United States Patent Application Publication US 2017/0114356 A1 - sequence listing, part 110

SEQ ID NO: 207820 - DNA, 2406 bp, Zea Mays
ggcaagagagagaagagaagagaagagaagaggggagtcgaggtcgagagcagcagggagagggaaaatccactaatccccccaccccggctctctcgaaacccgccattcccctccgccgcaaacacgcgtcggagctcgtggcgagcgccgccaccccgcactcgggctggggggcgtccctccgcccccttcgatctagagccggcggccgcgatcccgccgcgggtcctcgcggccgccgcgaattgggtttgtactgacgttaccggtgggcggaggcgctttgatcctgtagctgccgggttgggttcagtagatggcgggcaaggagcagggcggtggaggcccgccgcagaggcctcccatgcccgcagcgtccatgcagccgccaatcaagaagctggtaaggcagctggacttcaactcggcggcgttggcggggaaccccgcgatggcggcagcggcggccgccgtgtctagggctcttcagccgagggcgttgcccgcggggttccagcatccgcagcacgtgagggctgccgtgccgatggtggtgccgcagcagctgcaccagcgggcgctgccggtgatgcgcccgcatccggtggtgggtcatgtgccgcggcacgcggtgccgctggcggtccctgtaccgcagctccgtccgatgccgccacagccagtccagcgtcccccggtcgccgttcccttgaaaccagactcaccaaaaccgtgggcaagactttacgaagggaaagatagcactcccacgaagaaaaagtgctgcaactgcaggaactccagatgtttgaagttatactgtgaatgcttcgcttctggtactcactgtgatggttgcaactgcaccaactgttttaataatcctgagaatgaggttgccagacgtgaagctattgaagctacattggagcgtaatccagatgcttttaggcctaagatcgggagcagtccacatacgaataggaataatgaggtgtctagtgatctccctttagtagggaagcataataaagggtgccattgcaagaagtcaggatgcctcaagaagtactgtgagtgcttccaagctaatatactatgctctgaaaactgcaagtgtatggattgcaagaattttgaaggaagtgaagagagaagaaatcttttccaaggggatcataaaaatgcaattaacattcagcaggcgacaaatgcagctgtaaatggtgctattggaaccacaggattcccttctccctccacgtcaaggaagaggaaacatattgatccttcacttgaccattcaaacaaggaacatgcagcgcacaggaattgtcacatacctcagaaaaatgcagtgcctgatggttcaattccaataagccagtctgcacatcctccaactctgggcccctttaaagttacctacaggccccttttagcagacattgtccaagcagaggacgtaaaggagctatgcaagcttttagtggtggtatcaggagaagccgccaaaacatatgctgaccggaaagcgaaggaagagagggttggcaagaaggaagatgaaagggcagaacaaaaggaagatgacagggcaggttccctagcattgacaaaccatgacagagaaggaaataatcaagatccagataaaaaagcatcaatcgatgaccattcaagcagaggaactcatacgggcaaagctaatcaagaagaatccagacctaactgcgctgatgatcagaagtccaatagacctatgtctcctggaacactagcactgatgtgtgacgaacaagcgttcgagaaaatgtgtgacgaacaagatacagtgtttacggcttctcaaaatgctgttcctcagcagacagttactgtcaaccaaaaccaatctgcactgtacgcagaacaagaaagaattgtgctgacagaattccgtgattgcctccgcaaacttgtgacatacggaagaatgaaagaggaaaggtacgccatggaaatcaaatctgaaacatctggccatcctggacagagaacccatgacagagtggttgctgtcaactgtcgcctacaaaggttactgccccaggattcgagatcctgagcttttgatgttctctagaaattctttcctgcagataatatggactaatcaatccaaaacgcacaataggagccgtgatggatcgagcagctgttcataactacaatgcttaaattactctcttggaatcatttcacgttgatttttttttcttgaaggctttgtttgggtactctataatattcacgtcaattcatatgtattgagttggattgaggtgtaaattagtttaatttactcgtcaatacacctcaatacatgtagattgaggtggatagagtaccaatacaattcat

SEQ ID NO: 207821 - DNA, 2403 bp, Zea Mays
aagagaagagaagagaagaggggagtcgaggtcgagagcagcagggagagggaaaatccactaatccccccaccccggctctctcgaaacccgccattcccctccgccgcaaacacgcgtcggagctcgtggcgagcgccgccaccccgcactcgggctggggggcgtccctccgcccccttcgatctagagccggcggccgcgatcccgccgcgggtcctcgcggccgccgcgaattgggtttgtactgacgttaccggtgggcggaggcgctttgatcctgtagctgccgggttgggttcagtagatggcgggcaaggagcagggcggtggaggcccgccgcagaggcctcccatgcccgcagcgtccatgcagccgccaatcaagaagctggtaaggcagctggacttcaactcggcggcgttggcggggaaccccgcgatggcggcagcggcggccgccgtgtctagggctcttcagccgagggcgttgcccgcggggttccagcatccgcagcacgtgagggctgccgtgccgatggtggtgccgcagcagctgcaccagcgggcgctgccggtgatgcgcccgcatccggtggtgggtcatgtgccgcggcacgcggtgccgctggcggtccctgtaccgcagctccgtccgatgccgccacagccagtccagcgtcccccggtcgccgttcccttgaaaccagactcaccaaaaccgtgggcaagactttacgaagggaaagatagcactcccacgaagaaaaagtgctgcaactgcaggaactccagatgtttgaagttgtaagtcagatactgtgaatgcttcgcttctggtactcactgtgatggttgcaactgcaccaactgttttaataatcctgagaatgaggttgccagacgtgaagctattgaagctacattggagcgtaatccagatgcttttaggcctaagatcgggagcagtccacatacgaataggaataatgaggtgtctagtgatctccctttagtagggaagcataataaagggtgccattgcaagaagtcaggatgcctcaagaagtactgtgagtgcttccaagctaatatactatgctctgaaaactgcaagtgtatggattgcaagaattttgaaggaagtgaagagagaagaaatcttttccaaggggatcataaaaatgcaattaacattcagcaggcgacaaatgcagctgtaaatggtgctattggaaccacaggattcccttctccctccacgtcaaggaagaggaaacatattgatccttcacttgaccattcaaacaaggaacatgcagcgcacaggaattgtcacatacctcagaaaaatgcagtgcctgatggttcaattccaataagccagtctgcacatcctccaactctgggcccctttaaagttacctacaggccccttttagcagacattgtccaagcagaggacgtaaaggagctatgcaagcttttagtggtggtatcaggagaagccgccaaaacatatgctgaccggaaagcgaaggaagagagggttggcaagaaggaagatgaaagggcagaacaaaaggaagatgacagggcaggttccctagcattgacaaaccatgacagagaaggaaataatcaagatccagataaaaaagcatcaatcgatgaccattcaagcagaggaactcatacgggcaaagctaatcaagaagaatccagacctaactgcgctgatgatcagaagtccaatagacctatgtctcctggaacactagcactgatgtgtgacgaacaagcgttcgagaaaatgtgtgacgaacaagatacagtgtttacggcttctcaaaatgctgttcctcagcagacagttactgtcaaccaaaaccaatctgcactgtacgcagaacaagaaagaattgtgctgacagaattccgtgattgcctccgcaaacttgtgacatacggaagaatgaaagaggaaaggtacgccatggaaatcaaatctgaaacatctggccatcctggacaggtaaatggtgtttctcaagtaccatattcaaaagtagaggtgcctgttgtaaaaacagacccacagagttccagcagccatcctgttgctggaaaacctgttactggccttttggacaaaaactgaagcctgggtgttccaggtttgtattcggggtgttgcaatgatcaagggaatcatgttttcaccctcctaatttgttgatcagatacatgtatcagtcttgatagataatctagattttagggaattccaatttattctcattggtcagagtaagtgtgatgctggaatgtggatagttagtttagtcataaatgccaaccttgtcgtattttctacattgtagtttctcccttttcttttcc

SEQ ID NO: 207822 - DNA, 2596 bp, Zea Mays
aaatccgaaccaaccaatcccaatatccgcaggcctccctctgcactggaccacaccacaccctcgcctttcccgcaacccagagcccctctgccaatctctgcacaacatcatcgattccccaggcgaaaaaaaatactctggaccctttttttcaatcagattttcaatcagaggagggtagattggatttgtcagattatccgatctccactgcagcctctctgaagagaagaggcccatccagtccagcctttccgcagttcctggagcaatcctggctcagtgcgtgaagcagcttgattcgcctgcgcaactgatagtcatagaagggagccaagagcttgttcttggctgcttgaccgattcttgattgagctgctgcggatcttgccaaagggccaagagcttgctgtgtctggaattcttggtcagccgtgccggatagggtgagggtgccatgacagcatcgcagtcctcgatgagcggcggcggggagccgggggtgcggacggtggtctggttcaggcgagacctgcgtgtggaggacaacccggcgctggcggcggccgctcggacggccggggaggtcgtgccggcgtacgtgtggtcgccagaggaggacgggccctactaccccggcagggtgtcccggtggtggctcagccaaagcctgaagcacctcgacgcctcgctccgccggctcggcgcctgccgcctcgtcacccgccgctccagcgacgctgtcgtcgcgctgatcgacctagtccgcagcaccggcgccacccacctctttttcaaccgactctacgacccgctatcgctggtccgggaccaccgcgtgaaggagcagctgtcggcggagggcatcactgtgcagtccttcaacgccgatctgctgtacgagccgtgggaggtcctcgacgacgacggcttccccttcaccatgttcgcgccattctggaacaggtgcctgtgcatgccggaccctgccgcaccactgctgccgcccaagaggatcaattcaggtgacctgtcgaggtgtccgtgggacgagctcatctttgaagacgagtccgagaagggcagcaatgcgctgctcgcacgagcgtggtcaccagggtggcagaacgctgacaaggcgctaacggccttcctcgacggtccgctggtcgactactccgcgaaccacaagaaggccgacagcgccagcacgtccctgctgtctccgtacctgcacttcggcgagctcagcgtccgcaaggtcttccaccaggtgcggatgaagcagctgatgtggagcaacgacggcgaccgcgccggcgaggagagctgcacgctattcctccgcgccatcggcctgcgggagtactcgaggtacctcaccttcaaccacccctgcagccttgagaagccccttctgtcgcacctcaggttcttcccctgggtcgtcgatgaggtgcacttcaaggtctggagacaagggaggactggctaccctcttgtcgacgctggcatgagggagctctgggccaccggctgggttcacgaccggatacgtgtcgttgtctctagcttcttcgtcaaggtgctccagctgccatggcgctggggcatgaagtacttctgggacaccttgctggatgctgaccttgagagtgacgcactaggctggcagtacatttctgggtctctccctgatggccgtgagcttgaccgcattgacaaccctcagtttgaagggtacaagtttgatccgcacggggagtacgtacggcgatggctaccggagctggcgaggctgccgacggaatggatacaccacccctgggatgcacctgagtctgtgcttcaggctgcaggagtcgagctaggctccaactacccacgccccattgtggagttagatgcagccaattccaggttgcagggtgccctgtcagagatgtgggagcttgaggcagcctcttgtgctgccatcgagaacgggatggaagaaggcctcggcgattccacagatgagccgccgatcgacttccctcaagaattacggatggaagtggaccgacaaccagctcaacctgctatcatccacacgccggtagtggctggttggagacgagaagaccagagggtgcctagcatgacttcctcgttaattagagctgagaccgaactcactgcagactttggcaacaccagtgaggacagtaggccagaagtgccgtcaaacattcatctgcaggctcgggcggagagggaagaaacagttgacggtgccactggcaatactgtcagggtgaatggcaaccaacagcagcagaatcttcagaacaacatgcaccgcgtgctaggtatcgctccatcaatttcagaggcatcgagcagctggacgggtagggaaggtggattggtaccggtctggtcacctccggcagcttcagtacattctgatccatatactgccgacgaggctgacatttcgagtaggagttatttggacaggcatcagcaatcaaatacgatgatgaactggagtcaactctctcagtcattgtctactcctgtggctcaagctgaatgcttgacagtggat

SEQ ID NO: 207823 - DNA, 6566 bp, Zea Mays
cgggagcacccgcgccgtgctgcaccgcccgtccgctccgggccccagttgtctggcggccgtagctctggtccgtcggttggaccttcaagcactgcctttcacccctatatacttttcctggatccgccaccgcccacccttccgtcgttttgcccttccgtttcacttactggagcacactgcctcgaatgaggaggttatttctggcgtgctgccgctacctgcagttcacatctgtccctgatgctatcagagctacttcacctgttaacaatgtctacgggtcatggaggaggtatatcttcacaaacgctgataaggttctaccatgggaggcgccatcccgtgaaattctgttgaggaagataaattgtgctatgaaggatgggaatgttgaagaggcgctgcaatctttgagcaattacaagaagcttcacggtcttcctgagccgcgggtactgaatagtataattgtgtcgctgtcctacatgtctagtaggaggtggcttcagagggcatttgacatggttctctcagtttatcaaattaatagaaatcttctcaattgtggctcactgatgaggctagcattggcgctcgcaagagatcagatgcctatcccggcctccacagtcctgaggataatactagagagtagaaagcttcccgatgttgatatgctgaccatgtcgtttctgcatatgttgaagtcacaggtaggctcctaccttgccactgatgttctgattgagacttgcgagagctttttggaccaagttacagataggcgggagatgaaaaaactggacccaataaaaaacaatgccaccttgttcaatatggttttggagtcatgtgtgacctttaaatgcattatcaaggcccagaaaataatggaactgatgtcattgatcggagttgtggccgatgtaaatacagtggtgatggctagccgtgtctttgagatggttgggcaacgggatgagttgatacatatgaaaagaagcatcgattctttaacatctttgacatttcttcagtactacctgcatttttatgacagtctattgagcctccatttcaaatataatgacatggatgctgctgcaaagtttttaatcgatctgcatcagcaaccaaagcctggtgttttattttgcaatggtttgcagaaacaaagtatcatacaaattggctctggcaatctgaaaagcggatataaaataatgtttgatcccaaaaaagttgacaggggttttgtgttgggtacagaaagccaattcggccttgttgttcttactgatggaaaccttcttcatactgaaaaggctcttgctaaacttatcataggctgtgtgaaatcaagaaatatgcatatactgtctaacttttttattatgtcatgtcaatatggtctagagctaatttctcctcaagatgtggttactgcttgcattcaaatgggatggttgcatgctgctcatgatatcatagataacttggagtcagccgggattccagttgggattactggttacgtttctcttctgagagcatatgagaaggagaataagtcagaagaagtcaatggccttcttcaacagatacaaaagatggcatctaccatggatgatgttcatactgattcaccatttactatcaataatattgccgaagtagtgaaatatgaaatgtccttcagtagttcatctttggttgctgctttggctgatgaaattaaacattacaaccctggagagcacttggcattagagctcaataattcggttcttttcttctgcaaggcaaaaatgatggaagatgctctttgcacatataagtgtatgagagagcaaaatatcagacccacatctcatactttttgtcatatgttgtgtggttattcttcaatggacatgcatagggagatcaccatgttgtggggagaaataaagcgcagacatgaatatggagagctagatttggatagggacttgcttgatagcttggttttgaattttcttaaaggtggatatttttcgagggtgatggagatcattagttacatgtcaaaacataacatttactgtgacaagtggaaatacaggcgtgccttcctgaagctacacaagaacctgtataggaatttggattcattgcatgacaaaacagaagctcaaagtaaaaggattgaagatgtccgagctttcaggttgtgggcaagcattaagtagggacagcgaccaatttgatccctctcattttcaaattgggtaaagacacccctttgatgacttgtagtgcggtgccaagcaagcctgccttgttgccacctcaaggattactcctggcttgttgccctgaagcctcccttgagggaaaaaggcaaagaggcatcgatggtgttcgcagcacctgcagcgggggaagagggttgaggctgtggagagctttggggagctcagccttagggaggtggtgatgtttgcgctgggagaggtgggcctctccaagcagacggagatccagttggttgacgtgaccagcggcgtgttcggctcccacaccggctctagaaagacgttcttctacttgctccttgtttattgttcaggtatgaaaccggagaccatgttggtgtatatgcagaaaattctgttgagactgtggaggaggctgatgtgatggcccctggccaccggcgtgcgcagatgccgggacgtgagctctgatcaccaccaggacttggcaaacgaagcaaatgcagaagatgggtctcctcgtaaaggaggaggttccttggccccacctttcccatctccatgtactttgcggactacgcttctacgatatgctgatctactcaatccaccgaagaaggctgctttgcttgctttagcttctcatgcatctgatccagctgaagctgaacgacttaggttcttggcctctcctgctggaaaggggggaaggtttgcctcctcaatcatgtgggagcctgtggcgctgggtctgctcttttatcgaactgtcctgttcatgccggtgtggcatactatgcttgaggtggtggatggctccctccagaattcgtgtaacatgtgcattagtttttgggccttcaccaacaggaaggatccaccaaggagtttgttcaacatggatgaagggctggctccttttagaggtttcttgcaggaaaggttagcactgaaacaatctggagcagaactgggcacttcaatccttttctttggatgcaggaaccgtaatatggactacatatatgaagatgagctgcaaactttccttgaggcgggggcgctttctgagctaattgttgcattctctcaagaagggccaacgaaagaatatgtgcagcataagatggtggagaagtctgacctgaaaattttggaaccaatggaagaggaagagtatagctctgaaacatctaatgaagaagatggcgaaaaagaaggaaatgctgctgagagtgatgtcttcagaccagttgatgtagatccagcatgtttaccaagagtagggatgatatttgactcggaggaagatgcctttcagttttatgtgacgtatggttgtcacgcaggttttggtattacaagaagatctaacaatacctttgatggtttccgctatcgctctacattcatatgttctaaaggagggcagtctagactgagatctggtgtgacaaaacctgcaagaaagcgaggtgtgaagactggctgcaaggccaagatgattgtgaaggatgcccattttcaaaatcgctgggaagtaattgttcttgagttggagcacaaccatccattggatccgaacttgcttaagtttaagagacatttgaagaactccccttttacgataaatccacctcaaatttgtgagtctgagggacaacagagcaactcagctcttgtacattcaagcagagttgttgatactggtataacttcgtcttctacacagattgaattcaaagccaagatagatagaaataggaaattgaagctcgcagaaggagacttagacgccttgttggattttctcaacaaaatgcaagaccaaaacccttgtttcttttacagtttagatatgaatgagcaagggcaactaaggaatgtcttttggtctgacgccaaatcacgcagttcatacaattactttggtgatgttgttgctattaatgtcacaaacttcagcgatcagtatgatatgcagtttgtgtcattcatgggaactaaccaccatgcacagccagtgttactaggttgtggcctgcttgctggtagatctcttggggcttatgtgtggctttttggtacatggttaagatgtatgaatgccaaaccaccacattcaataattacaaactactgtcatgatgtagcgatagctatcaaaaaggttttccctaacgcacgtcaccgtttttgcctttcacacatcttaaatgtgcttcctgaaaagttggaagaaattgataacaaagatgaaattatttccacattcaccacactagcctatgattatgttactatgactgattttgacagagagtggcaagatactatccaacattttcgtttggagagaaatgaatggctgtccaaactatatgaggtcaggatgcagtgggctcctgtttatgttaaggattcattttgggcaggaatgtctgtcacagacagaagtgatagtgtaactgactattttgatggctggttgatgtcaggaacctctttgaaaatgtttgtagagcaatatgaggaagctgttaaaggaaagttagaaaaggaatcttacgaagatttacgatcagctcagatgaggccaccaatggtgacggggttgcctgtggaagatcaagcagcaaaggtgtacactgcagaaatctttcagaagttcttcaatgaaataggacattcatttcattgcaattataatatacttgaacggaatgagtcagtggttacatacatagtttcggagcatgtcgatcaaacaaacaaggtagactacaaagttgcttatgataatgttcaaggtgacatatggtgcctctgccgtttgtaccaatccaaaggaatattgtgcaggcatgcactcactgtactgagacaggagcttgtgctgatgattccacaaaaatacatcattcatcgctggtgcaaggactgtaaacaaacttgtgcttccatatcccagcctgtctcagcagaagttgtggaatttggttccatgaactcagaatcaaaagaatatgctttgtcaatcatgagggaagtcagggataaagtgatttcatatgagaaatcactaagagatcaaagggttgacagccatgtttcaacagccaactttgcatacaatcctgtgaatgaggattttactgatgatgctttgcctatctctcttagtacaaagggctgggatcttacccaaggccaatctaaacgttcccgaaagaagaagctggcgaccccaactgttcttgatactttgaaaaagaaaactaaaagggcatataacaaaaggaggaatgccactgcaaacaccctgaacacatctgccactgcaactgacggcataactgatggcacaaatgttcagcagaatcctgtaaatgagggatggcagctagcgtcgactagtgctcccgaaactttctcttatggagtggagaacatttcgtttgatttgtcacaatacaacaatgccccaagcttccactggcctgaaagcagcagcaggtctcagctccactgagtaggcagcaatgcaatcgtggatgccttccaaatagactaagttctgacagtcttgtaagggcttgttcggttattcctatcttctgtggattagatgagattggaaaaaaatatgaaagattttgacttgaaagattttgacttgtttgggattaaaacgcacccaattccactcaatctacatggattgagagcaaaaccaacaagccctaatttggaaaaaaaaaaaaactagaggtgatggatcaggtttgacctttctattcctgcctaggactctaggagtcagtgaccacctgaataaaggtgaaaagggaagggattcaatgtggtgaagtgacatctaccatctatgtaccaatttagtggaacgggttctctacataatcattcctttttttccttccatggatatttgcagctcccgattgatttatctgaaccatgtaaattaggtcagatgcccctgaatcgacctgatgtttcactatggatccctcaggaaatcatatgccccttctctgatgaagctgtttgtaacaagatgtttattgcttcaccaagttcatctgttttcgctaatatttgttccgttcaatttctatgatcaaattattatatttgttctgtccagataatattttgtatcattttattctttttttctcaaacatgcaggagaactgtgtgtcaatatattaagatagaacgaatgatctgattacaagccgaatccatggcattttatccttgcaactgataaactag

SEQ ID NO: 207824 - DNA, 6686 bp, Zea Mays
agcacccgcgccgtgctgcaccgcccgtccgctccgggccccagttgtctggcggccgtagctctggtccgtcggttggaccttcaagcactgcctttcacccctatatacttttcctggatccgccaccgcccacccttccgtcgttttgcccttccgtttcacttactggagcacactgcctcgaatgaggaggttatttctggcgtgctgccgctacctgcagttcacatctgtccctgatgctatcagagctacttcacctgttaacaatgtctacgggtcatggaggaggtatatcttcacaaacgctgataaggttctaccatgggaggcgccatcccgtgaaattctgttgaggaagataaattgtgctatgaaggatgggaatgttgaagaggcgctgcaatctttgagcaattacaagaagcttcacggtcttcctgagccgcgggtactgaatagtataattgtgtcgctgtcctacatgtctagtaggaggtggcttcagagggcatttgacatggttctctcagtttatcaaattaatagaaatcttctcaattgtggctcactgatgaggctagcattggcgctcgcaagagatcagatgcctatcccggcctccacagtcctgaggataatactagagagtagaaagcttcccgatgttgatatgctgaccatgtcgtttctgcatatgttgaagtcacaggtaggctcctaccttgccactgatgttctgattgagacttgcgagagctttttggaccaagttacagataggcgggagatgaaaaaactggacccaataaaaaacaatgccaccttgttcaatatggttttggagtcatgtgtgacctttaaatgcattatcaaggcccagaaaataatggaactgatgtcattgatcggagttgtggccgatgtaaatacagtggtgatggctagccgtgtctttgagatggttgggcaacgggatgagttgatacatatgaaaagaagcatcgattctttaacatctttgacatttcttcagtactacctgcatttttatgacagtctattgagcctccatttcaaatataatgacatggatgctgctgcaaagtttttaatcgatctgcatcagcaaccaaagcctggtgttttattttgcaatggtttgcagaaacaaagtatcatacaaattggctctggcaatctgaaaagcggatataaaataatgtttgatcccaaaaaagttgacaggggttttgtgttgggtacagaaagccaattcggccttgttgttcttactgatggaaaccttcttcatactgaaaaggctcttgctaaacttatcataggctgtgtgaaatcaagaaatatgcatatactgtctaacttttttattatgtcatgtcaatatggtctagagctaatttctcctcaagatgtggttactgcttgcattcaaatgggatggttgcatgctgctcatgatatcatagataacttggagtcagccgggattccagttgggattactggttacgtttctcttctgagagcatatgagaaggagaataagtcagaagaagtcaatggccttcttcaacagatacaaaagatggcatctaccatggatgatgttcatactgattcaccatttactatcaataatattgccgaagtagtgaaatatgaaatgtccttcagtagttcatctttggttgctgctttggctgatgaaattaaacattacaaccctggagagcacttggcattagagctcaataattcggttcttttcttctgcaaggcaaaaatgatggaagatgctctttgcacatataagtgtatgagagagcaaaatatcagacccacatctcatactttttgtcatatgttgtgtggttattcttcaatggacatgcatagggagatcaccatgttgtggggagaaataaagcgcagacatgaatatggagagctagatttggatagggacttgcttgatagcttggttttgaattttcttaaaggtggatatttttcgagggtgatggagatcattagttacatgtcaaaacataacatttactgtgacaagtggaaatacaggcgtgccttcctgaagctacacaagaacctgtataggaatttggattcattgcatgacaaaacagaagctcaaagtaaaaggattgaagatgtccgagctttcaggttgtgggcaagcattaagtagggacagcgaccaatttgatccctctcattttcaaattgggtaaagacacccctttgatgacttgtagtgcggtgccaagcaagcctgccttgttgccacctcaaggattactcctggcttgttgccctgaagcctcccttgagggaaaaaggcaaagaggcatcgatggtgttcgcagcacctgcagcgggggaagagggttgaggctgtggagagctttggggagctcagccttagggaggtggtgatgtttgcgctgggagaggtgggcctctccaagcagacggagatccagttggttgacgtgaccagcggcgtgttcggctcccacaccggctctagaaagacgttcttctacttgctccttgtttattgttcagtttggtcacaattgttctacacaactatttgtttgaatacaacaagaaagccatttaatgctgggcaagttggggtaggatggaaatgaattgcccatgtactgattgattactgttcaacaaggtatgaaaccggagaccatgttggtgtatatgcagaaaattctgttgagactgtggaggaggctgatgtgatggcccctggccaccggcgtgcgcagatgccgggacgtgagctctgatcaccaccaggacttggcaaacgaagcaaatgcagaagatgggtctcctcgtaaaggaggaggttccttggccccacctttcccatctccatgtactttgcggactacgcttctacgatatgctgatctactcaatccaccgaagaaggctgctttgcttgctttagcttctcatgcatctgatccagctgaagctgaacgacttaggttcttggcctctcctgctggaaaggggggaaggtttgcctcctcaatcatgtgggagcctgtggcgctgggtctgctcttttatcgaactgtcctgttcatgccggtgtggcatactatgcttgaggtggtggatggctccctccagaattcgtgtaacatgtgcattagtttttgggccttcaccaacaggaaggatccaccaaggagtttgttcaacatggatgaagggctggctccttttagaggtttcttgcaggaaaggttagcactgaaacaatctggagcagaactgggcacttcaatccttttctttggatgcaggaaccgtaatatggactacatatatgaagatgagctgcaaactttccttgaggcgggggcgctttctgagctaattgttgcattctctcaagaagggccaacgaaagaatatgtgcagcataagatggtggagaagtctgacctgaaaattttggaaccaatggaagaggaagagtatagctctgaaacatctaatgaagaagatggcgaaaaagaaggaaatgctgctgagagtgatgtcttcagaccagttgatgtagatccagcatgtttaccaagagtagggatgatatttgactcggaggaagatgcctttcagttttatgtgacgtatggttgtcacgcaggttttggtattacaagaagatctaacaatacctttgatggtttccgctatcgctctacattcatatgttctaaaggagggcagtctagactgagatctggtgtgacaaaacctgcaagaaagcgaggtgtgaagactggctgcaaggccaagatgattgtgaaggatgcccattttcaaaatcgctgggaagtaattgttcttgagttggagcacaaccatccattggatccgaacttgcttaagtttaagagacatttgaagaactccccttttacgataaatccacctcaaatttgtgagtctgagggacaacagagcaactcagctcttgtacattcaagcagagttgttgatactggtataacttcgtcttctacacagattgaattcaaagccaagatagatagaaataggaaattgaagctcgcagaaggagacttagacgccttgttggattttctcaacaaaatgcaagaccaaaacccttgtttcttttacagtttagatatgaatgagcaagggcaactaaggaatgtcttttggtctgacgccaaatcacgcagttcatacaattactttggtgatgttgttgctattaatgtcacaaacttcagcgatcagtatgatatgcagtttgtgtcattcatgggaactaaccaccatgcacagccagtgttactaggttgtggcctgcttgctggtagatctcttggggcttatgtgtggctttttggtacatggttaagatgtatgaatgccaaaccaccacattcaataattacaaactactgtcatgatgtagcgatagctatcaaaaaggttttccctaacgcacgtcaccgtttttgcctttcacacatcttaaatgtgcttcctgaaaagttggaagaaattgataacaaagatgaaattatttccacattcaccacactagcctatgattatgttactatgactgattttgacagagagtggcaagatactatccaacattttcgtttggagagaaatgaatggctgtccaaactatatgaggtcaggatgcagtgggctcctgtttatgttaaggattcattttgggcaggaatgtctgtcacagacagaagtgatagtgtaactgactattttgatggctggttgatgtcaggaacctctttgaaaatgtttgtagagcaatatgaggaagctgttaaaggaaagttagaaaaggaatcttacgaagatttacgatcagctcagatgaggccaccaatggtgacggggttgcctgtggaagatcaagcagcaaaggtgtacactgcagaaatctttcagaagttcttcaatgaaataggacattcatttcattgcaattataatatacttgaacggaatgagtcagtggttacatacatagtttcggagcatgtcgatcaaacaaacaaggtagactacaaagttgcttatgataatgttcaaggtgacatatggtgcctctgccgtttgtaccaatccaaaggaatattgtgcaggcatgcactcactgtactgagacaggagcttgtgctgatgattccacaaaaatacatcattcatcgctggtgcaaggactgtaaacaaacttgtgcttccatatcccagcctgtctcagcagaagttgtggaatttggttccatgaactcagaatcaaaagaatatgctttgtcaatcatgagggaagtcagggataaagtgatttcatatgagaaatcactaagagatcaaagggttgacagccatgtttcaacagccaactttgcatacaatcctgtgaatgaggattttactgatgatgctttgcctatctctcttagtacaaagggctgggatcttacccaaggccaatctaaacgttcccgaaagaagaagctggcgaccccaactgttcttgatactttgaaaaagaaaactaaaagggcatataacaaaaggaggaatgccactgcaaacaccctgaacacatctgccactgcaactgacggcataactgatggcacaaatgttcagcagaatcctgtaaatgagggatggcagctagcgtcgactagtgctcccgaaactttctcttatggagtggagaacatttcgtttgatttgtcacaatacaacaatgccccaagcttccactggcctgaaagcagcagcaggtctcagctccactgagtaggcagcaatgcaatcgtggatgccttccaaatagactaagttctgacagtcttgtaagggcttgttcggttattcctatcttctgtggattagatgagattggaaaaaaatatgaaagattttgacttgaaagattttgacttgtttgggattaaaacgcacccaattccactcaatctacatggattgagagcaaaaccaacaagccctaatttggaaaaaaaaaaaaactagaggtgatggatcaggtttgacctttctattcctgcctaggactctaggagtcagtgaccacctgaataaaggtgaaaagggaagggattcaatgtggtgaagtgacatctaccatctatgtaccaatttagtggaacgggttctctacataatcattcctttttttccttccatggatatttgcagctcccgattgatttatctgaaccatgtaaattaggtcagatgcccctgaatcgacctgatgtttcactatggatccctcaggaaatcatatgccccttctctgatgaagctgtttgtaacaagatgtttattgcttcaccaagttcatctgttttcgctaatatttgttccgttcaatttctatgatcaaattattatatttgttctgtccagataatattttgtatcattttattctttttttctcaaacatgcaggagaactgtgtgtcaatatattaagatagaacgaatgatctgattacaagccgaatccatggcattttatccttgcaactgataaactag

SEQ ID NO: 207825 - DNA, 6566 bp, Zea Mays
ccgcccgtccgctccgggccccagttgtctggcggccgtagctctggtccgtcggttggaccttcaagcactgcctttcacccctatatacttttcctggatccgccaccgcccacccttccgtcgttttgcccttccgtttcacttactggagcacactgcctcgaatgaggaggttatttctggcgtgctgccgctacctgcagttcacatctgtccctgatgctatcagagctacttcacctgttaacaatgtctacgggtcatggaggaggtatatcttcacaaacgctgataaggttctaccatgggaggcgccatcccgtgaaattctgttgaggaagataaattgtgctatgaaggatgggaatgttgaagaggcgctgcaatctttgagcaattacaagaagcttcacggtcttcctgagccgcgggtactgaatagtataattgtgtcgctgtcctacatgtctagtaggaggtggcttcagagggcatttgacatggttctctcagtttatcaaattaatagaaatcttctcaattgtggctcactgatgaggctagcattggcgctcgcaagagatcagatgcctatcccggcctccacagtcctgaggataatactagagagtagaaagcttcccgatgttgatatgctgaccatgtcgtttctgcatatgttgaagtcacaggtaggctcctaccttgccactgatgttctgattgagacttgcgagagctttttggaccaagttacagataggcgggagatgaaaaaactggacccaataaaaaacaatgccaccttgttcaatatggttttggagtcatgtgtgacctttaaatgcattatcaaggcccagaaaataatggaactgatgtcattgatcggagttgtggccgatgtaaatacagtggtgatggctagccgtgtctttgagatggttgggcaacgggatgagttgatacatatgaaaagaagcatcgattctttaacatctttgacatttcttcagtactacctgcatttttatgacagtctattgagcctccatttcaaatataatgacatggatgctgctgcaaagtttttaatcgatctgcatcagcaaccaaagcctggtgttttattttgcaatggtttgcagaaacaaagtatcatacaaattggctctggcaatctgaaaagcggatataaaataatgtttgatcccaaaaaagttgacaggggttttgtgttgggtacagaaagccaattcggccttgttgttcttactgatggaaaccttcttcatactgaaaaggctcttgctaaacttatcataggctgtgtgaaatcaagaaatatgcatatactgtctaacttttttattatgtcatgtcaatatggtctagagctaatttctcctcaagatgtggttactgcttgcattcaaatgggatggttgcatgctgctcatgatatcatagataacttggagtcagccgggattccagttgggattactggttacgtttctcttctgagagcatatgagaaggagaataagtcagaagaagtcaatggccttcttcaacagatacaaaagatggcatctaccatggatgatgttcatactgattcaccatttactatcaataatattgccgaagtagtgaaatatgaaatgtccttcagtagttcatctttggttgctgctttggctgatgaaattaaacattacaaccctggagagcacttggcattagagctcaataattcggttcttttcttctgcaaggcaaaaatgatggaagatgctctttgcacatataagtgtatgagagagcaaaatatcagacccacatctcatactttttgtcatatgttgtgtggttattcttcaatggacatgcatagggagatcaccatgttgtggggagaaataaagcgcagacatgaatatggagagctagatttggatagggacttgcttgatagcttggttttgaattttcttaaaggtggatatttttcgagggtgatggagatcattagttacatgtcaaaacataacatttactgtgacaagtggaaatacaggcgtgccttcctgaagctacacaagaacctgtataggaatttggattcattgcatgacaaaacagaagctcaaagtaaaaggattgaagatgtccgagctttcaggttgtgggcaagcattaagtagggacagcgaccaatttgatccctctcattttcaaattgggtaaagacacccctttgatgacttgtagtgcggtgccaagcaagcctgccttgttgccacctcaaggattactcctggcttgttgccctgaagcctcccttgagggaaaaaggcaaagaggcatcgatggtgttcgcagcacctgcagcgggggaagagggttgaggctgtggagagctttggggagctcagccttagggaggtggtgatgtttgcgctgggagaggtgggcctctccaagcagacggagatccagttggttgacgtgaccagcggcgtgttcggctcccacaccggctctagaaagacgttcttctacttgctccttgtttattgttcaggtatgaaaccggagaccatgttggtgtatatgcagaaaattctgttgagactgtggaggaggctgatgtgatggcccctggccaccggcgtgcgcagatgccgggacgtgagctctgatcaccaccaggacttggcaaacgaagcaaatacagtcttctccatccatgcagatgcagaagatgggtctcctcgtaaaggaggaggttccttggccccacctttcccatctccatgtactttgcggactacgcttctacgatatgctgatctactcaatccaccgaagaaggctgctttgcttgctttagcttctcatgcatctgatccagctgaagctgaacgacttaggttcttggcctctcctgctggaaaggggggaaggtttgcctcctcaatcatgtgggagcctgtggcgctgggtctgctcttttatcgaactgtcctgttcatgccggtgtggcatactatgcttgaggtggtggatggctccctccagaattcgtgtaacatgtgcattagtttttgggccttcaccaacaggaaggatccaccaaggagtttgttcaacatggatgaagggctggctccttttagaggtttcttgcaggaaaggttagcactgaaacaatctggagcagaactgggcacttcaatccttttctttggatgcaggaaccgtaatatggactacatatatgaagatgagctgcaaactttccttgaggcgggggcgctttctgagctaattgttgcattctctcaagaagggccaacgaaagaatatgtgcagcataagatggtggagaagtctgacctgaaaattttggaaccaatggaagaggaagagtatagctctgaaacatctaatgaagaagatggcgaaaaagaaggaaatgctgctgagagtgatgtcttcagaccagttgatgtagatccagcatgtttaccaagagtagggatgatatttgactcggaggaagatgcctttcagttttatgtgacgtatggttgtcacgcaggttttggtattacaagaagatctaacaatacctttgatggtttccgctatcgctctacattcatatgttctaaaggagggcagtctagactgagatctggtgtgacaaaacctgcaagaaagcgaggtgtgaagactggctgcaaggccaagatgattgtgaaggatgcccattttcaaaatcgctgggaagtaattgttcttgagttggagcacaaccatccattggatccgaacttgcttaagtttaagagacatttgaagaactccccttttacgataaatccacctcaaatttgtgagtctgagggacaacagagcaactcagctcttgtacattcaagcagagttgttgatactggtataacttcgtcttctacacagattgaattcaaagccaagatagatagaaataggaaattgaagctcgcagaaggagacttagacgccttgttggattttctcaacaaaatgcaagaccaaaacccttgtttcttttacagtttagatatgaatgagcaagggcaactaaggaatgtcttttggtctgacgccaaatcacgcagttcatacaattactttggtgatgttgttgctattaatgtcacaaacttcagcgatcagtatgatatgcagtttgtgtcattcatgggaactaaccaccatgcacagccagtgttactaggttgtggcctgcttgctggtagatctcttggggcttatgtgtggctttttggtacatggttaagatgtatgaatgccaaaccaccacattcaataattacaaactactgtcatgatgtagcgatagctatcaaaaaggttttccctaacgcacgtcaccgtttttgcctttcacacatcttaaatgtgcttcctgaaaagttggaagaaattgataacaaagatgaaattatttccacattcaccacactagcctatgattatgttactatgactgattttgacagagagtggcaagatactatccaacattttcgtttggagagaaatgaatggctgtccaaactatatgaggtcaggatgcagtgggctcctgtttatgttaaggattcattttgggcaggaatgtctgtcacagacagaagtgatagtgtaactgactattttgatggctggttgatgtcaggaacctctttgaaaatgtttgtagagcaatatgaggaagctgttaaaggaaagttagaaaaggaatcttacgaagatttacgatcagctcagatgaggccaccaatggtgacggggttgcctgtggaagatcaagcagcaaaggtgtacactgcagaaatctttcagaagttcttcaatgaaataggacattcatttcattgcaattataatatacttgaacggaatgagtcagtggttacatacatagtttcggagcatgtcgatcaaacaaacaaggtagactacaaagttgcttatgataatgttcaaggtgacatatggtgcctctgccgtttgtaccaatccaaaggaatattgtgcaggcatgcactcactgtactgagacaggagcttgtgctgatgattccacaaaaatacatcattcatcgctggtgcaaggactgtaaacaaacttgtgcttccatatcccagcctgtctcagcagaagttgtggaatttggttccatgaactcagaatcaaaagaatatgctttgtcaatcatgagggaagtcagggataaagtgatttcatatgagaaatcactaagagatcaaagggttgacagccatgtttcaacagccaactttgcatacaatcctgtgaatgaggattttactgatgatgctttgcctatctctcttagtacaaagggctgggatcttacccaaggccaatctaaacgttcccgaaagaagaagctggcgaccccaactgttcttgatactttgaaaaagaaaactaaaagggcatataacaaaaggaggaatgccactgcaaacaccctgaacacatctgccactgcaactgacggcataactgatggcacaaatgttcagcagaatcctgtaaatgagggatggcagctagcgtcgactagtgctcccgaaactttctcttatggagtggagaacatttcgtttgatttgtcacaatacaacaatgccccaagcttccactggcctgaaagcagcagcaggtctcagctccactgagtaggcagcaatgcaatcgtggatgccttccaaatagactaagttctgacagtcttgtaagggcttgttcggttattcctatcttctgtggattagatgagattggaaaaaaatatgaaagattttgacttgaaagattttgacttgtttgggattaaaacgcacccaattccactcaatctacatggattgagagcaaaaccaacaagccctaatttggaaaaaaaaaaaaactagaggtgatggatcaggtttgacctttctattcctgcctaggactctaggagtcagtgaccacctgaataaaggtgaaaagggaagggattcaatgtggtgaagtgacatctaccatctatgtaccaatttagtggaacgggttctctacataatcattcctttttttccttccatggatatttgcagctcccgattgatttatctgaaccatgtaaattaggtcagatgcccctgaatcgacctgatgtttcactatggatccctcaggaaatcatatgccccttctctgatgaagctgtttgtaacaagatgtttattgcttcaccaagttcatctgttttcgctaatatttgttccgttcaatttctatgatcaaattattatatttgttctgtccagataatattttgtatcattttattctttttttctcaaacatgcaggagaactgtgtgtcaatatattaagatagaacgaatgatctgattacaagccgaatccatggcattttatccttgcaactgataaactag

SEQ ID NO: 207826 - DNA, 3175 bp, Zea Mays
cgcctgctctgtctgacctgaaaattttggaaccaatggaagaggaagagtatagctctgaaacatctaatgaagaagatggcgaaaaagaaggaaatgctgctgagagtgatgtcttcagaccagttgatgtagatccagcatgtttaccaagagtagggatgatatttgactcggaggaagatgcctttcagttttatgtgacgtatggttgtcacgcaggttttggtattacaagaagatctaacaatacctttgatggtttccgctatcgctctacattcatatgttctaaaggagggcagtctagactgagatctggtgtgacaaaacctgcaagaaagcgaggtgtgaagactggctgcaaggccaagatgattgtgaaggatgcccattttcaaaatcgctgggaagtaattgttcttgagttggagcacaaccatccattggatccgaacttgcttaagtttaagagacatttgaagaactccccttttacgataaatccacctcaaatttgtgagtctgagggacaacagagcaactcagctcttgtacattcaagcagagttgttgatactggtataacttcgtcttctacacagattgaattcaaagccaagatagatagaaataggaaattgaagctcgcagaaggagacttagacgccttgttggattttctcaacaaaatgcaagaccaaaacccttgtttcttttacagtttagatatgaatgagcaagggcaactaaggaatgtcttttggtctgacgccaaatcacgcagttcatacaattactttggtgatgttgttgctattaatgtcacaaacttcagcgatcagtatgatatgcagtttgtgtcattcatgggaactaaccaccatgcacagccagtgttactaggttgtggcctgcttgctggtagatctcttggggcttatgtgtggctttttggtacatggttaagatgtatgaatgccaaaccaccacattcaataattacaaactactgtcatgatgtagcgatagctatcaaaaaggttttccctaacgcacgtcaccgtttttgcctttcacacatcttaaatgtgcttcctgaaaagttggaagaaattgataacaaagatgaaattatttccacattcaccacactagcctatgattatgttactatgactgattttgacagagagtggcaagatactatccaacattttcgtttggagagaaatgaatggctgtccaaactatatgaggtcaggatgcagtgggctcctgtttatgttaaggattcattttgggcaggaatgtctgtcacagacagaagtgatagtgtaactgactattttgatggctggttgatgtcaggaacctctttgaaaatgtttgtagagcaatatgaggaagctgttaaaggaaagttagaaaaggaatcttacgaagatttacgatcagctcagatgaggccaccaatggtgacggggttgcctgtggaagatcaagcagcaaaggtgtacactgcagaaatctttcagaagttcttcaatgaaataggacattcatttcattgcaattataatatacttgaacggaatgagtcagtggttacatacatagtttcggagcatgtcgatcaaacaaacaaggtagactacaaagttgcttatgataatgttcaaggtgacatatggtgcctctgccgtttgtaccaatccaaaggaatattgtgcaggcatgcactcactgtactgagacaggagcttgtgctgatgattccacaaaaatacatcattcatcgctggtgcaaggactgtaaacaaacttgtgcttccatatcccagcctgtctcagcagaagttgtggaatttggttccatgaactcagaatcaaaagaatatgctttgtcaatcatgagggaagtcagggataaagtgatttcatatgagaaatcactaagagatcaaagggttgacagccatgtttcaacagccaactttgcatacaatcctgtgaatgaggattttactgatgatgctttgcctatctctcttagtacaaagggctgggatcttacccaaggccaatctaaacgttcccgaaagaagaagctggcgaccccaactgttcttgatactttgaaaaagaaaactaaaagggcatataacaaaaggaggaatgccactgcaaacaccctgaacacatctgccactgcaactgacggcataactgatggcacaaatgttcagcagaatcctgtaaatgagggatggcagctagcgtcgactagtgctcccgaaactttctcttatggagtggagaacatttcgtttgatttgtcacaatacaacaatgccccaagcttccactggcctgaaagcagcagcaggtctcagctccactgagtaggcagcaatgcaatcgtggatgccttccaaatagactaagttctgacagtcttgtaagggcttgttcggttattcctatcttctgtggattagatgagattggaaaaaaatatgaaagattttgacttgaaagattttgacttgtttgggattaaaacgcacccaattccactcaatctacatggattgagagcaaaaccaacaagccctaatttggaaaaaaaaaaaaactagaggtgatggatcaggtttgacctttctattcctgcctaggactctaggagtcagtgaccacctgaataaaggtgaaaagggaagggattcaatgtggtgaagtgacatctaccatctatgtaccaatttagtggaacgggttctctacataatcattcctttttttccttccatggatatttgcagctcccgattgatttatctgaaccatgtaaattaggtcagatgcccctgaatcgacctgatgtttcactatggatccctcaggaaatcatatgccccttctctgatgaagctgtttgtaacaagatgtttattgcttcaccaagttcatctgttttcgctaatatttgttccgttcaatttctatgatcaaattattatatttgttctgtccagataatattttgtatcattttattctttttttctcaaacatgcaggagaactgtgtgtcaatatattaagatagaacgaatgatctgattacaagccgaatccatggcattttatccttgcaactgataaactag

SEQ ID NO: 207827 - DNA, 3316 bp, Zea Mays
gcgtagcccggccggcgtcaccgccggaaaggtgtaggcgggaacacccgcgccgtgctgcaccgcccgtccgctccgggccccagttctcttgcgccagcacccacagcttgtagggcgcaggctggcggccgtagctccggtccatcggttggaccttcaagtctgacctgaaaattttggaaccaatggaagaggaagagtatagctctgaaacatctaatgaagaagatggcgaaaaagaaggaaatgctgctgagagtgatgtcttcagaccagttgatgtagatccagcatgtttaccaagagtagggatgatatttgactcggaggaagatgcctttcagttttatgtgacgtatggttgtcacgcaggttttggtattacaagaagatctaacaatacctttgatggtttccgctatcgctctacattcatatgttctaaaggagggcagtctagactgagatctggtgtgacaaaacctgcaagaaagcgaggtgtgaagactggctgcaaggccaagatgattgtgaaggatgcccattttcaaaatcgctgggaagtaattgttcttgagttggagcacaaccatccattggatccgaacttgcttaagtttaagagacatttgaagaactccccttttacgataaatccacctcaaatttgtgagtctgagggacaacagagcaactcagctcttgtacattcaagcagagttgttgatactggtataacttcgtcttctacacagattgaattcaaagccaagatagatagaaataggaaattgaagctcgcagaaggagacttagacgccttgttggattttctcaacaaaatgcaagaccaaaacccttgtttcttttacagtttagatatgaatgagcaagggcaactaaggaatgtcttttggtctgacgccaaatcacgcagttcatacaattactttggtgatgttgttgctattaatgtcacaaacttcagcgatcagtatgatatgcagtttgtgtcattcatgggaactaaccaccatgcacagccagtgttactaggttgtggcctgcttgctggtagatctcttggggcttatgtgtggctttttggtacatggttaagatgtatgaatgccaaaccaccacattcaataattacaaactactgtcatgatgtagcgatagctatcaaaaaggttttccctaacgcacgtcaccgtttttgcctttcacacatcttaaatgtgcttcctgaaaagttggaagaaattgataacaaagatgaaattatttccacattcaccacactagcctatgattatgttactatgactgattttgacagagagtggcaagatactatccaacattttcgtttggagagaaatgaatggctgtccaaactatatgaggtcaggatgcagtgggctcctgtttatgttaaggattcattttgggcaggaatgtctgtcacagacagaagtgatagtgtaactgactattttgatggctggttgatgtcaggaacctctttgaaaatgtttgtagagcaatatgaggaagctgttaaaggaaagttagaaaaggaatcttacgaagatttacgatcagctcagatgaggccaccaatggtgacggggttgcctgtggaagatcaagcagcaaaggtgtacactgcagaaatctttcagaagttcttcaatgaaataggacattcatttcattgcaattataatatacttgaacggaatgagtcagtggttacatacatagtttcggagcatgtcgatcaaacaaacaaggtagactacaaagttgcttatgataatgttcaaggtgacatatggtgcctctgccgtttgtaccaatccaaaggaatattgtgcaggcatgcactcactgtactgagacaggagcttgtgctgatgattccacaaaaatacatcattcatcgctggtgcaaggactgtaaacaaacttgtgcttccatatcccagcctgtctcagcaggtaatcaggaactgggaagctacgatgatctgtacaaacttggccacctatactttgcagaagttgtggaatttggttccatgaactcagaatcaaaagaatatgctttgtcaatcatgagggaagtcagggataaagtgatttcatatgagaaatcactaagagatcaaagggttgacagccatgtttcaacagccaactttgcatacaatcctgtgaatgaggattttactgatgatgctttgcctatctctcttagtacaaagggctgggatcttacccaaggccaatctaaacgttcccgaaagaagaagctggcgaccccaactgttcttgatactttgaaaaagaaaactaaaagggcatataacaaaaggaggaatgccactgcaaacaccctgaacacatctgccactgcaactgacggcataactgatggcacaaatgtggagaacatttcgtttgatttgtcacaatacaacaatgccccaagcttccactggcctgaaagcagcagcaggtctcagctccactgagtaggcagcaatgcaatcgtggatgccttccaaatagactaagttctgacagtcttgtaagggcttgttcggttattcctatcttctgtggattagatgagattggaaaaaaatatgaaagattttgacttgaaagattttgacttgtttgggattaaaacgcacccaattccactcaatctacatggattgagagcaaaaccaacaagccctaatttggaaaaaaaaaaaaactagaggtgatggatcaggtttgacctttctattcctgcctaggactctaggagtcagtgaccacctgaataaaggtgaaaagggaagggattcaatgtggtgaagtgacatctaccatctatgtaccaatttagtggaacgggttctctacataatcattcctttttttccttccatggatatttgcagctcccgattgatttatctgaaccatgtaaattaggtcagatgcccctgaatcgacctgatgtttcactatggatccctcaggaaatcatatgccccttctctgatgaagctgtttgtaacaagatgtttattgcttcaccaagttcatctgttttcgctaatatttgttccgttcaatttctatgatcaaattattatatttgttctgtccagataatattttgtatcattttattctttttttctcaaacatgcaggagaactgtgtgtcaatatattaagatagaacgaatgatctgattacaagccgaatccatggcattttatccttgcaactgataaactag

SEQ ID NO: 207828 - DNA, 936 bp, Zea Mays
ctcttgcgccagcacccacagcttgtagggcgcaggctggcggccgtagctccggtccatcggttggaccttcaaggtggagaacatttcgtttgatttgtcacaatacaacaatgccccaagcttccactggcctgaaagcagcagcaggtctcagctccactgagtaggcagcaatgcaatcgtggatgccttccaaatagactaagttctgacagtcttgtaagggcttgttcggttattcctatcttctgtggattagatgagattggaaaaaaatatgaaagattttgacttgaaagattttgacttgtttgggattaaaacgcacccaattccactcaatctacatggattgagagcaaaaccaacaagccctaatttggaaaaaaaaaaaaactagaggtgatggatcaggtttgacctttctattcctgcctaggactctaggagtcagtgaccacctgaataaaggtgaaaagggaagggattcaatgtggtgaagtgacatctaccatctatgtaccaatttagtggaacgggttctctacataatcattcctttttttccttccatggatatttgcagctcccgattgatttatctgaaccatgtaaattaggtcagatgcccctgaatcgacctgatgtttcactatggatccctcaggaaatcatatgccccttctctgatgaagctgtttgtaacaagatgtttattgcttcaccaagttcatctgttttcgctaatatttgttccgttcaatttctatgatcaaattattatatttgttctgtccagataatattttgtatcattttattctttttttctcaaacatgcaggagaactgtgtgtcaatatattaagatagaacgaatgatctgattacaagccgaatccatggcattttatccttgcaactgataaactag

SEQ ID NO: 207829 - DNA, 3188 bp, Zea Mays
ttgcactcctattcgcctgctctgtctgacctgaaaattttggaaccaatggaagaggaagagtatagctctgaaacatctaatgaagaagatggcgaaaaagaaggaaatgctgctgagagtgatgtcttcagaccagttgatgtagatccagcatgtttaccaagagtagggatgatatttgactcggaggaagatgcctttcagttttatgtgacgtatggttgtcacgcaggttttggtattacaagaagatctaacaatacctttgatggtttccgctatcgctctacattcatatgttctaaaggagggcagtctagactgagatctggtgtgacaaaacctgcaagaaagcgaggtgtgaagactggctgcaaggccaagatgattgtgaaggatgcccattttcaaaatcgctgggaagtaattgttcttgagttggagcacaaccatccattggatccgaacttgcttaagtttaagagacatttgaagaactccccttttacgataaatccacctcaaatttgtgagtctgagggacaacagagcaactcagctcttgtacattcaagcagagttgttgatactggtataacttcgtcttctacacagattgaattcaaagccaagatagatagaaataggaaattgaagctcgcagaaggagacttagacgccttgttggattttctcaacaaaatgcaagaccaaaacccttgtttcttttacagtttagatatgaatgagcaagggcaactaaggaatgtcttttggtctgacgccaaatcacgcagttcatacaattactttggtgatgttgttgctattaatgtcacaaacttcagcgatcagtatgatatgcagtttgtgtcattcatgggaactaaccaccatgcacagccagtgttactaggttgtggcctgcttgctggtagatctcttggggcttatgtgtggctttttggtacatggttaagatgtatgaatgccaaaccaccacattcaataattacaaactactgtcatgatgtagcgatagctatcaaaaaggttttccctaacgcacgtcaccgtttttgcctttcacacatcttaaatgtgcttcctgaaaagttggaagaaattgataacaaagatgaaattatttccacattcaccacactagcctatgattatgttactatgactgattttgacagagagtggcaagatactatccaacattttcgtttggagagaaatgaatggctgtccaaactatatgaggtcaggatgcagtgggctcctgtttatgttaaggattcattttgggcaggaatgtctgtcacagacagaagtgatagtgtaactgactattttgatggctggttgatgtcaggaacctctttgaaaatgtttgtagagcaatatgaggaagctgttaaaggaaagttagaaaaggaatcttacgaagatttacgatcagctcagatgaggccaccaatggtgacggggttgcctgtggaagatcaagcagcaaaggtgtacactgcagaaatctttcagaagttcttcaatgaaataggacattcatttcattgcaattataatatacttgaacggaatgagtcagtggttacatacatagtttcggagcatgtcgatcaaacaaacaaggtagactacaaagttgcttatgataatgttcaaggtgacatatggtgcctctgccgtttgtaccaatccaaaggaatattgtgcaggcatgcactcactgtactgagacaggagcttgtgctgatgattccacaaaaatacatcattcatcgctggtgcaaggactgtaaacaaacttgtgcttccatatcccagcctgtctcagcagaagttgtggaatttggttccatgaactcagaatcaaaagaatatgctttgtcaatcatgagggaagtcagggataaagtgatttcatatgagaaatcactaagagatcaaagggttgacagccatgtttcaacagccaactttgcatacaatcctgtgaatgaggattttactgatgatgctttgcctatctctcttagtacaaagggctgggatcttacccaaggccaatctaaacgttcccgaaagaagaagctggcgaccccaactgttcttgatactttgaaaaagaaaactaaaagggcatataacaaaaggaggaatgccactgcaaacaccctgaacacatctgccactgcaactgacggcataactgatggcacaaatgttcagcagaatcctgtaaatgagggatggcagctagcgtcgactagtgctcccgaaactttctcttatggagtggagaacatttcgtttgatttgtcacaatacaacaatgccccaagcttccactggcctgaaagcagcagcaggtctcagctccactgagtaggcagcaatgcaatcgtggatgccttccaaatagactaagttctgacagtcttgtaagggcttgttcggttattcctatcttctgtggattagatgagattggaaaaaaatatgaaagattttgacttgaaagattttgacttgtttgggattaaaacgcacccaattccactcaatctacatggattgagagcaaaaccaacaagccctaatttggaaaaaaaaaaaaactagaggtgatggatcaggtttgacctttctattcctgcctaggactctaggagtcagtgaccacctgaataaaggtgaaaagggaagggattcaatgtggtgaagtgacatctaccatctatgtaccaatttagtggaacgggttctctacataatcattcctttttttccttccatggatatttgcagctcccgattgatttatctgaaccatgtaaattaggtcagatgcccctgaatcgacctgatgtttcactatggatccctcaggaaatcatatgccccttctctgatgaagctgtttgtaacaagatgtttattgcttcaccaagttcatctgttttcgctaatatttgttccgttcaatttctatgatcaaattattatatttgttctgtccagataatattttgtatcattttattctttttttctcaaacatgcaggagaactgtgtgtcaatatattaagatagaacgaatgatctgattacaagccgaatccatggcattttatccttgcaactgataaactag

SEQ ID NO: 207830 - DNA, 953 bp, Zea Mays
cactcctattcgcctgctctggttcagcagaatcctgtaaatgagggatggcagctagcgtcgactagtgctcccgaaactttctcttatggagtggagaacatttcgtttgatttgtcacaatacaacaatgccccaagcttccactggcctgaaagcagcagcaggtctcagctccactgagtaggcagcaatgcaatcgtggatgccttccaaatagactaagttctgacagtcttgtaagggcttgttcggttattcctatcttctgtggattagatgagattggaaaaaaatatgaaagattttgacttgaaagattttgacttgtttgggattaaaacgcacccaattccactcaatctacatggattgagagcaaaaccaacaagccctaatttggaaaaaaaaaaaaactagaggtgatggatcaggtttgacctttctattcctgcctaggactctaggagtcagtgaccacctgaataaaggtgaaaagggaagggattcaatgtggtgaagtgacatctaccatctatgtaccaatttagtggaacgggttctctacataatcattcctttttttccttccatggatatttgcagctcccgattgatttatctgaaccatgtaaattaggtcagatgcccctgaatcgacctgatgtttcactatggatccctcaggaaatcatatgccccttctctgatgaagctgtttgtaacaagatgtttattgcttcaccaagttcatctgttttcgctaatatttgttccgttcaatttctatgatcaaattattatatttgttctgtccagataatattttgtatcattttattctttttttctcaaacatgcaggagaactgtgtgtcaatatattaagatagaacgaatgatctgattacaagccgaatccatggcattttatccttgcaactgataaactag

SEQ ID NO: 207831 - DNA, 3063 bp, Zea Mays
ccacaatcggatcccgccgtcggacttcgctacaaccggacggagacagccatacgctcgctcgtttcgaactgtttacacgtgaggcaacaaacgcggacgctgctcacggcacatgacttttctacccctgctcgtcattctcacttttctgccctgctcctagcgacagggcctgtctgttctccttccgccgcaccacaaaacctccatggatgagccgtctcccctagagttggccgacggagatgcagtcctatggctcccagagccggccgccgtagatctagctccgcagctcccagatgaggtggatgtggaaccagacggagtggatccggcatccccgctgctcgtcgttagccccagcctcgtcgtggatcctgccccaccactccctctcgattgcaaggtggatcgacacagagatgaccccttccagcccgccgtggagacgacgcttgccttccagtctgacacggagaggatcctgctactgcgttctctgtccatccccaggacacaggtgacagcgatgacagatcggcatacttgtacttcaagtgccaggagaaggaccaccactcccactagctcgtgggttgctggactagctcttccaatcttgatgaagaaaccaaacatgggtgccaaagagttacaaaaagagttgcaagacaaatggaaatgtaccatttcctatgacaccgtttggaagggaagagaaaaggcctttcttgatttgcatggtgcttgggaggacagctttcgactattatttagttggaaggaggcggttttggaaaaaatgccagatagtgttattgagattgatgttcaagaagaggatggaaaggtgtttttcagtaggtttttctgtgcttttggaccatgcataaaagggtttcttcaaggatgcagaccatatctgagtgttgattcgacagctttgaacggtaacagacaccactcgccttgtctcatgcattggaagacgccggttcatcgcagccttctgcaagggtagctgagtcccctccaaggcaaactaggatagctgtacgcaaaatgacaccgaagaagaagaaaatttcgtccatgatttaaattgtagttgtatgatttggaatgtagttgtacggtttgaattattgttctatggtcactttgaatactgtgtgatttcaatatccaaactgcagccagacaaaactgcaattgtggacagaaatgttcttcttcttgctcactgtttggacaaaactgctatgttttttctaataatctagattcattcatggttgtggcatgagttataacctttgtcagttggtctcactgtttgggtgcacaaccttgatgatgatttttttttgaaatcccttgatgatgaattgaatggaagctgagtgcctcactgcctcttcagagttaaaaatggactgagaaacatagcagtggtggcggtgggttacagagagaggacggtggatggagtggagcctgcatctcatacaggagaaagggggttcggatacaggagaacgagaaggagcaggggcagaaaagtcctatgccatgagcagcattcgtgtttgttgtgcacgcgcaaacagttcgaaacgagcgagcgtatggctgtctccgtccggttgtagcgaagtccgacggcgggatccgattgtggcgaagtcacgcccgtgcagtgcgcccacagcaaaaagctccggcccacgggttagtgtggggctgcaggcctgcagctactagcctacaacaaatatctacgagctgcactgcagggtacgctcgtctgtgtctgcctactccctcctccggctcccgcgaagcgactccaagaagcagcaggagcgtcgagctcgagcagcagccatggatggcgaggaggttggcaggaggggtattcctactctgctgaagccgtcttcctcctccagcgacggcagtgccggggaacaagagcacatcgcttctgacgtcactcagctcataggatggacgccgctggtcgaattgaagcgaatcgccagcgaggctgggatcgatgcgcggatcgtcggcaagatggaggcttaccagccactttgctccatcaaggaccgctctgctttgagaatgatagaggatgctgaggagaggggattgatttcgcctggagtcacaacactggtggagccgacgagtggtaacatggggttagggttggtcctcttcgctattcagagaggttacaggctcattgcagtcatgccggctaaatactcgcttgacaagcagatcttgctgaggttcatgggcgcggagctatacttaactgatccggcccttggctttccgggcatgtttgacaaagttgaacagctccgaaaacagctgccaaatgtacatgttctgaaccaagtcacgaacaaagcgaattctgaagcccacttcagattgaccgggcctgagatctggaaggacacggcaggcaaggtggatgtattcgtagccggttcaggcacaggaggcactgtttctggcgtcgggaagtatctgaagatgcaaaagccaggcgtcaagatcatctgcgttgagcctgcagaaagcccagtgatttcaggtggcgcgcctggcaagcataaaatccagggagtaggcccagggtttctacctgaagttctggacacctcggtcatcgacgagaccgtcaccgtgagcaccgaggaggccatggcgaatgcgaggaggctggccagggaagagggcctgctcgtgggcatttcttccggagcaaacctggcagcttgtttgaaggtcgcttcgagacaggagaacaagggcaagatgatcgtcactgtgttcccaagtggcggcgagagatacatcaactccgacctctttgcagatgtgcgagaggagtgcattgccatgacattttgatcttccttttttcttttggacactttggtctgaatggtgtcagcattctccacaccacacagacatatttccaggacatggtgttcacgtagattgtctacgtgggaagaccagctcagc

SEQ ID NO: 207832 - DNA, 3143 bp, Zea Mays
ccacaatcggatcccgccgtcggacttcgctacaaccggacggagacagccatacgctcgctcgtttcgaactgtttacacgtgaggcaacaaacgcggacgctgctcacggcacatgacttttctacccctgctcgtcattctcacttttctgccctgctcctagcgacagggcctgtctgttctccttccgccgcaccacaaaacctccatggatgagccgtctcccctagagttggccgacggagatgcagtcctatggctcccagagccggccgccgtagatctagctccgcagctcccagatgaggtggatgtggaaccagacggagtggatccggcatccccgctgctcgtcgttagccccagcctcgtcgtggatcctgccccaccactccctctcgattgcaaggtggatcgacacagagatgaccccttccagcccgccgtggagacgacgcttgccttccagtctgacacggagaggatcctgctactgcgttctctgtccatccccaggacacaggtgacagcgatgacagatcggcatacttgtacttcaagtgccaggagaaggaccaccactcccactagctcgtgggttgctggactagctcttccaatcttgatgaagaaaccaaacatgggtgccaaagagttacaaaaagagttgcaagacaaatggaaatgtaccatttcctatgacaccgtttggaagggaagagaaaaggcctttcttgatttgcatggtgcttgggaggacagctttcgactattatttagttggaaggaggcggttttggaaaaaatgccagatagtgttattgagattgatgttcaagaagaggatggaaaggtgtttttcagtaggtttttctgtgcttttggaccatgcataaaagggtttcttcaaggatgcagaccatatctgagtgttgattcgacagctttgaacggtaacagacaccactcgccttgtctcatgcattggaagacgccggttcatcgcagccttctgcaagggtagctgagtcccctccaaggcaaactaggatagctgtacgcaaaatgacaccgaagaagaagaaaatttcgtccatgatttaaattgtagttgtatgatttggaatgtagttgtacggtttgaattattgttctatggtcactttgaatactgtgtgatttcaatatccaaactgcagccagacaaaactgcaattgtggacagaaatgttcttcttcttgctcactgtttggacaaaactgctatgttttttctaataatctagattcattcatggttgtggcatgagttataacctttgtcagttggtctcactgtttgggtgcacaaccttgatgatgatttttttttgaaatcccttgatgatgaattgaatggaagctgagtgcctcactgcctcttcagagttaaaaatggactgagaaacatagcagtggtggcggtgggttacagagagaggacggtggatggagtggagcctgcatctcatacaggagaaagggggttcggatacaggagaacgagaaggagcaggggcagaaaagtcctatgccatgagcagcattcgtgtttgttgtgcacgcgcaaacagttcgaaacgagcgagcgtatggctgtctccgtccggttgtagcgaagtccgacggcgggatccgattgtggcgaagtcacgcccgtgcagtgcgcccacagcaaaaagctccggcccacgggttagtgtggggctgcaggcctgcagctactagcctacaacaaatatctacgagctgcactgcagggtacgctcgtctgtgtctgcctactccctcctccggctcccgcgaagcgactccaagaagcagcaggagcgtcgagctcgagcagcagccatggatggcgaggaggttggcaggaggggtattcctactctgctgaagccgtcttcctcctccagcgacggcagtgccggggaacaagagcacatcgcttctgacgtcactcagctcataggatggacgccgctggtcgaattgaagcgaatcgccagcgaggctgggatcgatgcgcggatcgtcggcaagatggaggcttaccagccactttgctccatcaaggaccgctctgctttgagaatgatagaggatgctgaggagaggggattgatttcgcctggagtcacaacactggtggagccgacgagtggtaacatggggttagggttggtcctcttcgctattcagagaggttacaggctcattgcagtcatgccggctaaatactcgcttgacaagcagatcttgctgaggttcatgggcgcggagctatacttaactgatccggcccttggctttccgggcatgtttgacaaagttgaacagctccgaaaacagctgccaaatgtacatgttctgaaccaagtcacgaacaaagcgaattctgaagcccacttcagattgaccggtatggatacaatagcatgtgttcgaacgatgcttatacctcagtgaacagtagctgttgctgggcctgagatctggaaggacacggcaggcaaggtggatgtattcgtagccggttcaggcacaggaggcactgtttctggcgtcgggaagtatctgaagatgcaaaagccaggcgtcaagatcatctgcgttgagcctgcagaaagcccagtgatttcaggtggcgcgcctggcaagcataaaatccagggagtaggcccagggtttctacctgaagttctggacacctcggtcatcgacgagaccgtcaccgtgagcaccgaggaggccatggcgaatgcgaggaggctggccagggaagagggcctgctcgtgggcatttcttccggagcaaacctggcagcttgtttgaaggtcgcttcgagacaggagaacaagggcaagatgatcgtcactgtgttcccaagtggcggcgagagatacatcaactccgacctctttgcagatgtgcgagaggagtgcattgccatgacattttgatcttccttttttcttttggacactttggtctgaatggtgtcagcattctccacaccacacagacatatttccaggacatggtgttgtaaatttagagaaataagtgacatgctttctacatatttaaatagattaaa

SEQ ID NO: 207833 - DNA, 2482 bp, Zea Mays
cgcccatttccgagcagtctgcgcgtgccggcgtgcgtcagtctccgcgaccgcccgtgagccgtgatctgacgaggaggcgcacctgcttcgcccgcgctgcgacgactgacgactgacgaggcgtgcggcgcgcgtgaggaggaaggcttctccatctggcaaccggcggcaggaggacgatcaactccgcgactccacttcctcacgcggcgtgtcctctccccggaggaggcggaggcggctcacgggctctgattggcggatggcgcgtcggatcggagcagtcgagcttcggggatttcctgtccctctggaagggatgaaatgcggcgactacctggtgaactgggtggagctctagtgccagccagtgttcctgctgacgcctgcctcatctagtccccccttcgttcagttcttgtggcgagttgttaatccaccgtgtccgggatccgtttggcctggggttttgaggagatggacgacgaggactactcgtgggtgcggcgcaccaggttctcgcagtccatcgtcagatccagctctggcagggagcagtatggcgcgttcatcgagcagttcagccgtggcgccgagctgaggcagaatgggttgggcacagggtacaggaaccctcgccagagtgtacagcccttggcgaagggatccggggtctccaactctgcaaggctgccgattcccaaggcgaagtcagcagttgcccagtcggaacggaagctgaagcatgcgtcttccgaaggccaattgaacagagacggtgatcgcccgttgcaagaatcatcggcgaagcagagccggaaaggggccgtcggcctcagtctggacattccgcagctgcatgtggttcggccatccaaggagagcccagacgcgctggatttctctttccactcggacgagcacagccagaggctccagagagtgtgttccagcccggctcctttctctacgaaggatggtacggcaccagctggtgattccagagcgagcagtgcatctatgaagatcatcggacaagtgtccaaacccgcgccgaaacgaagagccaagtcccctatccccaagcgcgtcatctcggatgtgtttaaggaggcgaaagcagccaccaagaggttctccagcccgcagcggcagaggaagcccacatctccacggtcactagatgacagccctccattcggctttgcttcgctaagaacaccaagcaagctgaagattaatagcagaacctcctcatggccgagaaggaacctcgacagtgggctggcgaaagttgctgcactggagatccttgagaggtggacggtcgatcgctctgagttgctcattggacataggtttgcatccggggcttatagccgattgttccatgggatctacaaggagcaacctgttgctgtaaagtttatcagacagcctgacgatggtgaggatgacgaattatctgctaagcttgagaagcagttcacttcagaggttaccattctggcaaggctccaacatcgtaatgtcattaagcttgttggggcctgtaattgcccgccagtattctgtgtaatcactgagtttctgtctgggggttctttgagggctttcttgcgaaagttggagcgcaaagctcttcctttggagaaggtcatttccatcgctttggatatcgcccgcggcctggaatatattcacctccagggaatcgtacaccgtgacgtcaaacccgagaacatcttatttgatggagaattctgtgctaaagttgtcgattttggagtggcgtgtgaagaaacatactgcaatttgttaggggatgatccaggtacttatagatggatggcaccagagatgtacaagcacaagccctatggccggaaagttgatgtgtatagctttgggcttctcttgtgggaattggtcaccggttcactcccttatgaagatatgactccgcttcaggcagctttcgccgttgttaataagaacttgaggccggtcattccattgagctgcccagcagcgctgaagcttctgattgagcagtgttggtcctggcaaccagaaaagaggcccgactttcagcagatagtttctatcctcgaagatctcaagacagttcttgaaacagacggaacactccacaaggtcccaagctcgatctgccaggccttggaatccaatgatcagaacaagaagaaggccggtaactggatccagaggctgtcatacgctcaacctgatttctccgggcctccacccccaaagttactgtagctacgcgtcttcttgttcttggtagcttgtttatctggttggtagcaactgtgtaaattgaacctttcttgtttcttgttgagagaccacagatttcgtcatggtatatactcggacaaagtacatacatcaattcttttttcggctaccttaacaacttctatcttgatgatacatgggagcgatatgatag

SEQ ID NO: 207834 - DNA, 1002 bp, Zea Mays
cggcggcaggaggacgatcaactccgcgactccacttcctcacgcggcgtgtcctctccccgcttgttggggcctgtaattgcccgccagtattctgtgtaatcactgagtttctgtctgggggttctttgagggctttcttgcgaaagttggagcgcaaagctcttcctttggagaaggtcatttccatcgctttggatatcgcccgcggcctggaatatattcacctccagggaatcgtacaccgtgacgtcaaacccgagaacatcttatttgatggagaattctgtgctaaagttgtcgattttggagtggcgtgtgaagaaacatactgcaatttgttaggggatgatccaggtacttatagatggatggcaccagagatgtacaagcacaagccctatggccggaaagttgatgtgtatagctttgggcttctcttgtgggaattggtcaccggttcactcccttatgaagatatgactccgcttcaggcagctttcgccgttgttaataagaacttgaggccggtcattccattgagctgcccagcagcgctgaagcttctgattgagcagtgttggtcctggcaaccagaaaagaggcccgactttcagcagatagtttctatcctcgaagatctcaagacagttcttgaaacagacggaacactccacaaggtcccaagctcgatctgccaggccttggaatccaatgatcagaacaagaagaaggccggtaactggatccagaggctgtcatacgctcaacctgatttctccgggcctccacccccaaagttactgtagctacgcgtcttcttgttcttggtagcttgtttatctggttggtagcaactgtgtaaattgaacctttcttgtttcttgttgagagaccacagatttcgtcatggtatatactcggacaaagtacatacatcaattcttttttcggctaccttaacaacttctatcttgatgatacatgggagcgatatgatag

SEQ ID NO: 207835 - DNA, 2346 bp, Zea Mays
cacactttttctccgccccccccaaaccacatcgattattgcgttgagcgcttagactcttgttgtctttgtttttgtggtcggcgagcatggaggaggcggaggcggctcacgggctctgattggcggatggcgcgtcggatcggagcagtcgagcttcggggatttcctgtccctctggaagggatgaaatgcggcgactacctggtgaactgggtggagctctagtgccagccagtgttcctgctgacgcctgcctcatctagtccccccttcgttcagttcttgtggcgagttgttaatccaccgtgtccgggatccgtttggcctggggttttgaggagatggacgacgaggactactcgtgggtgcggcgcaccaggttctcgcagtccatcgtcagatccagctctggcagggagcagtatggcgcgttcatcgagcagttcagccgtggcgccgagctgaggcagaatgggttgggcacagggtacaggaaccctcgccagagtgtacagcccttggcgaagggatccggggtctccaactctgcaaggctgccgattcccaaggcgaagtcagcagttgcccagtcggaacggaagctgaagcatgcgtcttccgaaggccaattgaacagagacggtgatcgcccgttgcaagaatcatcggcgaagcagagccggaaaggggccgtcggcctcagtctggacattccgcagctgcatgtggttcggccatccaaggagagcccagacgcgctggatttctctttccactcggacgagcacagccagaggctccagagagtgtgttccagcccggctcctttctctacgaaggatggtacggcaccagctggtgattccagagcgagcagtgcatctatgaagatcatcggacaagtgtccaaacccgcgccgaaacgaagagccaagtcccctatccccaagcgcgtcatctcggatgtgtttaaggaggcgaaagcagccaccaagaggttctccagcccgcagcggcagaggaagcccacatctccacggtcactagatgacagccctccattcggctttgcttcgctaagaacaccaagcaagctgaagattaatagcagaacctcctcatggccgagaaggaacctcgacagtgggctggcgaaagttgctgcactggagatccttgagaggtggacggtcgatcgctctgagttgctcattggacataggtttgcatccggggcttatagccgattgttccatgggatctacaaggagcaacctgttgctgtaaagtttatcagacagcctgacgatggtgaggatgacgaattatctgctaagcttgagaagcagttcacttcagaggttaccattctggcaaggctccaacatcgtaatgtcattaagcttgttggggcctgtaattgcccgccagtattctgtgtaatcactgagtttctgtctgggggttctttgagggctttcttgcgaaagttggagcgcaaagctcttcctttggagaaggtcatttccatcgctttggatatcgcccgcggcctggaatatattcacctccagggaatcgtacaccgtgacgtcaaacccgagaacatcttatttgatggagaattctgtgctaaagttgtcgattttggagtggcgtgtgaagaaacatactgcaatttgttaggggatgatccaggtacttatagatggatggcaccagagatgtacaagcacaagccctatggccggaaagttgatgtgtatagctttgggcttctcttgtgggaattggtcaccggttcactcccttatgaagatatgactccgcttcaggcagctttcgccgttgttaataagaacttgaggccggtcattccattgagctgcccagcagcgctgaagcttctgattgagcagtgttggtcctggcaaccagaaaagaggcccgactttcagcagatagtttctatcctcgaagatctcaagacagttcttgaaacagacggaacactccacaaggtcccaagctcgatctgccaggccttggaatccaatgatcagaacaagaagaaggccggtaactggatccagaggctgtcatacgctcaacctgatttctccgggcctccacccccaaagttactgtagctacgcgtcttcttgttcttggtagcttgtttatctggttggtagcaactgtgtaaattgaacctttcttgtttcttgttgagagaccacagatttcgtcatggtatatactcggacaaagtacatacatcaattcttttttcggctaccttaacaacttctatcttgatgatacatgggagcgatatgatag

SEQ ID NO: 207836 - DNA, 2123 bp, Zea Mays
gagaattggctccatttatcttggctgcgttctaatagacagcttgaatttatcgtagtacaaccttattttcattgatgatacgatatggggatggagagccaactgataacgcagcaagattctacaaatggtttactgagggaaaagagaaggaagtttggctgaaggatcttaaatatggtatttttggccttggaaacaggcagtatgaacattttaataaggttgcaaaggtggtagatgagctactagaggagcagggtgggaaacgtcttgttcctgttggccttggagatgatgatcagtgcattgaggatgatttcactgcatggaaagaactagtgtggccagagttggatcaattgctccgcgacgaggatgacacaaatggtgcatcaactccatatactgctgctattcctgaatacagagttgttttcattgataaatctgacctgtcattccaagatagatcatggtcactagccaacggtactggtgtgattgatattcaccacccttgcagggctaatgttgctgttcgaaaggagctgcacaaaccagcttcagaccgctcttgtattcatcttgagtttgatatttctggcactagtcttgtgtatgaaaccggagaccatgttggtgtatatgcagaaaattctgttgagactgtggaggaggctgaaagcctacttgacctttctccagatacagtcttctccatccatgcagatgcagaagatgggtctcctcgtaaaggaggaagttccttggccccacctttcccatctccatgtactttgcggactgcgcttctacgatatgctgatctactcaatccaccgaagaaggctgctttgcttgctttagcttctcatgcatctgatccagctgaagctgaacgacttaggttcttggcctctcctgctggaaaggatgagtattctcaatggataactgctagtcagaggagtcttcttgaagttatggctgcattcccttcagctaagccaccactgggagtgtttttcgcagcaatagctcctcgtctgcaaccacgatactactcaatttcatcatctccaaagatggctccctccagaattcatgtaacatgtgcattagtttatgggccttcaccaacaggaaggatccaccaaggagtttgttcaacatggatgaagaatacaattcctctggaatatagcgaagaatgcagctgggctcccatatttgtgaggcagtcaaatttcaagttacctgctgacccatccactccgattatcatgattggtcctgggacagggctggctccttttagaggtttcttgcaggaaaggttagcactgaaacaatctggagcagaactgggcacttcaatccttttctttggatgcaggaaccgtaatatggactacatatatgaagatgagctgcaaactttccttgaggagggggcgctttctgagctaattgttgcattctctcgggaagggccaactaaagaatatgtgcagcataagatggtggagaaggccacagaaatttggaacatcatctcacatggtggttacttatatgtatgcggtgatgccaagggaatggctagagacgtacacaggatgcttcatacagtagtccaagagcagggatctttggatagctccaaaaccgagagctacgtaaagagcctgcagatggaaggcaggtacctccgtgatgtatggtgacacatcacccccattcagccatagctctagcgtgtggaagtaaagctggctttgcgtgtacgacatgcctaatgccaaatgaagcgtgccattgattagaaactgaaatgttcagtcgatcagtgtaattctttgacatctaactatttatcattatatggaatgggaggaactgttgtagatttgtagaactacaaaaaaattgtgtatccctaacaagtttgtagcaaagggggtacattattacagtttgagatgaggacatcatgtatactgtttgagacgaggacattatgtatatacttggtacattagaaggccaccgaaaacaaattttgcatctggtttttgaaagcatgtgctcctatcaactatcgtgctgtctgcaat

SEQ ID NO: 207837 - DNA, 2055 bp, Zea Mays
ttatcgtagtacaaccttattttcattgatgatacgatatggggatggagagccaactgataacgcagcaagattctacaaatggtttactgagggaaaagagaaggaagtttggctgaaggatcttaaatatggtatttttggccttggaaacaggcagtatgaacattttaataaggttgcaaaggtggtagatgagctactagaggagcagggtgggaaacgtcttgttcctgttggccttggagatgatgatcagtgcattgaggatgatttcactgcatggaaagaactagtgtggccagagttggatcaattgctccgcgacgaggatgacacaaatggtgcatcaactccatatactgctgctattcctgaatacagagttgttttcattgataaatctgacctgtcattccaagatagatcatggtcactagccaacggtactggtgtgattgatattcaccacccttgcagggctaatgttgctgttcgaaaggagctgcacaaaccagcttcagaccgctcttgtattcatcttgagtttgatatttctggcactagtcttgtgtatgaaaccggagaccatgttggtgtatatgcagaaaattctgttgagactgtggaggaggctgaaagcctacttgacctttctccagatacagtcttctccatccatgcagatgcagaagatgggtctcctcgtaaaggaggaagttccttggccccacctttcccatctccatgtactttgcggactgcgcttctacgatatgctgatctactcaatccaccgaagaagcttctcatgcatctgatccagctgaagctgaacgacttaggttcttggcctctcctgctggaaaggatgagtattctcaatggataactgctagtcagaggagtcttcttgaagttatggctgcattcccttcagctaagccaccactgggagtgtttttcgcagcaatagctcctcgtctgcaaccacgatactactcaatttcatcatctccaaagatggctccctccagaattcatgtaacatgtgcattagtttatgggccttcaccaacaggaaggatccaccaaggagtttgttcaacatggatgaagaatacaattcctctggaatatagcgaagaatgcagctgggctcccatatttgtgaggcagtcaaatttcaagttacctgctgacccatccactccgattatcatgattggtcctgggacagggctggctccttttagaggtttcttgcaggaaaggttagcactgaaacaatctggagcagaactgggcacttcaatccttttctttggatgcaggaaccgtaatatggactacatatatgaagatgagctgcaaactttccttgaggagggggcgctttctgagctaattgttgcattctctcgggaagggccaactaaagaatatgtgcagcataagatggtggagaaggccacagaaatttggaacatcatctcacatggtggttacttatatgtatgcggtgatgccaagggaatggctagagacgtacacaggatgcttcatacagtagtccaagagcagggatctttggatagctccaaaaccgagagctacgtaaagagcctgcagatggaaggcaggtacctccgtgatgtatggtgacacatcacccccattcagccatagctctagcgtgtggaagtaaagctggctttgcgtgtacgacatgcctaatgccaaatgaagcgtgccattgattagaaactgaaatgttcagtcgatcagtgtaattctttgacatctaactatttatcattatatggaatgggaggaactgttgtagatttgtagaactacaaaaaaattgtgtatccctaacaagtttgtagcaaagggggtacattattacagtttgagatgaggacatcatgtatactgtttgagacgaggacattatgtatatacttggtacattagaaggccaccgaaaacaaattttgcatctggtttttgaaagcatgtgctcctatcaactatcgtgctgtctgcaat

SEQ ID NO: 207838 - DNA, 1811 bp, Zea Mays
caaagtcgtgctggactagtgggaaagaactagtgtggccagagttggatcaattgctccgcgacgaggatgacacaaatggtgcatcaactccatatactgctgctattcctgaatacagagttgttttcattgataaatctgacctgtcattccaagatagatcatggtcactagccaacggtactggtgtgattgatattcaccacccttgcagggctaatgttgctgttcgaaaggagctgcacaaaccagcttcagaccgctcttgtattcatcttgagtttgatatttctggcactagtcttgtgtatgaaaccggagaccatgttggtgtatatgcagaaaattctgttgagactgtggaggaggctgaaagcctacttgacctttctccagatacagtcttctccatccatgcagatgcagaagatgggtctcctcgtaaaggaggaagttccttggccccacctttcccatctccatgtactttgcggactgcgcttctacgatatgctgatctactcaatccaccgaagaaggctgctttgcttgctttagcttctcatgcatctgatccagctgaagctgaacgacttaggttcttggcctctcctgctggaaaggatgagtattctcaatggataactgctagtcagaggagtcttcttgaagttatggctgcattcccttcagctaagccaccactgggagtgtttttcgcagcaatagctcctcgtctgcaaccacgatactactcaatttcatcatctccaaagatggctccctccagaattcatgtaacatgtgcattagtttatgggccttcaccaacaggaaggatccaccaaggagtttgttcaacatggatgaagaatacaattcctctggaatatagcgaagaatgcagctgggctcccatatttgtgaggcagtcaaatttcaagttacctgctgacccatccactccgattatcatgattggtcctgggacagggctggctccttttagaggtttcttgcaggaaaggttagcactgaaacaatctggagcagaactgggcacttcaatccttttctttggatgcaggaaccgtaatatggactacatatatgaagatgagctgcaaactttccttgaggagggggcgctttctgagctaattgttgcattctctcgggaagggccaactaaagaatatgtgcagcataagatggtggagaaggccacagaaatttggaacatcatctcacatggtggttacttatatgtatgcggtgatgccaagggaatggctagagacgtacacaggatgcttcatacagtagtccaagagcagggatctttggatagctccaaaaccgagagctacgtaaagagcctgcagatggaaggcaggtacctccgtgatgtatggtgacacatcacccccattcagccatagctctagcgtgtggaagtaaagctggctttgcgtgtacgacatgcctaatgccaaatgaagcgtgccattgattagaaactgaaatgttcagtcgatcagtgtaattctttgacatctaactatttatcattatatggaatgggaggaactgttgtagatttgtagaactacaaaaaaattgtgtatccctaacaagtttgtagcaaagggggtacattattacagtttgagatgaggacatcatgtatactgtttgagacgaggacattatgtatatacttggtacattagaaggccaccgaaaacaaattttgcatctggtttttgaaagcatgtgctcctatcaactatcgtgctgtctgcaat

SEQ ID NO: 207839 - DNA, 1060 bp, Zea Mays
ctatgcttgaggtggtggtgtgtgtctgatggctccctccagaattcatgtaacatgtgcattagtttatgggccttcaccaacaggaaggatccaccaaggagtttgttcaacatggatgaagaatacaattcctctggaatatagcgaagaatgcagctgggctcccatatttgtgaggcagtcaaatttcaagttacctgctgacccatccactccgattatcatgattggtcctgggacagggctggctccttttagaggtttcttgcaggaaaggttagcactgaaacaatctggagcagaactgggcacttcaatccttttctttggatgcaggaaccgtaatatggactacatatatgaagatgagctgcaaactttccttgaggagggggcgctttctgagctaattgttgcattctctcgggaagggccaactaaagaatatgtgcagcataagatggtggagaaggccacagaaatttggaacatcatctcacatggtggttacttatatgtatgcggtgatgccaagggaatggctagagacgtacacaggatgcttcatacagtagtccaagagcagggatctttggatagctccaaaaccgagagctacgtaaagagcctgcagatggaaggcaggtacctccgtgatgtatggtgacacatcacccccattcagccatagctctagcgtgtggaagtaaagctggctttgcgtgtacgacatgcctaatgccaaatgaagcgtgccattgattagaaactgaaatgttcagtcgatcagtgtaattctttgacatctaactatttatcattatatggaatgggaggaactgttgtagatttgtagaactacaaaaaaattgtgtatccctaacaagtttgtagcaaagggggtacattattacagtttgagatgaggacatcatgtatactgtttgagacgaggacattatgtatatacttggtacattagaaggccaccgaaaacaaattttgcatctggtttttgaaagcatgtgctcctatcaactatcgtgctgtctgcaat

SEQ ID NO: 207840 - DNA, 946 bp, Zea Mays
ggctctcgaaaatacaattcctctggaatatagcgaagaatgcagctgggctcccatatttgtgaggcagtcaaatttcaagttacctgctgacccatccactccgattatcatgattggtcctgggacagggctggctccttttagaggtttcttgcaggaaaggttagcactgaaacaatctggagcagaactgggcacttcaatccttttctttggatgcaggaaccgtaatatggactacatatatgaagatgagctgcaaactttccttgaggagggggcgctttctgagctaattgttgcattctctcgggaagggccaactaaagaatatgtgcagcataagatggtggagaaggccacagaaatttggaacatcatctcacatggtggttacttatatgtatgcggtgatgccaagggaatggctagagacgtacacaggatgcttcatacagtagtccaagagcagggatctttggatagctccaaaaccgagagctacgtaaagagcctgcagatggaaggcaggtacctccgtgatgtatggtgacacatcacccccattcagccatagctctagcgtgtggaagtaaagctggctttgcgtgtacgacatgcctaatgccaaatgaagcgtgccattgattagaaactgaaatgttcagtcgatcagtgtaattctttgacatctaactatttatcattatatggaatgggaggaactgttgtagatttgtagaactacaaaaaaattgtgtatccctaacaagtttgtagcaaagggggtacattattacagtttgagatgaggacatcatgtatactgtttgagacgaggacattatgtatatacttggtacattagaaggccaccgaaaacaaattttgcatctggtttttgaaagcatgtgctcctatcaactatcgtgctgtctgcaat

SEQ ID NO: 207841 - DNA, 3907 bp, Zea Mays
caggctgtgacagctgctcctgcacctcatcgcctccctcgccgccggaccggatgatgcattactagccaaccaaatcggtcgctgagccaggccccaggcccaggcacgccgctcttctcggcagtaacggaagccgagtcctctcccaccccggggcgggactcgccacttcccattcctgtgcgcctgcctcgcctcgcctcgcgtcgcactacccacccccaccagccaccaccaccaccaccaccaccaccaaccaaatggagcgcgcacgccgccacgccagccgcgcgctgctgcgccgcctgctcgcggcggccgcggcctcgcccgccgcgtccccggccacgtcgtcccgcggcatctccaccctgtcgccgccgccgccagccgcggggaagcagcagcgccgctgctgccctccaccccgcggcgcgcaccagcacgcgcaggcgcgggcggtgtcggtgtcggcgctgcagccgagcgacaccttcccgcggcggcacaactccgcgacgcccgccgagcaggaggccatggcgtccgcgtgcggcttcggcggcgtcgacgcgctggtcgacgccacggtcccgcccgccatccgcgcgccgccgatgcggttccccggcaggttcgacgccgggttcaccgagtcgcagatgctggaccacatgcggcgcctggcgtccatgaacagggacttcaagtccttcatcgggatgggctactacggcacccacgtccccgcggtggtgctgcgcaacctcatggagaacccggcctggtacacccagtacaccccgtaccaggccgagatcgcgcagggccgcctcgagtcgctgctcaactaccagaccatggtcgccgacctcaccggcctccccatgtccaacgcctccctcctcgacgaggccaccgccgccgccgaggccatggccatgtgcagcgccatcctcaggggcaagaagaggactttcctcatcgcctccaactgccacccgcagaccatcgacgtgtgccgcacccgctccgacggcttcggcatccgggtcgtcgtcgccgacgccaaggacctggactacggcggcggcgacgtctgcggcgtgctcgtgcagtaccccggcacggagggcgaggtgctcgactacgccgagttcgtccgggacgcgcacgcccacggcgtcaaggtcgtcatggccaccgacctgctcgcgctcaccgcgctgcgcccgcccggcgagatcggcgccgacatcgccgtcggctccgcgcagcgcttcggcgtgcccatgggatacggcggcccgcacgccgcgttcctcgccacgtcgcaggagtacaagcgcctcatgcccggccgtatcatcggagttagcgtcgactccaccggcaggcccgcgctccgcatggcgatgcagacccgggaacagcacatccgtcgcgacaaggccaccagcaacatctgcactgcccaggccttgctcgccaacatggctgccatgtacgctgtctaccatggcccagcggggctgaaggcgatcgctgaccgggttcatggcctggctggcaccttcgcccacggcctcaagaagctcgggacagtgacggtgcaggacctgcccttcttcgacacggtcagggtcacgtgctccgatgcacgtgcaatcgccaaggaagctgtcaagaacgagatgaaccttcgggtcgtcgatgccaacacgatcactgtagcatttgatgagacctccaccctggaggatgttgacaagctgttcaaggtgttcaacaacggcaaatcagccagtttcacagccgaatccatcgcaccagaggtctcaagctcaattcctagcagccttgctcgcgagagcccctacctaacgcatccagtcttcaacatgtaccacacagagcatgagcttcttcgttacctgcataagttgcagtccaaggatctctcgctatgccacagtatgatccctctgggttcttgcacaatgaagctaaacgctactgttgagatgatacctgttacatttcccaactttgcgaacctgcacccatttgcccccactgatcaggctgcagggaaatgtttgacgacttgggcaacctgttatgcacgatcacaggttttgattctttctctttgcaaccaaatgctggtgctgcaggagagtatgctggattgatggttatccgtgcttaccacaactcaagaggagaccaccaccgcgatgtctgcatcattcctgtctcagcacacggcacgaaccctgcaagtgctgctatggttggaatgaagattgttgctgttggaactgatgccaagggtaacataaacatcgaggaattgaggaaagctgcagaagcaaacaaggacaacttggctgctctgatggttacctacccttcaactcacggagtctatgaagaaggcattgatgagatctgcaagatcattcatgaaaatggcggacaggtctacatggacggggctaacatgaatgctcaggttgggttaacaagccctggttttattggagctgatgtttgtcaccttaaccttcacaagacattttgcattccacatggtggaggcggtcccggcatgggtcctattggggttaagaagcatttggcaccatttttaccatctcacccagtgattcccactggtggctttcctctccctgagaaaacggaccctcttggcaccatttctgctgctccatggggatctgctttgattctgccaatttcctacacatatatagccatgatgggctcacaggggctcactgatgcttcgaagatcgcgatcttgaatgcaaactacatggcaaaacgtctagagaaacactacccagttctgttccgtggagtcaacggaactgttgcccatgaattcatcattgatctaagggcatttaagacgactgctggtatagagccggaggatgtggcaaagcgcttgatggactacgggttccacgcaccgaccatgtcatggcctgttcctggcacacttatgattgaaccaactgaaagtgagagcaaggccgaactggacaggttctgcgacgctcttatctccatcagggaagagattgcagagatagaaagcggcaaagcagatgtgcttaacaatgtcctgaagggcgctcctcacccaccgcaactcttgatgggtgacacatggagcaagccgtattccagggagtacgctgcgttccccgcggcatggctccggggcgccaagttctggccaacaactggtcgtgtggacaacgtctacggggaccgcaacctcatctgcacgctgcagcaggcgacccaggtggccgaggaagccgcggccgcaactgcaactgcgtaatctcgtccgagaaccacgataattgatcgcggcgtgcgaaacatcctcaagaaactataatgcatgcttcctgtaggagggaagcatcgtcatcttcctcgtcatcctttctgcagtgtatatactagctcatggcagcgcctgatcccccaccaccaccgcgcgcacacacaaagctgccaccttgtaattttgtacattacttcattgcttctctgttattcccatttaataaattaaaaggaatagctttttattgaatataatttgtttctcttttcataacaaaaataaataaatgaaggggcattgttcgaaataagactaagagctgatttggtggtcagagatccatgggaggaatctctttgctattcaaatttgaataataaggagattcatccacatggatcctctagatcaacaaatcagctataagagacaacaaattggattcaggttggattcaaattatacttaatattaggccataaattggctgacgctcaatttattgtgtat

SEQ ID NO: 207842 - DNA, 3329 bp, Zea Mays
ggctgccactcggctggcgctcacaccggatccgggccccactacccacctcctgtccagcccggtctccacagcagtgcccaccaccgcctgcagtctgcagagatcccccactgattcgctcgccgtccctccgctgcgctgctatataggaccgtgccgccgcgtgcgctcgtggactgtggtgtgccttgtgcgacagtcgccagcctgccccgcctgccggcccggccgcccgcctgcccgcggcactgagaagacgaagctccgggctccgggacgccgagcagaggggaaaggatggaggacaaggcgtccaacctagacgccgtgctcaaggaggccgtcgatctcgagaacataccgatcgaggaggtgttcgagaacctccgatgcagcccgcagggtctcaccacggagcaggcggagcagcgcctcgccatcttcgggcccaacaagctggaggagaagcaggagagcaagttcctcaagttcttgggcttcatgtggaacccgctgtcctgggtcatggaggcggccgccatcatggccatcgcgctcgcgaatgggggaaacaagccgcccgactggcaggacttcgtggggatcatcactctgctcattatcaactccacaatcagcttcattgaggagaacaatgcgggcaatgccgctgctgctctcatggcacgcctcgcccccaaggccaaggttctcagaaatggccggtggaccgaggaggaatcggctatccttgtgccaggagacatcatcagtgtgaagcttggggacatcattccagctgatgctcgtctgcttgaaggggatccactgaaaatcgatcagtctgcactcaccggcgaatcccttccagtcaccaaaggccctggtgatggagtgtattctggctccacttgcaaacagggtgagattgaggccgttgtcattgccactggtgtgcacacattctttggcaaggccgcacatcttgtcgattcaacaaaccaagttggtcattttcagaaggttctcactgccatagggaacttttgcatctgttcaattgctgtgggaatgctcgtggagcttgtcgtcatgtacgctatccaacacagggcttaccgacccggaatcgacaatctattggtgcttctgattggaggaattccaatcgccatgcccactgtcctttctgtgaccatggcaataggggctcatcgcttggctcaacagggagcaatcactaagagaatgacagcaattgaagaaatggctggcatggatgttctttgtagtgacaagactgggacattaaccttaaacaagttgactgtggacaagagtcttgttgaggttttccaaagaggtgttgaccaagatacagtaattttgatggctgctagagcttctcgcacagaaaatcaggatgccatagatgccacaatagttggtatgctggctgatccaaaggaggctcgtgctggtgttcaagagatccattttcttccatttaacccaactgataaaagaactgctttaacctaccttgatggagaggggagaatgcatcgtgttagcaagggagcaccagagcaggtgatcaacttgctattgggaaggaaactgcacgtcgtttgggaatgggtactaatatgtacccttcttctgctttactcggacagaataaggatgagtcaattgcttccttgccaattgatgatttgattgagaaggctgatggctttgctggtgtttttccagaacacaagtatgagatcgtgaaacgcttgcaagcaagaaaacatatatgtggcatgactggggatggtgtaaatgatgcaccagctttgaagaaggctgatattggtattgcagtagcagattctactgatgcagctcgtagtgcttctgacattgtcctaactgaacctggccttagtgtgattattagtgctgtgctgacgagtcgggcaattttccaaaggatgaagaattacacgatctatgctgtatcgattaccatccgtattgtgcttggttttatgcttcttgcgctgatatggaagtttgacttcccaccatttatggtcctgatcattgccatcctcaatgacggtaccattatgactatctcgaaggacagagtaaaaccatctccacaacccgacagttggaagttagctgagatttttgcaactggagtagttcttggtggttatttggccatgatgactgtcattttcttctgggctgcatacaagactgacttcttcccgcgactgttccacgtcgaaagcctcgagaagaccgcccaggatgactttcagaagctcgcctctgccgtgtaccttcaagtcagcacgatcagtcaggcccttatcttcgtgacgcggtcgcgcagctggtcgtttgtggagcgtcctgggttcttgctggtctttgctttcttggtggctcagctgattgccactctgatcgctgtatatgccaactgggcgttcgctgcgatcaagggcattggatggggttgggccggtgtcatctggctctacaacatcgtcttctacttcccgctggacatcatcaagttcctcatccgctatgcgctgagtgggagggcatggaacctcgtccttgagcagaggattgcgttcacgagcaagaagaattttggcacggaagaaagggagcgcaagtgggcgcatgcgcagaggactctccatgggctccagccgccagaggcatccatcttcgagaacaagacgacattcaatgagctgaaccagctcgcggaagaggcccgcaggagagccgagatggcgaggttgcgagaagtgagcaccctgaaggggaggatggagtcagtggtgaagcagaagggtctggacatcgagaccatccagcagtcctacaccgtgtgactggctgaccgacgacgacggggtttatagaggtttcttcttcttatactatacaatctgtactaggtagcaataaggatcaaggaaggaacccctatatattggctgtggttcgcgggaaatgaatgatggtcatatttatgatgtcggtgtggtgcttctgtcgccaactctcgaccatactaccctcaactcaccccttgtatgctgtggcattaaccacccccggcaccaccggcaggcattgatattgagagatgaggtatagtagtctgtagcctctagtagatgatgatgaattgatgatatagtacatttttgcttgcttgctttctttcttgtttgttgttttccttggttctgctctctgggtttttgatgcttgctggttttgtgctattcctgatt

SEQ ID NO: 207843 - DNA, 554 bp, Zea Mays
gttctatttcattgcatcattgctcgagtgcccaaatggtatcgagaggattattgggatagagactatagaaggcgaagccagagcagaagtagggagcgatatgaacaggccgggtacagagatggtgatcatcgtcgccataggactcacagtattagtcctgattatgacaggaaacgtaacagacacagggcacctcatgaaggaatacctagcaagcccagagatggccgcgctgcatgttctggaagcccttgaccctgagctgtggctgaatatcacacagcttctcctggacagcttgaggcatctaagcagttctcatcatttgtattttcttactaagatggcctttgttttagtccaggttgagtagactgagctttggcaaaaacaacaatgtctgcttggttactgaatctacatggtgacaatgatggaatattgtgtggcacagcattcaacttccagtactgcgttttgtaaacatctaagcctcatttgggaactatatgcatgatggatattgtcatttcttactataggtggtg

SEQ ID NO: 207844 - DNA, 2779 bp, Zea Mays
ctcacactcatcaagggcggctcactctcatgtcatgtggcggcgtccttctccctcgctgctccgtctctctcagtctctctcctgccctgtccgtcccactccccgtccagcggagagagaccctgtgggctgtggccgggcagccgtttcccctccccttccctctccgctccctccagagtctactgtagcgcagtgccgtagggtttcgcgtcctatccttcctcgcatcctccatggccgatcctgacgacctcggccgccgcctcgccgcggtcgccgtatccgagtctcctaccgccgccgcggctgcgctggagagcagcaacaacaacctgttccaggtgatgcgcgccgtggaggacgcggaggccaccatccgccagcagctggaggagaacagccggttgaaggacgagctgatgctcaagacgcgggagctccacagaattaggtcagaagccacagaccaagcttcctctcatgggatccgtatccatcaggatcgcgctcttggtgcccacacagacacctcctccactgctcccatcaggactaccgctacagcagcagaggccttcgaatggggagctggggatgccggcatcaaccacaagtaccttgaggccaaccaggctaatggaattccccgtaaatcaccgagcgctcccgatagcgctttcccatctcagctatctaccccgtcttcgcgatccctttcaccaactaggcaccacaaagaaacagactatgattctaggctcaacttatccggacaaggcgcactgcctgtttcagacctcaactcaaacgtcgtcatctggaagcaggatctccttgttaaggtcaaagaacaaggggaggagattgcacagctgagaaggcatctttctgactactctgtcaaggaggcccaaatacttaatgagaaacatgtcctggaaaaacgcattgcatatatgcgcatggcatttgatcagcagcagcaagatctggttgatgctgcatcgaaagctttgtcctacagacaggatattatcgaagaaaacatccgtcttacatatgcattgcaggcagcacatcaagagagatctacattcgtatcttctttattgcctcttctatcagaatataaccttcagcctcctgttcttgatgctcagtctattgttagcaatctgaaggttctgtttaagcatttgcaagaaaaacttattattactgaggagaagctgaaggaatcacaataccagattactccttggcatgctgaatcttcaaataatacaagtgctgctgcacagtcgccttctcatcctcctggaaatgcattgatcaaagccaaccttgacattgtgccccagcaagcatattctcatgtacattctccagtttcttctcctgttcaaactaggcgtgactgggatttgttagggaatgaaaatcgtcaggtcattcgaagtgaggttgccacaacaagtgcagagcatgataatgttgggaggacctctccttcaaccagcagccataatatgaaggatgcccctcaaagaaccgatcatgattcccgtgctgttcgatttaacattgaatccaaggatcaaaacccatcattcaaggaccttattaagagtgatgcctcagaaagtctggagggagctgaggcccaaattccacaagaactttctgcgcagcaggattctggaggctcacctaatttgacatctggtcttgatgacgcaaatccaccatacccttatcttcctactgtccttgaggagcctagttcttctttttccgaagttgcagaggatgatccgcttccagccatagaaggactgcgaatcacaggtgaagcctttcctggaagagaacttcaagcaagtgggtactctatccatggaaccacaagttgtaattttgagtgggtacgccatttggacgatggatcaataaattttatagaaggtgcacggcagcccacctatttagtatctgctgatgatgtggactttgtactagcgattgaagtccagcctctggatgacaaaaaaaggaagggcgagattgtgaaggtttatgctaatgatcaaagaaaaattacatgtgaccctgaaaccaaggagcatattaagaaaattctctctctggggcatgtctcttatgaagttctattacctgttagatttttagatatgtgggaaccagctattttggcaataaagagggaaggttacagcgttaagtgtaatggacagcgcggtgtcgttgtcatggagaaatttcagcaagcgatgaccatcaatatcccatttgggcgtcctactgagttttcaattttgtctgctgatggtgctgagtacaatttaaagcctgcagagaatgccccatcacgagatgccattgttctaatactaaggctattcaggatgaaggctgttgagaagagcaagggaaaaagaaagggcatcttcttcaagtagtttgtagttgtagcagtattactacgtagtgtcatggcaggttgactgtatctgttacctatgttttcgcggttcatgtatgtagaaggaaagagcaagttgtctgcgtgcttatgtaaagttccgattcaattcgattagattcaattggcaccgtacccagttttttgtttgtttttgttctgttgtagggagggatgaattcattttccaattaatgttggtttgtttggccagattgtagattcgtcgggtgctgccgtaaagcagaagcaattcagacgggttacccc

SEQ ID NO: 207845 - DNA, 2756 bp, Zea Mays
ctcactctcatgtcatgtggcggcgtccttctccctcgctgctccgtctctctcagtctctctcctgccctgtccgtcccactccccgtccagcggagagagaccctgtgggctgtggccgggcagccgtttcccctccccttccctctccgctccctccagagtctactgtagcgcagtgccgtagggtttcgcgtcctatccttcctcgcatcctccatggccgatcctgacgacctcggccgccgcctcgccgcggtcgccgtatccgagtctcctaccgccgccgcggctgcgctggagagcagcaacaacaacctgttccaggtgatgcgcgccgtggaggacgcggaggccaccatccgccagcagctggaggagaacagccggttgaaggacgagctgatgctcaagacgcgggagctccacagaattaggtcagaagccacagaccaagcttcctctcatgggatccgtatccatcaggatcgcgctcttggtgcccacacagacacctcctccactgctcccatcaggactaccgctacagcagcagaggccttcgaatggggagctggggatgccggcatcaaccacaagtaccttgaggccaaccaggctaatggaattccccgtaaatcaccgagcgctcccgatagcgctttcccatctcagctatctaccccgtcttcgcgatccctttcaccaactaggcaccacaaagaaacagactatgattctaggctcaacttatccggacaaggcgcactgcctgtttcagacctcaactcaaacgtcgtcatctggaagcaggatctccttgttaaggtcaaagaacaaggggaggagattgcacagctgagaaggcatctttctgactactctgtcaaggaggcccaaatacttaatgagaaacatgtcctggaaaaacgcattgcatatatgcgcatggcatttgatcagcagcagcaagatctggttgatgctgcatcgaaagctttgtcctacagacaggatattatcgaagaaaacatccgtcttacatatgcattgcaggcagcacatcaagagagatctacattcgtatcttctttattgcctcttctatcagaatataaccttcagcctcctgttcttgatgctcagtctattgttagcaatctgaaggttctgtttaagcatttgcaagaaaaacttattattactgaggagaagctgaaggaatcacaataccagattactccttggcatgctgaatcttcaaataatacaagtgctgctgcacagtcgccttctcatcctcctggaaatgcattgatcaaagccaaccttgacattgtgccccagcaagcatattctcatgtacattctccagtttcttctcctgttcaaactaggcgtgactgggatttgttagggaatgaaaatcgtcaggtcattcgaagtgaggttgccacaacaagtgcagagcatgataatgttgggaggacctctccttcaaccagccataatatgaaggatgcccctcaaagaaccgatcatgattcccgtgctgttcgatttaacattgaatccaaggatcaaaacccatcattcaaggaccttattaagagtgatgcctcagaaagtctggagggagctgaggcccaaattccacaagaactttctgcgcagcaggattctggaggctcacctaatttgacatctggtcttgatgacgcaaatccaccatacccttatcttcctactgtccttgaggagcctagttcttctttttccgaagttgcagaggatgatccgcttccagccatagaaggactgcgaatcacaggtgaagcctttcctggaagagaacttcaagcaagtgggtactctatccatggaaccacaagttgtaattttgagtgggtacgccatttggacgatggatcaataaattttatagaaggtgcacggcagcccacctatttagtatctgctgatgatgtggactttgtactagcgattgaagtccagcctctggatgacaaaaaaaggaagggcgagattgtgaaggtttatgctaatgatcaaagaaaaattacatgtgaccctgaaaccaaggagcatattaagaaaattctctctctggggcatgtctcttatgaagttctattacctgttagatttttagatatgtgggaaccagctattttggcaataaagagggaaggttacagcgttaagtgtaatggacagcgcggtgtcgttgtcatggagaaatttcagcaagcgatgaccatcaatatcccatttgggcgtcctactgagttttcaattttgtctgctgatggtgctgagtacaatttaaagcctgcagagaatgccccatcacgagatgccattgttctaatactaaggctattcaggatgaaggctgttgagaagagcaagggaaaaagaaagggcatcttcttcaagtagtttgtagttgtagcagtattactacgtagtgtcatggcaggttgactgtatctgttacctatgttttcgcggttcatgtatgtagaaggaaagagcaagttgtctgcgtgcttatgtaaagttccgattcaattcgattagattcaattggcaccgtacccagttttttgtttgtttttgttctgttgtagggagggatgaattcattttccaattaatgttggtttgtttggccagattgtagattcgtcgggtgctgccgtaaagcagaagcaattcagacgggttacccc

SEQ ID NO: 207846 - DNA, 2643 bp, Zea Mays
cttctccctcgctgctccgtctctctcagtctctctcctgccctgtccgtcccactccccgtccagcggagagagaccctgtgggctgtggccgggcagccgtttcccctccccttccctctccgctccctccagagtctactgtagcgcagtgccgtagggtttcgcgtcctatccttcctcgcatcctccatggccgatcctgacgacctcggccgccgcctcgccgcggtcgccgtatccgagtctcctaccgccgccgcggctgcgctggagagcagcaacaacaacctgttccaggtgatgcgcgccgtggaggacgcggaggccaccatccgccagcagctggaggagaacagccggttgaaggacgagctgatgctcaagacgcgggagctccacagaattaggtcagaagccacagaccaagcttcctctcatgggatccgtatccatcaggatcgcgctcttggtgcccacacagacacctcctccactgctcccatcaggactaccgctacagcagcagaggccttcgaatggggagctggggatgccggcatcaaccacaagtaccttgaggccaaccaggctaatggaattccccgtaaatcaccgagcgctcccgatagcgctttcccatctcagctatctaccccgtcttcgcgatccctttcaccaactaggcaccacaaagaaacagactatgattctaggctcaacttatccggacaaggcgcactgcctgtttcagacctcaactcaaacgtcgtcatctggaagcaggatctccttgttaaggtcaaagaacaaggggaggagattgcacagctgagaaggcatctttctgactactctgtcaaggaggcccaaatacttaatgagaaacatgtcctggaaaaacgcattgcatatatgcgcatggcatttgatcagcagcagcaagatctggttgatgctgcatcgaaagctttgtcctacagacaggatattatcgaagaaaacatccgtcttacatatgcattgcaggcagcacatcaagagagatctacattcgtatcttctttattgcctcttctatcagaatataaccttcagcctcctgttcttgatgctcagtctattgttagcaatctgaaggttctgtttaagcatttgcaagaaaaacttattattactgaggagaagctgaaggaatcacaataccagattactccttggcatgctgaatcttcaaataatacaagtgctgctgcacagtcgccttctcatcctcctggaaatgcattgatcaaagccaaccttgacattgtgccccagcaagcatattctcatgtacattctccagtttcttctcctgttcaaactaggcgtgactgggatttgttagggaatgaaaatcgtcaggtcattcgaagtgaggttgccacaacaagtgcagagcatgataatgttgggaggacctctccttcaaccagcagccataatatgaaggatgcccctcaaagaaccgatcatgattcccgtgctgttcgatttaacattgaatccaaggatcaaaacccatcattcaaggaccttattaagagtgatgcctcagaaagtctggagggagctgaggcccaaattccacaagaactttctgcgcagcaggattctggaggctcacctaatttgacatctggtcttgatgacgcaaatccaccatacccttatcttcctactgtccttgaggagcctagttcttctttttccgaagttgcagaggatgatccgcttccagccatagaaggactgcgaatcacaggtgaagcctttcctggaagagaacttcaagcaagtgggtactctatccatggaaccacaagttgtaattttgagtgggtacgccatttggacgatggatcaataaattttatagaaggtgcacggcagcccacctatttagtatctgctgatgatgtggactttgtactagcgattgaagtccagcctctggatgacaaaaaaaggaagggcgagattgtgaaggtttatgctaatgatcaaagaaaaattacatgtgaccctgaaaccaaggagcatattaagaaaattctctctctggggcatgtctcttatgaagttctattacctgttagatttttagatatgtgggaaccagctattttggcaataaagagggaaggttacagcgttaagtgtaatggacagcgcggtgtcgttgtcatggagaaatttcagcaagcgatgaccatcacgagatgccattgttctaatactaaggctattcaggatgaaggctgttgagaagagcaagggaaaaagaaagggcatcttcttcaagtagtttgtagttgtagcagtattactacgtagtgtcatggcaggttgactgtatctgttacctatgttttcgcggttcatgtatgtagaaggaaagagcaagttgtctgcgtgcttatgtaaagttccgattcaattcgattagattcaattggcaccgtacccagttttttgtttgtttttgttctgttgtagggagggatgaattcattttccaattaatgttggtttgtttggccagattgtagattcgtcgggtgctgccgtaaagcagaagcaattcagacgggttacccc

SEQ ID NO: 207847 - DNA, 2712 bp, Zea Mays
gtctctctcagtctctctcctgccctgtccgtcccactccccgtccagcggagagagaccctgtgggctgtggccgggcagccgtttcccctccccttccctctccgctccctccagagtctactgtagcgcagtgccgtagggtttcgcgtcctatccttcctcgcatcctccatggccgatcctgacgacctcggccgccgcctcgccgcggtcgccgtatccgagtctcctaccgccgccgcggctgcgctggagagcagcaacaacaacctgttccaggtgatgcgcgccgtggaggacgcggaggccaccatccgccagcagctggaggagaacagccggttgaaggacgagctgatgctcaagacgcgggagctccacagaattgtcagaagccacagaccaagcttcctctcatgggatccgtatccatcaggatcgcgctcttggtgcccacacagacacctcctccactgctcccatcaggactaccgctacagcagcagaggccttcgaatggggagctggggatgccggcatcaaccacaagtaccttgaggccaaccaggctaatggaattccccgtaaatcaccgagcgctcccgatagcgctttcccatctcagctatctaccccgtcttcgcgatccctttcaccaactaggcaccacaaagaaacagactatgattctaggctcaacttatccggacaaggcgcactgcctgtttcagacctcaactcaaacgtcgtcatctggaagcaggatctccttgttaaggtcaaagaacaaggggaggagattgcacagctgagaaggcatctttctgactactctgtcaaggaggcccaaatacttaatgagaaacatgtcctggaaaaacgcattgcatatatgcgcatggcatttgatcagcagcagcaagatctggttgatgctgcatcgaaagctttgtcctacagacaggatattatcgaagaaaacatccgtcttacatatgcattgcaggcagcacatcaagagagatctacattcgtatcttctttattgcctcttctatcagaatataaccttcagcctcctgttcttgatgctcagtctattgttagcaatctgaaggttctgtttaagcatttgcaagaaaaacttattattactgaggagaagctgaaggaatcacaataccagattactccttggcatgctgaatcttcaaataatacaagtgctgctgcacagtcgccttctcatcctcctggaaatgcattgatcaaagccaaccttgacattgtgccccagcaagcatattctcatgtacattctccagtttcttctcctgttcaaactaggcgtgactgggatttgttagggaatgaaaatcgtcaggtcattcgaagtgaggttgccacaacaagtgcagagcatgataatgttgggaggacctctccttcaaccagcagccataatatgaaggatgcccctcaaagaaccgatcatgattcccgtgctgttcgatttaacattgaatccaaggatcaaaacccatcattcaaggaccttattaagagtgatgcctcagaaagtctggagggagctgaggcccaaattccacaagaactttctgcgcagcaggattctggaggctcacctaatttgacatctggtcttgatgacgcaaatccaccatacccttatcttcctactgtccttgaggagcctagttcttctttttccgaagttgcagaggatgatccgcttccagccatagaaggactgcgaatcacaggtgaagcctttcctggaagagaacttcaagcaagtgggtactctatccatggaaccacaagttgtaattttgagtgggtacgccatttggacgatggatcaataaattttatagaaggtgcacggcagcccacctatttagtatctgctgatgatgtggactttgtactagcgattgaagtccagcctctggatgacaaaaaaaggaagggcgagattgtgaaggtttatgctaatgatcaaagaaaaattacatgtgaccctgaaaccaaggagcatattaagaaaattctctctctggggcatgtctcttatgaagttctattacctgttagatttttagatatgtgggaaccagctattttggcaataaagagggaaggttacagcgttaagtgtaatggacagcgcggtgtcgttgtcatggagaaatttcagcaagcgatgaccatcaatatcccatttgggcgtcctactgagttttcaattttgtctgctgatggtgctgagtacaatttaaagcctgcagagaatgccccatcacgagatgccattgttctaatactaaggctattcaggatgaaggctgttgagaagagcaagggaaaaagaaagggcatcttcttcaagtagtttgtagttgtagcagtattactacgtagtgtcatggcaggttgactgtatctgttacctatgttttcgcggttcatgtatgtagaaggaaagagcaagttgtctgcgtgcttatgtaaagttccgattcaattcgattagattcaattggcaccgtacccagttttttgtttgtttttgttctgttgtagggagggatgaattcattttccaattaatgttggtttgtttggccagattgtagattcgtcgggtgctgccgtaaagcagaagcaattcagacgggttacccc

SEQ ID NO: 207848 - DNA, 2603 bp, Zea Mays
gtctctctcagtctctctcctgccctgtccgtcccactccccgtccagcggagagagaccctgtgggctgtggccgggcagccgtttcccctccccttccctctccgctccctccagagtctactgtagcgcagtgccgtagggtttcgcgtcctatccttcctcgcatcctccatggccgatcctgacgacctcggccgccgcctcgccgcggtcgccgtatccgagtctcctaccgccgccgcggctgcgctggagagcagcaacaacaacctgttccaggtgatgcgcgccgtggaggacgcggaggccaccatccgccagcagctggaggagaacagccggttgaaggacgagctgatgctcaagacgcgggagctccacagaattaggtcagaagccacagaccaagcttcctctcatgggatccgtatccatcaggatcgcgctcttggtgcccacacagacacctcctccactgctcccatcaggactaccgctacagcagcagaggccttcgaatggggagctggggatgccggcatcaaccacaagtaccttgaggccaaccaggctaatggaattccccgtaaatcaccgagcgctcccgatagcgctttcccatctcagctatctaccccgtcttcgcgatccctttcaccaactaggcaccacaaagaaacagactatgattctaggctcaacttatccggacaaggcgcactgcctgtttcagacctcaactcaaacgtcgtcatctggaagcaggatctccttgttaaggtcaaagaacaaggggaggagattgcacagctgagaaggcatctttctgactactctgtcaaggaggcccaaatacttaatgagaaacatgtcctggaaaaacgcattgcatatatgcgcatggcatttgatcagcagcagcaagatctggttgatgctgcatcgaaagctttgtcctacagacaggatattatcgaagaaaacatccgtcttacatatgcattgcaggttctgtttaagcatttgcaagaaaaacttattattactgaggagaagctgaaggaatcacaataccagattactccttggcatgctgaatcttcaaataatacaagtgctgctgcacagtcgccttctcatcctcctggaaatgcattgatcaaagccaaccttgacattgtgccccagcaagcatattctcatgtacattctccagtttcttctcctgttcaaactaggcgtgactgggatttgttagggaatgaaaatcgtcaggtcattcgaagtgaggttgccacaacaagtgcagagcatgataatgttgggaggacctctccttcaaccagcagccataatatgaaggatgcccctcaaagaaccgatcatgattcccgtgctgttcgatttaacattgaatccaaggatcaaaacccatcattcaaggaccttattaagagtgatgcctcagaaagtctggagggagctgaggcccaaattccacaagaactttctgcgcagcaggattctggaggctcacctaatttgacatctggtcttgatgacgcaaatccaccatacccttatcttcctactgtccttgaggagcctagttcttctttttccgaagttgcagaggatgatccgcttccagccatagaaggactgcgaatcacaggtgaagcctttcctggaagagaacttcaagcaagtgggtactctatccatggaaccacaagttgtaattttgagtgggtacgccatttggacgatggatcaataaattttatagaaggtgcacggcagcccacctatttagtatctgctgatgatgtggactttgtactagcgattgaagtccagcctctggatgacaaaaaaaggaagggcgagattgtgaaggtttatgctaatgatcaaagaaaaattacatgtgaccctgaaaccaaggagcatattaagaaaattctctctctggggcatgtctcttatgaagttctattacctgttagatttttagatatgtgggaaccagctattttggcaataaagagggaaggttacagcgttaagtgtaatggacagcgcggtgtcgttgtcatggagaaatttcagcaagcgatgaccatcaatatcccatttgggcgtcctactgagttttcaattttgtctgctgatggtgctgagtacaatttaaagcctgcagagaatgccccatcacgagatgccattgttctaatactaaggctattcaggatgaaggctgttgagaagagcaagggaaaaagaaagggcatcttcttcaagtagtttgtagttgtagcagtattactacgtagtgtcatggcaggttgactgtatctgttacctatgttttcgcggttcatgtatgtagaaggaaagagcaagttgtctgcgtgcttatgtaaagttccgattcaattcgattagattcaattggcaccgtacccagttttttgtttgtttttgttctgttgtagggagggatgaattcattttccaattaatgttggtttgtttggccagattgtagattcgtcgggtgctgccgtaaagcagaagcaattcagacgggttacccc

SEQ ID NO: 207849 - DNA, 1651 bp, Zea Mays
tgattgctacagaagacgaattattaaaattatagtttcaaaacaatcaagtgacgaaagttctgtttaagcatttgcaagaaaaacttattattactgaggagaagctgaaggaatcacaataccagattactccttggcatgctgaatcttcaaataatacaagtgctgctgcacagtcgccttctcatcctcctggaaatgcattgatcaaagccaaccttgacattgtgccccagcaagcatattctcatgtacattctccagtttcttctcctgttcaaactaggcgtgactgggatttgttagggaatgaaaatcgtcaggtcattcgaagtgaggttgccacaacaagtgcagagcatgataatgttgggaggacctctccttcaaccagcagccataatatgaaggatgcccctcaaagaaccgatcatgattcccgtgctgttcgatttaacattgaatccaaggatcaaaacccatcattcaaggaccttattaagagtgatgcctcagaaagtctggagggagctgaggcccaaattccacaagaactttctgcgcagcaggattctggaggctcacctaatttgacatctggtcttgatgacgcaaatccaccatacccttatcttcctactgtccttgaggagcctagttcttctttttccgaagttgcagaggatgatccgcttccagccatagaaggactgcgaatcacaggtgaagcctttcctggaagagaacttcaagcaagtgggtactctatccatggaaccacaagttgtaattttgagtgggtacgccatttggacgatggatcaataaattttatagaaggtgcacggcagcccacctatttagtatctgctgatgatgtggactttgtactagcgattgaagtccagcctctggatgacaaaaaaaggaagggcgagattgtgaaggtttatgctaatgatcaaagaaaaattacatgtgaccctgaaaccaaggagcatattaagaaaattctctctctggggcatgtctcttatgaagttctattacctgttagatttttagatatgtgggaaccagctattttggcaataaagagggaaggttacagcgttaagtgtaatggacagcgcggtgtcgttgtcatggagaaatttcagcaagcgatgaccatcaatatcccatttgggcgtcctactgagttttcaattttgtctgctgatggtgctgagtacaatttaaagcctgcagagaatgccccatcacgagatgccattgttctaatactaaggctattcaggatgaaggctgttgagaagagcaagggaaaaagaaagggcatcttcttcaagtagtttgtagttgtagcagtattactacgtagtgtcatggcaggttgactgtatctgttacctatgttttcgcggttcatgtatgtagaaggaaagagcaagttgtctgcgtgcttatgtaaagttccgattcaattcgattagattcaattggcaccgtacccagttttttgtttgtttttgttctgttgtagggagggatgaattcattttccaattaatgttggtttgtttggccagattgtagattcgtcgggtgctgccgtaaagcagaagcaattcagacgggttacccc

SEQ ID NO: 207850 - DNA, 1426 bp, Zea Mays
caacggataacaaacgctcggcttgtcgccgtccgtcccctgccgccacccatcacctgctatcccgccgggatcgtacgccaattcgccaaaacgatggcggcggcggcggcggcgggcgcggcatcttccatcctctcgtccacgcccccgcgccgcctcaccttccctcccgcccacatccgcaaacccctcgccgcggccgcccccaaggccctcaacctgtcatcgcagaaactccccccgctctcttcatctgccacggcctcgccaccacctccgcccgacggggacgataagccggaccccatcaagctcgctttcgcccgcgctgccgcatacaagaaggggagggacagtcacagcccgagcccgagcccggcgccggccccgcctcccacgccgccgccacagtcttcaccaccgtcgcagccgcaggcttcggtcagtgagcccggcagtaaggaggcttttaagcgggcgttggagtaccgaaacggcaacggggccggagcgggcgcggctggtggtgactccccgctgctgggaggctcgccggattttgtatggcggtggaagaaatatacgccttggtggagagactcaaagtgcagaagaaaaggcagccaaagataagcgcaccaaagagctaatagctgcatataggaatcgacagaacatggtaatcgatgcaaagacaaaagcagagtgcatcaagttttcatctttgctttaatgcacatgtatttgttacgtatttgtaaaattgtcatatggaaggccttgagggaaggtgatgagatgatgaatactggaaggcttaaacaagcattaccttattatgaaaaagtgatggacgctgtggactttaagactgaatttcatggaagggctgctctgcaatggtccatctgtcttgattcactttgcaggtccaaggaagcaatgagcatgtatagcaaacttaaaaaccacccgaatagtgagatcagcaagaaagcaaacatgttcgtgttcagctttcaggcaatggatttcatgaaggtgagcagcattccagtgcccaaaagcacaggctacgagacgtacttcaccaaatttggcagcaagaagaattactacgcgagcttagaagagccggaggtgggaatcgagcagatcgtcccgtacatcatctttcttgtttcgccgatatttttagttgcttttgttgcactgagaaaatccttccaactatgaacagaaatcatggacgagttgctgaggttttaataccgtataggagcacatagcttggcaatagaagattattattatgatttttttgttttcatcaaaagagcaaattattttgtgtagctgagctagggactaatttttaatcccttttctttaggccctgttccaatcctataagataaatttt

SEQ ID NO: 207851 - DNA, 1288 bp, Zea Mays
cgagtcttccccgcgccgcgcgggcaacggataacaaacgctcggcttgtcgccgtccgtcccctgccgccacccatcacctgctatcccgccgggatcgtacgccaattcgccaaaacgatggcggcggcggcggcggcgggcgcggcatcttccatcctctcgtccacgcccccgcgccgcctcaccttccctcccgcccacatccgcaaacccctcgccgcggccgcccccaaggccctcaacctgtcatcgcagaaactccccccgctctcttcatctgccacggcctcgccaccacctccgcccgacggggacgataagccggaccccatcaagctcgctttcgcccgcgctgccgcatacaagaaggggagggacagtcacagcccgagcccgagcccggcgccggccccgcctcccacgccgccgccacagtcttcaccaccgtcgcagccgcaggcttcggtcagtgagcccggcagtaaggaggcttttaagcgggcgttggagtaccgaaacggcaacggggccggagcgggcgcggctggtggtgactccccgctgctgggaggctcgccggattttgtatggcggtggaagaaatatacgccttggtggagagactcaaagtgcagaagaaaaggcagccaaagataagcgcaccaaagagctaatagctgcatataggaatcgacagaacatggtaatcgatgcaaagacaaaagcagagtgcatcaaggccttgagggaaggtgatgagatgatgaatactggaaggcttaaacaagcattaccttattatgaaaaagtgatggacgctgtggactttaagactgaatttcatggaagggctgctctgcaatggtccatctgtcttgattcactttgcaggtccaaggaagcaatgagcatgtatagcaaacttaaaaaccacccgaatagtgagatcagcaagaaagcaaacatgttcgtgttcagctttcaggcaatggatttcatgaaggtgagcagcattccagtgcccaaaagcacaggctacgagacgtacttcaccaaatttggcagcaagaagaattactacgcgagcttagaagagccggagaaatcatggacgagttgctgaggttttaataccgtataggagcacatagcttggcaatagaagattattattatgatttttttgttttcatcaaaagagcaaattattttgtgtagctgagctagggactaatttttaatcccttttctttaggccctgttccaatcctataagataaatttt

SEQ ID NO: 207852 - DNA, 1756 bp, Zea Mays
aaaaaatcgtgcctcgagtcttccccgcgccgcgcgggcaacggataacaaacgctcggcttgtcgccgtccgtcccctgccgccacccatcacctgctatcccgccgggatcgtacgccaattcgccaaaacgatggcggcggcggcggcggcgggcgcggcatcttccatcctctcgtccacgcccccgcgccgcctcaccttccctcccgcccacatccgcaaacccctcgccgcggccgcccccaaggccctcaacctgtcatcgcagaaactccccccgctctcttcatctgccacggcctcgccaccacctccgcccgacggggacgataagccggaccccatcaagctcgctttcgcccgcgctgccgcatacaagaaggggagggacagtcacagcccgagcccgagcccggcgccggccccgcctcccacgccgccgccacagtcttcaccaccgtcgcagccgcaggcttcggtcagtgagcccggcagtaaggaggcttttaagcgggcgttggagtaccgaaacggcaacggggccggagcgggcgcggctggtggtgactccccgctgctgggaggctcgccggattttggtcagaatgccctaattagtgaagaagtctcgtttggcaagagaggagggtacgagtttgatgaggctgattttttgggtctcgacttctttgagaaaaaacgttctaaaggtctaccacctgggctggctccagcttttgagcctttacgagatgacgattttcctgaggtggacataatagttggagaccccagcaaatttgacaagtctcctcgccgaactgaaatccaaccggtagacaacggggagtcaggggaagcatctcaatcgactactaaaccaaatgaagctgacaaggctgggatagcacccccttcaactgttattgagactgaagaagatgaagatgtttatagacccacagttagatcatggggaatgtttccgaggccacaaaatatttcaaaggcgtatggcggtggaagaaatatacgccttggtggagagactcaaagtgcagaagaaaaggcagccaaagataagcgcaccaaagagctaatagctgcatataggaatcgacagaacatggtaatcgatgcaaagacaaaagcagagtgcatcaaggccttgagggaaggtgatgagatgatgaatactggaaggcttaaacaagcattaccttattatgaaaaagtgatggacgctgtggactttaaggtccaaggaagcaatgagcatgtatagcaaacttaaaaaccacccgaatagtgagatcagcaagaaagcaaacatgttcgtgttcagctttcaggcaatggatttcatgaaggtgagcagcattccagtgcccaaaagcacaggctacgagacgtacttcaccaaatttggcagcaagaagaattactacgcgagcttagaagagccggaggtgggaatcgagcagatcgtcccgtacatcatctttcttgtttcgccgatatttttagttgcttttgttgcactgagaaaatccttccaactatgaacagaaatcatggacgagttgctgaggttttaataccgtataggagcacatagcttggcaatagaagattattattatgatttttttgttttcatcaaaagagcaaattattttgtgtagctgagctagggactaatttttaatcccttttctttaggccctgttccaatcctataagataaatttt

SEQ ID NO: 207853 - DNA, 2593 bp, Zea Mays
atagccacgcgatccccacacccacacaaccgcacctcgcacccattgaccagacggcggcgctcatctcctcccccacggttctccccatcggcctgctggcttctccccggcttccccgatactgatcctcatcactcatgtctgctgaagttgctggaggacacccttatttcctctcgtgctacttctggttcatatactgcataaaattccgagattttacttgatacaagtggaacactcagagttttgtgcgaatacttcctaccatgtgaatcagttgtagctggtgaatttggcaagactcaatttctctcatctgagttcagaaacgtttgcttggtctcctgcttcccttgagtcttgccaaccatagttttctctcatctctttctgtgacttgaccaacatctcttttggtcctgtcagtctcgcaatactcccttccaaagacttgtctagaggttggattgccctgctctctgctggcactgcagcctgctgaagtctttacttgctgcattctgtgctcacttttgaaagctgctctcttctgctctgcgttgttgatttctgcactcaagcttctcttgcctgtgcactcaagcttctctcttcctgggcaactagtgatctccttgaagcatttcagcttttacctagagatctttctgttgttgaaggcaagagaggctttagggtgatggcgcaaactagcctgcctcctggttttcgtttccacccaaccgatgttgagctcgtttcctattacttgaagaggaagatcatgggaaagaaacatatcgtggatgctatagcagaggttgatctgtacaagtttcctccctgggatctatgtgacaagtcctctcttcgaagtaaagatcttgaatggttctttttttgtcctcgtgacaagaagtatcctaacgggtctaggacaaatcgtgccacaccaaatggttactggaagactagtggaaaggatagaataattatgcttaactcccgcaccgttgggatgaagaaaacattgatatttcatgaaggcaaggcccctaagggcgacagaactgattgggtgatgtatgaatacagaatggaagatgaggatttggtttctgctggtttctcaaaggatgcttatgtactctgcaaaattttcaagaaaagtggccttggtccaagaatcggagagcaatatggggctccatttaatgaagacgaatgggataatgcagaagtcgaaacttctctgtttcctttgacttgttcagaagtgaatccaacagagggacaacgtgctcagcctactgtcctggctggtgctcttctggaacccgaaccacctctacataattcatcttctacatgtgctggagaggaatcatcatttggtcatgccactgctgaggacttaacttttagccatagtgttgctagctctgctatccaagatacacctgctcggatgtcaggagacggtgtggtttctgtgaacaacatatccaatgtggccaatgacatgcgtagtcctcgtgactgtgatgaatttctatcggagttgtctagatttatgaatgattctcctctgcgtaacactcctcttggagagtgctctggtcttcctccgatgtctgaagctgaggctcatgcttttgaagtcaactcttttggcctctacaatgaattatcagagcttgttgggttaggatgcgcggataacaacttaaacaccagcaatgtggaaactacggattatctcatgttgccacctgacagagaactgtcggctaatgattacatggaactaaacgatctccttgctcctgacccaagcttccccagtgaattttctgctcaggacaatcaatatatgcagcatcctcttgctcagtacaatggacattatgatctgtcaggtccttcggagccaacaatgcctagcattttcgatgtttttcctcccaataatggagtcctcgcaacagatgatccagccaactacttggacccagccatgcagttccctttctcatgattggttaccatttgtcatggaggattgataagtagacctgctcgtcatagagttgcactcggccaaaagaaaggacatcaagtgccaccaccggtagagaagacggctgcatcgacgagcgcgccgcgtgacatgatggctttctcaagaaatataaaggccggaaggagaatttgagtgtccacctaaattctatgaatttagtagatgccttattttgtttttttgtctggtgatcgatatttagctacgaggggttgaatagggacgtagagagtaacctttttttttgtttaaagtgcggtctgggcctgccaccggttcgaatattatgggaatcaggaagtaagtaaatactccctccgtttctttttatttgtcgctggatagtgcaattttgcactatccagcgacaaataaaaagaaacggagggagtattggactgccaactgcttccgaaacttttacgtccatccttgaaattgaattacattctaataataataatttatatgtatatcaattaagctaattcgatttatgtaaaa

SEQ ID NO: 207854 - DNA, 1571 bp, Zea Mays
gcgtggggcgcgcgcgcgagcgagctgtgagcatcgccgttcctctcgcgctctcggctgtctcgctccttcccgcggtcgcctccgcccgtgcccgtgcccgtgccccgtcccaactcccacccaacatttcccaatccctccgggctccggcaccgcgagatgtttcgttagccattcccacgacacaatcagcaccaccggtgccctcgctgccaaggcgcccgctcgtgtgacgagtggcgctccaccaccgcccattgcgcgctcagctccgaggcctcccgctcgccgcggcatcatctccggctcctcccgccgccgtgttatgacctgccatcctgcaagcagggcgtcatgaaatgaacctgacttgcttgagttgcttcttgacaccataagaaggcgatccatctgtttccagttgcacacagaaagctagtgccttgaaagataagaatggtaaggggggcggtaggtgtcctaagatgaaactgcggttgcatctgttggtcctgtgcgtgatcatcatattcctggtgtacaacatggctagctttcaacataagcagacatcggtaacaaccagtatcccctggtttattgaaacagggttctgtgaacgtaaatatacctaaaagattaatctgatgtgattatgcaactttacagtcggaagcaaaatcccatccatttgatacagtgacggtctctgacagagatgctgttaagttgccccaaaaagctgaggttaggattggttatttaccccatggtatagtggagtctaactccgacatgaagttgaaaccgttgtggttgacaacaagtgcgcagtcaaagaagtctaaacaaaaagatcacttcttgattgctattgctgccggtataaatcaaaagaaaagtgtggacgctataatgaagaagtttcttccagaaaattttacagctgtattgttccattacgacgggaatgtcaatgggtggaatgatctaccatggagcaaaagtgtgatacatatagctgcttctaaccagactaaatggtggtttgcaaagaggttcctccatcctgctgttgtgtctatgtaccagtacatctttctttgggatgaagacctggaagtagataactttaatccgagaaggtacttaaatatagttagatcagaaggactggagatatcacaaccaggtcttgattctaagctttctgaaattcatcaccgaataactgttcgtaaaaatacagggacctttcatagaagagttagtcgggctaacaaacgttgtttaagagaaggaccgccttgttctggatgggtcgaaggcatggcaccggttttctcaaagtacgcttggcaatgtgtgtggcaccttatacagaatgatcttatacatggatggggcatcgattacaagtttgggtattgtgctcagggtgacaggacaaagaacatcggcgtagttgatagtgaatttatagttcaccgaggagtgcagacattaggaggttctacaataacaaagggcgcaaatatcagcgcaggaaggtttagtggatagaggag

SEQ ID NO: 207855 - DNA, 1778 bp, Zea Mays
gcgtggggcgcgcgcgcgagcgagctgtgagcatcgccgttcctctcgcgctctcggctgtctcgctccttcccgcggtcgcctccgcccgtgcccgtgcccgtgccccgtcccaactcccacccaacatttcccaatccctccgggctccggcaccgcgagatgtttcgttagccattcccacgacacaatcagcaccaccggtgccctcgctgccaaggcgcccgctcgtgtgacgagtggcgctccaccaccgcccattgcgcgctcagctccgaggcctcccgctcgccgcggcatcatctccggctcctcccgccgccgtggtctctgacagagatgctgttaagttgccccaaaaagctgaggttaggattggttatttaccccatggtatagtggagtctaactccgacatgaagttgaaaccgttgtggttgacaacaagtgcgcagtcaaagaagtctaaacaaaaagatcacttcttgattgctattgctgccggtataaatcaaaagaaaagtgtggacgctataatgaagaagtttcttccagaaaattttacagctgtattgttccattacgacgggaatgtcaatgggtggaatgatctaccatggagcaaaagtgtgatacatatagctgcttctaaccagactaaatggtggtttgcaaagaggttcctccatcctgctgttgtgtctatgtaccagtacatctttctttgggatgaagacctggaagtagataactttaatccgagaaggtacttaaatatagttagatcagaaggactggagatatcacaaccaggtcttgattctaagctttctgaaattcatcaccgaataactgttcgtaaaaatacagggacctttcatagaagagttagtcgggctaacaaacgttgtttaagagaaggaccgccttgttctggatgggtcgaaggcatggcaccggttttctcaaagtacgcttggcaatgtgtgtggcaccttatacagaatgatcttatacatggatggggcatcgattacaagtttgggtattgtgctcagggtgacaggacaaagaacatcggcgtagttgatagtgaatttatagttcaccgaggagtgcagacattaggaggttctacaataacaaaggatggtattcgtggcaaaaatgcccagtcactccgccagaaagcagctcaagtccaaaaatcgagagggagggatcctggccttgatatgcgaacaaagatccggagaaaatcacgatcggagcttcgtgatttccagaagcgctgggcccgggctgcaagggaagacagaacatgggttgatccgtttgcccactcccgaagaaagcggaggaatagaaacccacagtagataagcataatcatcattgtttaagcttgcacagaattcgtctgcacctaccatctagggtgtgtttgatatagctccagagcagaattctaaggaggagctagcaagagtctactaaacactcgtaactctagagttgcaaactccataaagttttcagagttgtagtacatatagttggagtacttcttttgctgctctgaaaacttaaaaaaacaacctagacgtggagtttggagttatttatccgccactgtcattggttatgagaaaataatttaaatctggagtagagctgcttcatccagagttttgaagtggaactgctctaaagtagaacagagttataccaaacatgcctttagtgtatataattgcatggttcgagtgggagttgtg

SEQ ID NO: 207856 - DNA, 2041 bp, Zea Mays
gcgtggggcgcgcgcgcgagcgagctgtgagcatcgccgttcctctcgcgctctcggctgtctcgctccttcccgcggtcgcctccgcccgtgcccgtgcccgtgccccgtcccaactcccacccaacatttcccaatccctccgggctccggcaccgcgagatgtttcgttagccattcccacgacacaatcagcaccaccggtgccctcgctgccaaggcgcccgctcgtgtgacgagtggcgctccaccaccgcccattgcgcgctcagctccgaggcctcccgctcgccgcggcatcatctccggctcctcccgccgccgtgggcgtcatgaaatgaacctgacttgcttgagttgcttcttgacaccataagaaggcgatccatctgtttccagttgcacacagaaagctagtgccttgaaagataagaatggtaaggggggcggtaggtgtcctaagatgaaactgcggttgcatctgttggtcctgtgcgtgatcatcatattcctggtgtacaacatggctagctttcaacataagcagacatcgtcggaagcaaaatcccatccatttgatacagtgacggtctctgacagagatgctgttaagttgccccaaaaagctgaggttaggattggttatttaccccatggtatagtggagtctaactccgacatgaagttgaaaccgttgtggttgacaacaagtgcgcagtcaaagaagtctaaacaaaaagatcacttcttgattgctattgctgccggtataaatcaaaagaaaagtgtggacgctataatgaagaagtttcttccagaaaattttacagctgtattgttccattacgacgggaatgtcaatgggtggaatgatctaccatggagcaaaagtgtgatacatatagctgcttctaaccagactaaatggtggtttgcaaagaggttcctccatcctgctgttgtgtctatgtaccagtacatctttctttgggatgaagacctggaagtagataactttaatccgagaaggtacttaaatatagttagatcagaaggactggagatatcacaaccaggtcttgattctaagctttctgaaattcatcaccgaataactgttcgtaaaaatacagggacctttcatagaagagttagtcgggctaacaaacgttgtttaagagaaggaccgccttgttctggatgggtcgaaggcatggcaccggttttctcaaagtacgcttggcaatgtgtgtggcaccttatacagaatgatcttatacatggatggggcatcgattacaagtttgggtattgtgctcagggtgacaggacaaagaacatcggcgtagttgatagtgaatttatagttcaccgaggagtgcagacattaggaggttctacaataacaaaggatggtattcgtggcaaaaatgcccagtcactccgccagaaagcagctcaagtccaaaaatcgagagggagggatcctggccttgatatgcgaacaaagatccggagaaaatcacgatcggagcttcgtgatttccagaagcgctgggcccgggctgcaagggaagacagaacatgggttgatccgtttgcccactcccgaagaaagcggaggaatagaaacccacagtagataagcataatcatcattgtttaagcttgcacagaattcgtctgcacctaccatctagggtgtgtttgatatagctccagagcagaattctaaggaggagctagcaagagtctactaaacactcgtaactctagagttgcaaactccataaagttttcagagttgtagtacatatagttggagtacttcttttgctgctctgaaaacttaaaaaaacaacctagacgtggagtttggagttatttatccgccactgtcattggttatgagaaaataatttaaatctggagtagagctgcttcatccagagttttgaagtggaactgctctaaagtagaacagagttataccaaacatgcctttagtgtatataattgcatggttcgagtgggagttgtg

SEQ ID NO: 207857 - DNA, 2734 bp, Zea Mays
attagctgaccgtgatggtgtgcttttgatgcccgctctaggtgctgattattttaccggttgattttactgttaatctgattactttttttcgccacagcttaatgcagagaagagcccgtttcaacgtacatatgctgcccagatcaaaaggtgtagtgaaatggctcgtaaattgaggttttttaaggagcagatgtcaaaagctgacataggtcctacacaactaaatgaaactcatctggattttgatgacttggagataaagcttggagaactggaagctgagctaactgaagtcaatgcaaacaatgaaaagttactgaggacctacaatgagctattagagtaccatactgttctccaaaagctcaaagaactgctgcatcacaacaaagggaattggaggcaaatcaatctggtcaaacttcactggagagccctctgttggaacaggagatgtcaactgatccatcaaaacaagtgaagcttggttcattgagtggccttgttccaaaggaaaaggcaatggctttcgaacggatcttattccgtgccacaaggggtaacattttccttaggcaggagcctgttgatgagcctgtcactgacccagtttctggggagaaggtaacgaagaatgcatttgttatattctactctggagagagggcaaaaaccaaaattctgaagatatgtgatgccttcaatgcgaaccgttacccattcccagaagatgttagcaaacaacttcatgctgttcaggaggtatctggaaagatctcagagttgaaggcaacaattgacatgggtttagctcatcgtgacagtatactaaaaaatattgcttctgattttgaacagtggaaccatctggtgaagaaggaaaaagcaatttatcacaccttgaacatgctgagcgttgatgttacgaagaaatgcctagttgctgagggctggagtccagtttttgcaagcattcagattcaagatgctcttcagcgtgctactgttaatagcaaatcccaagttggttcaatatttgaagttctcaacacaaaagaatctccaccaacatatttccagacaaataaatttacttcagcgttccaggaaattgttgatgcatatggtgtagccaaatatcaagaagcaaatcctggagtattcaccatcgtgactttcccttttctatttgccgtcatgtttggtgattggggccatgggatttgcttgttacttgcaacactttatctgataatacgggagaagaaactagcttcacagaaacttggagacataatggagatgatgtttggtgggcgttatgtaattatgatgatggcagttttttcaatctacacaggattaatatacaatgaatttttctctgttccatttgggctttttggtaaatctgcctatgcatgccgtgattcttcttgtagtgatgctactactgaaggactaattaaggtaagagatgcatacccttttggtgtggaccctgtttggcatggtagccgcagcgagctgccgtttctcaattcactgaagatgaagatgtccattcttcttggagttgcacaaatgaaccttgggattgtgatcagctacttcaatgcaaaattttttaggaacagtcttaatgtgtggtaccagttcattccccagctgatcttcttgaacagcttatttggttacctgtccttgcttattattattaagtggtgcacggggtcaaaagcagatctataccatgttatgatctacatgttccttagcccaacagatgagattggtgaaaaccagttgtttagtggccagaagacagtgcagcttgttctacttctgcttgctctggtgtctgtgccttggatgttgattccaaaacctcttctattgaagaagcaacatcagcaaaggcatcaaggtcaccagtacgcaatgcttcagggcgttgatgaatcagtgggagcagagctgggggaacatcatgaggaagcacatgaccatgaggagtttgagttcagcgaagtttttgttcaccagctgattcacacgatcgaatttgttcttggtgcagtctcaaacacagcttcgtaccttcgcctttgggctctgagtcttgcacactccgagttgtccactgtattctacgataaagtactactcatggcatgggggtttaacaatgtcatcatccttattattggcatcatcgtcttcatatttgccacggttggtgtcctgcttgttatggagaccctgagtgcattccttcacgcactgaggcttcactgggtggagttccagaacaagttctatgaaggtgatggttacaagttcgccccattctcctttgcgctgattcgtgaggaagaagattgagatcgtcccatgtagccgatgtacaatctttgatggcctttgttcccggaacaaatcattttttcatctgttgtctcggatggatcataaacctcagtcccctttgtttagacatgggacgaacagcaccatttttccttgtttagctatgcagaggatttttgggtcggttggcggcaaacatggggggtgatatcaccattgtatgatgctaataagtagttgccgattgggcggtgtgttggatataaataagcactgtattgaaggttaaacattccgctacgttcgttgtcaataaagagtgctatttacgctgctggcgttagtcatttcctggtct

SEQ ID NO: 207858 - DNA, 2848 bp, Zea Mays
attagctgaccgtgatggtgtgcttttgatgcccgctctaggtgctgattattttaccggttgattttactgttaatctgattactttttttcgccacagcttaatgcagagaagagcccgtttcaacgtacatatgctgcccagatcaaaaggtgtagtgaaatggctcgtaaattgaggttttttaaggagcagatgtcaaaagctgacataggtcctacacaactaaatgaaactcatctggattttgatgacttggagataaagcttggagaactggaagctgagctaactgaagtcaatgcaaacaatgaaaagttactgaggacctacaatgagctattagagtaccatactgttctccaaaaggctggtgattttttctattcagctcaaagaactgctgcatcacaacaaagggaattggaggcaaatcaatctggtcaaacttcactggagagccctctgttggaacaggagatgtcaactgatccatcaaaacaagtgaagcttggttcattgagtggccttgttccaaaggaaaaggcaatggctttcgaacggatcttattccgtgccacaaggggtaacattttccttaggcaggagcctgttgatgagcctgtcactgacccagtttctggggagaaggtaacgaagaatgcatttgttatattctactctggagagagggcaaaaaccaaaattctgaagatatgtgatgccttcaatgcgaaccgttacccattcccagaagatgttagcaaacaacttcatgctgttcaggaggtatctggaaagatctcagagttgaaggcaacaattgacatgggtttagctcatcgtgacagtatactaaaaaatattgcttctgattttgaacagtggaaccatctggtgaagaaggaaaaagcaatttatcacaccttgaacatgctgagcgttgatgttacgaagaaatgcctagttgctgagggctggagtccagtttttgcaagcattcagattcaagatgctcttcagcgtgctactgttaatagcaaatcccaagttggttcaatatttgaagttctcaacacaaaagaatctccaccaacatatttccagacaaataaatttacttcagcgttccaggaaattgttgatgcatatgggtatgtagccaaatatcaagaagcaaatcctggagtattcaccatcgtgactttcccttttctatttgccgtcatgtttggtgattggggccatgggatttgcttgttacttgcaacactttatctgataatacgggagaagaaactagcttcacagaaacttggagacataatggagatgatgtttggtgggcgttatgtaattatgatgatggcagttttttcaatctacacaggattaatatacaatgaatttttctctgttccatttgggctttttggtaaatctgcctatgcatgccgtgattcttcttgtaggtaaggaaaatgaaataaataaacctatgcttatttatttatagaactgcacatttatctggctcattaatttccccacttgttcatagtgatgctactactgaaggactaattaaggtaagagatgcatacccttttggtgtggaccctgtttggcatggtagccgcagcgagctgccgtttctcaattcactgaagatgaagatgtccattcttcttggagttgcacaaatgaaccttgggattgtgatcagctacttcaatgcaaaattttttaggaacagtcttaatgtgtggtaccagttcattccccagctgatcttcttgaacagcttatttggttacctgtccttgcttattattattaagtggtgcacggggtcaaaagcagatctataccatgttatgatctacatgttccttagcccaacagatgagattggtgaaaaccagttgtttagtggccagaagacagtgcagcttgttctacttctgcttgctctggtgtctgtgccttggatgttgattccaaaacctcttctattgaagaagcaacatcagcaaaggcatcaaggtcaccagtacgcaatgcttcagggcgttgatgaatcagtgggagcagagctgggggaacatcatgaggaagcacatgaccatgaggagtttgagttcagcgaagtttttgttcaccagctgattcacacgatcgaatttgttcttggtgcagtctcaaacacagcttcgtaccttcgcctttgggctctgagtcttgcacactccgagttgtccactgtattctacgataaagtactactcatggcatgggggtttaacaatgtcatcatccttattattggcatcatcgtcttcatatttgccacggttggtgtcctgcttgttatggagaccctgagtgcattccttcacgcactgaggcttcactgggtggagttccagaacaagttctatgaaggtgatggttacaagttcgccccattctcctttgcgctgattcgtgaggaagaagattgagatcgtcccatgtagccgatgtacaatctttgatggcctttgttcccggaacaaatcattttttcatctgttgtctcggatggatcataaacctcagtcccctttgtttagacatgggacgaacagcaccatttttccttgtttagctatgcagaggatttttgggtcggttggcggcaaacatggggggtgatatcaccattgtatgatgctaataagtagttgccgattgggcggtgtgttggatataaataagcactgtattgaaggttaaacattccgctacgttcgttgtcaataaagagtgctatttacgctgctggcgttagtcatttcctggtct

SEQ ID NO: 207859 - DNA, 2756 bp, Zea Mays
attagctgaccgtgatggtgtgcttttgatgcccgctctaggtgctgattattttaccggttgattttactgttaatctgattactttttttcgccacagcttaatgcagagaagagcccgtttcaacgtacatatgctgcccagatcaaaaggtgtagtgaaatggctcgtaaattgaggttttttaaggagcagatgtcaaaagctgacataggtcctacacaactaaatgaaactcatctggattttgatgacttggagataaagcttggagaactggaagctgagctaactgaagtcaatgcaaacaatgaaaagttactgaggacctacaatgagctattagagtaccatactgttctccaaaaggctggtgattttttctattcagctcaaagaactgctgcatcacaacaaagggaattggaggcaaatcaatctggtcaaacttcactggagagccctctgttggaacaggagatgtcaactgatccatcaaaacaagtgaagcttggttcattgagtggccttgttccaaaggaaaaggcaatggctttcgaacggatcttattccgtgccacaaggggtaacattttccttaggcaggagcctgttgatgagcctgtcactgacccagtttctggggagaaggtaacgaagaatgcatttgttatattctactctggagagagggcaaaaaccaaaattctgaagatatgtgatgccttcaatgcgaaccgttacccattcccagaagatgttagcaaacaacttcatgctgttcaggaggtatctggaaagatctcagagttgaaggcaacaattgacatgggtttagctcatcgtgacagtatactaaaaaatattgcttctgattttgaacagtggaaccatctggtgaagaaggaaaaagcaatttatcacaccttgaacatgctgagcgttgatgttacgaagaaatgcctagttgctgagggctggagtccagtttttgcaagcattcagattcaagatgctcttcagcgtgctactgttaatagcaaatcccaagttggttcaatatttgaagttctcaacacaaaagaatctccaccaacatatttccagacaaataaatttacttcagcgttccaggaaattgttgatgcatatggtgtagccaaatatcaagaagcaaatcctggagtattcaccatcgtgactttcccttttctatttgccgtcatgtttggtgattggggccatgggatttgcttgttacttgcaacactttatctgataatacgggagaagaaactagcttcacagaaacttggagacataatggagatgatgtttggtgggcgttatgtaattatgatgatggcagttttttcaatctacacaggattaatatacaatgaatttttctctgttccatttgggctttttggtaaatctgcctatgcatgccgtgattcttcttgtagtgatgctactactgaaggactaattaaggtaagagatgcatacccttttggtgtggaccctgtttggcatggtagccgcagcgagctgccgtttctcaattcactgaagatgaagatgtccattcttcttggagttgcacaaatgaaccttgggattgtgatcagctacttcaatgcaaaattttttaggaacagtcttaatgtgtggtaccagttcattccccagctgatcttcttgaacagcttatttggttacctgtccttgcttattattattaagtggtgcacggggtcaaaagcagatctataccatgttatgatctacatgttccttagcccaacagatgagattggtgaaaaccagttgtttagtggccagaagacagtgcagcttgttctacttctgcttgctctggtgtctgtgccttggatgttgattccaaaacctcttctattgaagaagcaacatcagcaaaggcatcaaggtcaccagtacgcaatgcttcagggcgttgatgaatcagtgggagcagagctgggggaacatcatgaggaagcacatgaccatgaggagtttgagttcagcgaagtttttgttcaccagctgattcacacgatcgaatttgttcttggtgcagtctcaaacacagcttcgtaccttcgcctttgggctctgagtcttgcacactccgagttgtccactgtattctacgataaagtactactcatggcatgggggtttaacaatgtcatcatccttattattggcatcatcgtcttcatatttgccacggttggtgtcctgcttgttatggagaccctgagtgcattccttcacgcactgaggcttcactgggtggagttccagaacaagttctatgaaggtgatggttacaagttcgccccattctcctttgcgctgattcgtgaggaagaagattgagatcgtcccatgtagccgatgtacaatctttgatggcctttgttcccggaacaaatcattttttcatctgttgtctcggatggatcataaacctcagtcccctttgtttagacatgggacgaacagcaccatttttccttgtttagctatgcagaggatttttgggtcggttggcggcaaacatggggggtgatatcaccattgtatgatgctaataagtagttgccgattgggcggtgtgttggatataaataagcactgtattgaaggttaaacattccgctacgttcgttgtcaataaagagtgctatttacgctgctggcgttagtcatttcctggtct

SEQ ID NO: 207860 - DNA, 1803 bp, Zea Mays
attagctgaccgtgatggtgtgcttttgatgcccgctctaggtgctgattattttaccggttgattttactgttaatctgattactttttttcgccacagcttaatgcagagaagagcccgtttcaacgtacatatgctgcccagatcaaaaggtgtagtgaaatggctcgtaaattgaggttttttaaggagcagatgtcaaaagctgacataggtcctacacaactaaatgaaactcatctggattttgatgacttggagataaagcttggagaactggaagctgagctaactgaagtcaatgcaaacaatgaaaagttactgaggacctacaatgagctattagagtaccatactgttctccaaaaggctggtgattttttctattcagctcaaagaactgctgcatcacaacaaagggaattggaggcaaatcaatctggtcaaacttcactggagagccctctgttggaacaggagatgtcaactgatccatcaaaacaagtgaagcttggttcattgagtggccttgttccaaaggaaaaggcaatggctttcgaacggatcttattccgtgccacaaggggtaacattttccttaggcaggagcctgttgatgagcctgtcactgacccagtttctggggagaaggtaacgaagaatgcatttgttatattctactctggagagagggcaaaaaccaaaattctgaagatatgtgatgccttcaatgcgaaccgttacccattcccagaagatgttagcaaacaacttcatgctgttcaggaggtatctggaaagatctcagagttgaaggcaacaattgacatgggtttagctcatcgtgacagtatactaaaaaatattgcttctgattttgaacagtggaaccatctggtgaagaaggaaaaagcaatttatcacaccttgaacatgctgagcgttgatgttacgaagaaatgcctagttgctgagggctggagtccagtttttgcaagcattcagattcaagatgctcttcagcgtgctactgttaatagcaaatcccaagttggttcaatatttgaagttctcaacacaaaagaatctccaccaacatatttccagacaaataaatttacttcagcgttccaggaaattgttgatgcatatggtgtagccaaatatcaagaagcaaatcctggagtattcaccatcgtgactttcccttttctatttgccgtcatgtttggtgattggggccatgggatttgcttgttacttgcaacactttatctgataatacgggagaagaaactagcttcacagaaacttggagacataatggagatgatgtttggtgggcgttatgtaattatgatgatggcagttttttcaatctacacaggattaatatacaatgaatttttctctgttccatttgggctttttggtaaatctgcctatgcatgccgtgattcttcttgtaggtaaggaaaatgaaataaataaacctatgcttatttatttatagaactgcacatttatctggctcattaatttccccacttgttcatagtgatgctactactgaaggactaattaaggtaagagatgcatacccttttggtgtggaccctgtttggcatggtagccgcagcgagctgccgtttctcaattcactgaagatgaagatgtccattcttcttggagttgcacaaatgaaccttgggattgtgatcagctacttcaatgcaaaattttttaggaacagtcttaatgtgtgacaacagattatgatttttccacgcttactcctttga

SEQ ID NO: 207861 - DNA, 679 bp, Zea Mays
agggggggccttacatggagaaaagagtaccccaatccacccgcaatgaaactcggatcgaggcaatgatgttatcagaccccaaagattgcacgctctgcaagggtagagaaataattattggggagcatgttacaaacatgatgcaaattttctccttaaagttggctaagattgatgtggatggtggccccatagagttgtatggatatatcgctacgcgggatgttctcgagccattgcttaactatattgtcaatgttagcaggaatgatcctatcaccatcgagcagggttccctcatagaaatgactggccctaagcgaggcattgagttgtgtggcgaaattatgcttgaatttgacatgaggattaagaggggcggagaagagaaagacgacccacagctgattgatggtgtagcaatcgtactagacgagatgagcatgcctaggagtacttatgcattcacaaaacggatccacggcgattgtggagcggttgacataacggtatcacgccttgactttgcagttgaggcgacgatacaacttcacggcattcttatagcagtgatgacaatccggaacattggtgtagcttcaaaacgaccagtcatggatggacctgccaacaggttacagtacactgcaaagtggcagccgacatctgaggtcaa

SEQ ID NO: 207862 - DNA, 853 bp, Zea Mays
cacccgcaatgaaactcggatcgaggcaatgatgttatcagaccccaaagattgcacgctctgcaagggtagagaaataattattggggagcatgttacaaacatgatgcaaattttctccttaaagttggctaagattgatgtggatggtggccccatagagttgtatggatatatcgctacgcgggatgttctcgagccattgcttaactatattgtcaatgttagcaggaatgatcctatcaccatcgagcagggttccctcatagaaatgactggccctaagcgaggcattgagttgtgtggcgaaattatgcttgaatttgacatgaggattaagaggggcggagaagagaaagacgacccacagctgattgatggtgtagcaatcgtactagacgagatgagcatgcctaggagtacttatgcattcacaaaacggatccacggcgattgtggagcggttgacataacggtatcacgccttgactttgcagttgaggcgacgatacaacttcacgtatctgaagtagagggcagcttcagtttgcgtgcgggctgttttaccagtgggttatgtgaagaaatccagatctttaagggcaccattagtgagccgcgtgccttgaggagatgtgttgttgctgcagtacatgatacttggatggatgtgaagttgaaggttgacgactcagggcattcttatagcagtgatgacaatccggaacattggtgtagcttcaaaacgaccagtcatggatggacctgccaacagagctgctcatgagcgtcttcctgcggaatctgaaccagaacctggaaatgtttttttacgaactatttcatacgtagc

SEQ ID NO: 207863 - DNA, 1348 bp, Zea Mays
cagaaatcaccttttctcttttaaggcatgcgacctaatgcatcagctgcatttcgtaactttgaacaagaagcaagacaatctgctgtttgggactctgaccagaatgctacatctagttctggtgataatcttgcttctttataccgtccacctttttctttgatgttcaacggaccctttgacaaggcaaagttagaggcttcttccctggacaaatggctattaatcaatttgcagtcgacagcggaatttagctctcacatgcttaatcgagacacttggggaaatgatgcggtggctcagttgattcggtcaaattttattttctggcaggtttattatgacaccagtgaggggaggaaggtatgcacctactaccatttggtgtccatgcctgctattctcctaattgaccccgtcactgggcaaaaaatgcatgcttggaatggaatggttcacccagatcgtttacttgaggtccgaaggagcaccatgcagctcaacctcaaaagcgcccaaggaaagttgatccggaagcttctacgggcaagcaaggcaaaatagctgtagaggatgaagatgaagagctagcacgggcagtagcagcttctctagaggagagtaaagaagtcattgaagcatcagacgccagtgatgacatggttgaagctgaacccgaggaggaaaatgagcccaccctaaacaccaagcctgattaccctcctctccctgaagaacctacaggaagcagggaccttctctgcagggttgcgattcggctaccgaacaaccggaggatccaaagaaacttccttcacacagatcctatcaagctcttgtggtcattctgcgctcctcaggtcgaggacggggagaggagggctttccacttcgtccaggcaattcctggggcatcccagaaactggagttgggaagcgacctaacattcaaggaagccgggctggccaactcgatgatcaacctcttgttggactgagccgcccgctctctcaacctgcactttgagatgagacgccgtcggccggtcgaggggtttgtatttcaggatgggcttgaagatgatggtgcgcttgggtatcttctttccttgaggattaactcttatcttttgctccactggagctaggagtccgaggacaaaccaaaaaaaaaagtctggtgtgccctgagctgtttgtgtgtggaaatggtccttttgtcgttcgttcttgtgtccgtatacatcctgtccccggtagggcttaactctatttaatgcacatatctatgaaagattcagtctggagcttgctttgatgctcccctctgggctctggtcgtgtc

SEQ ID NO: 207864 - DNA, 1963 bp, Zea Mays
ctttatggtctgattagagaaggtgacatcgatctcattgctgaaacgcgggcaaaagaagtctctgagtttcttgaaatgctagatacttcgagggacggacgatcttccaaggtccatgggctgccacagaaggagtggaaggtgaagcaagatacagaccaattaagagtgatgtaccgtgagggtccagaggggacaccatttcataccttacttgctgaaggctttgcagatggacctattgacgtttgtacatgtgtgtcatgggaatcaactttatacaaaaaatggtttccacaatacaacctgccaacttttagaattgatcagtcaggctgcttgaaaaaagtgcggattggtgaagagatttgtatggtcagttatcagacttggatgccatagatgttcgaacccatggatttagtagggatggaattcctgaagctggtgacacagttcggatagatgtgtttggaggctttgtattgcaacggattacaaaagaaagaagctttttcagggcaatagctaatatggatatcaagctagattttgttccaccatggttgatcaacttcatgtcaaggcaactaataggcagcgggcataagctgtatcaaaaggcagtcagcaccgtggccagtcatgatgatgactacaggaaagctttgagaggaccgctctacgtcaggatccgtgagtaccaggattctgatgacaaggcgaaggtggcagcaacagaggaaaatgctaccgaggcgccccctgataatgccactacacaaaatcgtttgtcactaacaaataccgtatcgaatagcgagattgtggaggagtccgaacagaacacatccgtcactgtggatagtcttccaactagccaacaaccctatgtgccagttgagcaagcatggcaggtcggaaacaggccatacaccagtcctgaggtggagcgtgcgctgtgcatattagacacttctattgcacttctcagaggcgatgataaggctggaaatgtcaccacgctacaaaatctgctcagttacgatgcatctttggaagcgagtactgctgctggttccgtaacttgtcaaacaaacgttcttaacgcagacagtcttccgaatggccatcctgttgccgcagcgccacaagactccagagagaaagctagcgatagtgccgcagaggaagaagacgccggcgacgaaaactctctgaaaaatccgacagcttccactgtgacgaagagtgtgtcgatgacattgcgaagtgcaataagggtgcacggtgaagagagcctggacactgatggcttcttccatcagaacggtttcagcaacagcaaggagtcaaggcgagcgaggaagtctaagaagagatggccctgctgcttaatccctaccactatgggatgatgtgggcccatcgtaggacctcgttcgttcaagttaagttgctgattttttgagtgtactattaacaaacagtaaactacagaaatttagcgcttcgtcagttacacgatgtgggttcagacggtatgttatagcgcgtagataatgtcttggtaaatgtaaagtagaatcgttgtaaacaacacgtaattcttctcacgagagctctgatttgggggtatatgggtaaagtatatgggtaaagtacatatactattattttcacgcatggtggttatgctcagcagagcatgtaaacgtataaaccactgttttatattatagactacactattataaactcgagcttgaaatagtgagtgtgatagagagttggatgggtagtttgccggagacagcctagcctaagattggatccttccggttggagaaggaattacattggggcattcagtgaactctaggagatgtgcatcataattcttctcacgagtttgtggcgtttgtttgttatggacagtagtctgcatggcgaaaaagtc

SEQ ID NO: 207865 - DNA, 991 bp, Zea Mays
gaacgcataccgcatgtcctctctcctgtgttgctcgcctccccaactccccgtcgcgctttctcctagtgaggctactgggtgaccgccgcctctgccgccctacgccaggttccagaaatcatagctgctttgggtatggaggcgctgtttgggagcaataaccatggcggccacaaggccgctgatttggcctcgcttataattacccaggttgccttggaggtgccaaggttacttgggctccttgccatgattctgcataatgaaatctttacatctggtggagaccagaatttgattactaggattctgggcaaaagcgaagatgaaactaatcctgagaacaaagatgatggagagtccgatgatgataatgatgatgaaggagacgatgatgatgctgaaaacgaggaggaagatgatggtggtgatgagggatcagatgacaatgagaatgaggaagatgacgatggagatgatgatgatcctgcagccaatggcgaagggggaagcgatgacgacgaagatgatggtggagaggatgaagaggatgatgacgacgacgacgatgatggggacgatggcaatgaggaagaggaggaagaatctgaagaggatgatgatgatgatgaagtcccccaaccacctactaaaaagaggaaatgatcaacggctgcgacgagtggttgcttacacgcaggaatgctgcctgttcgtccctgcgcagcagtttactgtttagtgggtagagttttttagcttggtcgtggacaattcatagcctagtttggaaacaaaaaagaaacatttaattgtgcatgtactattaaaccattcctttaatcatgtatctcagattgctatcatggtttctaaattgtgtttgcctaagttttgtattgcaatttaacaatgttcttgtgcaacctgatggtcgtggtacgttatgcctggttgcaaggatagatcagaatttctggatgaatct

SEQ ID NO: 207866 - DNA, 1709 bp, Zea Mays
ctgagaatgagatcttcttgtcgcttccgcccgttgtttcagcttttcttcggttcgaattcagtagtttctcgtccggcggattctccccagctaagctgcgagcgatgcttcgcgggctagagaaacaccagcgcaacagcggcgaggacacgtcgccggaggccaacgactccggcgagctcgacgaccggaggagcttggaatgctccacctccaccgagatgtcgagcaacagcggccacaggtcaaggaaccgggccccggacgacgacagcttcgactcggagagcagctcgtcggggccgcccacggtgaagaggtcggccgcggtggccgctttgctgccgcccttctctcgcccaacgccgtccaagtgggacgacgccgagaagtggatttccagccccacgtccaaccgtactggccgtgccgggcctaccgctggaactatgccaaagaagtccgcattggcatttcctgaacatggagcccgccagccagccgttgctaaggtggtcacggatgtgcctactatcgctggaccattggttaagaattcagatggtcttgcccatcctgatttgcttaaacttgcacacgatgcttcaatagttgatggaccagctcctgcagttaggtctgtctctatgagagacatggggaccgagatgactccaattgccagccaggagccttctcggaccgcgactcctatgattgcatccagtccaacctcctctcggacaccaactcctcaacgcaccacagaattcagtgtgagcaatatagattctaacaagatggcgatgtctgaagaggaggtccatataagtacaagacaggaaattatggatcttggcgaaaggttaggcaagactactatagctgcatgggcaagcaaggaggagaaagctgctgcacgttctacggatactgcagccgataatgctgttgatgtcaacagggagaatcgagcggcagattggcaggaggcagagaaggcaaagtatcttgcaaggtttcatagggaggaggcaaagatccaagcttgggaaaatctccagaaagcgaaaattgaagctgaaatgaaaaggatagaggccaagatcgagcggaaacgggcgcgcgagcaagacaggctcgccagcaaactggcagcggtgagccaccgagcggaggcgaagagggaggccgcggaggcgaggcgggaccaggaagccgcgagaacggaggagcaggcggctcagatccgagaaaccgggcacacgccttcctctttctcatgctggtgctggtgcctgtgactctgattccttcactgcatgaccagcacagcacgtcacccgactgtaacatagcatgacccgtgagactgtgatctccggccatggtagaaaaatttgctcactgtacgacttgtgtagtgccttggtctaatggtgtccagttttttggtacctcgcgattaatatgggctgttaggccggttgggctgtggacggtagataaggcccgtagaggatttttggagatgggctcggatcgtcagctcggcctaggaattggatcgcaggcaaatcccaacggctcctgtcgttccttcccatgaacaggaggaaaaccttctggttcttttttttcttcagaaaggaggatcccccatttcattatgaaataggaaaccagttgcagacgacttacatcat

SEQ ID NO: 207867 - DNA, 1365 bp, Zea Mays
aacagacgcagaattcttgcgtctcgctcggtcgctagcgcgcaatctgccgccgccgctaaatcgcattaaattaattaacaaatcccaccgccacaaatctacaactacaagacccacacacccgtcggtaaatgcaaagatcgcaagtccacggcccaccccccaaatcggccaatctccacttcttaagcctccctgttgcctcgcacggcctccgcctcctcgtcgtccggcctcccgcgccaccaccggggcctcgccgccacgaatggagtacgagcgcatccacgagccgctcccgcgccgtcagtccggcggattctccccagctaagctgcgagcgatgcttcgcgggctagagaaacaccagcgcaacagcggcgaggacacgtcgccggaggccaacgactccggcgagctcgacgaccggaggagcttggaatgctccacctccaccgagatgtcgagcaacagcggccacaggtcaaggaaccgggccccggacgacgacagcttcgactcggagagcagctcgtcggggccgcccacggtgaagaggtcggccgcggtggccgctttgctgccgcccttctctcgcccaacgccgtccaagtgggacgacgccgagaagtggatttccagccccacgtccaaccgtactggccgtgccgggcctaccgctggaactatgccaaagaagtccgcattggcatttcctgaacatggagcccgccagccagccgttgctaaggtggtcacggatgtgcctactatcgctggaccattggttaagaattcagatggtcttgcccatcctgatttgcttaaacttgcacacgatgcttcaatagttgatggaccagctcctgcagttaggtctgtctctatgagagacatggggaccgagatgactccaattgccagccaggagccttctcggaccgcgactcctatgattgcatccagtccaacctcctctcggacaccaactcctcaacgcaccacagaattcagtgtgagcaatatagattctaacaagatggcgatgtctgaagaggaggtccatataagtacaagacaggaaattatggatcttggcgaaaggttaggcaagactactatagctgcatgggcaagcaaggaggagaaagctgctgcacgttctacggatactgcagccgataatgctgttgatgtcaacagggagaatcgagcggcagattggcaggaggcagagaaggcaaagtatcttgcaaggtttcatagggaggaggcaaagatccaagcttgggaaaatctccagaaagcgaaaattgaagctgaaatgaaaaggatagagggttgatccggatcgtccgttac

SEQ ID NO: 207868 - DNA, 1024 bp, Zea Mays
ctccaattccacccctcgccgccatctccgtctctctctctcccgcaaccaagcagttcaactcacacccgaagcggcgccgctagggtttgctccgacagccgcgaaacctagtccttactgcgccctcccacagaggccgtcattcactaatctacctgctacgcttcgcttcccgctccgattgggagctagggtttagcttatctccgagctcagcttcgggtcgcggcacgcggcatggcggggtacggggaagagaaccagaacgccatgaacgggtacgaggaggaagaggaggaagaagaagttgaagaagtcgaggaggtgtacgaagaggaggaggagggggacggggagggggaaggagacgagggggcagccgccgaggcagcagcgatggcggccgagacgagaagtgtcgatggaggccggggcctagcggaggccgttgggaatgttgatgccggaggcgaggatgagagggatgcagattctagcggcggtgacgcttcggggaaggttttcgtagggggtgtagcctgggagacaactgaagaaacattcacaaagcattttcagaagtatggagctataactgattctgtgatcatgaaggacaagcatactaggatgcctcgtggatttggatttgttacattttccgatccgtctgtgcttgacagggttctagaggatgaacatgtcatagatggaaggacggttgaagtcaaaaggactgttccaaaagagctgtcgtcgaaagatggccctaagacaaaaaagatctttgtgggtggtatcccaccatctcttactgaagataaattaaaggagcacttctcatcgtacgggaaggtggttgagcatcagattatgcttgatcatagcactggacgttcacggggctttggatttgtcacatttgaaagcgaggatgctgttgaaagggttatgtcagaggggagaatgcatgatcttggagggaagcagaaatcagcattcaatagttgaagcacatcca

SEQ ID NO: 207869 - DNA, 1642 bp, Zea Mays
ccacccctcgccgccatctccgtctctctctctcccgcaaccaagcagttcaactcacacccgaagcggcgccgctagggtttgctccgacagccgcgaaacctagtccttactgcgccctcccacagaggccgtcattcactaatctacctgctacgcttcgcttcccgctccgattgggagctagggtttagcttatctccgagctcagcttcgggtcgcggcacgcggcatggcggggtacggggaagagaaccagaacgccatgaacgggtacgaggaggaagaggaggaagaagaagttgaagaagtcgaggaggtgtacgaagaggaggaggagggggacggggagggggaaggagacgagggggcagccgccgaggcagcagcgatggcggccgagacgagaagtgtcgatggaggccggggcctagcggaggccgttgggaatgttgatgccggaggcgaggatgagagggatgcagattctagcggcggtgacgcttcgggggttctagaggatgaacatgtcatagatggaaggacggttgaagtcaaaaggactgttccaaaagagctgtcgtcgaaagatggccctaagacaaaaaagatctttgtgggtggtatcccaccatctcttactgaagataaattaaaggagcacttctcatcgtacgggaaggtggttgagcatcagattatgcttgatcatagcactggacgttcacggggctttggatttgtcacatttgaaagcgaggatgctgttgaaagggttatgtcagaggggagaatgcatgatcttggagggaagcaggttgaaattaagaaagctgaaccaaagaaacctggcgctggtgattcaagctcaaacggaagacacagccgtggtggtggtcatcgtgattcataccgtggtagtggtgtttctgtgaacagcggtggcggctatggatatggtggtggttaccgatcagctgctgcagcatattatggcagcacagcatatggtgcctatggcagagggtatggatatggtgctacttctggctatggctcaggttatggctctgcatatggtggctccatgtatggaggtccatatggtgcctacgggtcatatggtggtgcctatggaggatatggcagctacggtggtgctggaggcatgggtgggggtggcagcgctggtggtcggggctccagcagataccacccttatgggaaatgatcatccattctgtgtttctctaggatctgataataaagccatacctttcctcgtttctgctactgagaaaatggaacattccattcgtcttgttgaatcagcggcatctggacatttttttccttggaacttgcattgcacatcaacgattctatagtctatagtcgctgaaccctgaaccgcccccaccccgagctttctgtagaagctgcagctgaaattctcgtagtctggcatgagccttagaatgcccttgaaactattatctttgtggtagtaacattatggtgtaatggaacagatgtacgttgttgtaacattcactcactgatcagagacttgctatctctacatatgtggagagaagctttgcaaatgattgactgatactattaaattgtgtgggttgct

SEQ ID NO: 207870 - DNA, 893 bp, Zea Mays
cgagcccttggaggaccaatgttgctgaggttgaaattaagaaagctgaaccaaagaaacctggcgctggtgattcaagctcaaacggaagacacagccgtggtggtggtcatcgtgattcataccgtggtagtggtgtttctgtgaacagcggtggcggctatggatatggtggtggttaccgatcagctgctgcagcatattatggcagcacagcatatggtgcctatggcagagggtatggatatggtgctacttctggctatggctcaggttatggctctgcatatggtggctccatgtatggaggtccatatggtgcctacgggtcatatggtggtgcctatggaggtggtgcgtatggtgctccaggagggtatggtgggggaggatatggcagctacggtggtgctggaggcatgggtgggggtggcagcgctggtggtcggggctccagcagataccacccttatgggaaatgatcatccattctgtgtttctctaggatctgataataaagccatacctttcctcgtttctgctactgagaaaatggaacattccattcgtcttgttgaatcagcggcatctggacatttttttccttggaacttgcattgcacatcaacgattctatagtctatagtcgctgaaccctgaaccgcccccaccccgagctttctgtagaagctgcagctgaaattctcgtagtctggcatgagccttagaatgcccttgaaactattatctttgtggtagtaacattatggtgtaatggaacagatgtacgttgttgtaacattcactcactgatcagagacttgctatctctacatatgtggagagaagctttgcaaatgattgactgatactattaaattgtgtgggttgct

SEQ ID NO: 207871 - DNA, 2432 bp, Zea Mays
ccggctgtacgccctctcctcctcctcttcttcctctccctcggcctcggtccctcccgtcgcgctctcgcctctgcgtctgcgcttctctccagttctccttgtcgtcgagcgggagcgccgagagagagagatgcgaccgcgatgcccccactcgtcccctcgctgctcctcccaatcccagccttgatcctacccgcgccacctcgcctctcccgccaccgctgcttcctgcccgccgtgtcctcctcctcctcctcctcgtcgtccccgcactccagggagccataccgccgccgccgacgcgacaccccgagccagacaccgacgcctgcgccgcgcccatcctcccagccgcagccgcctccgcgccgcgcaaatgccgccacgcccggcgctcggagtcaggaggagctggaggcggcgatctacgacttcatgtgccgctccgccaagccgggagccttccccacccgcgaggagctcgtcgcggccggccgctccgacctcgcggccgccgtcgcgtccagcgggggctggctctccctaggctggtcctccaccgccgcggagggccccgcgacgacggctgcaccgtgctcatcaggcgggggccaccctgactacccgcctgagacgggcgtgtattaccgtggtgatctagcgcccgtctcggtggaggactccgagtgggaggacgacgaagaggatgcctcaccatctgggcgggagtcgggaacagaggaggccagcgaggtccggctcaacgcaggaatcgaggggatgctcaccaggctgcagaaggatagagagcgagcgcggccacctccacggactagtacccacgacacacagggccaaagtgacgatgatgcgggcaacagtggcgctcctagccatacagcggctggtggcaggcatattccaagggctcctgagaatggaagtgtccatggatctcattctcaaaatggaacaatagagggcaacagcacctttcagggttcgaacgatgatgcatggcaaacatggacccttggcaagggcgatttatctcattttgaagctgctgaggtcttacctattgaaagaagaaaagtatcccgacatgatgacattgcatccgtgcaaaatgacattcacaggtcatctaatggtgtggctgtaagcgatttttctagcgatggtgttggcactggaagagatgagatacattcacggcttcaaattctggaattggacctttctgctgctctcaagacattaagatcaagatttgacaaagttttatcagatttgtcaaatagtaatggagcaactgtgttggatgacatctctgatgattgggaatttgaggagacaaaggtaatgcaagctcaggaggagttaagatcaatccgggctaaaatagctgtgttagaagggaagatggctcttgagataattgaaaggaacaaaataattgaagataaacaaaggaggcttgataaagttgagaaggcactgagtgagctccgtactgtctgtattatgtgggccaaccctgcttcagatgttttagtggttgggtcctttgatggctggacaagtcaaagaaagttggaaagatcagaaaacggcatgttttccttaaatctgagactgtaccctggtagatatgagattaagtttattgttgatggtgtttggaagaatgatccgctgcgacccactgtgcacaacaatgggcatgaaaacaaccttctgcttgtcacttgatttgaagttttcaccctggtagcatttttgtagatcattgcctagctccttctcggtatggttgatggcaactgattagatcggtccctccgtgtaactaatcagctttcttttcagtttttttctgtcttttctagataggtgtgtacaacataaacagtgtagggtgttattgaaatgcgtcgccctgttgagatagagaagaaagtagtgtgttcttttcttcccgtcgttctcccctgtgttggctcttcttcatgattctgtttaacaatgttgtaatgtctatatgctgtgaaggtggtctatcatcgaaattatccaaaagttatttgcaggagttgcattattgacgtgctatgtttatctgcaactaaccccacatagaaatatagaatgcagctaggaatcgccgcggaggttttgtttgcggtggcaagagtatttcttccagccaaggtagtacggcatgaagaccaagtgaccaaccggaagtgaactttgaaggcattcgtttatccagttccgcgtcaacgaagtgtgaaggcatgtcaaggagtaaatgcttgcaatcataatctggtaactgagctaaagctttcattcaatcttacatccatttgtatttcagtttaaccacttacaagtaacaagaaaccaactgttttgtttct

SEQ ID NO: 207872 - DNA, 2290 bp, Zea Mays
caggcaggcacggtcggtacgggcgcggaggcacagcgcgcctgacgcctgacgggcgacggctgggcgtgggggagcgcgcgttggctttgcgacttgcgagtcgcttgtcgccattcgattcgcacgaggcgcagagcgcgggggattgacattggctcgccaccggctgtacgccctctcctcctcctcttcttcctctccctcggcctcggtccctcccgtcgcgctctcgcctctgcgtctgcgcttctctccagttctccttgtcgtcgagcgggagcgccgagagagagagatgcgaccgcgatgcccccactcgtcccctcgctgctcctcccaatcccagccttgatcctacccgcgccacctcgcctctcccgccaccgctgcttcctgcccgccgtgtcctcctcctcctcctcctcgtcgtccccgcactccagggagccataccgccgccgccgacgcgacaccccgagccagacaccgacgcctgcgccgcgcccatcctcccagccgcagccgcctccgcgccgcgcaaatgccgccacgcccggcgctcggagtcaggaggagctggaggcggcgatctacgacttcatgtgccgctccgccaagccgggagccttccccacccgcgaggagctcgtcgcggccggccgctccgacctcgcggccgccgtcgcgtccagcgggggctggctctccctaggctggtcctccaccgccgcggagggccccgcgacgacggctgcaccgtgctcatcaggcgggggccaccctgactacccgcctgagacgggcgtgtattaccgtggtgatctagcgcccgtctcggtggaggactccgagtgtttgcgttgcagggaggacgacgaagaggatgcctcaccatctgggcgggagtcgggaacagaggaggccagcgaggtccggctcaacgcaggaatcgaggggatgctcaccaggctgcagaaggatagagagcgagcgcggccacctccacggactagtacccacgacacacagggccaaagtgacgatgatgcgggcaacagtggcgctcctagccatacagcggctggtggcaggcatattccaagggctcctgagaatggaagtgtccatggatctcattctcaaaatggaacaatagagggcaacagcacctttcagggttcgaacgatgatgcatggcaaacatggacccttggcaagggcgatttatctcattttgaagctgctgaggtcttacctattgaaagaagaaaagtatcccgacatgatgacattgcatccgtgcaaaatgacattcacaggtcatctaatggtgtggctgtaagcgatttttctagcgatggtgttggcactggaagagatgagatacattcacggcttcaaattctggaattggacctttctgctgctctcaagacattaagatcaagatttgacaaagttttatcagatttgtcaaatagtaatggagcaactgtgttggatgacatctctgatgattgggaatttgaggagacaaaggtaatgcaagctcaggaggagttaagatcaatccgggctaaaatagctgtgttagaagggaagatggctcttgagataattgaaaggaacaaaataattgaagataaacaaaggaggcttgataaagttgagaaggcactgagtgagctccgtactgtctgtattatgtgggccaaccctgcttcagatgttttagtggttgggtcctttgatggctggacaagtcaaagaaagttggaaagatcagaaaacggcatgttttccttaaatctgagactgtaccctggtagatatgagattaagtttattgttgatggtgtttggaagaatgatccgctgcgacccactgtgcacaacaatgggcatgaaaacaaccttctgcttgtcacttgatttgaagttttcaccctggtagcatttttgtagatcattgcctagctccttctcggtatggttgatggcaactgattagatcggtccctccgtgtaactaatcagctttcttttcagtttttttctgtcttttctagataggtgtgtacaacataaacagtgtagggtgttattgaaatgcgtcgccctgttgagatagagaagaaagtagtgtgttcttttcttcccgtcgttctcccctgtgttggctcttcttcatgattctgtttaacaatgttgtaatgtctatatgctgtgaaggtggtctatcatcgaaattatccaaaagttatttgcaggagttgcattattgacg

SEQ ID NO: 207873 - DNA, 1662 bp, Zea Mays
cgattcgcacgaggcgcagagcgcgggggattgacattggctcgccaccggctgtacgccctctcctcctcctcttcttcctctccctcggcctcggtccctcccgtcgcgctctcgcctctgcgtctgcgcttctctccagttctccttgtcgtcgagcgggagcgccgagagagagagatgcgaccgcgatgcccccactcgtcccctcgctgctcctcccaatcccagccttgatcctacccgcgccacctcgcctctcccgccaccgctgcttcctgcccgccgtgtcctcctcctcctcctcctcgtcgtccccgcactccagggagccataccgccgccgccgacgcgacaccccgagccagacaccgacgcctgcgccgcgcccatcctcccagccgcagccgcctccgcgccgcgcaaatgccgccacgcccggcgctcggagtcaggaggagctggaggcggcgatctacgacttcatgtgccgctccgccaagccgggagccttccccacccgcgaggagctcgtcgcggccggccgctccgacctcgcggccgccgtcgcgtccagcgggggctggctctccctaggctggtcctccaccgccgcggagggccccgcgacgacggctgcaccgtgctcatcaggcgggggccaccctgactacccgcctgagacgggcgtgtattaccgtggtgatctagcgcccgtctcggtggaggactccgagtgggaggacgacgaagaggatgcctcaccatctgggcgggagtcgggaacagaggaggccagcgaggtccggctcaacgcaggaatcgaggggatgctcaccaggctgcagaaggatagagagcgagcgcggccacctccacggactagtacccacgacacacagggccaaagtgacgatgatgcgggcaacagtggcgctcctagccatacagcggctggtggcaggcatattccaagggctcctgagaatggaagtgtccatggatctcattctcaaaatggaacaatagagggcaacagcacctttcagggttcgaacgatgatgcatggcaaacatggacccttggcaagggcgatttatctcattttgaagctgctgaggtcttacctattgaaagaagaaaagtatcccgacatgatgacattgcatccgtgcaaaatgacattcacaggtcatctaatggtgtggctgtaagcgatttttctagcgatggtgttggcactggaagagatgagatacattcacggcttcaaattctggaattggacctttctgctgctctcaagacattaagatcaagatttgacaaagttttatcagatttgtcaaatagtaatggagcaactgtgttggatgacatctctgatgattgggaatttgaggagacaaaggtaatgcaagctcaggaggagttaagatcaatccgggctaaaatagctgtgttagaagggaagatggctcttgagataattgaaaggaacaaaataattgaagataaacaaaggaggcttgataaagttgagaaggcactgagtgagctccgtactgtctgtattatgtgggccaaccctgcttcagatgttttagtggttgggtcctttgatggctggacaagtcaaaaacattgtaggcacaaggatg

SEQ ID NO: 207874 - DNA, 4825 bp, Zea Mays
cccaagtccaaacatcagtcagattttgacatttccgcagcgtttcaccgagagccacaagcccgcaagcaacaaatccgcgctccctgattcgccatcctcttcaccaagttaggcgacgactggcgcccatcgtcgattccccgttctccgtttccgtctcgcgtgtttggtgctttcgatctccccaaggcggcaggcggcagcgccgtacgcgttgcgggaagattttggttggtggattgttggtggcggctccactccgtcccagtgcactggtccaatccaaatggcggccaataatagcgacccgatccaggatcagctgggggaaggaggggcgggcgtgaggcacgaggctgaggaggaggaggtgggggaggagacgtcttctgccgcggcgcaggcgaccgcgacgacgatgctgccccggtcgagctcgcggccgcagctggacctcagcggcgcggcgatccacgggacgctggaggaccgtaaccctaccatccttttgcccaaccagtccgacgacatctctcacctcgcccttgacatcggcggatctcttataaaactggtgtacttctcgcgacatgctgagctctccactgaagataagcacaagatatccacaaagagaagacttgggatgtttaatggtggcaggagaagctacccgattcttggagggaggctccacttcgtaaagtttgagactgggaagctaaatgaatgtttggacttcatttcttccaaacaactacatcgtggtggaattgattcaccttcatggcgctctggggctcagtctgatgacattgtaattaaggcaacaggtggtggagcattcaagtatgcagatgtcttcaaggaaagattgggagtcagccttgaaaaggaagatgaaatggactgtcttgtggctggagcaaactttttgcttaaggctatacgtcatgaagcttttacacacatggatggccagaagcaatatgttcagattgatcagaatgacttgtttcccttccttcttgttaatgtcggatctggtgttagtataatcaaggttgatgggcatgggaaatttcagcgagtaagtgggacaaatgttggtggtggtacgtactggggattggggaggctaatgacgaagtgcaaaagttttgatgagttgctagagttgagccagcgtggagacaatagcaccatggacatgcttgtaggagacatatatggtggtctggactactccaagattggcctttcagcatctacaattgcctctagttttggaaagataatttcagaaaacaaggagctatcagattatagacctgaagatatatcgctctctctgttacggatgatttcatataatattggccagatttcctatcttaatgcacttcgttatggactcaagaggatattttttggtggattcttcatccgtggtcatgcctacactatggatacaatttcttttgcagtgcatttctggtcaaaaggagaggcacaagctatgtttctgcgccatgagggctttctaggagctcttggtgcatttatgagttatgagaagcatggtcttgatgacttaagggtacatcatttggttgaacgcttcccaatgggtgctccatatgttggtggaaagattcacgggccacctcttggagatctcaatgagaagatatcatggatggagaagtttgtgcaaaagggtactcagattatagcccctgtacctatgggagttccagctacgacaggtatgggaggctttgaaaggccgactgctaagggtgacatcttgcggtcagatgcaagtgcagcgctaaatgtcggtgttctccatcttgtacccacattggatgtatttccattgttggaagatccaaagacgtatgaaccaaacacaattgatcttgaccaggatgagttcaagtactggttcaagattttgtcagatcattcgccggacctcgtggacaaggcagttgctagtgaaggtgggactgatgatgccaaaagacggggtgatgcatttgcacatgccttttctgctcatctggcaagattgatggaggagccagctgcttatggaaagtttggtttggccaacctgttggaattgagagaagaatgtctgagggaatttcagttcgttgatgcatatattagcatcaagcaaagggaaaatgaagcttcactggctgttttaccggatcttctgatggaacttgatagtatgaatgaggaagctaggctgcttgcactaattgaaggtgtccttgctgcaaatatatttgattgggggtctcgagcttgtgtagaactttatcacaagggaactataatagaaatctatcgcatgagtcgcaagaagatgcaacgtccttggcggattgatgactttgacatgttcaaaaagagaatgcttactgataggaaggaccaatcatacaaaagagcactgctttttgttgataactcaggtgctgatgtggtccttggaatgcttcctttagctagggagcttttacgccatggaacagaggtagttcttgttgcaaattcgttgccggctttgaatgatgttaccgctaatgaacttccagaagttatagctgaagcctcaaagcactgtggtatccttcggaaagctgcagaagctggtggattgatagtcgatgcaatggctggcatccaagatgatctcaaggatgagacagtgtcagtgccactaatggttgttgagaatggatgcggcagtccatgtattgatttccggcaggttagctcagagcttgctgctgctgcaaaggatgcagatttgttaattttagaaggcatggggcgatcactgcataccaacctcaatgcccgttttaagtgtgatgctctaaagcttttatgcgcagcttgctatggtcaagaatcagcgattggcagaaaaactcttcaatgggagtctatacgactgcatctgtaaatttgaaccagttccttaacaacatggtagcgactgcggaggcaactagcagaagcagcttgattggtgtagccggtgagacagaaacaatcatacagcgtacggcataaccgatccttccatgtacggggtacaagaaacgccctttcaataaaacaataacagtgttttctgaaacgatataataaaggctctaaaggctctttccagaaatattgaagggaaaagtttgagccagcaactggagttcgtgtttaagccagaactagttagcagcctaccatggcgaaagtaacatactcgaaccaatcttggaaagatcctgtcattcttgtgccatgctcgaatcaatccataaattgttcagacactgccgggacaatgccatcactcaaatgctaagaatcagttattagtcttcgcatgtgggcaactataataaatcaataaacgacacagtagtcacgagacatgtaaaacaagaggggatgtgaggcattttttcttcagcatacaccagttgatccactaatcaacaagccgtccatcgctccagaaactaccagctctaggcaaagttgatgtcatacgccttactgccgtccgccctgaagatgccaaagtggcgctcgaactcggggccgggcttgccgtcctcgtcgtacaagtcgaacaggaacacctccacgggcacgccgggccgcttcggcgtgccgacgccgcgcgccgccctctccacaatcttggcgttgtacgctgcggcgttctgcggggtggcggccgggtgccccgcggttggccacccggtctcggtcaccgcgaccggcacgccgtcgaacccctccttctccagcgcggccaccagcgcgtctaccgtggcgtcgaacaggttcgtgtacaccagcgcgccgtcctgcaccggcgccgcgcccgctccgaagagcgcgtacgcgagctgcacgttcgccgggtcgttcacgtggctgatgaaagggtaggcgttcaccatgaagggcgcaccggtgtcggccaggaaccgcagcatggggcggaggacggggagggaggcggcgtcgaacgcgccggcggagggcgggtacgaggcggccagcaccgaggaggcgtgcgcggaggagaccttgaccctgccgtccagccccagggtggcgagcgcggcgtgcaggttccgcatggccggcacgaggtgaggcgcatagaactggttgttgtacagcacctcgttgccgacggcgaggcaccggacgcgctcggcgggggcgtgggccaggaccgcggaccgcagccactgcgccgcgccctcgggccccgccgcggccaggaaggtgaggttctcgttgggcacgcccaccatgaggtcgatgcccgccgcggcgaaggccgggagcacggccgggtccggcaggaagagccgcgccttggtgatcccgttccgcttgagcagtgccgcggcggccgacggcggcgggaggttactgccaacgcggccgtggcagatgccgatcttgcccgcgtcaccggccgccgccgccactgccatcgacgcgacggcgaggaggacgtggccgagaagacacaaggctattctcgtggccattggtgaaggaaagaaggaaggaagaatgccacgctttggttgtgttgtcgccgttaaatagattctgctttggcaagaattgtatggttctggttgcttgtagttgtagttgtggcagatcgaggaagttaaggttgagacttgaggatgggctttgtggcagatccacgtgggtcactgcttggttatgatgcttatggtcttttgatgggctg

SEQ ID NO: 207875 - DNA, 1981 bp, Zea Mays
cagcgtttcaccgagagccacaagcccgcaagcaacaaatccgcgctccctgattcgccatcctcttcaccaagttaggcgacgactggcgcccatcgtcgattccccgttctccgtttccgtctcgcgtgtttggtgctttcgatctccccaaggcggcaggcggcagcgccgtacgcgttgcgggaagattttggttggtggattgttggtggcggctccactccgtcccagtgcactggtccaatccaaatggcggccaataatagcgacccgatccaggatcagctgggggaaggaggggcgggcgtgaggcacgaggctgaggaggaggaggtgggggaggagacgtcttctgccgcggcgcaggcgaccgcgacgacgatgctgccccggtcgagctcgcggccgcagctggacctcagcggcgcggcgatccacgggacgctggaggaccgtaaccctaccatccttttgcccaaccagtccgacgacatctctcacctcgcccttgacatcggcggatctcttataaaactggtgtacttctcgcgacatgctgagctctccactgaagataagcacaagatatccacaaagagaagacttgggatgtttaatggtggcaggagaagctacccgattcttggagggaggctccacttcgtaaagtttgagactgggaagctaaatgaatgtttggacttcatttcttccaaacaactacatcgtggtggaattgattcaccttcatggcgctctggggctcagtctgatgacattgtaattaaggcaacaggtggtggagcattcaagtatgcagatgtcttcaaggaaagattgggagtcagccttgaaaaggaagatgaaatggactgtcttgtggctggagcaaactttttgcttaaggctatacgtcatgaagcttttacacacatggatggccagaagcaatatgttcagattgatcagaatgacttgtttcccttccttcttgttaatgtcggatctggtgttagtataatcaaggttgatgggcatgggaaatttcagcgagtaagtgggacaaatgttggtggtggtacgtactggggattggggaggctaatgacgaagtgcaaaagttttgatgagttgctagagttgagccagcgtggagacaatagcaccatggacatgcttgtaggagacatatatggtggtctggactactccaagattggcctttcagcatctacaattgcctctagttttggaaagataatttcagaaaacaaggagctatcagattatagacctgaagatatatcgctctctctgttacggatgatttcatataatattggccagatttcctatcttaatgcacttcgttatggactcaagaggatattttttggtggattcttcatccgtggtcatgcctacactatggatacaatttcttttgcagtgcatttctggtcaaaaggagaggcacaagctatgtttctgcgccatgagggctttctaggagctcttggtgcatttatgagttatgagaagcatggtcttgatgacttaagggtacatcatttggttgaacgcttcccaatgggtgctccatatgttggtggaaagattcacgggccacctcttggagatctcaatgagaagatatcatggatggagaagtttgtgcaaaagggtactcagattatagcccctgtacctatgggagttccagctacgacaggtatgggaggctttgaaaggccgactgctaagggtgacatcttgcggtcagatgcaagtgcagcgctaaatgtcggtgttctccatcttgtacccacattggatgtatttccattgttggaagatccaaagacgtatgaaccaaacacaattgatcttgaccaggatgagttcaagtactggttcaagattttgtcagatcattcgccggacctcgtggacaagatatatctccttcagtttccga

SEQ ID NO: 207876 - DNA, 1842 bp, Zea Mays
gattcgccatcctcttcaccaagttaggcgacgactggcgcccatcgtcgattccccgttctccgtttccgtctcgcgtgtttggtgctttcgatctccccaaggcggcaggcggcagcgccgtacgcgttgcgggaagattttggttggtggattgttggtggcggctccactccgtcccagtgcactggtccaatccaaatggcggccaataatagcgacccgatccaggatcagctgggggaaggaggggcgggcgtgaggcacgaggctgaggaggaggaggtgggggaggagacgtcttctgccgcggcgcaggcgaccgcgacgacgatgctgccccggtcgagctcgcggccgcagctggacctcagcggcgcggcgatccacgggacgctggaggaccgtaaccctaccatccttttgcccaaccagtccgacgacatctctcacctcgcccttgacatcggcggatctcttataaaactggtgtacttctcgcgacatgctgagctctccactgaagataagcacaagatatccacaaagagaagacttgggatgtttaatggtggcaggagaagctacccgattcttggagggaggctccacttcgtaaagtttgagactgggaagctaaatgaatgtttggacttcatttcttccaaacaactacatcgtggtggaattgattcaccttcatggcgctctggggctcagtctgatgacattgtaattaaggtggtggagcattcaagtatgcagatgtcttcaaggaaagattgggagtcagccttgaaaaggaagatgaaatggactgtcttgtggctggagcaaactttttgcttaaggctatacgtcatgaagcttttacacacatggatggccagaagcaatatgttcagattgatcagaatgacttgtttcccttccttcttgttaatgtcggatctggtgttagtataatcaaggttgatgggcatgggaaatttcagcgagtaagtgggacaaatgttggtggtggtacgtactggggattggggaggctaatgacgaagtgcaaaagttttgatgagttgctagagttgagccagcgtggagacaatagcaccatggacatgcttgtaggagacatatatggtggtctggactactccaagattggcctttcagcatctacaattgcctctagttttggaaagataatttcagaaaacaaggagctatcagattatagacctgaagatatatcgctctctctgttacggatgatttcatataatattggccagatttcctatcttaatgcacttcgttatggactcaagaggatattttttggtggattcttcatccgtggtcatgcctacactatggatacaatttcttttgcagtgcatttctggtcaaaaggagaggcacaagctatgtttctgcgccatgagggctttctaggagctcttggtgcatttatgagttatgagaagcatggtcttgatgacttaagggtacatcatttggttgaacgcttcccaatgggtgctccatatgttggtggaaagattcacgggccacctcttggagatctcaatgagaaggcaagagcatcttctcctgatcatgcttaagtttatggctatgatggtttggttatttttctaagtatgacatcctctactaacacaaatttgatgctcgataaattacacctttgaaaactcaaaatgagtgttagatgtcactcaatctaactatacgacggacatgcacaagaaccaaaaggatcaaccaaaattttacctatattgaaaagactgctagaattttgtcgataaccttttg

SEQ ID NO: 207877 - DNA, 455 bp, Zea Mays
gtatggctgcataatggagggtttgcattgccgtcatgacctcgtactgtgtagttgctgttgaatcagtcgggcgacaaatccccatagctttcctggacagagttaaggaagacttcaccaaaaagtatggaggcgggaaagcagctactgctgcagcgaacagcttgaagagggagtttggaccaaagcttaaagagcacatgcagtactgtgtggaccaccctgaggaggttagcaagcttgccaaggtgaaggcccaagtctccgaagtcaaaggagttatgatggaaaacattgagaaggttcttgaccgtggtgagaagattgagctgctagttgacaaaactgaaaatctgcgttctcaggtatccaatgccgagaaataggggaagtaataacaataagaaagaaagcagcttctttatgcaatctaggatcaatggaagcaagcc

SEQ ID NO: 207878 - DNA, 2040 bp, Zea Mays
ttgcacttgtcaacaaagacctcggaatatataggaacaatggttacttgatggtttcgtgcaatggtgggcttaaccaaatgcgagctgcaatatgtgacatggttgtaattgcaagatatttgaatgtgactttagtcgtgccagagttggataaaacttcattttggaacgatccaagtgagttccaagatatatttgatgttgagcactttataacctcattacgaggtgaagttcgcattctgagagaattacctccaagggtaaagagaagagttgaacttggaatgtttcactccatgcctccaattagttggtctgatatctcctactatcaaaatcagattcttcctttgattcgtaagtacaaggttctccatttgaatagaactgatgctaggctagcaaacaatggtttaccaatagaaattcagaaacttcgatgccgagtaaattatgcctccctcaaatttaccccacaaattgaagagttgggcaagagagtaattagaattcttcgccaaaatggacctttcttggtacttcatttacggtatgaaatggatatgttggctttctctggctgtacacaaggttgcagtactgaagaggcagaagaactcacaagaatgaggtatgcttatccatggtggaaagaaaaagtgattgactcagacttgaaaagaaaagatggcctttgcccattgacgcctgaggagactgctcttgtcctcagagcacttgacatcgatagaagtatgcaaatatacattgctgctggggaaatatacggtggaaagcgcaggatggcttctctaacttcagcatacccgaatgttgtgaggaaggagacacttctggaaccttctgatctgatgttcttccagaaccattcatcacaaatggcagcacttgattacttagtatccttagaaagtgatatatttgttccaacatatgatggaaacatggctaaagtcgttgagggtcatcggagattcatgggttacaagaagaccgtcttgttagaccgaaaactcattgttgagctagtggaccggtacacaaatggttctctgctgtgggatgagttctcttcactgatcaaggttgcccatgcaaagcggatgggatcagcttcaaagaggatggtgattcctgacagacccaaggaagaggactatttctatgccaatccccaagaatgcctccaggatcgtgattttttgcaaacatcataatatcctttcatgtctatataccatgttcacattataccattcttctgcaaacaacacaactgaacccaaaagcaatattttggagccagaaaggcgactcggcttctgtcgagtcatagatgaggccgatctgtaaacttgagggagggagggagggaaggagaaaggctgaaagggggtgggtgggggtggatttagttggtaaatacacattatagaatggagggggatttgttcattccaaaataaaaaaaagagagatgggcttgtatagatggtgatagaattaccgctaagaagaatgtaacttagatgcagctgggtctgggttcctgcatctggtcttgcgttgtgtaacatagcagttgttcttggacagccgcccccattgtccccaccggcgaaattttggcaaccatgtagaaagatgtatacactttttattgtatcgatacaacctgtattatatatgtaaattgtgcagaatgtttgtaccacttgcacattttataatgtggttagtacattgaattccttcacggagggtgcttgttgacatctgagttcgtgatctacgggccaaagcattggtgaaagtgtttctgtcggtactgatgatttcttcatgtgggctgggcaaaaacaacgcagagcgttttatcagtttgcatgtgtccgttggcattgtgccaatgccaacgtacttttatttcaccattggcagctttgtcagctgttcagttatcacttgtcaattgtcgtagtgacacaatgccaatataaaagtacttttatg

SEQ ID NO: 207879 - DNA, 2254 bp, Zea Mays
attactgacaagcgccagagcagagagggagagagagaacacacaaggggaggggtggggaagggaagggaagggaggcgcactcgtcccgtctggtatcgtctcccccggcagtgaaggagtagaaggaaggagagtaggagtaggaggggagaatgcgtgtcggcggcgggcgggacgacgacgacgaggtgtcccggaagctcaagagcatggacgtggacaagctggagaacggcggcggggaggagagcccgcggcccgccgtcaagtaccacggctggaaggccatgccgttcatcatcgggaacgagacgttcgagaagctggggacgctgggcacgtcggcgaacctgctggtgtacctgacgcaggtgttccacatgcggagcgtggacgcggcgacgctgctcaacgggctcaacggcaccaccagcctcgcccccatcatcggcgccttcctctccgacgcctacctcggccgctacctcgcgctcgccatcgcctccgtcgcctccctcatcggcatgttcctgctgacgatgacggccggcgcgaatagcctgcacccgccggagtgcagcgtgggcgagacctgcgagaaggcgacgtcgtaccagttcgcggtgctcttcgtggccttcgcgttcctggtgctgggctcggcggggatccgcccctgcagcatgcccttcggcgccgaccagttcgaccccaacacggagtctggcaagcgcggcatcaacagcttcttcaactggtactacttcaccttcacggccgccatgatgatctccgccaccgtcatcatctacgtgcagagcaacgtgagctggcccatcgggctgggcatccccacggcactcatgttcctggcatgcgtgctcttcttcatgggcacgcgcctatacgtgcgggtgacgcccgaggggagccccttcaccagcgtcgtgcaggtgctatcagccgcgctcaagaagcggtcgctgaagcagcccaaggacccgaagcaggacctcttcgacccgccgcacaccagcgccatcgtcaccaagttggcgcacacggaccagttccgctgcctcgacaaggcggccatcgtggcatccccggacgaggtgcgttccggcggcggcgcgcccgcggacccctggaggctctgcagcgtgcagcaggtggaggaggtcaagtgcctcatccgcatcgtgcccgtctggtccacggggatcatctactacgtcgccgtggtgcagcagtccacacgctgtggatccccttctacgaccgcctcctgctgcccaagctccggaagataacgggcaaggaggaggggttcacgctgctccagcgccagggcatcggcatcgcgctctccactgtcgccatggtcatctcggccatcgtcgaggaccggcgccgtgccatcgcgctcagccagccgacgctcggcaccaccatcactggcggggcgatctcggccatgtccagcctgtggatggtgccacagctcatgatcctggggctgtcggaggccttcaacctcatcagccagatcgagttctactacaaggagatcccggagcacatgcgcagcgtggccggggcgctcgccttctgcaacctggcgctcggcaactacctcagcggcttcctggttaccatcgtgcaccggacgacggggtccgggcagaactggctggcgcaggacctcaacaagggccgcctcgacctattctactggaccatcgccggaatcggcgtctttaacttcatctacttcgtcatctgcgccaggtggtacaggttcaagggggccagcaactgatccgccgaggtaaccgtcgtctcacgatcacgacgagtgcgggcatgaatgggactcagctctatgcggtcctgatggcagtttgcttggtggcttgggtaattatgttatggccttggcagagcaacaggaaaaaaaaggggccttaaaataaggtcatgataattattttgtatctaccatagtagttgtttgatatcgacgcctctctctctctctctctctctctctctctctctctgttattactttatatttttgttactgtcctttcatttgaatctataggatggtcaaagtggctgatgaaagaggagaaagaaacaaaacagttggtttcttgttacttgtaagtggttaaactgaaatacaaatggatgtaagattgaatgaaagctttagctcagttaccagattatgattgcaagc

SEQ ID NO: 207880 - DNA, 1860 bp, Zea Mays
cttcgatttcccctacgcaatcaaacaatgggcatgttcctgctgacgatgacggccggcgcgaatagcctgcacccgccggagtgcagcgtgggcgagacctgcgagaaggcgacgtcgtaccagttcgcggtgctcttcgtggccttcgcgttcctggtgctgggctcggcggggatccgcccctgcagcatgcccttcggcgccgaccagttcgaccccaacacggagtctggcaagcgcggcatcaacagcttcttcaactggtactacttcaccttcacggccgccatgatgatctccgccaccgtcatcatctacgtgcagagcaacgtgagctggcccatcgggctgggcatccccacggcactcatgttcctggcatgcgtgctcttcttcatgggcacgcgcctatacgtgcgggtgacgcccgaggggagccccttcaccagcgtcgtgcaggtgctatcagccgcgctcaagaagcggtcgctgaagcagcccaaggacccgaagcaggacctcttcgacccgccgcacaccagcgccatcgtcaccaagttggcgcacacggaccagttccgctgcctcgacaaggcggccatcgtggcatccccggacgaggtgcgttccggcggcggcgcgcccgcggacccctggaggctctgcagcgtgcagcaggtggaggaggtcaagtgcctcatccgcatcgtgcccgtctggtccacggggatcatctactacgtcgccgtggtgcagcagtccacgtacgtggtgctctcggcgctgcagtccgaccgccacctcggccgcgccggcttccagatccccgccgcgtccttcaccgtcttcgccatgctcgcgcagacgctgtggatccccttctacgaccgcctcctgctgcccaagctccggaagataacgggcaaggaggaggggttcacgctgctccagcgccagggcatcggcatcgcgctctccactgtcgccatggtcatctcggccatcgtcgaggaccggcgccgtgccatcgcgctcagccagccgacgctcggcaccaccatcactggcggggcgatctcggccatgtccagcctgtggatggtgccacagctcatgatcctggggctgtcggaggccttcaacctcatcagccagatcgagttctactacaaggagatcccggagcacatgcgcagcgtggccggggcgctcgccttctgcaacctggcgctcggcaactacctcagcggcttcctggttaccatcgtgcaccggacgacggggtccgggcagaactggctggcgcaggacctcaacaagggccgcctcgacctattctactggaccatcgccggaatcggcgtctttaacttcatctacttcgtcatctgcgccaggtggtacaggttcaagggggccagcaactgatccgccgaggtaaccgtcgtctcacgatcacgacgagtgcgggcatgaatgggactcagctctatgcggtcctgatggcagtttgcttggtggcttgggtaattatgttatggccttggcagagcaacaggaaaaaaaaggggccttaaaataaggtcatgataattattttgtatctaccatagtagttgtttgatatcgacgcctctctctctctctctctctctctctctctctctctgttattactttatatttttgttactgtcctttcatttgaatctataggatggtcaaagtggctgatgaaagaggagaaagaaacaaaacagttggtttcttgttacttgtaagtggttaaactgaaatacaaatggatgtaagattgaatgaaagctttagctcagttaccagattatgattgcaagc

SEQ ID NO: 207881 - DNA, 1325 bp, Zea Mays
tcctccgagagacacaacttgaggctgtaaataagactgctgttctcaaggaaaatatgaacattgatctgcgtgtcattggaataactggctcaagtacaatgcttctgagcgacacgggaatagacttaacccagtggaaacagcttctacaaaaggaagcagaaccagctgatattggtagttttgttcatcatttatctgataatcatgtatttccgaacaaagttttggtggactgcacagcggatacaagtgtggcatcccactattacgattggttaaagaagggtattcatgtcatcacgccaaataagaaagcaaattctgggccacttgatcagtacctgaaattacggactatgcagcgtgcctcatacactcattacttttatgaagcaactgttggtgctggcctcccaatcatcagcaccttgcgaggtcttctggagacgggtgacaagatactgcgtattgagggcattttcagtggaactttgagttatatatttaacaatttcgaaggaacaagggcgtttagtgatgttgttgccgaagcaagagaggcgggatacactgaacctgacccaagggatgatctatctggaactgacgttgcccgaaaggtcgttgtcctcgcgagggaatctggtctgaggcttgaactttctgacattcctgtgaagagccttgtgccagaaacacttgcatcatgctcgtcagcagatgaattcatgcagaagctaccgtccttcgacgaggactgggccaggcaacgcagtgatgctgaggctgcaggcgaagtcctgcgttacgttggagcgttggatgcggtgaacaggagcggacaggtggagctacgcaggtacaggagggaccacccgttcgcgcagctctccggctccgacaacatcatcgccttcaccacgtcgaggtacaaggagcagccgctgatcgtgcggggtccgggtgccggcgcggaggtgacagccggtggcgtcttctgcgacattctgcggctggcgtcttacctcggtgctccttcttgagcttctactagctacaggtgccagtttcaggaagcagacggagacacactgccatgcatgatgcctcccctccgtgtttgggctatgctcacatgttgtaatgttgttctgaataagtgccaggaaataaggcctctagcgtatgtcgagagagagaggtcgttcggctttggaatagccgattaggtgttgtttttgctgcatgatgcaaatgaattatcgtaccaatgaagggatgtttgcttgtgcctactgccatgtatgctcataaaaaac

SEQ ID NO: 207882 - DNA, 1325 bp, Zea Mays
aaaacaccgagctttatcggctttctcgttctgagactgctgttctcaaggaaaatatgaacattgatctgcgtgtcattggaataactggctcaagtacaatgcttctgagcgacacgggaatagacttaacccagtggaaacagcttctacaaaaggaagcagaaccagctgatattggtagttttgttcatcatttatctgataatcatgtatttccgaacaaagttttggtggactgcacagcggatacaagtgtggcatcccactattacgattggttaaagaagggtattcatgtcatcacgccaaataagaaagcaaattctgggccacttgatcagtacctgaaattacggactatgcagcgtgcctcatacactcattacttttatgaagcaactgttggtgctggcctcccaatcatcagcaccttgcgaggtcttctggagacgggtgacaagatactgcgtattgagggcattttcagtggaactttgagttatatatttaacaatttcgaaggaacaagggcgtttagtgatgttgttgccgaagcaagagaggcgggatacactgaacctgacccaagggatgatctatctggaactgacgttgcccgaaaggtcgttgtcctcgcgagggaatctggtctgaggcttgaactttctgacattcctgtgaagagccttgtgccagaaacacttgcatcatgctcgtcagcagatgaattcatgcagaagctaccgtccttcgacgaggactgggccaggcaacgcagtgatgctgaggctgcaggcgaagtcctgcgttacgttggagcgttggatgcggtgaacaggagcggacaggtggagctacgcaggtacaggagggaccacccgttcgcgcagctctccggctccgacaacatcatcgccttcaccacgtcgaggtacaaggagcagccgctgatcgtgcggggtccgggtgccggcgcggaggtgacagccggtggcgtcttctgcgacattctgcggctggcgtcttacctcggtgctccttcttgagcttctactagctacaggtgccagtttcaggaagcagacggagacacactgccatgcatgatgcctcccctccgtgtttgggctatgctcacatgttgtaatgttgttctgaataagtgccaggaaataaggcctctagcgtatgtcgagagagagaggtcgttcggctttggaatagccgattaggtgttgtttttgctgcatgatgcaaatgaattatcgtaccaatgaagggatgtttgcttgtgcctactgccatgtatgctcataaaaaac

SEQ ID NO: 207883 - DNA, 2170 bp, Zea Mays
caccgttgaacgcatggcgtgtgtactgtagcagctacatttggcgtgtgggagcggtggcgggatccgttgaagacggtctcaagaagggtttttggcgtctagcagtccgccagtccctttctgctgcgaacttgcgcgacctgcactgcgtccctctctccactctcccgtctctcgggtctcggctctcgccgtcgccactcgccgcgagcgagatgcagggcctagccgtatcatgccagcttcctcctgctgcggccgcagctcggtggcggccgcgcgcttcttcctctaatagggaagcagttttacaatgttggaagtatgaattaagtcaagaccactatttgggaggccccctaaggataggtcagtctcaaggaagtttgcacagacatcgctctacaaattttctcagaccagctgctgcagctatttcagttgaacaagatgaagtcaatacttatcttccaaaaggtgatatgtggtctgtgcacaagttcggtggaacctgtatgggaactcccaaaagaatccagtgtgttgcaaatatagttcttggtgattcttctgagaggaagctgatcattgtttccgcaatgtccaaagtaactgacatgatgtacaaccttgtacaaaaggctcagtcacgggatgattcatatgcaatagcactggcagaagtttttgagaagcatatgactgcagcaaaggatcttcttgacggagaagatcttgcaagattcttgtctcagttgcattcagacgtcagcaacttgcgagccatgctccgtgctatttatatagctgggcatgcgacagaatctttctctgactttgttgttgggcatggagagttgtggtctgcgcagatgctgtcgtatgcaataaagaagtctggggcaccctgcagttggatggatacaagagaagttctagttgtaacacccagtggttgtaatcaagtagaccctgattacttggaatgtgagaagcgacttcagaaatggttttctcgacaaccagctgagataatagttgctacaggatttattgcaagtacagctggaaacattccaacaactctaaaaagggatggaagtgatttctcagcagccatagttggttctcttgtcagggcacgccaggtcactatttggactgatgttgacggggtatttagcgcagatcctagaaaagttagtgaggctgtgatcttaagcactctgtcttaccaggaggcctgggaaatgtcatattttggggcaaatgttttgcatccgcgcaccattatacctgtgatgaaagacaacattcccattgttattaggaacatgttcaacctctctgcccctggaaccatgatttgcaagcagcctgccaatgaaaatggtgatttagacgcatgtgtcaaatcatttgctactgtcgataatttagcacttgttaatgttgaaggaactggaatggctggcgttccaggtacagcaagtgctatatttagtgctgttaaggatgttggagctaatgttatcatgatatctcaggctagcagcgaacattcagtatgctttgctgttccagaaaaggaagttgctgtagtttctgctgagttacatgataggtttcgtgaggcattagctgcagggaggctgtctaaggttgaagttattaatggttgcagcattcttgctgctgttggtctgaggatggccagcactccaggagtcagtgcaatactttttgatgcattagcaaaggcaaacattaatgttcgagcaatagctcaaggttgcagtgaatacaatattactgttgtattgaagcaacaagattgtgtaagggctctgagagctgctcactcaaggttcttcctctccaaaaccacacttgctgttgggatcattggacctggtttaattggtggagcactccttaaccagttgaagaatcagattcgccaccaccgcagacttcgccgcaacgggcaacaccaagtctattgccgcgtacacctcctcggggccgggaacacgaacaacgccagcgacgacggaagggcgaggatggtgggcgaccgtgacaacattgacgagcgccgagctgtccatgaccatgagcgcgacaaccttggtgcgcgtgaggcagcggggagcacggagtaaat

SEQ ID NO: 207884 - DNA, 3730 bp, Zea Mays
ctgctctgttgcgcgtttccctggcctctgctgcgaacctgcaggtgcggacttgcggctgcggcgccccactgcagcactgctgtactgtactggccgcagcgttcgccgtcctccgccacagaaaattcacgcacgattccgagcagccgccctccgccacaatttcgccatgggcgcgccctagccccgcccttcttatccccgctcttccccgcctatggctgccgctgctacagctgacgcctccgcgcagcccctcccatggctctgcttgcgctacggttcgggccgcttctccctgccccgccccaccaccgtcgggtcctgcggaaccgatgccgagtccggatcgtcgcctccaatgcccccacccccgtgagggacgggggcgctgccgcggtggtgtggtttaagcatgatctccgcatcgacgaccacccgggcctcgccgccgccgtctcggagccgcggcgccccgtcgtgccgctttacgtcttcgaccgacgcatcctcgccggctattcagataaaatgctggaactgctgctatttgctctgaaagatcttaagatgacgttgaaatctcaagattctgatttgctcataggcctgggaaacgctgaagatgttgtgctgaagcttgtgaatgaggtacaagcaggtctcgtttttacagaagaagaagttgaatatagagtgcgtgatgttcttgccaatgttgaatcatctttatctaatgggtcattctcatggggaagccctcccaagatagtggcttggagtgccccattgtatgactataagaatctgggagcagtaccgacatcacatgacgattttttaaagaaaaaattaccattggccacaccttcttgctgcggcgaccttgcctgctctaaatttggagttagacacaggttctctacccactctggaagaattaaaatgtttcctgaaagaaataacaccagaggacaattgggctcctctcaagagaatgcccgcaagatctatccttaaaaggacaatcagtcaaaggaagatcaaaagtaatgctacattaagcaccatcaatgaagaaaacatagatgatgctgccaccatggattctgttgcatcaggaaagaggattataaactcgaagtttgcatcagagaactcactggaagttagtggtggaacagaaattactttggatgctttggctgcttacctaaaatatcttgaaggcacaggaaatgctagttggcaagagttgcatgataaagtgcgtttagctgaaaccagatatggtgcttcattctacatcttgtttggtcctgcaattcaacttggagtcatatctaggaggaaagcttacactgagactatccaatatgaaaaagatcgcaatgcaggttttctatcaccatttgggtactcaacacctacagtaacatcagcagtagatgctatatgttcaatggagtggtattggctcttggcatcaaaatcccaagtatgcatcgaggggaaatattctataagaatttggagatggaagggttatcttgtacagtacacctttcttggcaacgaaggtccacctgttcttcttgtgcatggttttggagctttcctggagcattttcgtgacaatatagacaagattgctgctacgggccaccgagtttgggcaattactcttgttggctttgggaaatcagagaaaccaaatgtcaactattcagaacttttctggtctgaactactgagggattttattgttgaaattgtgagggagcctgttcatcttcttggcaactctattggaggttatctctgtgctattgctgctggtttatggccttctcttgcaaagtctctggttcttttaaactcagctggttcagttgttccaaattactccttcatcccactgagtgaagaaagacgaacatcatggatttccaggttgcaggcacagctccttttgctcttcttgaggtcaagggcagaaggcattcttaaagaatattatcctacaagaactgaacgggtggacaagccacttctggaccagattgtaagagcttcatatgatcctggtgctgcaaaagtccttgagagtgtattcaacttcaatctttcaattcctcttaacttcttatttgattcttttggagggaagatattagttatccagggtatgaaagacccccttacaaaatctgaggcatttgtcaccatgctccgagaacattgcagcaaggttcaaatcagagagttaaatgcaggtcatgctccacatgatgaagttccagatgaagtaaataccatactatgtaaatgggtggagcagattgaagttaagccagccctggagaagaccaaggcaatatagaaacaaatcagcagtgcttccaccagtcatgagccctggtgaccatccgagaaatctttgggcgcgcatcagtgaggccataaaacaaaagcgctgattgggatcgcccaaccaacgcaccttatcagctttccccctctctcttggtttcaccaaatctgacggtgacgcgcccggtgcatggcctccggaagatgtcaagttgcagtcggtccggtcactcgtggatgttacaagctgctgctcatgggccaccagttgctgcactcttgctgtctgctttcaagccaagtgctctctccagtctcctcccttgtgctggatttcttggcgagttcttacgctagtgcctaggcgtagcgacgtgcgttgcgcaggtcgggcgacagaatcggggccgggctgtgaaacttctggagcttttccggtaggacaggagtgtaggacctctttcgaacaagctacgttttagaatttaaacacaaaatatatgttccatccgtcctaaaaaactggtctgtagtttataacaaaaatactatcaacaggtatggttatatataggaatatgtgaaaggttattttgaggaattcaataactcttatttaatatcattaatatttatacatttttaatagaaaatggtcaaaatgaagattgtttgacctatcatcggagtgagaagtataccatttttaggacggaaaagtatacactaagattgtctctagcggtttctctaaagggccccttgtcctatatctggagaaaattcttctcctctatacgctctagcagtgtcttctagatatagatgatgtttctctatcctctctctatatagattctctcttctatctacttattttatagcaaaactaaactatttataagatatttgagtgcatgataaatacatacatacataaatctagaacaaaatatgtttttaatattatttaacgtaaagaggacggaatatgaaggacgctggggagaaataagacatgagggaatgtttttagaggagactgtaaatgagatatatagatgaggaatatagatgatatggttggagatagtacaagactgtaaaattgctatgattttgacattggaactgttaatatattaaaccatttctatgtgaaactcttaaattccaaatagtcgctacacgctttgtttgagtacgcatacctatggctatgttggctttgcaaaaagaaacacaggcaagtatgcaggtcgaatatattagtactgttacacattgtcatgtcgtgtctgattacggcaacttattctaagagaggtcaaaaggagtgtcgcttgcgaagttg

SEQ ID NO: 207885 - DNA, 2650 bp, Zea Mays
ctgctctgttgcgcgtttccctggcctctgctgcgaacctgcaggtgcggacttgcggctgcggcgccccactgcagcactgctgtactgtactggccgcagcgttcgccgtcctccgccacagaaaattcacgcacgattccgagcagccgccctccgccacaatttcgccatgggcgcgccctagccccgcccttcttatccccgctcttccccgcctatggctgccgctgctacagctgacgcctccgcgcagcccctcccatggctctgcttgcgctacggttcgggccgcttctccctgccccgccccaccaccgtcgggtcctgcggaaccgatgccgagtccggatcgtcgcctccaatgcccccacccccgtgagggacgggggcgctgccgcggtggtgtggtttaagcatgatctccgcatcgacgaccacccgggcctcgccgccgccgtctcggagccgcggcgccccgtcgtgccgctttacgtcttcgaccgacgcatcctcgccggctattcagataaaatgctggaactgctgctatttgctctgaaagatcttaagatgacgttgaaatctcaagattctgatttgctcataggcctgggaaacgctgaagatgttgtgctgaagcttgtgaatgaggtcactatgcaaggtacaagcaggtctcgtttttacagaagaagaagttgaatatagagtgcgtgatgttcttgccaatgttgaatcatctttatctaatgggtcattctcatggggaagccctcccaagatagtggcttggagtgccccattgtatgactataagaatctgggagcagtaccgacatcacatgacgattttttaaagaaaaaattaccattggccacaccttcttgctgcggcgaccttgcctgctctaaatttggagttagacacaggttctctacccactctggaagaattaaaatgtttcctgaaagaaataacaccagaggacaattgggctcctctcaagagaatgcccgcaagatctatccttaaaaggacaatcagtcaaaggaagatcaaaagtaatgctacattaagcaccatcaatgaagaaaacatagatgatgctgccaccatggattctgttgcatcaggaaagaggattataaactcgaagtttgcatcagagaactcactggaagttagtggtggaacagaaattactttggatgctttggctgcttacctaaaatatcttgaaggcacaggaaatgctagttggcaagagttgcatgataaagtgcgtttagctgaaaccagatatggtgcttcattctacatcttgtttggtcctgcaattcaacttggagtcatatctaggaggaaagcttacactgagactatccaatatgaaaaagatcgcaatgcaggttttctatcaccatttgggtactcaacacctacagtaacatcagcagtagatgctatatgttcaatggagtggtattggctcttggcatcaaaatcccaagtatgcatcgaggggaaatattctataagaatttggagatggaagggttatcttgtacagtacacctttcttggcaacgaaggtccacctgttcttcttgtgcatggttttggagctttcctggagcattttcgtgacaatatagacaagattgctgctacgggccaccgagtttgggcaattactcttgttggctttgggaaatcagagaaaccaaatgtcaactattcagaacttttctggtctgaactactgagggattttattgttgaaattgtgagggagcctgttcatcttcttggcaactctattggaggttatctctgtgctattgctgctggtttatggccttctcttgcaaagtctctggttcttttaaactcagctggttcagttgttccaaattactccttcatcccactgagtgaagaaagacgaacatcatggatttccaggttgcaggcacagctccttttgctcttcttgaggtcaagggcagaaggcattcttaaagaatattatcctacaagaactgaacgggtggacaagccacttctggaccagattgtaagagcttcatatgatcctggtgctgcaaaagtccttgagagtgtattcaacttcaatctttcaattcctcttaacttcttatttgattcttttggagggaagatattagttatccagggtatgaaagacccccttacaaaatctgaggcatttgtcaccatgctccgagaacattgcagcaaggttcaaatcagagagttaaatgcaggtcatgctccacatgatgaagttccagatgaagtaaataccatactatgtaaatgggtggagcagattgaagttaagccagccctggagaagaccaaggcaatatagaatgatgcagcctagctttgttatctctgtcacggaagccaaattgttaatgccccaaagcctagcatacgcccgctgaatgttcagcagatgaaagtggcgtttggttagaaaattgactagaggtgtacaattattgggtgcatataggtcaagatgcttgctatattcctcttgtatctaaggacagtatgtaaggaaaatgcaattttaccactagcgcgtcgacgtcaaaatatatatatgttcgt

SEQ ID NO: 207886 - DNA, 4553 bp, Zea Mays
ctgctctgttgcgcgtttccctggcctctgctgcgaacctgcaggtgcggacttgcggctgcggcgccccactgcagcactgctgtactgtactggccgcagcgttcgccgtcctccgccacagaaaattcacgcacgattccgagcagccgccctccgccacaatttcgccatgggcgcgccctagccccgcccttcttatccccgctcttccccgcctatggctgccgctgctacagctgacgcctccgcgcagcccctcccatggctctgcttgcgctacggttcgggccgcttctccctgccccgccccaccaccgtcgggtcctgcggaaccgatgccgagtccggatcgtcgcctccaatgcccccacccccgtgagggacgggggcgctgccgcggtggtgtggtttaagcatgatctccgcatcgacgaccacccgggcctcgccgccgccgtctcggagccgcggcgccccgtcgtgccgctttacgtcttcgaccgacgcatcctcgccggctattcagataaaatgctggaactgctgctatttgctctgaaagatcttaagatgacgttgaaatctcaagattctgatttgctcataggcctgggaaacgctgaagatgttgtgctgaagcttgtgaatgaggtcactatgcaaggtacaagcaggtctcgtttttacagaagaagaagttgaatatagagtgcgtgatgttcttgccaatgttgaatcatctttatctaatgggtcattctcatggggaagccctcccaagatagtggcttggagtgccccattgtatgactataagaatctgggagcagtaccgacatcacatgacgattttttaaagaaaaaattaccattggccacaccttcttgctgcggcgaccttgcctgctctaaatttggagttagacacagataagcccagaagcaggtctggatgagcttttctaagaaacctgcttttggaaaagctccacccgcagaaactcaaacagacatgcaagtgattctccagatgtcgggaacccgtgagaggccacaaggaagaagataatgcgaagggatgtcaaataagctgggtttgaaccttggatgttagcaagttcagggatgtgaaactgcaaattaatagttccaggacttacatgcatctctggacaagctcaaagatgctgatgttctctacccactctggaagaattaaaatgtttcctgaaagaaataacaccagaggacaattgggctcctctcaagagaatgcccgcaagatctatccttaaaaggacaatcagtcaaaggaagatcaaaagtaatgctacattaagcaccatcaatgaagaaaacatagatgatgctgccaccatggattctgttgcatcaggaaagaggattataaactcgaagtttgcatcagagaactcactggaagttagtggtggaacagaaattactttggatgctttggctgcttacctaaaatatcttgaaggcacaggaaatgctagttggcaagagttgcatgataaagtgcgtttagctgaaaccagatatggtgcttcattctacatcttgtttggtcctgcaattcaacttggagtcatatctaggaggaaagcttacactgagactatccaatatgaaaaagatcgcaatgcaggttttctatcaccatttgggtactcaacacctacagtaacatcagcagtagatgctatatgttcaatggagtggtattggctcttggcatcaaaatcccaagtatgcatcgaggggaaatattctataagaatttggagatggaagggttatcttgtacagtacacctttcttggcaacgaaggtccacctgttcttcttgtgcatggttttggagctttcctggagcattttcgtgacaatatagacaagattgctgctacgggccaccgagtttgggcaattactcttgttggctttgggaaatcagagaaaccaaatgtcaactattcagaacttttctggtctgaactactgagggattttattgttgaaattgtgagggagcctgttcatcttcttggcaactctattggaggttatctctgtgctattgctgctggtttatggccttctcttgcaaagtctctggttcttttaaactcagctggttcagttgttccaaattactccttcatcccactgagtgaagaaagacgaacatcatggatttccaggttgcaggcacagctccttttgctcttcttgaggtcaagggcagaaggcattcttaaagaatattatcctacaagaactgaacgggtggacaagccacttctggaccagattgtaagagcttcatatgatcctggtgctgcaaaagtccttgagagtgtattcaacttcaatctttcaattcctcttaacttcttatttgattcttttggagggaagatattagttatccagggtatgaaagacccccttacaaaatctgaggcatttgtcaccatgctccgagaacattgcagcaaggttcaaatcagagagttaaatgcaggtcatgctccacatgatgaagttccagatgaagtaaataccatactatgtaaatgggtggagcagattgaagttaagccagccctggagaagaccaaggcaatataggtaacatttagaattatggacaccctatccattggttgattgtttaacatgatcttcaggagcaccttggtacattttcagtgacctaccaaaacttgtgtgattaaagcattgtgaattgttagccctatacaaattgtgattaaagtattgtgaattgttagctatatacaaaacttggtacattttctttcagctgatgttgagatgaacatacatgaaaccaaaaggacttttttttgggggtggggggtgggctagcatttgagcatgtttctgagtaagtttgcagagccgagatgcattctaagttgcacataacatgcctggttctgcttcttagggcttgtttagatagagggactagagctgatccctgttttatgggatgaaaagattgggtcagatccctgccaattcagacaagccctaaatgttgcttttgattaaaggctgaatctgaccggaaataaaccttggaccctcaacgacatataatctaaaatcacaatagttgcgcttgtgatcccattgtgcaagtaatgtttaatcatgctacttctatacttgcatccactgtactccactcctgcttgttttattgagacagcagcgtcacacaattattttttatctcacgccaactggtgctttatcatgtcatttatgtaattatgtgcaatcagcaatttcatgagagaagccaattgtaatcaccttgttgaactattctccagcaaggtgagctgctggaacttttagtgaaggatttgaactggatgtgttagtattcttttgttatagtgcagccgtgaccctctagagcttgatctgggttctaagtttaaacgtaggatcagagcagacccggacgcctggtttcaatatcagcacatgccatcataggctcacgacgacgaagaggtaaggcggttatttacgccgatattttttgagctgtcagtcatcacagtccctagtgcggctgtgttaatcagaagacactggattatatacgtatagattatataatagagagaccaagttcggtgtcgtagtttgtcaaatgctcccctttctgcttgcgtattgtaccccttcttttccgtactgaacaattcgtgctcggttgttcagtatggaacacacttgtcgacactggagcagggtttcgtttcatcatcctgcgtttgcattacatcagttgtgcagttccagttccatttccacgccaatctactaatcgctggtgcttccatcctttcgcggtgccatactgtcatgaaactgcagctgtcactttggccaccttcccccagcaaaaagaacgcgagcattacctctagggccaggcggacagcgaccactcagagtgaatatcaatcccctcatgagcatgaccgccacgcatcacgcatgctgtcattgtttttttcgctttgctgaccaaatattcagtgccttaattctttcttttttctgtcccagaaacaaatcagcagtgcttccaccagtcatgagccctggtgaccatccgagaaatctttgggcgcgcatcagtgaggccataaaacaaaagcgctgattgggatcgcccaaccaacgcaccttatcagctttccccctctctcttggtttcaccaaatctgacggtgacgcgcccggtgcatggcctccggaagatgtcaagttgcaggtgattttttaattcagagggaaaaaagagacgtacacgcggaagctttttactctagtagttagagttagttgttagtactattgcagtgtagagtaatttttttaaaattgatcatagcgtggccatgtacaagattttttttgggtttactgttgtgacgcagcatgcatgcatgcacgcatttttcttccat

SEQ ID NO: 207887 - DNA, 6846 bp, Zea Mays
ctgctctgttgcgcgtttccctggcctctgctgcgaacctgcaggtgcggacttgcggctgcggcgccccactgcagcactgctgtactgtactggccgcagcgttcgccgtcctccgccacagaaaattcacgcacgattccgagcagccgccctccgccacaatttcgccatgggcgcgccctagccccgcccttcttatccccgctcttccccgcctatggctgccgctgctacagctgacgcctccgcgcagcccctcccatggctctgcttgcgctacggttcgggccgcttctccctgccccgccccaccaccgtcgggtcctgcggaaccgatgccgagtccggatcgtcgcctccaatgcccccacccccgtgagggacgggggcgctgccgcggtggtgtggtttaagcatgatctccgcatcgacgaccacccgggcctcgccgccgccgtctcggagccgcggcgccccgtcgtgccgctttacgtcttcgaccgacgcatcctcgccggctattcagataaaatgctggaactgctgctatttgctctgaaagatcttaagatgacgttgaaatctcaagattctgatttgctcataggcctgggaaacgctgaagatgttgtgctgaagcttgtgaatgaggtacaagcaggtctcgtttttacagaagaagaagttgaatatagagtgcgtgatgttcttgccaatgttgaatcatctttatctaatgggtcattctcatggggaagccctcccaagatagtggcttggagtgccccattgtatgactataagaatctgggagcagtaccgacatcacatgacgattttttaaagaaaaaattaccattggccacaccttcttgctgcggcgaccttgcctgctctaaatttggagttagacacaggttctctacccactctggaagaattaaaatgtttcctgaaagaaataacaccagaggacaattgggctcctctcaagagaatgcccgcaagatctatccttaaaaggacaatcagtcaaaggaagatcaaaagtaatgctacattaagcaccatcaatgaagaaaacatagatgatgctgccaccatggattctgttgcatcaggaaagaggattataaactcgaagtttgcatcagagaactcactggaagttagtggtggaacagaaattactttggatgctttggctgcttacctaaaatatcttgaaggcacaggaaatgctagttggcaagagttgcatgataaagtgcgtttagctgaaaccagatatggtgcttcattctacatcttgtttggtcctgcaattcaacttggagtcatatctaggaggaaagcttacactgagactatccaatatgaaaaagatcgcaatgcaggttttctatcaccatttgggtactcaacacctacagtaacatcagcagtagatgctatatgttcaatggagtggtattggctcttggcatcaaaatcccaagtatgcatcgaggggaaatattctataagaatttggagatggaagggttatcttgtacagtacacctttcttggcaacgaaggtccacctgttcttcttgtgcatggttttggagctttcctggagcattttcgtgacaatatagacaagattgctgctacgggccaccgagtttgggcaattactcttgttggctttgggaaatcagagaaaccaaatgtcaactattcagaacttttctggtctgaactactgagggattttattgttgaaattgtgagggagcctgttcatcttcttggcaactctattggaggttatctctgtgctattgctgctggtttatggccttctcttgcaaagtctctggttcttttaaactcagctggttcagttgttccaaattactccttcatcccactgagtgaagaaagacgaacatcatggatttccaggttgcaggcacagctccttttgctcttcttgaggtcaagggcagaaggcattcttaaagaatattatcctacaagaactgaacgggtggacaagccacttctggaccagattgtaagagcttcatatgatcctggtgctgcaaaagtccttgagagtgtattcaacttcaatctttcaattcctcttaacttcttatttgattcttttggagggaagatattagttatccagggtatgaaagacccccttacaaaatctgaggcatttgtcaccatgctccgagaacattgcagcaaggttcaaatcagagagttaaatgcaggtcatgctccacatgatgaagttccagatgaagtaaataccatactatgtaaatgggtggagcagattgaagttaagccagccctggagaagaccaaggcaatatagaaacaaatcagcagtgcttccaccagtcatgagccctggtgaccatccgagaaatctttgggcgcgcatcagtgaggccataaaacaaaagcgctgattgggatcgcccaaccaacgcaccttatcagctttccccctctctcttggtttcaccaaatctgacggtgacgcgcccggtgcatggcctccggaagatgtcaagttgcaggatctcttataaaactggtgtacttctcgcgacatgctgagctctccactgaagataagcacaagatatccacaaagagaagacttgggatgtttaatggtggcaggagaagctacccgattcttggagggaggctccacttcgtaaagtttgagactgggaagctaaatgaatgtttggacttcatttcttccaaacaactacatcgtggtggaattgattcaccttcatggcgctctggggctcagtctgatgacattgtaattaaggcaacaggtggtggagcattcaagtatgcagatgtcttcaaggaaagattgggagtcagccttgaaaaggaagatgaaatggactgtcttgtggctggagcaaactttttgcttaaggctatacgtcatgaagcttttacacacatggatggccagaagcaatatgttcagattgatcagaatgacttgtttcccttccttcttgttaatgtcggatctggtgttagtataatcaaggttgatgggcatgggaaatttcagcgagtaagtgggacaaatgttggtggtggtacgtactggggattggggaggctaatgacgaagtgcaaaagttttgatgagttgctagagttgagccagcgtggagacaatagcaccatggacatgcttgtaggagacatatatggtggtctggactactccaagattggcctttcagcatctacaattgcctctagttttggaaagataatttcagaaaacaaggagctatcagattatagacctgaagatatatcgctctctctgttacggatgatttcatataatattggccagatttcctatcttaatgcacttcgttatggactcaagaggatattttttggtggattcttcatccgtggtcatgcctacactatggatacaatttcttttgcagtgcatttctggtcaaaaggagaggcacaagctatgtttctgcgccatgagggctttctaggagctcttggtgcatttatgagttatgagaagcatggtcttgatgacttaagggtacatcatttggttgaacgcttcccaatgggtgctccatatgttggtggaaagattcacgggccacctcttggagatctcaatgagaagatatcatggatggagaagtttgtgcaaaagggtactcagattatagcccctgtacctatgggagttccagctacgacaggtatgggaggctttgaaaggccgactgctaagggtgacatcttgcggtcagatgcaagtgcagcgctaaatgtcggtgttctccatcttgtacccacattggatgtatttccattgttggaagatccaaagacgtatgaaccaaacacaattgatcttgaccaggatgagttcaagtactggttcaagattttgtcagatcattcgccggacctcgtggacaaggcagttgctagtgaaggtgggactgatgatgccaaaagacggggtgatgcatttgcacatgccttttctgctcatctggcaagattgatggaggagccagctgcttatggaaagtttggtttggccaacctgttggaattgagagaagaatgtctgagggaatttcagttcgttgatgcatatattagcatcaagcaaagggaaaatgaagcttcactggctgttttaccggatcttctgatggaacttgatagtatgaatgaggaagctaggctgcttgcactaattgaaggtgtccttgctgcaaatatatttgattgggggtctcgagcttgtgtagaactttatcacaagggaactataatagaaatctatcgcatgagtcgcaagaagatgcaacgtccttggcggattgatgactttgacatgttcaaaaagagaatgcttactgataggaaggaccaatcatacaaaagagcactgctttttgttgataactcaggtgctgatgtggtccttggaatgcttcctttagctagggagcttttacgccatggaacagaggtagttcttgttgcaaattcgttgccggctttgaatgatgttaccgctaatgaacttccagaagttatagctgaagcctcaaagcactgtggtatccttcggaaagctgcagaagctggtggattgatagtcgatgcaatggctggcatccaagatgatctcaaggatgagacagtgtcagtgccactaatggttgttgagaatggatgcggcagtccatgtattgatttccggcaggttagctcagagcttgctgctgctgcaaaggatgcagatttgttaattttagaaggcatggggcgatcactgcataccaacctcaatgcccgttttaagtgtgatgctctaaagcttgctatggtcaagaatcagcgattggcagaaaaactcttcaatgggagtctatacgactgcatctgtaaatttgaaccagttccttaacaacatggtagcgactgcggaggcaactagcagaagcagcttgattggtgtagccggtgagacagaaacaatcatacagcgtacggcataaccgatccttccatgtacggggtacaagaaacgccctttcaataaaacaataacagtgttttctgaaacgatataataaaggctctaaaggctctttccagaaatattgaagggaaaagtttgagccagcaactggagttcgtgtttaagccagaactagttagcagcctaccatggcgaaagtaacatactcgaaccaatcttggaaagatcctgtcattcttgtgccatgctcgaatcaatccataaattgttcagacactgccgggacaatgccatcactcaaatgctaagaatcagttattagtcttcgcatgtgggcaactataataaatcaataaacgacacagtagtcacgagacatgtaaaacaagaggggatgtgaggcattttttcttcagcatacaccagttgatccactaatcaacaagccgtccatcgctccagaaactaccagctctaggcaaagttgatgtcatacgccttactgccgtccgccctgaagatgccaaagtggcgctcgaactcggggccgggcttgccgtcctcgtcgtacaagtcgaacaggaacacctccacgggcacgccgggccgcttcggcgtgccgacgccgcgcgccgccctctccacaatcttggcgttgtacgctgcggcgttctgcggggtggcggccgggtgccccgcggttggccacccggtctcggtcaccgcgaccggcacgccgtcgaacccctccttctccagcgcggccaccagcgcgtctaccgtggcgtcgaacaggttcgtgtacaccagcgcgccgtcctgcaccggcgccgcgcccgctccgaagagcgcgtacgcgagctgcacgttcgccgggtcgttcacgtggctgatgaaagggtaggcgttcaccatgaagggcgcaccggtgtcggccaggaaccgcagcatggggcggaggacggggagggaggcggcgtcgaacgcgccggcggagggcgggtacgaggcggccagcaccgaggaggcgtgcgcggaggagaccttgaccctgccgtccagccccagggtggcgagcgcggcgtgcaggttccgcatggccggcacgaggtgaggcgcatagaactggttgttgtacagcacctcgttgccgacggcgaggcaccggacgcgctcggcgggggcgtgggccaggaccgcggaccgcagccactgcgccgcgccctcgggccccgccgcggccaggaaggtgaggttctcgttgggcacgcccaccatgaggtcgatgcccgccgcggcgaaggccgggagcacggccgggtccggcaggaagagccgcgccttggtgatcccgttccgcttgagcagtgccgcggcggccgacggcggcgggaggttactgccaacgcggccgtggcagatgccgatcttgcccgcgtcaccggccgccgccgccactgccatcgacgcgacggcgaggaggacgtggccgagaagacacaaggctattctcgtggccattggtgaaggaaagaaggaaggaagaatgccacgctttggttgtgttgtcgccgttaaatagattctgctttggcaagaattgtatggttctggttgcttgtagttgtagttgtggcagatcgaggaagttaaggttgagacttgaggatgggctttgtggcagatccacgtgggtcactgcttggttatgatgcttatggtcttttgatgggctg

SEQ ID NO: 207888 - DNA, 2214 bp, Zea Mays
atgtgaaactgcaaattaatagttccaggacttacatgcatctctggacaagctcaaagatgctgatgttctctacccactctggaagaattaaaatgtttcctgaaagaaataacaccagaggacaattgggctcctctcaagagaatgcccgcaagatctatccttaaaaggacaatcagtcaaaggaagatcaaaagtaatgctacattaagcaccatcaatgaagaaaacatagatgatgctgccaccatggattctgttgcatcaggaaagaggattataaactcgaagtttgcatcagagaactcactggaagttagtggtggaacagaaattactttggatgctttggctgcttacctaaaatatcttgaaggcacaggaaatgctagttggcaagagttgcatgataaagtgcgtttagctgaaaccagatatggtgcttcattctacatcttgtttggtcctgcaattcaacttggagtcatatctaggaggaaagcttacactgagactatccaatatgaaaaagatcgcaatgcaggttttctatcaccatttgggtactcaacacctacagtaacatcagcagtagatgctatatgttcaatggagtggtattggctcttggcatcaaaatcccaagtatgcatcgaggggaaatattctataagaatttggagatggaagggttatcttgtacagtacacctttcttggcaacgaaggtccacctgttcttcttgtgcatggttttggagctttcctggagcattttcgtgacaatatagacaagattgctgctacgggccaccgagtttgggcaattactcttgttggctttgggaaatcagagaaaccaaatgtcaactattcagaacttttctggtctgaactactgagggattttattgttgaaattgtgagggagcctgttcatcttcttggcaactctattggaggttatctctgtgctattgctgctggtttatggccttctcttgcaaagtctctggttcttttaaactcagctggttcagttgttccaaattactccttcatcccactgagtgaagaaagacgaacatcatggatttccaggttgcaggcacagctccttttgctcttcttgaggtcaagggcagaaggcattcttaaagaatattatcctacaagaactgaacgggtggacaagccacttctggaccagattgtaagagcttcatatgatcctggtgctgcaaaagtccttgagagtgtattcaacttcaatctttcaattcctcttaacttcttatttgattcttttggagggaagatattagttatccaggtatggtatgaaagacccccttacaaaatctgaggcatttgtcaccatgctccgagaacattgcagcaaggttcaaatcagagagttaaatgcaggtcatgctccacatgatgaagttccagatgaagtaaataccatactatgtaaatgggtggagcagattgaagttaagccagccctggagaagaccaaggcaatataggtaacatttagaattatggacaccctatccattggttgattgtttaacatgatcttcaggagcaccttggtacattttcagtgacctaccaaaacttgtgtgattaaagcattgtgaattgttagccctatacaaattgtgattaaagtattgtgaattgttagctatatacaaaacttggtacattttctttcagctgatgttgagatgaacatacatgaaaccaaaaggacttttttttgggggtggggggtgggctagcatttgagcatgtttctgagtaagtttgcagagccgagatgcattctaagttgcacataacatgcctggttctgcttcttagggcttgtttagatagagggactagagctgatccctgttttatgggatgaaaagattgggtcagatccctgccaattcagacaagccctaaatgttgcttttgattaaaggctgaatctgaccggaaataaaccttggaccctcaacgacatataatctaaaatcacaatagttgcgcttgtgatcccattgtgcaagtaatgtttaatcatgctacttctatacttgcatccactgtactccactcctgcttgttttattgagacagcagcgtcacacaattattttttatctcacgccaactggtgctttatcatgtcatttatgtaattatg

SEQ ID NO: 207889 - DNA, 1596 bp, Zea Mays
tgcatctctggacaagctcaaagatgctgatgttctctacccactctggaagaattaaaatgtttcctgaaagaaataacaccagaggacaattgggctcctctcaagagaatgcccgcaagatctatccttaaaaggacaatcagtcaaaggaagatcaaaagtaatgctacattaagcaccatcaatgaagaaaacatagatgatgctgccaccatggattctgttgcatcaggaaagaggattataaactcgaagtttgcatcagagaactcactggaagttagtggtggaacagaaattactttggatgctttggctgcttacctaaaatatcttgaaggcacaggaaatgctagttggcaagagttgcatgataaagtgcgtttagctgaaaccagatatggtgcttcattctacatcttgtttggtcctgcaattcaacttggagtcatatctaggaggaaagcttacactgagactatccaatatgaaaaagatcgcaatgcaggttttctatcaccatttgggtactcaacacctacagtaacatcagcagtagatgctatatgttcaatggagtggtattggctcttggcatcaaaatcccaagtatgcatcgaggggaaatattctataagaatttggagatggaagggttatcttgtacagtacacctttcttggcaacgaaggtccacctgttcttcttgtgcatggttttggagctttcctggagcattttcgtgacaatatagacaagattgctgctacgggccaccgagtttgggcaattactcttgttggctttgggaaatcagagaaaccaaatgtcaactattcagaacttttctggtctgaactactgagggattttattgttgaaattgtgagggagcctgttcatcttcttggcaactctattggaggttatctctgtgctattgctgctggtttatggccttctcttgcaaagtctctggttcttttaaactcagctggttcagttgttccaaattactccttcatcccactgagtgaagaaagacgaacatcatggatttccaggttgcaggcacagctccttttgctcttcttgaggtcaagggcagaaggcattcttaaagaatattatcctacaagaactgaacgggtggacaagccacttctggaccagattgtaagagcttcatatgatcctggtgctgcaaaagtccttgagagtgtattcaacttcaatctttcaattcctcttaacttcttatttgattcttttggagggaagatattagttatccagggtatgaaagacccccttacaaaatctgaggcatttgtcaccatgctccgagaacattgcagcaaggttcaaatcagagagttaaatgcaggtcatgctccacatgatgaagttccagatgaagtaaataccatactatgtaaatgggtggagcagattgaagttaagccagccctggagaagaccaaggcaatatagagattcagaggtttgtctgcaagctaggcgcagcacacttaaagcgagtatgatggatggttatagatggttcacctaattgcgggcttgcatccgaag

SEQ ID NO: 207890 - DNA, 929 bp, Zea Mays
cttactctgaatattttgcttgatatgggaattgcaagatcatttgtaacactgaagtgtgatatctaggaaagacgaacatcatggatttccaggttgcaggcacagctccttttgctcttcttgaggtcaagggcagaaggcattcttaaagaatattatcctacaagaactgaacgggtggacaagccacttctggaccagattgtaagagctgtatccttgtattatccagtatatttggcatacttttaactgcaacatagtctgcagaaggtttccttgacaaataaattcagtcatatgatcctggtgctgcaaaagtccttgagagtgtattcaacttcaatctttcaattcctcttaacttcttatttgattcttttggagggaagatattagttatccagggtatgaaagacccccttacaaaatctgaggcatttgtcaccatgctccgagaacattgcagcaaggttcaaatcagagagttaaatgcaggtcatgctccacatgatgaagttccagatgaagtaaataccatactatgtaaatgggtggagcagattgaagttaagccagccctggagaagaccaaggcaatatagaaacaaatcagcagtgcttccaccagtcatgagccctggtgaccatccgagaaatctttgggcgcgcatcagtgaggccataaaacaaaagcgctgattgggatcgcccaaccaacgcaccttatcagctttccccctctctcttggtttcaccaaatctgacggtgacgcgcccggtgcatggcctccggaagatgtcaagttgcagacaggtcagtaggtcatcactcactcgatcagtttcggccaacacgtcgatttgctgcatatacacgtattggcgccacacgcgtggatggcattaatttgaggtataagcta

SEQ ID NO: 207891 - DNA, 1717 bp, Zea Mays
tttttttattacattttcctcttcctttttatacgaacgaggaacgatcacacgcagacacgcttccgcggcgccaccaccttccgccctccgctgcccgctcgcctccgcgcccgaaaggcaaagcctcctcgctcctgccccgccccctcctcgcggcgtcggtcaaaccctagcacaccgtacgcgcaggcccgcccgctcccattccccacctccacccatggcggcgctctccgcgcccctccgcgccgtcgccgccggatcccgcgtcgccgcgtccgaccccgtcaaggtctcgtgcgtgaggagcactggctcagctcacttcggctgcgccttcccctacatcagggcctcctcttcggctgcgaggaacctcgagccgctgagggcgatagccacgcaggcgccccctgccatgccacaatattcgagtggggagaagacaaagattggcatcaacgggtttgggcggattggcaggttggtcctgcgaattgcaaccagcagagatgatattgaagttgtggctgtgaatgaccctttcattgatgctaagtacatggttctattcgtgtcgtggatgattcaaccctcgagatcaatgggaagaaggtcacaattacaagcaaaagagatcctgcagagattccatggggtaactttggggctgaatatgttgttgaatcttctggtgtcttcacgacgactgataaagcatcagcacacttaaagggtggtgcaaagaaagtggtgatatctgcaccatcagctgatgctcccatgtttgtagttggagttaatgagaatagctatgatccaaagatgaatgttgtttctaatgcaagttgcactaccaactgccttgctccacttgccaaggttgtccatgaggaatttggcatcgtggagggccttatgacaactgttcatgcaacaacagctacccagaagaccgtcgatggtccttcgatgaaggattggagaggaggacgtggtgctgcccaaaacataattcccagctccactggtgcagcaaaggctgttggaaaagtcctgcctgagctgaatggaaaactcactggtatggccttccgagttccaacaccaaatgtctctgttgtggatttgacatgccggattgagaaaagcgcctcctatgatgatgtgaaagcagccatcaagacggcatcagagggtgcactcaaaggtattcttggctacacagacgaggatgttgtttccaatgattttgttggtgattcaaggtcaagcatctttgatgccaaggctggtattggactgagctcttccttcatgaagctcgtgtcttggtatgacaacgagtggggctacagcaaccgggttctggatctgatcgctcacatggctcttgtgagcgccaagcactgatgttcgtactcgttcctccagtaccagtagtagcctagataagaggctgcagttttgacggccattttcttttagctgttgtttggaataaaagaccaaatgttggaacacttggaactcgcgcaaaactggaatccgattcatgacctgtgttttagttgtagagggggcaaatttgcatcgtactatatgcgggattgttgatcggatgtcgtatggttcattgacttgatttattatgatgcgtggagggctgatttggtgatcagtgatcacggctctctatgagagagaaatctct

SEQ ID NO: 207892 - DNA, 1320 bp, Zea Mays
ttttacaaaggcagtttttagttcctgggtttgggcggattggcaggttggtcctgcgaattgcaaccagcagagatgatattgaagttgtggctgtgaatgaccctttcattgatgctaagtacatggcctatatgttcaagtatgattccactcatggcccgtttaaaggttctattcgtgtcgtggatgattcaaccctcgagatcaatgggaagaaggtcacaattacaagcaaaagagatcctgcagagattccatggggtaactttggggctgaatatgttgttgaatcttctggtgtcttcacgacgactgataaagcatcagcacacttaaagggtggtgcaaagaaagtggtgatatctgcaccatcagctgatgctcccatgtttgtagttggagttaatgagaatagctatgatccaaagatgaatgttgtttctaatgcaagttgcactaccaactgccttgctccacttgccaaggttgtccatgaggaatttggcatcgtggagggccttatgacaactgttcatgcaacaacagctacccagaagaccgtcgatggtccttcgatgaaggattggagaggaggacgtggtgctgcccaaaacataattcccagctccactggtgcagcaaaggctgttggaaaagtcctgcctgagctgaatggaaaactcactggtatggccttccgagttccaacaccaaatgtctctgttgtggatttgacatgccggattgagaaaagcgcctcctatgatgatgtgaaagcagccatcaagacggcatcagagggtgcactcaaaggtattcttggctacacagacgaggatgttgtttccaatgattttgttggtgattcaaggtcaagcatctttgatgccaaggctggtattggactgagctcttccttcatgaagctcgtgtcttggtatgacaacgagtggggctacagcaaccgggttctggatctgatcgctcacatggctcttgtgagcgccaagcactgatgttcgtactcgttcctccagtaccagtagtagcctagataagaggctgcagttttgacggccattttcttttagctgttgtttggaataaaagaccaaatgttggaacacttggaactcgcgcaaaactggaatccgattcatgacctgtgttttagttgtagagggggcaaatttgcatcgtactatatgcgggattgttgatcggatgtcgtatggttcattgacttgatttattatgatgcgtggagggctgatttggtgatcagtgatcacggctctctatgagagagaaatctct

SEQ ID NO: 207893 - DNA, 1931 bp, Zea Mays
ggttccggttcatcgtcgaccgccgctttttttcttccttccgccgccgactgttgccacttgccagtaccatctagctgcttctgatttcctaaaatcagttagatacttgcttcatcaaggcttagcttttcgaggtcatgatgaatcaaaagagtcaaaaaataagggaaactttcgagagctggtgaatactttggctgatcaaaatgatgctatacgtgaatctattaggaatgctcctgaaaattgtcaatggatttgtggagatattcaaaaggaaatcaccagttattttgcaaagataactttaaattctattattaaggaaattggaggcgatgtgtttagtttattaattgatgaggctgcagatgtgtctgataaagagcaaatggcaattgtgttaagatatctcaacaaacaagggcttatcattgaaagtttagttggagttgtacatgtgaaagaaacatcagcaatatgtctcatggaagctcttcaaaaattattcactgatattgggttaagcataaaacaagtcaggggtcaatgttatgatggggcaagcaacatgcgtgtagcaaagaagcatggagatgttgcagattttttttatatgatctctattttattcaatgtggttggaggttcttgcaaaagaaaagatatgatcagagagaaacatcgtgatgatgtaacaaaggccattggaagtggacaacttagcactggcaaagggttaaatcaagatcaaactcttcagagagctggtgacacacgctggggttcacactatagaaccctctcaagtatagtgaaattgttcccatctattatttctgttctaaaatatgttgagaaagaggggaaaagtgataagaaatctcaagcacgtggtcttatagcatattttgagacatttgattttgtgttttatttgcacatgatgctccatatattgggaagtgcaaatactttgtcacaatcattacaaaggaaggatcaagatatcctcaatgcgatgtcatgtgtgaggggaacaagaaatgagctgcaaaacctaagagagaatggatggaactcactcatggagaaggtacatttattctgcgatgaacatcacattgaaagggaaaacatgcatgacgaatatgtcaataggcatgcaccacgaaagaaatccaataagacaaacttgcagcattaccaaatagaagttcttaattatgttattgattggcaacttcaagagttcgatgaccgttttagtgaggtaaattctgcattgttgggtcacatggctgcttttaacccaaagaactcatttctcgcatttgacagagaaaccttagtaaggcttgctgagttttatccagatgattttgattcaaataaattggatgatctaagccttgaacttgttatatacattgacaatgtgagagcagatagaaggtttgacaatttggatgggattgttgatctagctaaattaatggtgcaaacaaataagcatattactttttcattggtctatcaacttctaaagctagtactaatattgccggttgccacagcatcagtggaaaggtgtttttcagctatgaatgttgtaaagaaaaagttgagaaacaagatgggtgatcagttcatgagtgattgcctaatatgctatgtggagaaagatatgttttcaaccattagtaatgatgaggtgattgatctttttaagaagatgaaatttcgaagtgggaagctttaacatgaatgaggaaactacatatacattgcacaacatcaaagcgcttttttgaaacatgcaaacatatgattgcaggattctattcagttggaattctttaagaagctcacgaaagaggcacgtgagtatatgacttacaagcttcatccaagaaggtagcctaaag

SEQ ID NO: 207894 - DNA, 2769 bp, Zea Mays
aacttcttggttccggttcatcgtcgaccgccgctttttttcttccttccgccgccgactgttgccacttgccagtaccatctagctgcttctgatttcctaaaatcagttagatacttgcttcatcaaggcttagcttttcgaggtcatgatgaatcaaaagagtcaaaaaataagggaaactttcgagagctggtgaatactttggctgatcaaaatgatgctatacgtgaatctattaggaatgctcctgaaaattgtcaatggatttgtggagatattcaaaaggaaatcaccagttattttgcaaagataactttaaattctattattaaggaaattggaggcgatgtgtttagtttattaattgatgaggctgcagatgtgtctgataaagagcaaatggcaattgtgttaagatatctcaacaaacaagggcttatcattgaaagtttagttggagttgtacatgtgaaagaaacatcagcaatatgtctcatggaagctcttcaaaaattattcactgatattgggttaagcataaaacaagtcaggggtcaatgttatgatggggcaagcaacatgcgtggtgagtttaatggcttgaaagctaagattttgcaagcaaataagtcagcatattatgtgcattgttttgctcaccagctccagttggttattgtggcagtagcaaagaagcatggagatgttgcagattttttttatatgatctctattttattcaatgtggttggaggttcttgcaaaagaaaagatatgatcagagagaaacatcgtgatgatgtaacaaaggccattggaagtggacaacttagcactggcaaagggttaaatcaagatcaaactcttcagagagctggtgacacacgctggggttcacactatagaaccctctcaagtatagtgaaattgttcccatctattatttctgttctaaaatatgttgagaaagaggggaaaagtgataagaaatctcaagcacgtggtcttatagcatattttgagacatttgattttgtgttttatttgcacatgatgctccatatattgggaagtgcaaatactttgtcacaatcattacaaaggaaggatcaagatatcctcaatgcgatgtcatgtgtgaggggaacaagaaatgagctgcaaaacctaagagagaatggatggaactcactcatggagaaggtacatttattctgcgatgaacatcacattgaaagggaaaacatgcatgacgaatatgtcaataggcatgcaccacgaaagaaatccaataagacaaacttgcagcattaccaaatagaagttcttaattatgttattgattggcaacttcaagagttcgatgaccgttttagtgaggtaaattctgcattgttgggtcacatggctgcttttaacccaaagaactcatttctcgcatttgacagagaaaccttagtaaggcttgctgagttttatccagatgattttgattcaaataaattggatgatctaagccttgaacttgttatatacattgacaatgtgagagcagatagaaggtttgacaatttggatgggattgttgatctagctaaattaatggtgcaaacaaataagcatattactttttcattggtctatcaacttctaaagctagtactaatattgccggttgccacagcatcagtggaaaggtgtttttcagctatgaatgttgtaaagaaaaagttgagaaacaagatgggtgatcagttcatgagtgattgcctaatatgctatgtggagaaagatatgttttcaaccattagtaatgatgaggtgattgatctttttaagaagatgaaatttcgaagtgggaagctttaacatgaatgaggaaactacatatacattgcacaacatcaaagcgcttttttgaaacatgcaaacatatgattgcaggattctattcagttgctccgcccctggggccacggagctggccttggcgctgctggcggagctgtgcgcgtgcgcggacgggcgcgcggccgtggcggcgcacccggcgggcgtggccgtggtggcgcggcggctgcttcgcgtgtccgcggccgccgacgcgtgcgccgtgcgcgtgctggcggccgtcggcggccgggccgcgtcccccgaggtgctgcgcgagatggcgcgcgtaggcgccgtcgggaagctctgctgcgtgctgcaggcggactgcgacgccgccgtcaaggacgcggcccgcgccgtgctcaggctgcaccacggcgtgtggagcgggtcgccctgcgtcagcgcgtacctgctctccaggtacctctagtcgttgccgccagtaagggcacgccatgcatgcatgctgcgaggcagcgacttcctgtcggcattgcagaccgacgacatggttaagtcttctctactagtaactagctcatttagttttcttgttcgtcgatcggtcaagattatgctgccagcaaataatggtagtcaacccatctatcaccagcaaatgtatgtagaggaatttaatgttattttccttatatatctttattagacgaggcttttcctttctttttccttgtccaaatttaaggctagtttgggaacccattttacaaagggaaattagttaatttttctttgaaaaaattgaaatctcttgagaaaatgatgttcccaaactagactttaatgttatccagtgcctcttaatatgttcgaaggcttaacaactatatatatactgccctaaat

SEQ ID NO: 207895 - DNA, 1489 bp, Zea Mays
attttttacaatcctatccaccaaaccaggcctcaactgcacgtctcccgctttgtgctattcccgcagccagaaaaccctaacttcccggccgccgctttcctttccctcgatccacagctcgcgccgttcctgcaagtgcgcacccatcgtcccacctacgcactgccgcccaacgatctacgagctgccatggctaactcggcaccgggaggaatgaggtcgttcctgcaggccgtgtctacggtcaccgaggaggcgccgacgccactccgcgtcgtccagatggagggcctggctgtactgaagatcatcaagcactgtgaggagtttgcgccagctttagttacaggtcaattgcttggtttggatgttggtagtgttctggaagtgaccaactgttttccgttccctatcagggaagaggatgatgaagcagatgcagatggtgccaattatcagcttgagatgatgaggtgtttgagggaagttaatgttgacaacaatactattggatggtatcagtcttgcttgcttggatcttttcaaactgtggaactgattgaaacatttatgaactatcaggagagcatcaggagatgtgtgtgcattgtctatgacccatctagatctagtcaaggcgtgctagctctcaaagccttaaagcttacagactcgtttatggatctttaccgtaacaatggtttaactggggagaagttaagggagaagaaattgtcctgggttgatatttttgaggagataccaataaaagtttccaactcagcgcttgtcagtgcctttatgaaggagctggaacctgagtcacctgttacccagtgtgacctggaccgacttaaattgtcaaccgccccctttatggaaaggaacttggaatttctgattgggtgcatggatgatctttcatcagagcagaacaagttccaatattataaccgcaatctctcaagacaacagtcacagcagcaggcatggcttcaaaagagaaggcaggagaacatggcgaggaaagcagctggtgaggagccactaccagaagaagatccatccaatcctatatttaagcctattcctgagccctcacgattggagggctatctagtaactaatcagatctccagttactgcaaccatatcaacggggttgctggtcagaatttcgacaggctatacctgatgaaggccttgcatgaggattagaagactgggctgtgatgaatgctgttagaattagcttgtgatactgctcaaaatcgtaattttgtgatgtacctttacatggggcgtgcctgtcctctacttaatgtttccatggaccagatggttagctcgtgatacttaatgtacttgcatatgtatgcgttgccgtataaaccaattttctccattagtatttttgtgacgctcagtttgaagtccatagtgtagcttgttttcgttctcgatttgggctgttgtcaaatggtag

SEQ ID NO: 207896 - DNA, 1256 bp, Zea Mays
agacaatgtagcttcaggcgggagtaaataggggttcgagccccagcctcttcatattatgcgggctgtactgaagatcatcaagcactgtgaggagtttgcgccagctttagttacaggtcaattgcttggtttggatgttggtagtgttctggaagtgaccaactgttttccgttccctatcagggaagaggatgatgaagcagatgcagatggtgccaattatcagcttgagatgatgaggtgtttgagggaagttaatgttgacaacaatactattggatggtatcagtcttgcttgcttggatcttttcaaactgtggaactgattgaaacatttatgaactatcaggagagcatcaggagatgtgtgtgcattgtctatgacccatctagatctagtcaaggcgtgctagctctcaaagccttaaagcttacagactcgtttatggatctttaccgtaacaatggtttaactggggagaagttaagggagaagaaattgtcctgggttgatatttttgaggagataccaataaaagtttccaactcagcgcttgtcagtgcctttatgaaggagctggaacctgagtcacctgttacccagtgtgacctggaccgacttaaattgtcaaccgccccctttatggaaaggaacttggaatttctgattgggtgcatggatgatctttcatcagagcagaacaagttccaatattataaccgcaatctctcaagacaacagtcacagcagcaggcatggcttcaaaagagaaggcaggagaacatggcgaggaaagcagctggtgaggagccactaccagaagaagatccatccaatcctatatttaagcctattcctgagccctcacgattggagggctatctagtaactaatcagatctccagttactgcaaccatatcaacggggttgctggtcagaatttcgacaggctatacctgatgaaggccttgcatgaggattagaagactgggctgtgatgaatgctgttagaattagcttgtgatactgctcaaaatcgtaattttgtgatgtacctttacatggggcgtgcctgtcctctacttaatgtttccatggaccagatggttagctcgtgatacttaatgtacttgcatatgtatgcgttgccgtataaaccaattttctccattagtatttttgtgacgctcagtttgaagtccatagtgtagcttgttttcgttctcgatttgggctgttgtcaaatggtag

SEQ ID NO: 207897 - DNA, 1852 bp, Zea Mays
aactcgactcgggtccggcgctgagccgctgaccgtcgacccgaccttgccctggctcgcctcctccgctgcggcggtctggaagggatcactggatcgtagatcccactcggcaaacccaaacggccaaacctttgcttgcattcagcacccccggcgagacgccactccaactgccgggatccagccgctgcacgcggcggccaccccgccctgccggccgaccaggggggttgagagcgggcgaggcggagatgcagagcgccacgcggctgacgctgctactgtgcgcggcgtgggcggccgcgctgctgtacggcgagatgggcgcctactgggtctcctacctcgcatgctcgtggccctcgtcgtcctcctcgccgccgaataaccatgtcaaggttgctgttgttgctgacccacagcttatggatagcacctcccttggtcttccatcaagctcagttgctctccaagctgctgagttttacacggatttgaacatgagaaggtccttccagtccaccatactgccattcaaacctgatgtggtcttatttcttggtgatcactttgatggaggcccttacatgcccgatgaagagtggcaggaatcattgtttcgatttaaacatatattcggcctgaatgatcaaagaacaaagcaacagatccctatctactaccttccaggaaatcatgatattggttactcagcatttcattcagtccatcctgaggtgctcagtcggtatgaaaaagaatttggatcaagaaattatcaattttctgctgggaaggtggacttcgttgttgttgatgcccaaacacttgatggagctaaacaaagcaaagaaaggtcctcctcttgggagttcattaaaactctatctccaggtaacacatcaaacccaaaggttctgctaacacatattccactataccgacctgataactctccttgtggcccgcatcgttcttcacctgttataaatcagagggtatcttatgccgccttagaccaaggaatcacctaccaaaattatctaactaaagagacttctgaccttttgctaagcttgttgaagccggccatgatcatgaccaatgcacagttgtccactccactccttttgggccagttacagagcataccctggggacaataagttggcagcaaggaaatctctatccatcttttatgctgctatctgctggacccaagttatcacaaaattcaactgatctggaacatgaggttgcaatgaacctttgctttttgcctaaacaaacccatatttatatctggtatatctgccagtttgtagtgaccatccttctcctagtcttttggccaacaaatggtctcggttctcttccttgcatgaacacattcatgagcttcatgaggtcggtgggcgccgaactgctttcaaggaccaaggaaaaagatgacgaggacgatggtgattatgatatggtttttgatgcggaaggatccatgcacctcgttaaaaaggcagtggcaaagaccccaagtgctagctcagactccagacctactggacgcggaagtgttgttgcaagggcaacagcaggaagacaccgattggagcctgattcatcgattcgtgtcgacatgggttctgagatgacatcagaagatgggggaaagttggcccgcgctggcaaatcgggagcaaggaaggtgctccaacggctgttccgtgtcattcagtctgttcttgtcattgccgctctgaatgcccccttgtacatgatgcttctcttcaaggattggattgatcgttgaagtatgtgagaatctattgtttttcagtaactcagtaga

SEQ ID NO: 207898 - DNA, 2314 bp, Zea Mays
gaatgggtcgcaagtcgcaacccacgctggctctctcccggctccgaactgctaagccccccgccggatcgggttgcgggtcgccatccccgacccagatccaccacagctcgccgccggtcgccgccgccgcagagtgggtgatagtgtacgtggtaacatgctggagccaacagcaatggaagtggtcgttgctggctcagtgagcaatgcagtggtgcctgcgcctgtggttcacaacccacgggcacgcaagctgcggtctgcagtttggcaggacttcacgaaggagcgtcgtgccgatggtaactgtgtggctgtctgtaaccactgcaagaagcagctcacggcaactagccggtcaggcacaacgcacctccgcaaccatctcgcaatctgcaccaccacctccacacggcgtgctggtaagcgccggaagcttgttgtgcgccgtattctccacaacaaatcctccatcgatgggcgctcgggtgagggtcacgcctcaggtgaggacaatgataatgagggcacacactttgatcaagaactcagccgccgagaccttgtgcacatgattgtccagcatggctaccggttttcgattgtggatgatgtgggcttccaaaagtttgttaagaacctccagcctcagtttaggatggtgtcgtatgaaacagtgagggctgatagcatggaaatatatgaaggtgagaaacttaagctacatgatgttctctttaagatcccctgcagggttagcatatcagttgacatgtggcggtcaaatacacagatggaatacatgtgcttgacttgccactacattgatcatgccaatgatgagtggaaagtcaggaaaaaaattctcaactttgtgcatatggaggcaccttttacacttgatcagatggttaatatcattgtagagaagttgcatagttggggtattgacagaaagctagctgctgttgtgctagacaactgcagcagcggtgaaattgttgctagagagcttcacagagttttccaggctcggaggcttctattgaatggggatttgttccaagtacgctcttgtgcacatattctaaatctcactgtccaagaaagctgggaacgggcatctgatataactgatagagttcgcaagatgattaactatgtcaagtttgaaaggttccaaaagtttcaggatattgcaaaggtattgcgtatggatcaaaagctgctagttattgattctcctgataactggccgtctacgtacttaatgtttgactctgcatgctactatcaagatgtgtttgtgcgcctgacagaacaggaaggtcattatgatgtttttctgtctgctaatgactgggctgatgtgaaagccctcactgaaatactggacgtagtctatcatgctatggagaagtttcctgtagaaaacccaactgcaaacctctatttcaatgagatgtgtgagatccacgtgcttttgaaaacctggtgcaagagtccatctactgttgttgccaaagttgctggccagatgctttctaagtttgaaggttactgggatctcactaggcctgtaatggcatttgcatctattcttgatccccgttacaagatgaagtccctcgaatacttttttcggctcatttattctgatgagcaatttacagcaaagacaatgatagatgtcatccagaatacctttcacaatctgtataatgattataaacatcagtcatcagactcatggaagaatccatctgttctctgttactctagaaacagtaattcttgcatgggctctgtgtacagcaatggggatgattctaagaccttttcgcgtatcacattatctgatgctcgacggggacttgatcagtatatacaagagacctcatcagggcaatccttgaagtctgacttggagatgtatctcgaggaagcagtttttcgtcaaaaagaaggaaatcaggataattttgacattctgggatggtggaagtcctttgccgccaagtatcctgtactttcacaaatggctcgtgatattttagctatccctgtatctatcatccctttggacagtgaagcccgtacactaaatgagtatctcagtactatggatccttcaacggttcagggattagtgtgtgcacaagattggttacgggatgacccagaagttgttgctggttcaggtggtcatggagatgatggagtaccgcgtggtgacgaacttattgtggtgccaaaatagagtggagtattctgatacaagtcttttgaagaagacgtgggcggcgatggt

SEQ ID NO: 207899 - DNA, 957 bp, Zea Mays
ctatcatgatgactttgaggacataggagatgttgaagacgaaagaagagctgcagctgaaacgaaatcatttcaacttctcaatgagctaagtgatcatctattttttagtttttcataattttcctttcatggcctccttacatgtttgatttcctatgatccatgagttgccaatcatgataacgcggtttcactatgtaggagatgaacaaggatgctgtcacaactgatgctatcggcagtatcagaacttgatgatgcttgtagactgttcatggtgcttgtagactgttcatggtgcttgtagggatgatgtatgtctatggcttactgagctccaaccaactatggaaggagcgttagctaggacagcagttagtctaacagttgtggacaaagttcagtataccatacactgaagcgcacccttgttgctaaagctgcaggtgtcaacagctttgctcagcagaatggaggatcattgtcactagcagcaagacctcaagcccaggcagcacgttgggacaactcaagaaaatggcagtggatatggacatagaaattgacaggcaaaacaaagtgctggttcctttcagcgacgacgtcgatgaactgaattttagactgaaaggcgtgaatcagtgtggacgccagttgctgggcaagtgatatggagccagaattcgggcagtttggagactatcgcctcgattgcagaatttaagaacattgttgttttacatgttttttgcagtgaatcaggccacacatgttgtattagtgagagaatgatgatttattttgtattattaaggatttcatagattattttagttttccctgaactgcaatcgtttcaataacatagaggggactaccttgaatgacatttaggtgaatttttaaggtatgtccattattccattatagagcacaaagcctacttcgtacaac

SEQ ID NO: 207900 - DNA, 1239 bp, Zea Mays
gtttttaggcattgtggaagaaaaaaacccaatacaatgcttaatagacaaacccatctcttagattgctgtcaagaggttaaataacgcaaagaacggcacagaagccgaatttgcttcagaagtcgagatactgggaagaataagacacaaaaacctcctgagcttccgtggatactgtgcggacggacccgagcgcgttctggtgtacgacttcatggcaaactcaagcctgtatgcacatctccatggaccgcattccgcggagtgtctcctcgactggcggaggcgagcgtctatcgccatgggcaccgctcgggctctcttgtaccttcatcgccacgcaacgcctaagataatccacggaagcgtcaaggccaccaacgtgctgctggattcagacttccgggcgcacgctggcgatttcggtctggcaaggcttattcccgacgacggaacggaccacgaaaagatagccagcagcgagagccagcgaggctaccttgctcccgagtacgccgccatgtccggcaaaccaactgcaggctgcgatgtatacagcttcgggatcatactgctggagcttgcgagcggcagaaggccagtcgagaagtcgggttctggcaaggcttgtggaatccgaagctgggtgctcccgctcgcaaggcagggcaggtacgacgagattgcggactcaaagctgggcgacaagttctctggacctgagctgagaaggatggtgttggtcggtctagcgtgtacacgttcagaacctgaaaagagacccacgatgcttcaagtcgtgccgttgctgaaaggcgagtcgaaagaaacgcttgttaagcttgaaagggaggagttgttcagcccagactcgacgacggtgagttcgcagggaacaccgaccccagatgggagcacggactctgcgccgccgctgaagaaagataaagaactggttggggcgtgagttgcgatatattgctgttctaggagattgtagagtgcgtatttgtggtattgatgattagtctgtgcggtttgacgtgaatgggaattgtataggcattgtttttttctaagttttttttttctgtcccttttgagggagtaaggaagagccggcgggctggagtactctgttgctttgcagctttttggttcattatgcttcgtctatcgagcttgtcgccgagtctggcccctcccttgcccgttttatctgtcctgcaacagtcg

SEQ ID NO: 207901 - DNA, 1768 bp, Zea Mays
cgcagctgcgaggctggtctccgctgttacgtctctgcccgcctctcccccacccctcctctggtccaagtccccccaccgcagcggccaccactccatccgagtctcttcgactccaagccgttccgctccccctgttccgcgcgacgccgatgcaccccaagctgccgcgggccgcgcgcaggctcctctgctgcggcggggccgccgcgtccccggaggaggacctgtaagtcgccagctcctcgtcctgccccccagccccgcttcgtttctctctcccttctgtgtttctctggggtttgctcaagcccaccgcgttgtgtgagctcggcgatcggtgttggatgttctgaggatcgtcggggactcggggcggggggcatgatcacgtgaacatgacggcgaactcctcgcacttggtcgctctagtgaatttgccaaatacgtctgacgaaggaaggcgatcgttgaggtgggtgttctcgttgagagaacttcgatcagcaacaaacagcttcaattacgataacaagatcggagaagggccacttgggagcgtgtattgggggcaagtctgggatggttctcagattgctgtcaagaggttaaataacgcaaagaacggcacagaagccgaatttgcttcagaagtcgagatactgggaagaataagacacaaaaacctcctgagcttccgtggatactgtgcggacggacccgagcgcgttctggtgtacgacttcatggcaaactcaagcctgtatgcacatctccatggaccgcattccgcggagtgtctcctcgactggcggaggcgagcgtctatcgccatgggcaccgctcgggctctcttgtaccttcatcgccacgcaacgcctaagataatccacggaagcgtcaaggccaccaacgtgctgctggattcagacttccgggcgcacgctggcgatttcggtctggcaaggcttattcccgacgacggaacggaccacgaaaagatagccagcagcgagagccagcgaggctaccttgctcccgagtacgccgccatgtccggcaaaccaactgcaggctgcgatgtatacagcttcgggatcatactgctggagcttgcgagcggcagaaggccagtcgagaagtcgggttctggcaaggcttgtggaatccgaagctgggtgctcccgctcgcaaggcagggcaggtacgacgagattgcggactcaaagctgggcgacaagttctctggacctgagctgagaaggatggtgttggtcggtctagcgtgtacacgttcagaacctgaaaagagacccacgatgcttcaagtcgtgccgttgctgaaaggcgagtcgaaagaaacgcttgttaagcttgaaagggaggagttgttcagcccagactcgacgacggtgagttcgcagggaacaccgaccccagatgggagcacggactctgcgccgccgctgaagaaagataaagaactggttggggcgtgagttgcgatatattgctgttctaggagattgtagagtgcgtatttgtggtattgatgattagtctgtgcggtttgacgtgaatgggaattgtataggcattgtttttttctaagttttttttttctgtcccttttgagggagtaaggaagagccggcgggctggagtactctgttgctttgcagctttttggttcattatgcttcgtctatcgagcttgtcgccgagtctggcccctcccttgcccgttttatctgtcctgcaacagtcg

SEQ ID NO: 207902 - DNA, 3429 bp, Zea Mays
gtcgtgggccctagaagacgaatcgctcctgtcacgctgtctgctcccacaggcaacagccacgtcttccgcgccgcagtgtccgatcgatcgatcccttctaggggaggggaattcaggacaggaggaggccaggttctcgccccgcaataggacgccgatcgattccggatcttagctcgagagcccggtgcccccttctcggtgctcgttgcaggattttcggccaggtatttaggaggaagacctgatttgtccttcagctaacagtcaacactgaaggttcacttgggcaagcaatataatttttccttctattctatccaaagaaataagaaacatgccagagacttatgttgatgagcaaccaaagggtgtgtctcggaatcgtccacctgcacatatgaatggtgatgaagaaaaggtttatcctggccaactcccagtgttgacctgggaacataagctaacccatgttagacatgatttgccgccattcagacttacatggagagagataatgcagctggctggtattggtttacgtcttagtcgacatatccttgaggaaacttcaaaagggcgaattgctgttattgatcctatgaaaaagcgggctgcaagatctggtcagggtgtcccacttggtggtattggtgcaggaagtattggaagaagctacaaaggcgatttccaacgttggcaattgtttccaggatcttgtgaagataatgctgtattggcaaatcaattttctgccttcatttcccgccaagatggtaaaaaatattccacagtgttgcatcctgggaaaccagatttgccgaaaggaagtgacatttcaggaattggatcctgggactggaatatgagtggacaacaatctacttaccatgccctttaccctagggcttggacagtatatgatggagaacctgatcctgagctcaatatagtgtgccgtcagatatctccaattattccacacaattatcaacagagcagctatccagttgcagtgttcacttttaccgtaacaaactcaggacatacagctgctgatgtgactttgctttttacatgggctaactctgttggtggaaaatctgaactcaccggatatcattccaactccagtatgatagaaaaggatggtgttcatggcatactattacatcacagaacagcagatggtcaaccacatgtaacttttgtgatagcagcacaggagaaagaggatatccttatatctgaatgtccttactttgtgatatctgggagctccgcatctgatgaattcacagctaaagatatgtggaattctgtgaaagagcatggatcttttgatcatcttgatcccatcaagacatcgatgtgctccagaccaggatcatcaataggggcagctatcgctgcttcagttaagctggctcccaaggcaacccaggatatttcattttcacttgcatgggcttgtcctgaagtgaagttctctagtgggaaaacctatcataggcgttacaccaaattttatggcacagacggtgatgcagcagcagcccttgctcacgatgccattcttgagcatgcttcctgggagagacaaattgaggagtggcaggatcctattttgcaagatgagaggtttcctgcttggtatccagttacacttttcaatgaactatactatcttaatgctggaggaactatatggacagatggattaccaccaattcaaagcttgacagcagttggctggaaaaagttttctcttgacatgttaaatggtgaatctgatgatttcaatgagatggttcgacagaataatactgcttctgatattcttcatcgaatggcatcagtatttgagaggatgcatgcatctattgcatcaaattctgctataggaacaactttgcttcagggtgaagagaacattggccagtttctatacctcgagggcatcgagtattatatgtggaacacatatgatgttcatttttatgcatcattttcactgatcatgttgtttccaaagcttcaactcagcgtccagagagactttgctgctgctgttatgatgcatgatcctgaaaagctgaggatcttgcatgatggaaaatgggctgcaagaaaagttctcggtgctgttcctcatgatcttggattatatgacccatggttcaaggtcaatgcgtacactctctataatacagatcggtggaaagatttgaatccgaagtttgtgctgcaagtttatagagatgtggtggccacaggcgacaaatcctttgctcgagctgtttggccatcagtttatatagcaatggcatatatggagcaatttgataaggataaagatgggatgatagaaaatgaggatttcccagatcaaacatatgacgtgtggtcaatggctggtataagtgcatactgtggtggtctttgggtggctgctcttcaggcagcatcggccttggcacgtgaggttggtgacaaagcttctgaaaagcttttttgggacaaatatgagaaggccaagtttgtctatagcaagctgtggaatggttcttacttcagttatgatgatggcgacaacaaaatgagcacatctatccaagcagatcaattggctggacaatggtatgccaaagcctgtggtctcttcccaattgttgacaaagacaaggcacaaagtgcgctagagaaggtatattctttcaatgtgatgaagttcaagggtggtacaaggggagccatgaatgggatgtggccagatggcactgtggacatgtctgcaatgcaatctagggagatatggccaggggtgacatatgcactagctgcaagcatgattcaggaaggcatggttgagcagggatttaaaacagctgaaggggtctatcatgctgcctggtcaccaggaggacttggatactcattccaaacccctgaagcctggaacaacgacgacgagtacaggtccctgtgctacatgcgcccgctcgccatatgggcaatgcaatgggcactgtcgaagccgaagctccacaacactccacaggcagatataccccaggactcattccccaagaaccagttcgcctacgcgcggatcacaaagctcctgcagctgcctgaagacgaatcgtccaaaagcttcgtccgggtggtgtacgagatcatccggaacaggtttaggtcctgatcgccgcctccgcacgcctgtgcgctgagtgtccgaattcttgatgatacaattcattagtcactgtcattgttgctgttggatcccgcggattcgtatatgaaactggtggtaataaacttgccaagtgcggtagttcgtatataaatgaatttattatatatgagctagctgttatatatgagtgacagtacgatggagtcacggagacatcttcgatt

SEQ ID NO: 207903 - DNA, 3305 bp, Zea Mays
gacgaatcgctcctgtcacgctgtctgctcccacaggcaacagccacgtcttccgcgccgcagtgtccgatcgatcgatcccttctaggggaggggaattcaggacaggaggaggccaggttctcgccccgcaataggacgccgatcgattccggatcttagctcgagagcccggtgcccccttctcggtgctcgttgcaggattttcggggtagtccaaagaaataagaaacatgccagagacttatgttgatgagcaaccaaagggtgtgtctcggaatcgtccacctgcacatatgaatggtgatgaagaaaaggtttatcctggccaactcccagtgttgacctgggaacataagctaacccatgttagacatgatttgccgccattcagacttacatggagagagataatgcagctggctggtattggtttacgtcttagtcgacatatccttgaggaaacttcaaaagggcgaattgctgttattgatcctatgaaaaagcgggctgcaagatctggtcagggtgtcccacttggtggtattggtgcaggaagtattggaagaagctacaaaggcgatttccaacgttggcaattgtttccaggatcttgtgaagataatgctgtattggcaaatcaattttctgccttcatttcccgccaagatggtaaaaaatattccacagtgttgcatcctgggaaaccagatttgccgaagaattggatcctgggactggaatatgagtggacaacaatctacttaccatgccctttaccctagggcttggacagtatatgatggagaacctgatcctgagctcaatatagtgtgccgtcagatatctccaattattccacacaattatcaacagagcagctatccagttgcagtgttcacttttaccgtaacaaactcaggacatacagctgctgatgtgactttgctttttacatgggctaactctgttggtggaaaatctgaactcaccggatatcattccaactccagtatgatagaaaaggatggtgttcatggcatactattacatcacagaacagcagatggtcaaccacatgtaacttttgtgatagcagcacaggagaaagaggatatccttatatctgaatgtccttactttgtgatatctgggagctccgcatctgatgaattcacagctaaagatatgtggaattctgtgaaagagcatggatcttttgatcatcttgatcccatcaagacatcgatgtgctccagaccaggatcatcaataggggcagctatcgctgcttcagttaagctggctcccaaggcaacccaggatatttcattttcacttgcatgggcttgtcctgaagtgaagttctctagtgggaaaacctatcataggcgttacaccaaattttatggcacagacggtgatgcagcagcagcccttgctcacgatgccattcttgagcatgcttcctgggagagacaaattgaggagtggcaggatcctattttgcaagatgagaggtttcctgcttggtatccagttacacttttcaatgaactatactatcttaatgctggaggaactatatggacagatggattaccaccaattcaaagcttgacagcagttggctggaaaaagttttctcttgacatgttaaatggtgaatctgatgatttcaatgagatggttcgacagaataatactgcttctgatattcttcatcgaatggcatcagtatttgagaggatgcatgcatctattgcatcaaattctgctataggaacaactttgcttcagggtgaagagaacattggccagtttctatacctcgagggcatcgagtattatatgtggaacacatatgatgttcatttttatgcatcattttcactgatcatgttgtttccaaagcttcaactcagcgtccagagagactttgctgctgctgttatgatgcatgatcctgaaaagctgaggatcttgcatgatggaaaatgggctgcaagaaaagttctcggtgctgttcctcatgatcttggattatatgacccatggttcaaggtcaatgcgtacactctctataatacagatcggtggaaagatttgaatccgaagtttgtgctgcaagtttatagagatgtggtggccacaggcgacaaatcctttgctcgagctgtttggccatcagtttatatagcaatggcatatatggagcaatttgataaggataaagatgggatgatagaaaatgaggatttcccagatcaaacatatgacgtgtggtcaatggctggtataagtgcatactgtggtggtctttgggtggctgctcttcaggcagcatcggccttggcacgtgaggttggtgacaaagcttctgaaaagcttttttgggacaaatatgagaaggccaagtttgtctatagcaagctgtggaatggttcttacttcagttatgatgatggcgacaacaaaatgagcacatctatccaagcagatcaattggctggacaatggtatgccaaagcctgtggtctcttcccaattgttgacaaagacaaggcacaaagtgcgctagagaaggtatattctttcaatgtgatgaagttcaagggtggtacaaggggagccatgaatgggatgtggccagatggcactgtggacatgtctgcaatgcaatctagggagatatggccaggggtgacatatgcactagctgcaagcatgattcaggaaggcatggttgagcagggatttaaaacagctgaaggggtctatcatgctgcctggtcaccaggaggacttggatactcattccaaacccctgaagcctggaacaacgacgacgagtacaggtccctgtgctacatgcgcccgctcgccatatgggcaatgcaatgggcactgtcgaagccgaagctccacaacactccacaggcagatataccccaggactcattccccaagaaccagttcgcctacgcgcggatcacaaagctcctgcagctgcctgaagacgaatcgtccaaaagcttcgtccgggtggtgtacgagatcatccggaacaggtttaggtcctgatcgccgcctccgcacgcctgtgcgctgagtgtccgaattcttgatgatacaattcattagtcactgtcattgttgctgttggatcccgcggattcgtatatgaaactggtggtaataaacttgccaagtgcggtagttcgtatataaatgaatttattatatatgagctagctgttatatatgagtgacagtacgatggagtcacggagacatcttcgatt

SEQ ID NO: 207904 - DNA, 3361 bp, Zea Mays
ccacgtcttccgcgccgcagtgtccgatcgatcgatcccttctaggggaggggaattcaggacaggaggaggccaggttctcgccccgcaataggacgccgatcgattccggatcttagctcgagagcccggtgcccccttctcggtgctcgttgcaggattttcggggtagtccaaagaaataagaaacatgccagagacttatgttgatgagcaaccaaagggtgtgtctcggaatcgtccacctgcacatatgaatggtgatgaagaaaaggtttatcctggccaactcccagtgttgacctgggaacataagctaacccatgttagacatgatttgccgccattcagacttacatggagagagataatgcagctggctggtattggtttacgtcttagtcgacatatccttgaggaaacttcaaaagggcgattttctacagattgctgttattgatcctatgaaaaagcgggctgcaagatctggtcagggtgtcccacttggtggtattggtgcaggaagtattggaagaagctacaaaggcgatttccaacgttggcaattgtttccaggatcttgtgaagataatgctgtattggcaaatcaattttctgccttcatttcccgccaagatggtaaaaaatattccacagtgttgcatcctgggaaaccagatttgccgaagaattggatcctgggactggaatatgagtggacaacaatctacttaccatgccctttaccctagggcttggacagtatatgatggagaacctgatcctgagctcaatatagtgtgccgtcagatatctccaattattccacacaattatcaacagagcagctatccagttgcagtgttcacttttaccgtaacaaactcaggacatacagctgctgatgtgactttgctttttacatgggctaactctgttggtggaaaatctgaactcaccggatatcattccaactccagtatgatagaaaaggatggtgttcatggcatactattacatcacagaacagcagatggtcaaccacatgtaacttttgtgatagcagcacaggagaaagaggatatccttatatctgaatgtccttactttgtgatatctgggagctccgcatctgatgaattcacagctaaagatatgtggaattctgtgaaagagcatggatcttttgatcatcttgatcccatcaagacatcgatgtgctccagaccaggatcatcaataggggcagctatcgctgcttcagttaagctggctcccaaggcaacccaggatatttcattttcacttgcatgggcttgtcctgaagtgaagttctctagtgggaaaacctatcataggcgttacaccaaattttatggcacagacggtgatgcagcagcagcccttgctcacgatgccattcttgagcatgcttcctgggagagacaaattgaggagtggcaggatcctattttgcaagatgagaggtttcctgcttggtttgttccaaccctaataattcatttacttggtacacaaaacctgaggctgctgaatgttgatttatagcgtgaactttattcgttaggtatccagttacacttttcaatgaactatactatcttaatgctggaggaactatatggacagatggattaccaccaattcaaagcttgacagcagttggctggaaaaagttttctcttgacatgttaaatggtgaatctgatgatttcaatgagatggttcgacagaataatactgcttctgatattcttcatcgaatggcatcagtatttgagaggatgcatgcatctattgcatcaaattctgctataggaacaactttgcttcagggtgaagagaacattggccagtttctatacctcgagggcatcgagtattatatgtggaacacatatgatgttcatttttatgcatcattttcactgatcatgttgtttccaaagcttcaactcagcgtccagagagactttgctgctgctgttatgatgcatgatcctgaaaagctgaggatcttgcatgatggaaaatgggctgcaagaaaagttctcggtgctgttcctcatgatcttggattatatgacccatggttcaaggtcaatgcgtacactctctataatacagatcggtggaaagatttgaatccgaagtttgtgctgcaagtttatagagatgtggtggccacaggcgacaaatcctttgctcgagctgtttggccatcagtttatatagcaatggcatatatggagcaatttgataaggataaagatgggatgatagaaaatgaggatttcccagatcaaacatatgacgtgtggtcaatggctggtataagtgcatactgtggtggtctttgggtggctgctcttcaggcagcatcggccttggcacgtgaggttggtgacaaagcttctgaaaagcttttttgggacaaatatgagaaggccaagtttgtctatagcaagctgtggaatggttcttacttcagttatgatgatggcgacaacaaaatgagcacatctatccaagcagatcaattggctggacaatggtatgccaaagcctgtggtctcttcccaattgttgacaaagacaaggcacaaagtgcgctagagaaggtatattctttcaatgtgatgaagttcaagggtggtacaaggggagccatgaatgggatgtggccagatggcactgtggacatgtctgcaatgcaatctagggagatatggccaggggtgacatatgcactagctgcaagcatgattcaggaaggcatggttgagcagggatttaaaacagctgaaggggtctatcatgctgcctggtcaccaggaggacttggatactcattccaaacccctgaagcctggaacaacgacgacgagtacaggtccctgtgctacatgcgcccgctcgccatatgggcaatgcaatgggcactgtcgaagccgaagctccacaacactccacaggcagatataccccaggactcattccccaagaaccagttcgcctacgcgcggatcacaaagctcctgcagctgcctgaagacgaatcgtccaaaagcttcgtccgggtggtgtacgagatcatccggaacaggtttaggtcctgatcgccgcctccgcacgcctgtgcgctgagtgtccgaattcttgatgatacaattcattagtcactgtcattgttgctgttggatcccgcggattcgtatatgaaactggtggtaataaacttgccaagtgcggtagttcgtatataaatgaatttattatatatgagctagctgttatatatgagtgacagtacgatggagtcacggagacatcttcgatt

SEQ ID NO: 207905 - DNA, 2197 bp, Zea Mays
attttcggggtagtccaaagaaataagaaacatgccagagacttatgttgatgagcaaccaaagggtgtgtctcggaatcgtccacctgcacatatgaatgcatggatcttttgatcatcttgatcccatcaagacatcgatgtgctccagaccaggatcatcaataggggcagctatcgctgcttcagttaagctggctcccaaggcaacccaggatatttcattttcacttgcatgggcttgtcctgaagtgaagttctctagtgggaaaacctatcataggcgttacaccaaattttatggcacagacggtgatgcagcagcagcccttgctcacgatgccattcttgagcatgcttcctgggagagacaaattgaggagtggcaggatcctattttgcaagatgagaggtttcctgcttggtatccagttacacttttcaatgaactatactatcttaatgctggaggaactatatggacagatggattaccaccaattcaaagcttgacagcagttggctggaaaaagttttctcttgacatgttaaatggtgaatctgatgatttcaatgagatggttcgacagaataatactgcttctgatattcttcatcgaatggcatcagtatttgagaggatgcatgcatctattgcatcaaattctgctataggaacaactttgcttcagggtgaagagaacattggccagtttctatacctcgagggcatcgagtattatatgtggaacacatatgatgttcatttttatgcatcattttcactgatcatgttgtttccaaagcttcaactcagcgtccagagagactttgctgctgctgttatgatgcatgatcctgaaaagctgaggatcttgcatgatggaaaatgggctgcaagaaaagttctcggtgctgttcctcatgatcttggattatatgacccatggttcaaggtcaatgcgtacactctctataatacagatcggtggaaagatttgaatccgaagtttgtgctgcaagtttatagagatgtggtggccacaggcgacaaatcctttgctcgagctgtttggccatcagtttatatagcaatggcatatatggagcaatttgataaggataaagatgggatgatagaaaatgaggatttcccagatcaaacatatgacgtgtggtcaatggctggtataagtgcatactgtggtggtctttgggtggctgctcttcaggcagcatcggccttggcacgtgaggttggtgacaaagcttctgaaaagcttttttgggacaaatatgagaaggccaagtttgtctatagcaagctgtggaatggttcttacttcagttatgatgatggcgacaacaaaatgagcacatctatccaagcagatcaattggctggacaatggtatgccaaagcctgtggtctcttcccaattgttgacaaagacaaggcacaaagtgcgctagagaaggtatattctttcaatgtgatgaagttcaagggtggtacaaggggagccatgaatgggatgtggccagatggcactgtggacatgtctgcaatgcaatctagggagatatggccaggggtgacatatgcactagctgcaagcatgattcaggaaggcatggttgagcagggatttaaaacagctgaaggggtctatcatgctgcctggtcaccaggaggacttggatactcattccaaacccctgaagcctggaacaacgacgacgagtacaggtccctgtgctacatgcgcccgctcgccatatgggcaatgcaatgggcactgtcgaagccgaagctccacaacactccacaggcagatataccccaggactcattccccaagaaccagttcgcctacgcgcggatcacaaagctcctgcagctgcctgaagacgaatcgtccaaaagcttcgtccgggtggtgtacgagatcatccggaacaggtttaggtcctgatcgccgcctccgcacgcctgtgcgctgagtgtccgaattcttgatgatacaattcattagtcactgtcattgttgctgttggatcccgcggattcgtatatgaaactggtggtaataaacttgccaagtgcggtagttcgtatataaatgaatttattatatatgagctagctgttatatatgagtgacagtacgatggagtcacggagacatcttcgatt

SEQ ID NO: 207906 - DNA, 3098 bp, Zea Mays
tttcggggtagtccaaagaaataagaaacatgccagagacttatgttgatgagcaaccaaagggtgtgtctcggaatcgtccacctgcacatatgaatggaaaaggtttatcctggccaactcccagtgttgacctgggaacataagctaacccatgttagacatgatttgccgccattcagacttacatggagagagataatgcagctggctggtattggtttacgtcttagtcgacatatccttgaggaaacttcaaaagggcgaattgctgttattgatcctatgaaaaagcgggctgcaagatctggtcagggtgtcccacttggtggaagtattggaagaagctacaaaggcgatttccaacgttggcaattgtttccaggatcttgtgaagataatgctgtattggcaaatcaattttctgccttcatttcccgccaagatggtaaaaaatattccacagtgttgcatcctgggaaaccagatttgccgaaaggaagtgacatttcaggaattggatcctgggactggaatatgagtggacaacaatctacttaccatgccctttaccctagggcttggacagtatatgatggagaacctgatcctgagctcaatatagtgtgccgtcagatatctccaattattccacacaattatcaacagagcagctatccagttgcagtgttcacttttaccgtaacaaactcaggacatacagctgctgatgtgactttgctttttacatgggctaactctgttggtggaaaatctgaactcaccggatatcattccaactccagtatgatagaaaaggatggtgttcatggcatactattacatcacagaacagcagatggtcaaccacatgtaacttttgtgatagcagcacaggagaaagaggatatccttatatctgaatgtccttactttgtgatatctgggagctccgcatctgatgaattcacagctaaagatatgtggaattctgtgaaagagcatggatcttttgatcatcttgatcccatcaagacatcgatgtgctccagaccaggatcatcaataggggcagctatcgctgcttcagttaagctggctcccaaggcaacccaggatatttcattttcacttgcatgggcttgtcctgaagtgaagttctctagtgggaaaacctatcataggcgttacaccaaattttatggcacagacggtgatgcagcagcagcccttgctcacgatgccattcttgagcatgcttcctgggagagacaaattgaggagtggcaggatcctattttgcaagatgagaggtttcctgcttggtatccagttacacttttcaatgaactatactatcttaatgctggaggaactatatggacagatggattaccaccaattcaaagcttgacagcagttggctggaaaaagttttctcttgacatgttaaatggtgaatctgatgatttcaatgagatggttcgacagaataatactgcttctgatattcttcatcgaatggcatcagtatttgagaggatgcatgcatctattgcatcaaattctgctataggaacaactttgcttcagggtgaagagaacattggccagtttctatacctcgagggcatcgagtattatatgtggaacacatatgatgttcatttttatgcatcattttcactgatcatgttgtttccaaagcttcaactcagcgtccagagagactttgctgctgctgttatgatgcatgatcctgaaaagctgaggatcttgcatgatggaaaatgggctgcaagaaaagttctcggtgctgttcctcatgatcttggattatatgacccatggttcaaggtcaatgcgtacactctctataatacagatcggtggaaagatttgaatccgaagtttgtgctgcaagtttatagagatgtggtggccacaggcgacaaatcctttgctcgagctgtttggccatcagtttatatagcaatggcatatatggagcaatttgataaggataaagatgggatgatagaaaatgaggatttcccagatcaaacatatgacgtgtggtcaatggctggtataagtgcatactgtggtggtctttgggtggctgctcttcaggcagcatcggccttggcacgtgaggttggtgacaaagcttctgaaaagcttttttgggacaaatatgagaaggccaagtttgtctatagcaagctgtggaatggttcttacttcagttatgatgatggcgacaacaaaatgagcacatctatccaagcagatcaattggctggacaatggtatgccaaagcctgtggtctcttcccaattgttgacaaagacaaggcacaaagtgcgctagagaaggtatattctttcaatgtgatgaagttcaagggtggtacaaggggagccatgaatgggatgtggccagatggcactgtggacatgtctgcaatgcaatctagggagatatggccaggggtgacatatgcactagctgcaagcatgattcaggaaggcatggttgagcagggatttaaaacagctgaaggggtctatcatgctgcctggtcaccaggaggacttggatactcattccaaacccctgaagcctggaacaacgacgacgagtacaggtccctgtgctacatgcgcccgctcgccatatgggcaatgcaatgggcactgtcgaagccgaagctccacaacactccacaggcagatataccccaggactcattccccaagaaccagttcgcctacgcgcggatcacaaagctcctgcagctgcctgaagacgaatcgtccaaaagcttcgtccgggtggtgtacgagatcatccggaacaggtttaggtcctgatcgccgcctccgcacgcctgtgcgctgagtgtccgaattcttgatgatacaattcattagtcactgtcattgttgctgttggatcccgcggattcgtatatgaaactggtggtaataaacttgccaagtgcggtagttcgtatataaatgaatttattatatatgagctagctgttatatatgagtgacagtacgatggagtcacggagacatcttcgatt

SEQ ID NO: 207907 - DNA, 1171 bp, Zea Mays
cttgtcttcttcctccggatggatccttgaccaaggtcgtgctttctcgcgatggtggacccaagctcgcctgctgtggcagaggtcatgctcgcccttggcgaccaaccgaggtggtggagcgctagacgaggagcttggttgcatgaagaatagatgtgtgtaaacttgggggagcaatgggaggagggaaagacaagcatgacgagagcgacaaggggctcttctcaaacttgatgcacggcgttgccggtggccatgggtaccccccgcagggataccctccgcagggctacccaccgcaaccaggagcatacccacctcccccaggggcgtatcctcctccacccggcgcatacccaccacaatatgggtaccctcagccgggtggctacccaactcaaggtggatatcctcctgcaggctaccccggctcatctcaccagggttatgggagcagccacgccgggggccacatggggacgggggcaatgctagctggaggtgccgccgccgccgctgccgcttacggagcacacaagctttctcatggccatagcggacacggtggacatgggccctttggaggccatggtcgtggtcgtggtcgtggtggttatggccgtggtcgtggtcaccacggcaagttcaagcatggcaagcacggacacggcatgttcagcggcaagttcaagaagtggaagtgatgtgctctccttggttgatcgtagctagcggtggtaatgaatcacgatctaaatgttttttcacaatatgttagagtccgtaaataattttagtttaaaaatgaataaaaatatagctcgatcctaatcagattcgatccttaaattttgtagtgtaaaatttatggcacattaccatccctaatgatagctgaattcaggcttctaggacatgtgttgccaggaatgccttttcagtatctatctagattgtggcaagtgacatgttgctaataagtgacataaataaccatttgctggtatgctgtatatgttggtctcgtggatggagcgctttaaagattatattctgtgtgttggaatgatatggttgtactgtatcctgaccatgctggcactgaatggtttctgttgccagtaaatcattgttcatgcaagttattatctgaccaatcgatttcgtt

SEQ ID NO: 207908 - DNA, 1523 bp, Zea Mays
ctcgattcggttccttcgtcgctttgctttcttccttttcttcccttcccctcccagtcgcacgcgctcgcgacgcgcaagtcgcagcaaccgtgactcgccccgggcccgcatggcagcgggcatggtgcgtgcaggtcaaagcctatccacgcgccggccccgcgaatagcacccccgggcccgcatggcagcctgactcggcgccacgcgtttgctcctcccggctcccatcttggctccttccttctcgtcgtctcctcggctatatatccgccagccggggggaaggggaacggccaaaccagcacccgccgccgacagggaacatcgccggccgagatcggctgcacatctgtgctgcttcagggcgccggagttcgcgtcgtcgttcggtaacttgcggggtcaatgggaggagggaaagacaagcatgacgagagcgacaaggggctcttctcgaacatgatgcacggcgttgccggtggtcatgggtacccccaccagggataccctccgcagggctacccaccgcaaccaggagcatacccgcctcccccaggggcgtatcctcctcctccaggggcatatcctcctccacctggggcatacccaccacaatatgggtaccctcagccaggtggctacccaccgcaaccaggagcatacccacctcccccaggggcgtatcctcctccacccggcgcatacccaccacaatatgggtaccctcagccgggtggctacccaactcaaggtggatatcctcctgcaggctaccccggctcatctcaccagggttatgggagcagccacgccgggggccacatggggacgggggcaatgctagctggaggtgccgccgccgccgctgccgcttacggagcacacaagctttctcatggccatagcggacacggtggacatgggccctttggaggccatggtcgtggtcgtggtcgtggtggttatggccgtggtcgtggtcaccacggcaagttcaagcatggcaagcacggacacggcatgttcagcggcaagttcaagaagtggaagtgatgtgctctccttggttgatcgtagctagcggtggtaatgaatcacgatctaaatgttttttcacaatatgttagagtccgtaaataattttagtttaaaaatgaataaaaatatagctcgatcctaatcagattcgatccttaaattttgtagtgtaaaatttatggcacattaccatccctaatgatagctgaattcaggcttctaggacatgtgttgccaggaatgccttttcagtatctatctagattgtggcaagtgacatgttgctaataagtgacataaataaccatttgctggtatgctgtatatgttggtctcgtggatggagcgctttaaagattatattctgtgtgttggaatgatatggttgtactgtatcctgaccatgctggcactgaatggtttctgttgccagtaaatcattgttcatgcaagttattatctgaccaatcgatttcgtt

SEQ ID NO: 207909 - DNA, 3426 bp, Zea Mays
cgtgcaggactgcaggccccagcgagtcctcacttactcccagaccggcgcccctatatatggtgctgctcccaccgcgagcaaggtggtagctcgcgccactgcacaaacagagactagtccaaagcaccataacgagagagagggagagagagaaagagagaaaaaaaaacactcggaaacgatccgcgaactagtccaccggcgatttgttgttttgttcttcagtgcgtcagccaaccttaactgctacgatcggtcgatcaagggggaggaagtttctggagctctgcccatggcgtcggcgatgaagctgctggggagatcttccttggcgagccctgctgccgcggcgcccggacgggagcggcgaggcgggccctgcttcgccgcggtcggaagggaggggagcgcgcacaggaggaggtcgtcgctgaggtcgaccgcgccggtgggcgcgctggccgagcgggtcgtggtgacgccggcgccaccggagagggccggggcgggccccccggagccgcacccccagagcgtggccgcgcgggccgtggtcaccgtgcggcggaggcggaaggaggacgccaagcgccgggtcgccgagcagctggacgcgtacgccgaccgggttggccgcagtgtcctcctcgagctcatcagcacggagaccgacccaagaaaggggggccccaagaagagcaggcgctcggcgctggtgggctggttcgagaagaaggacgtcaagacggagcgggtggtgtacacggcggacttcaccgttgacgggtccttcggcgagccgggcgcggtcaccgtgctcaaccggcaccagcgcgagttcttcatcgagagcatcgtggtggagggctttccctccggccccgcgcacttcacctgcaactcgtgggtgcagcccacccgcgtggaccgcaacccgcgcgtgttcttcaccaacaagccgtacctgccggccgagacgccgccgggcctgcaggagctccgccgccagcagctcagcgacctgaggggcgagggtgccgacaccggcgagcgcaggatcaccgaccgggtgtgggagtatgacgtgtacaacgacctcggcaacccggacaagggcgccgagttcgcgcgcccggtcctcggcggcgagcagcagctgccgtacccgcggcggatgcgaacgggccggcccaagaccatcacagacgaccgcgcggagagccgggtggagtacccggagcccatctacgtgtcccgggacgaggagttcgaggacgggaagaacgagatgctgtcggagggcgcgctcaaggcgctgctccataacttcatgccgctgctggtgagctccgtgtcgcctgacatccgcgacttcgccggcttccacgacgtggacaacctcttcaaggagggcctccgcctgaagcaggccctgcaggaccagctgttccagaagatccccttcgtgcgcaagatccaggagaacagcgagggcctcctccgctacgacactcccgacatcatcaagaaggacaagtttgcttggctgcgggacgacgagttcgcgaggcaggcgctggctggcatcaaccccgtcaacatcgaacgtcttcaggcgttcccgccgatgagcaagctggacccggccgtgtacggcccgccggagtcggccatcacggaggagcacatcatcggacagctcgacggcatgtcggtgcagcaggcgctgcaggacgacaggctgtacatgctggactaccacgacatcttcatgccgttcctggaccggatcaacgcgctggacgggcggaaggcctacggcacgcgcacgctcttcttcctgacggccgcgggcacgctgaagcccatcgcgatcgagctgtgcctgccgccgatgaccgacgggtgcgcgcgcgccaagcgggtgttcacgccgcccgccgatgccaccagcaactggctgtggcagctcgccaaggcacacgtctgctccaatgacgccggcgtccaccagctcatcaaccactggctgaggacgcacgcggccatggagccgttcatcatcgcggcgcaccggcacctgagcacgatgcaccccatcttcaagctgctcaagcctcacatgcggtacacgctcaagatcaacgcgctggcgcggcagatcctcatcaacggcgacggcgtcatcgagtccgggttcacccctggccgctactgcatggagatgagctcgttcgcgtaccgggagctctggcggctagaccaggagggcctccctgccgatctcatcagaagaggaatggccgtggaggacccgacgcagccgcacggtctccggctgctcatcgaggactacccgtacgccaccgacgggttgctgctctggtcggccatcaggcggtggtgcgacgcctacgtggccatgtactacccgtccgacgagtccgtgcagggcgacaccgagctgcagtcgtggtacagggaggccgtgcacacggggcacgcggacaagcgcgacgcgccgtggtggccgcgcctgtcgacgcccgcggacctggcgtcgctgctgacgacgctgctgtggctcacctcggcgcagcacgcggcgctcaacttcgggcagtacccgctgggcggctacatcccgaaccggccgccgctgatgcggcggctggtgcccgccgagggcgacccggagtacgcgcacctggtggccgacccgcaccgcttcttcctgtcggcgctgcccagcctgacgcagaccaccacgttcatgaccgtcatcgacacgctgtccacgcactccgccgacgagcagtacctcggggagcggcctgatgaggcgtggacggccgacccggcggcgttggcggccgcgcgcgagttcgcggacgaggtgcgccgcgccgaggaggagatcgaacggcgcaacgctgacactggccgccgcaaccggtgcggcgctggcgtgctgccgtacgagctcatggcgcccacgtcggggccgggcatcacctgccgcggcgtccccaacagcgttaccatttagcctctcagtaccgacagacagccatgggcgcatgacagagatgatctgaaaggagaatttttttccactcattatagtcgggtggggagaaatctaagcagaagcaaatgaattttgcattatttctccccccattgccaaattgccattgatttggtggtccgaacaggtaaaatttgatttttgactaggggcaagactgtgaggaactgaatgggtgtaaataatttgttatatacaaaaatcaatggaatataatcattatagagttctctggataaagcaatgtcgttatacagaaatgtttgctatgctttgtattgctcaacctgtgttttcttcaaatactacggcattcttaccggcgacatttt

SEQ ID NO: 207910 - DNA, 1964 bp, Zea Mays
aactgccctgccctctctcccatcaccaccgcctgcgactgcgagctcaaagatccatccacactgagctgcccaaatccacattcccatcggcgcagacggccgggaggaggatgtccatgccggagacgttcaccctgaaggtgggggaggcgacgccggccgccgccggcaggccgtcggccgggcccgtgtaccggagcatctacgccaaggacggcctcatggacctcccacaggacatccagtccccttgggacttgttcagtggggcagtcaagaagtaccccacgaacaggatggtcgggcagcgtcaggttacagatggcaaggccggtgagtatgtgtggcaaacgtacgaggaagtgtgccagaaggtcatgaggattggatcagcgatcagaagcctgggcgtagagccgggagctcactgtggcatatatggatccaactgcccggaatgggttatggccatgcaggcatgtaacagtcaagggatatgttatgtgccactgtatgacaccctcggagctaaagctgttgaattcatcatgtaccatgctgagatatccattgcctttgtccaggagagcaagatcaaatcaatactagcagttctccctaagtgcacagcgcaccttagagccattgttagtttcggagattttgcaagcgagatgaaagcggaagctgagagattgggcgtctcctgcttttcttgggaagagttttcttcaatgggaaaacaagactaccaacttcccaataaacgtaaggaagatatctgtacaatcatgtataccagcggaacaactggagatcccaaaggtgtgataatcacaaacaaagctatcgttgctggtgttatgaccacagaacacctcctcaaagagaccgataaagtgatcacagaagaggattcctacttttcctaccttccattagcacatatatttgatcaagtaattgagaactactgtatttctaaaggagcctccatcggattctggcaaggggacattaggtacctgatggaggatgtgcaagtgatgaaaccgacaatattctgtggtgttcctcgtgtttatgatcgtatatatacaggtataaacatgaaaattcagtctggagggatgatagccagacacctttttcagtatgcctacaactacaaacttgccaatatgaggaaagggctgaaacagcatgaagcatcaccgtttttcgacaagatagttttcagcaaaataaaggaagggcttggagggcgtatacgtctcatgatagctggagcagcacctttgccagggcaaatcgaagaattcatgcgggtaaccacctgcagcgttgtagtacaaggatatgggctcactgagagttgtgcaggatgcttcacgtcaatcgccaacattttctcaatgattggaacagtcggccctcctgtcacaacaatagaagcacggctggagtcggtccctgaaatgggctacgacgcactgtcagacacgccccggggcgagatctgcttgaggggccacaccatgttctccgggtactacaagcgccctagcctcactgaagaagtgttctcagatggctggttccatacaggtgatatcggggagtggcaatccaatggcacgatgaagatcatcgacagaaagaagaacatcttcaagctgtcccagggggagtatgtggcagttgaggtcctggaaagagcatacctgcagtcaccccttgtggcatcggtctgggtctacgggaacagcttcgagtcgttcctcgttgccgtggctgtccctgagaggcaggctctcgaggaatgggcagcagccaacagcaaggccggcgactttgcagagctgtgcgctgatcccaaggcgaggacctacgttcgggatcagctgaaccaaactgggaagaaacttgggtaaatttcaatcctttttcgtggatacaat

SEQ ID NO: 207911 - DNA, 1745 bp, Zea Mays
caacgcccatgcaggcaccaccccttctctccacaagaagcaccatcgggccttgaaaccgtcggaccccggcgaggccgaggagaagacgcgggtgtgggcgggaggggagaacagagcagctccccggccgccgccgccaaccacgtgcccctgatgcagccgaccgcggagtaggagtagagatcacagaagaggattcctacttttcctaccttccattagcacatatatttgatcaagtaattgagaactactgtatttctaaaggagcctccatcggattctggcaaggggacattaggtacctgatggaggatgtgcaagtgatgaaaccgacaatattctgtggtgttcctcgtgtttatgatcgtatatatacaggtataaacatgaaaattcagtctggagggatgatagccagacacctttttcagtatgcctacaactacaaacttgccaatatgaggaaagggctgaaacagcatgaagcatcaccgtttttcgacaagatagttttcagcaaaataaaggaagggcttggagggcgtatacgtctcatgatagctggagcagcacctttgccagggcaaatcgaagaattcatgcgggtaaccacctgcagcgttgtagtacaaggatatgggctcactgagagttgtgcaggatgcttcacgtcaatcgccaacattttctcaatgattggaacagtcggccctcctgtcacaacaatagaagcacggctggagtcggtccctgaaatgggctacgacgcactgtcagacacgccccggggcgagatctgcttgaggggccacaccatgttctccgggtactacaagcgccctagcctcactgaagaagtgttctcagatggctggttccatacaggtgatatcggggagtggcaatccaatggcacgatgaagatcatcgacagaaagaagaacatcttcaagctgtcccagggggagtatgtggcagttgaggtcctggaaagagcatacctgcagtcaccccttgtggcatcggtctgggtctacgggaacagcttcgagtcgttcctcgttgccgtggctgtccctgagaggcaggctctcgaggaatgggcagcagccaacagcaaggccggcgactttgcagagctgtgcgctgatcccaaggcgaggacctacgttcgggatcagctgaaccaaactgggaagaaacttgggttgagaggcttcgagatgctgaaagcagtctacctggagccggtgcctttcagcatcgagaaggacctcgtcactccaacctttaagctcaagagaccccagctgctcaagtattacaaggatcgggtcgaccaaatgtacaaggatgccaaggaggggagagctgcgccatgagcccatgacggcattgccaatttgccacgagtggctatgatcctgagcattgtgattcctcgaaagcgtgtacatattgattatcacaatttgtaagtttaaggcatgtgtgttctatgccaaaatgtcagcagaaaatgaattggctaagaagctcgtgaatcgtgatagcttacattaataaatttattaagctagtccattaccttcacacactccttacttttttgtttttgtttggtttgtggaatagaagatgagtttatccatcactaccctttttctcatagataccactatttcttatagatagttagttagtactaatatgagaaatgagatcatcccaccaaattt

SEQ ID NO: 207912 - DNA, 1522 bp, Zea Mays
tgcagccgaccgcggagtaggagtagagatcacagaagaggattcctacttttcctaccttccattagcacatatatttgatcaagtaattgagaactactgtatttctaaaggagcctccatcggattctggcaaggggacattaggtacctgatggaggatgtgcaagtgatgaaaccgacaatattctgtggtgttcctcgtgtttatgatcgtatatatacaggtataaacatgaaaattcagtctggagggatgatagccagacacctttttcagtatgcctacaactacaaacttgccaatatgaggaaagggctgaaacagcatgaagcatcaccgtttttcgacaagatagttttcagcaaaataaaggaagggcttggagggcgtatacgtctcatgatagctggagcagcacctttgccagggcaaatcgaagaattcatgcgggtaaccacctgcagcgttgtagtacaaggatatgtcggccctcctgtcacaacaatagaagcacggctggagtcggtccctgaaatgggctacgacgcactgtcagacacgccccggggcgagatctgcttgaggggccacaccatgttctccgggtactacaagcgccctagcctcactgaagaagtgttctcagatggctggttccatacaggtgatatcggggagtggcaatccaatggcacgatgaagatcatcgacagaaagaagaacatcttcaagctgtcccagggggagtatgtggcagttgaggtcctggaaagagcatacctgcagtcaccccttgtggcatcggtctgggtctacgggaacagcttcgagtcgttcctcgttgccgtggctgtccctgagaggcaggctctcgaggaatgggcagcagccaacagcaaggccggcgactttgcagagctgtgcgctgatcccaaggcgaggacctacgttcgggatcagctgaaccaaactgggaagaaacttgggttgagaggcttcgagatgctgaaagcagtctacctggagccggtgcctttcagcatcgagaaggacctcgtcactccaacctttaagctcaagagaccccagctgctcaagtattacaaggatcgggtcgaccaaatgtacaaggatgccaaggaggggagagctgcgccatgagcccatgacggcattgccaatttgccacgagtggctatgatcctgagcattgtgattcctcgaaagcgtgtacatattgattatcacaatttgtaagtttaaggcatgtgtgttctatgccaaaatgtcagcagaaaatgaattggctaagaagctcgtgaatcgtgatagcttacattaataaatttattaagctagtccattaccttcacacactccttacttttttgtttttgtttggtttgtggaatagaagatgagtttatccatcactaccctttttctcatagataccactatttcttatagatagttagttagtactaatatgagaaatgagatcatcccaccaaattt

SEQ ID NO: 207913 - DNA, 2124 bp, Zea Mays
tgttcatccccattactgtcatctgcgtgaacagccacgtttcccccaaccagcagcgctaaccctaggacgatggcgcccaagcgccggggaaatgaaatgggggttaaagagttggatagccttatgactttgattgctgagaagaagcggcaaatggaacaacaagaatcagagacaaatatgcaaatattgctagtcttcttacactgccttagaaagcaaaagctagaagagttgaatgagattcaaactgatctacaatacatcaaagaggatataagttctgtggagagacatagggcagaattatatcgcacaaaagaaaggtactccatgaagctgcgcatgcttttagatgagcctactgcgcaaaaaatgtggccctctcctatagacaaagctagctgtcgctttcttcccaactctcggacaccacttagtggatcatgtccaggaactttacagaataagaagcttgatttgaaagctcaagtaagccatcaaggatttcaaaggagagatgctctaacttcttctgatcctcctaactcccctatacaatcgggtaatgttattgctaggaagaggcgagttcaagcacagttcaatgagcttcaagaatactacctgcaaagacgtcgtactggagcacaggcacgcagacaagaagaaagagatatagttgcaatgaatagagaaggctatcatgcaggtcttcaggatttccagtctgtgctaacaacgttcactcgatacagtcgtctacgtgtcattgcggaactaagacatggagacttgtttcactctgccaatattgtatccagtattgaatttgatcgtgatgatgaactatttgctaccgctggagtctcgaaacgtattaaagtcttcgaattttccactgttgttaatgaaccatcagatgtgcattgcccagttgttgaaatggctaccagatctaaacttagctgcctaagctggaacaagtactcaaaaaatattattgcaagcagtgactatgagggtatagtaactgtgtgggatgttcagacccgtcagagtgtgatggaatatgaagagcatgagaagagagcatggagtgttgatttttctcgcacagactcttcaatgctagtatctgggagtgatgattgcaaggtgaaagtgtggtgcacaaatcaagaagcaagtgtgatcaatattgatatgaaagcaaatatttgctcggttaaatataatcctggatcaagcttctacgttgcagtcggatctgctgatcaccatattcattactttgatttacgtaatccaagttcgcctgtccatatttttggggggcacaagaaagcagtatcatatgtgaaattcttatctaacaatgagcttgcgtctgcatcaacagatagcacattacgcttatgggatgtcaaggataactgcccggtacggacattcagaggacacaaaaatgaaaagaactttgttggcttgtctgtgaacaatgaatatattgcttgtggaagtgagacaaatgaggtttttgtttatcacaaggctatctcgaaaccggcagcaagccatagatttgtatcttctgacctggatgatgccgatgatgatcctggttcttatttcattagtgctgtctgctggaagagtgatagccctacgatgttaactgctaacagtcaggggaccataaaagttcttgtacttgctccttgatgttatggagggcgttcaagaggttcacagtactgtccagttgtttcctttcgtgtcattatattcccccaaaattgggaacgggggcataattgatctccggttagggaatgaagttttgcagatggtcagctgacgtagggttttgaggtatcagaatgtgcatagtcatgtttatgttgtataggtgtaattgtgtaaagcagccaagttattggttacaagtgtaacacgagaaatacacattaataaaaaaaaaacctccagctcgtttgtacagagattgtgcttgaacccagaaccttatgtggtaattgcgattggtaatatatctacctgatatgatcaaacggatgccgtaatcagcaattgtttctttcaggtgtgtttttttcc

SEQ ID NO: 207914 - DNA, 1977 bp, Zea Mays
tgttcatccccattactgtcatctgcgtgaacagccacgtttcccccaaccagcagcgctaaccctaggacgatggcgcccaagcgccggggaaatgaaatgggggttaaagagttggatagccttatgactttgattgctgagaagaagcggcaaatggaacaacaagaatcagagacaaatatgcaaatattgctagtcttcttacactgccttagaaagcaaaagctagaagagttgaatgagattcaaactgatctacaatacatcaaagaggatataagttctgtggagagacatagggcagaattatatcgcacaaaagaaaggaactttacagaataagaagcttgatttgaaagctcaagtaagccatcaaggatttcaaaggagagatgctctaacttcttctgatcctcctaactcccctatacaatcgggtaatgttattgctaggaagaggcgagttcaagcacagttcaatgagcttcaagaatactacctgcaaagacgtcgtactggagcacaggcacgcagacaagaagaaagagatatagttgcaatgaatagagaaggctatcatgcaggtcttcaggatttccagtctgtgctaacaacgttcactcgatacagtcgtctacgtgtcattgcggaactaagacatggagacttgtttcactctgccaatattgtatccagtattgaatttgatcgtgatgatgaactatttgctaccgctggagtctcgaaacgtattaaagtcttcgaattttccactatgtgcattgcccagttgttgaaatggctaccagatctaaacttagctgcctaagctggaacaagtactcaaaaaatattattgcaagcagtgactatgagggtatagtaactgtgtgggatgttcagacccgtcagagtgtgatggaatatgaagagcatgagaagagagcatggagtgttgatttttctcgcacagactcttcaatgctagtatctgggagtgatgattgcaaggtgaaagtgtggtgcacaaatcaagaagcaagtgtgatcaatattgatatgaaagcaaatatttgctcggttaaatataatcctggatcaagcttctacgttgcagtcggatctgctgatcaccatattcattactttgatttacgtaatccaagttcgcctgtccatatttttggggggcacaagaaagcagtatcatatgtgaaattcttatctaacaatgagcttgcgtctgcatcaacagatagcacattacgcttatgggatgtcaaggataactgcccggtacggacattcagaggacacaaaaatgaaaagaactttgttggcttgtctgtgaacaatgaatatattgcttgtggaagtgagacaaatgaggtttttgtttatcacaaggctatctcgaaaccggcagcaagccatagatttgtatcttctgacctggatgatgccgatgatgatcctggttcttatttcattagtgctgtctgctggaagagtgatagccctacgatgttaactgctaacagtcaggggaccataaaagttcttgtacttgctccttgatgttatggagggcgttcaagaggttcacagtactgtccagttgtttcctttcgtgtcattatattcccccaaaattgggaacgggggcataattgatctccggttagggaatgaagttttgcagatggtcagctgacgtagggttttgaggtatcagaatgtgcatagtcatgtttatgttgtataggtgtaattgtgtaaagcagccaagttattggttacaagtgtaacacgagaaatacacattaataaaaaaaaaacctccagctcgtttgtacagagattgtgcttgaacccagaaccttatgtggtaattgcgattggtaatatatctacctgatatgatcaaacggatgccgtaatcagcaattgtttctttcaggtgtgtttttttcc

SEQ ID NO: 207915 - DNA, 2575 bp, Zea Mays
gcgcgcggcgcgtctggcgtgcagcggcggcacgacacgcaactagcgcgaggagggcgcggcagcagccgctccagtcgacttctccgacgtggtctcctcccacccatacacccatcccttcccctcccacacaggcacacacacacccacagcacccaattccctcgcgctccccctctcccgcatcacacatcccaccgccgccgccaccaccaccacccgccctatacccgtatataattactcgtacccggacgccaccgccgcctgcgccatgggcgactcctcggtggccggcgcgctcgtgccgtccgtgcccaagccggagcccgcgccgtccggtgacacctccgcggcggccgcggcgactacagcggcgctggcgatgccggaggaggcgggtatgcgcgcggcgtcggcgtcgcctcaggggcctgcggaggagggggagggccccgccgatagggacctcctctgcccgatctgcatggccgtcatcaaggacgccttcctcaccgcatgcggccacagcttctgctacatgtgcatcgtcacgcacctcagcaacaagagcgactgcccctgctgcgggcattaccttaccaaggcccagctctaccccaactttctccttgacaaggttctgaagaaaatatcagcccaacaaatagcaaaaacagcatcgccgatcgatcaatttcgatgtgcattgcaacagggaaatgaaatgggggttaaagagttggatagccttatgactttgattgctgagaagaagcggcaaatggaacaacaagaatcagagacaaatatgcaaatattgctagtcttcttacactgccttagaaagcaaaagctagaagagttgaatgagattcaaactgatctacaatacatcaaagaggatataagttctgtggagagacatagggcagaattatatcgcacaaaagaaaggtactccatgaagctgcgcatgcttttagatgagcctactgcgcaaaaaatgtggccctctcctatagacaaagctagctgtcgctttcttcccaactctcggacaccacttagtggatcatgtccaggaactttacagaataagaagcttgatttgaaagctcaagtaagccatcaaggatttcaaaggagagatgctctaacttcttctgatcctcctaactcccctatacaatcgggtaatgttattgctaggaagaggcgagttcaagcacagttcaatgagcttcaagaatactacctgcaaagacgtcgtactggagcacaggcacgcagacaagaagaaagagatatagttgcaatgaatagagaaggctatcatgcaggtcttcaggatttccagtctgtgctaacaacgttcactcgatacagtcgtctacgtgtcattgcggaactaagacatggagacttgtttcactctgccaatattgtatccagtattgaatttgatcgtgatgatgaactatttgctaccgctggagtctcgaaacgtattaaagtcttcgaattttccactgttgttaatgaaccatcagatgtgcattgcccagttgttgaaatggctaccagatctaaacttagctgcctaagctggaacaagtactcaaaaaatattattgcaagcagtgactatgagggtatagtaactgtgtgggatgttcagacccgtcagagtgtgatggaatatgaagagcatgagaagagagcatggagtgttgatttttctcgcacagactcttcaatgctagtatctgggagtgatgattgcaaggtgaaagtgtggtgcacaaatcaagaagcaagtgtgatcaatattgatatgaaagcaaatatttgctcggttaaatataatcctggatcaagcttctacgttgcagtacggacattcagaggacacaaaaatgaaaagaactttgttggcttgtctgtgaacaatgaatatattgcttgtggaagtgagacaaatgaggtttttgtttatcacaaggctatctcgaaaccggcagcaagccatagatttgtatcttctgacctggatgatgccgatgatgatcctggttcttatttcattagtgctgtctgctggaagagtgatagccctacgatgttaactgctaacagtcaggggaccataaaagttcttgtacttgctccttgatgttatggagggcgttcaagaggttcacagtactgtccagttgtttcctttcgtgtcattatattcccccaaaattgggaacgggggcataattgatctccggttagggaatgaagttttgcagatggtcagctgacgtagggttttgaggtatcagaatgtgcatagtcatgtttatgttgtataggtgtaattgtgtaaagcagccaagttattggttacaagtgtaacacgagaaatacacattaataaaaaaaaaacctccagctcgtttgtacagagattgtgcttgaacccagaaccttatgtggtaattgcgattggtaatatatctacctgatatgatcaaacggatgccgtaatcagcaattgtttctttcaggtgtgtttttttcc

SEQ ID NO: 207916 - DNA, 5511 bp, Zea Mays
atcaaatctctacagacacctctagcggattagtgacgtcagcgcgcgcatcgcacacgcgtctcctccctctgctcccagtctccaatctcctcccttccccactgcggcggaagtccaccaaagcgaaaccaagagcggcccgaccagatccaccttcttcctccccccttcatgcaaccaaaccctagggactagggctaattcccctcctcctcctactccatggcctcggatttcgacgagaccgacgaagccttcttcgacaagctagtcaactccgacgacgacgacgatcccccggccgccgccgccgtgggggggctcgctgcgctatcgctgaccgatcaacccgacgcgccgccgcctcgcgagtccgagcctcgtgaccagcctgctgctgctgctgcggcggcagcggcaccgacggaggatgcggagcgtgagccctcgccggaggtgtatcctgcggccgtgctgctgcatccgccccccgacctcgctgccaccgtcggggcagatccggccggggacctcctgccggaagacggagaacccttctccggggccgcggctgtgccagaggatcatcagggcctggagccgtcgctgtcgtcgtctctctcagcaggcaccggcgatggcagcgcgccggatcgcaccgtctctggccacacggagagcaatgccagttcccagttggattccagcacagctgcggaggggtctgggcatcagagcgccaaatcgcagctggagtacacggatcccaggtatctagagagcctctaccctggctggaagtacgatgacgctacgcagcagtggtatcagggactgggcttgaacacaggcagacggcttctcagcctgagactgaggctggcaatcagcctgcagtggcaccacagaaagagggggaggcacagtgtgaacccaagccgatgcatacagaggtgggatatggggagagcaatgccacttcccagttcgattccagagctactgctgagggatacggggatcggagcgctgatgcgcaggtggagtacactgatcccagatatctagagagcctctaccctggctggaagtacgacgaggccacacatcagtggtatcaggtagataccctcaacacacagacttatgctgctcgtgatactggtggtgctgtggcagaccttgcgagtggcggtagtgttcagcagcaccaacagtttagtggttcgtacatacaaaacacttcacatccagagcctgctcttgagcttacagagccgacttctgagtcaaagcctcagcttgagcctgcggcggcccctcctcagaccgatgcttatcctgcggtggcatcacataaagaggagcagaaagagcatggatctgtaccggtgcatactaagcctgaagctcaggagattcctgccaatgctggtgatactgccacagtgacagagggtgggtccccagggtcagagaaaggcatccataccgccgtcaagcaagtgcagtggaacgactttggtgccagcactggtggggcggatctatttggtgacctcctgcccgatggagctgaagatgacttctttgagggcaccgtccctgtcagccaagacgtctcatccttggtaggtgctacaaatgttagcgcaccagatcacagcttctctgcaggagtgtataacactgccatgattagtgctggacacagcttctctgacggagttgataaaaatgctaactctcatttcggtcccagtggaagtagtgcagggtacggggatcaaagcactaatgcacagttgggctccactgatcccaaatacctggagagcctctacccggggtggaagtatgatgaggcgacacagcagtggtatcaggtagatacccacagtgcacagagttacgttgctgataatactggtgctgttgtagccgttgggagtgacaatacacagcaacatcagcagcagtttagtgcatcgtacttgcaaaacaatttacatgcagcacttgaaaccattgcggaagagagcagcaccaatgccatgagctgggtccagggtgggaccaacacaggacccccagaatacccaccgaacatgctgttctacgcagaatacccaggatggtactttgacaccaacactcaacaatggcaaacacttgagtcataccagcaaagtgttgcacatgttgcaactactgcagcagcctcagatgggttcgcagggacatgccataatgtagctcattacactgaggattcttatgcaagtagctataaccagcagagccagtggcaaccggattcgttcggtaataccatgcaggctgatgttttggggggcaagagcttgctagggaatcagagttggtacagtggtttggagcattctacaagtaaggaattaaggtacaaaggatttgaaccttcaacaggtttccagactagtcgcaaggaattccagcctcctaaagatcaccaggctggtcacatggcagatgaacctttgacaagatatgggtatggtagttcaaatggggtcgtcaatacacaaaatttcgtaccaaaagagggtatgcacaagacacaaatgcatgatgactccactgcgcatacttatgctgcaagcaactattggggtactcagacctccatgggcagtgctcagcagcaactgactggtacaaatggtccatcccaacagtttggtttctcaccacatgagcagagatcatcagctggacgcccaccacacactgtggtatcctttggatttggggggaagcttgtagttcttaaagaaaccagctctatggctgcaaactttgacagcggaaatcagggcaattctggtcgaacggtatcagttcttaatattccagagattgttgctgataaaattgatcattcaagcatcgctaacggtggtgcatttagctacttccatgctttgtgtcgccatcctattcctggccctcttgttggtggaagtgctgcatcaaaggatctgaataaatggcttgatgatatgagtggcgtatatgaatcttctcagacagaattccagggaggggatgttcagaaggtgcttatttcgttgttgaaaatattgtgccaacactatggaaagcttcgttcatcctttgggtctgacccgtcacaagagggtatagatggcccagagatggcagtgacgaaacttttctcatcttgtaagagcagtgctaatatgaaagggtatggagctgttgtccattgcatgagaaatcttccctcagaaagccagattcagactactgcccaggaggttcaaagtctcttggtttctggtagaaggaaagaggcccttcaccaggcacaagaaggtcacctttggggccctgcactgatccttgctttacaacttggtgataagttttatgcggatactgtgaagaaaatggcccactgccattttgtttctggatcacccttgaggacactgtgccttcttattgctggacaacctgcagatgttttcagttttgagaatcctgttaacagtggtttgtcttctccccaacagcctgtagaggctgctcctaaaggtatgctggatgactggcaagagaatttggctattataacagcaaacaggacaaaaggtgatgaccttgtaattacccgccttggggattgcctttgggaagagaaaaatgaggttgcatctgcccactcgtgctatttagttgctgaactaaatattgattcgtactctggaagtgcaaggatgtgccttattggtgcggaccacttgagatgtccgcgcacatttaccagccctgaagcaatccagagaacagaggtttatgagtatgcaaaggttcttggtaattctcagtatatcctcttgccatttcaaccatacaagctgatatatgcatatatgcttgcggaggttgggaagatttctgattcactaaagtactgtcaagcatctctgaaggtgctcaagtcctctggtcgtgcacctgaactagaagcatggaagcaactgtttattaccctggaggaccggatacgtacccatcaacagggcggttatgcaacaaatcttgcccctggaaagattgttggaaagcttttcacatcacttgataaatctttgtcccgaatgatgggtacacaatctgcaccgttgcctcaactgccgcagggtgctgcaaatgagagagggaagttgcacataacagaagtatttctgaaccagacttcggcaaaaccccccaacagcagggtgctgctgtatcaagtaaggcacagagcacatcaggttcaggcagttcacgctttggatggttggtgcagaagacaatagggcttgtttcaaaatctcaccgccaggcaaagctaggggaacagaacaagttctactatgacgagaagctgaagcggtgggttgaagaaggtgctgagatccctgccgaggagcccccacttcccccacctccaacaaaagtgccattccagaacagcgttccagatcccaactccaatgctcctcccactggtggaggttattcctcaaatcctcccgagcctagttccgggatgccaccgatgccacccacccagaaccagttctcagcacgtggaaggatgggtgttagatcaagatatgtggatacttttaacaagggtggcggtggtggtggcgcaaatgccttcggagtagcaacatcttatagcaaaccagcagctccttcaattgaaaccgcccgacaggatgaatcgtcgtcctcaccagcgatggaaacatcatttagttcgccgccatcactgatacagatgcagtcaagcattccgcggtacccaagtatggataacgtcagctcccccacaggcagcattaacagctcgatgtcaaggtcaagagcgtcatcatggagcggaacgtacccagagcagttgagcagcactgccgcttccaggtcacctgatggacagatgacgcagtcaccatcgatgcctggaagaagacctccgcacagccgttccaacagcgcgtcttcttccgcccagctcaatggtttgggtgaggatcttcacgaggtggagctctgacacctggccgcagattttgaccataatgtgatttatattaatagctgcatgtgtctagagagcaaagcaaaggaaattaaagtgcggtgtccctttttcaatttttttacatgtgaaagactgtggatgccgctgcattgtacagatagttgactcgttcgccagatgaaaaatgtataacaagagtcgtaggttcaagatagggagaagatgaaaccgtgatgattcatcattgttaaaaagatggactgtctgttggaaaaataaagctgattaataaccgcaataatgtcggtccgcatcttggtgttcatattcttatttgtgtgtatgcatttctttgttcctgtgtattatattactttgttattttgcgagtcactggagcacca

SEQ ID NO: 207917 - DNA, 5752 bp, Zea Mays
atcaaatctctacagacacctctagcggattagtgacgtcagcgcgcgcatcgcacacgcgtctcctccctctgctcccagtctccaatctcctcccttccccactgcggcggaagtccaccaaagcgaaaccaagagcggcccgaccagatccaccttcttcctccccccttcatgcaaccaaaccctagggactagggctaattcccctcctcctcctactccatggcctcggatttcgacgagaccgacgaagccttcttcgacaagctagtcaactccgacgacgacgacgatcccccggccgccgccgccgtgggggggctcgctgcgctatcgctgaccgatcaacccgacgcgccgccgcctcgcgagtccgagcctcgtgaccagcctgctgctgctgctgcggcggcagcggcaccgacggaggatgcggagcgtgagccctcgccggaggtgtatcctgcggccgtgctgctgcatccgccccccgacctcgctgccaccgtcggggcagatccggccggggacctcctgccggaagacggagaacccttctccggggccgcggctgtgccagaggatcatcagggcctggagccgtcgctgtcgtcgtctctctcagcaggcaccggcgatggcagcgcgccggatcgcaccgtctctggccacacggagagcaatgccagttcccagttggattccagcacagctgcggaggggtctgggcatcagagcgccaaatcgcagctggagtacacggatcccaggtatctagagagcctctaccctggctggaagtacgatgacgctacgcagcagtggtatcagggactgggcttgaacacaggcagacggcttctcagcctgagactgaggctggcaatcagcctgcagtggcaccacagaaagagggggaggcacagtgtgaacccaagccgatgcatacagaggtgggatatggggagagcaatgccacttcccagttcgattccagagctactgctgagggatacggggatcggagcgctgatgcgcaggtggagtacactgatcccagatatctagagagcctctaccctggctggaagtacgacgaggccacacatcagtggtatcaggtagataccctcaacacacagacttatgctgctcgtgatactggtggtgctgtggcagaccttgcgagtggcggtagtgttcagcagcaccaacagtttagtggttcgtacatacaaaacacttcacatccagagcctgctcttgagcttacagagccgacttctgagtcaaagcctcagcttgagcctgcggcggcccctcctcagaccgatgcttatcctgcggtggcatcacataaagaggagcagaaagagcatggatctgtaccggtgcatactaagcctgaagctcaggagattcctgccaatgctggtgatactgccacagtgacagagggtgggtccccagggtcagagaaaggcatccataccgccgtcaagcaagtgcagtggaacgactttggtgccagcactggtggggcggatctatttggtgacctcctgcccgatggagctgaagatgacttctttgagggcaccgtccctgtcagccaagacgtctcatccttggtaggtgctacaaatgttagcgcaccagatcacagcttctctgcaggagtgtataacactgccatgattagtgctggacacagcttctctgacggagttgataaaaatgctaactctcatttcggtcccagtggaagtagtgcagggtacggggatcaaagcactaatgcacagttgggctccactgatcccaaatacctggagagcctctacccggggtggaagtatgatgaggcgacacagcagtggtatcaggtagatacccacagtgcacagagttacgttgctgataatactggtgctgttgtagccgttgggagtgacaatacacagcaacatcagcagcagtttagtgcatcgtacttgcaaaacaatttacatgcagcacttgaaaccattgcggaagagagcagcaccaatgccatgagctgggtccagggtgggaccaacacaggacccccagaatacccaccgaacatgctgttctacgcagaatacccaggatggtactttgacaccaacactcaacaatggcaaacacttgagtcataccagcaaagtgttgcacatgttgcaactactgcagcagcctcagatgggttcgcagggacatgccataatgtagctcattacactgaggattcttatgcaagtagctataaccagcagagccagtggcaaccggattcgttcggtaataccatgcaggctgatgttttggggggcaagagcttgctaggtagttcctatggttctaatcagcaggctgggaatcagattgggcaacaggccaatgtggactctttaaatcacgagcctcatgtaaatacatttatgccttctacagggaatcagagttggtacagtggtttggagcattctacaagtaaggaattaaggtacaaaggatttgaaccttcaacaggtttccagactagtcgcaaggaattccagcctcctaaagatcaccaggctggtcacatggcagatgaacctttgacaagatatgggtatggtagttcaaatggggtcgtcaatacacaaaatttcgtaccaaaagagggtatgcacaagacacaaatgcatgatgactccactgcgcatacttatgctgcaagcaactattggggtactcagacctccatgggcagtgctcagcagcaactgactggtacaaatggtccatcccaacagtttggtttctcaccacatgagcagagatcatcagctggacgcccaccacacactgtggtatcctttggatttggggggaagcttgtagttcttaaagaaaccagctctatggctgcaaactttgacagcggaaatcagggcaattctggtcgaacggtatcagttcttaatattccagagattgttgctgataaaattgatcattcaagcatcgctaacggtggtgcatttagctacttccatgctttgtgtcgccatcctattcctggccctcttgttggtggaagtgctgcatcaaaggatctgaataaatggcttgatgatatgagtggcgtatatgaatcttctcagacagaattccagggaggggatgttcagaaggtgcttatttcgttgttgaaaatattgtgccaacactatggaaagcttcgttcatcctttgggtctgacccgtcacaagagggtatagatggcccagagatggcagtgacgaaacttttctcatcttgtaagagcagtgctaatatgaaagggtatggagctgttgtccattgcatgagaaatcttccctcagaaagccagattcagactactgcccaggaggttcaaagtctcttggtttctggtagaaggaaagaggcccttcaccaggcacaagaaggtcacctttggggccctgcactgatccttgctttacaacttggtgataagttttatgcggatactgtgaagaaaatggcccactgccattttgtttctggatcacccttgaggacactgtgccttcttattgctggacaacctgcagatgttttcagttttgagaatcctgttaacagtggtttgtcttctccccaacagcctgtagaggctgctcctaaaggtatgctggatgactggcaagagaatttggctattataacagcaaacaggacaaaaggtgatgaccttgtaattacccgccttggggattgcctttgggaagagaaaaatgaggttgcatctgcccactcgtgctatttagttgctgaactaaatattgattcgtactctggaagtgcaaggatgtgccttattggtgcggaccacttgagatgtccgcgcacatttaccagccctgaagcaatccagagaacagaggtttatgagtatgcaaaggttcttggtaattctcagtatatcctcttgccatttcaaccatacaagctgatatatgcatatatgcttgcggaggttgggaagatttctgattcactaaatgcattatgaaggtactgtcaagcatctctgaaggtgctcaagtcctctggtcgtgcacctgaactagaagcatggaagcaactgtttattaccctggaggaccggatacgtacccatcaacagggcggttatgcaacaaatcttgcccctggaaagattgttggaaagcttttcacatcacttgataaatctttgtcccgaatgatgggtacacaatctgcaccgttgcctcaactgccgcagggtgctgcaaatgagagaggtgtttattcttctcctgatacaaaagtagtaaatagtcagtcagtgatgtccatggcaccattagtgtcatctgcttcagagcagtctatgagtgaaattggaggaaatagtgtctatggcagggaagttgcacataacagaagtatttctgaaccagacttcggcaaaaccccccaacagggtgctgctgtatcaagtaaggcacagagcacatcaggttcaggcagttcacgctttggatggttggtgcagaagacaatagggcttgtttcaaaatctcaccgccaggcaaagctaggggaacagaacaagttctactatgacgagaagctgaagcggtgggttgaagaaggtgctgagatccctgccgaggagcccccacttcccccacctccaacaaaagtgccattccagaacagcgttccagatcccaactccaatgctcctcccactggtggaggttattcctcaaatcctcccgagcctagttccgggatgccaccgatgccacccacccagaaccagttctcagcacgtggaaggatgggtgttagatcaagatatgtggatacttttaacaagggtggcggtggtggtggcgcaaatgccttcggagtagcaacatcttatagcaaaccagcagctccttcaattgaaaccgcccgacaggatgaatcgtcgtcctcaccagcgatggaaacatcatttagttcgccgccatcactgatacagatgcagtcaagcattccgcggtacccaagtatggataacgtcagctcccccacaggcagcattaacagctcgatgtcaaggtcaagagcgtcatcatggagcggaacgtacccagagcagttgagcagcactgccgcttccaggtcacctgatggacagatgacgcagtcaccatcgatgcctggaagaagacctccgcacagccgttccaacagcgcgtcttcttccgcccagctcaatggtttgggtgaggatcttcacgaggtggagctctgacacctggccgcagattttgaccataatgtgatttatattaatagctgcatgtgtctagagagcaaagcaaaggaaattaaagtgcggtgtccctttttcaatttttttacatgtgaaagactgtggatgccgctgcattgtacagatagttgactcgttcgccagatgaaaaatgtataacaagagtcgtaggttcaagatagggagaagatgaaaccgtgatgattcatcattgttaaaaagatggactgtctgttggaaaaataaagctgattaataaccgcaataatgtcggtccgcatcttggtgttcatattcttatttgtgtgtatgcatttctttgttcctgtgtattatattactttgttattttgcgagtcactggagcacca

SEQ ID NO: 207918 - DNA, 5736 bp, Zea Mays
atcaaatctctacagacacctctagcggattagtgacgtcagcgcgcgcatcgcacacgcgtctcctccctctgctcccagtctccaatctcctcccttccccactgcggcggaagtccaccaaagcgaaaccaagagcggcccgaccagatccaccttcttcctccccccttcatgcaaccaaaccctagggactagggctaattcccctcctcctcctactccatggcctcggatttcgacgagaccgacgaagccttcttcgacaagctagtcaactccgacgacgacgacgatcccccggccgccgccgccgtgggggggctcgctgcgctatcgctgaccgatcaacccgacgcgccgccgcctcgcgagtccgagcctcgtgaccagcctgctgctgctgctgcggcggcagcggcaccgacggaggatgcggagcgtgagccctcgccggaggtgtatcctgcggccgtgctgctgcatccgccccccgacctcgctgccaccgtcggggcagatccggccggggacctcctgccggaagacggagaacccttctccggggccgcggctgtgccagaggatcatcagggcctggagccgtcgctgtcgtcgtctctctcagcaggcaccggcgatggcagcgcgccggatcgcaccgtctctggccacacggagagcaatgccagttcccagttggattccagcacagctgcggaggggtctgggcatcagagcgccaaatcgcagctggagtacacggatcccaggtatctagagagcctctaccctggctggaagtacgatgacgctacgcagcagtggtatcagggactgggcttgaacacaggcagacggcttctcagcctgagactgaggctggcaatcagcctgcagtggcaccacagaaagagggggaggcacagtgtgaacccaagccgatgcatacagaggtgggatatggggagagcaatgccacttcccagttcgattccagagctactgctgagggatacggggatcggagcgctgatgcgcaggtggagtacactgatcccagatatctagagagcctctaccctggctggaagtacgacgaggccacacatcagtggtatcaggtagataccctcaacacacagacttatgctgctcgtgatactggtggtgctgtggcagaccttgcgagtggcggtagtgttcagcagcaccaacagtttagtggttcgtacatacaaaacacttcacatccagagcctgctcttgagcttacagagccgacttctgagtcaaagcctcagcttgagcctgcggcggcccctcctcagaccgatgcttatcctgcggtggcatcacataaagaggagcagaaagagcatggatctgtaccggtgcatactaagcctgaagctcaggagattcctgccaatgctggtgatactgccacagtgacagagggtgggtccccagggtcagagaaaggcatccataccgccgtcaagcaagtgcagtggaacgactttggtgccagcactggtggggcggatctatttggtgacctcctgcccgatggagctgaagatgacttctttgagggcaccgtccctgtcagccaagacgtctcatccttggtaggtgctacaaatgttagcgcaccagatcacagcttctctgcaggagtgtataacactgccatgattagtgctggacacagcttctctgacggagttgataaaaatgctaactctcatttcggtcccagtggaagtagtgcagggtacggggatcaaagcactaatgcacagttgggctccactgatcccaaatacctggagagcctctacccggggtggaagtatgatgaggcgacacagcagtggtatcaggtagatacccacagtgcacagagttacgttgctgataatactggtgctgttgtagccgttgggagtgacaatacacagcaacatcagcagcagtttagtgcatcgtacttgcaaaacaatttacatgcagcacttgaaaccattgcggaagagagcagcaccaatgccatgagctgggtccagggtgggaccaacacaggacccccagaatacccaccgaacatgctgttctacgcagaatacccaggatggtactttgacaccaacactcaacaatggcaaacacttgagtcataccagcaaagtgttgcacatgttgcaactactgcagcagcctcagatgggttcgcagggacatgccataatgtagctcattacactgaggattcttatgcaagtagctataaccagcagagccagtggcaaccggattcgttcggtaataccatgcaggctgatgttttggggggcaagagcttgctaggtagttcctatggttctaatcagcaggctgggaatcagattgggcaacaggccaatgtggactctttaaatcacgagcctcatgtaaatacatttatgccttctacagggaatcagagttggtacagtggtttggagcattctacaagtaaggaattaaggtacaaaggatttgaaccttcaacaggtttccagactagtcgcaaggaattccagcctcctaaagatcaccaggctggtcacatggcagatgaacctttgacaagatatgggtatggtagttcaaatggggtcgtcaatacacaaaatttcgtaccaaaagagggtatgcacaagacacaaatgcatgatgactccactgcgcatacttatgctgcaagcaactattggggtactcagacctccatgggcagtgctcagcagcaactgactggtacaaatggtccatcccaacagtttggtttctcaccacatgagcagagatcatcagctggacgcccaccacacactgtggtatcctttggatttggggggaagcttgtagttcttaaagaaaccagctctatggctgcaaactttgacagcggaaatcagggcaattctggtcgaacggtatcagttcttaatattccagagattgttgctgataaaattgatcattcaagcatcgctaacggtggtgcatttagctacttccatgctttgtgtcgccatcctattcctggccctcttgttggtggaagtgctgcatcaaaggatctgaataaatggcttgatgatatgagtggcgtatatgaatcttctcagacagaattccagggaggggatgttcagaaggtgcttatttcgttgttgaaaatattgtgccaacactatggaaagcttcgttcatcctttgggtctgacccgtcacaagagatggcccagagatggcagtgacgaaacttttctcatcttgtaagagcagtgctaatatgaaagggtatggagctgttgtccattgcatgagaaatcttccctcagaaagccagattcagactactgcccaggaggttcaaagtctcttggtttctggtagaaggaaagaggcccttcaccaggcacaagaaggtcacctttggggccctgcactgatccttgctttacaacttggtgataagttttatgcggatactgtgaagaaaatggcccactgccattttgtttctggatcacccttgaggacactgtgccttcttattgctggacaacctgcagatgttttcagttttgagaatcctgttaacagtggtttgtcttctccccaacagcctgtagaggctgctcctaaaggtatgctggatgactggcaagagaatttggctattataacagcaaacaggacaaaaggtgatgaccttgtaattacccgccttggggattgcctttgggaagagaaaaatgaggttgcatctgcccactcgtgctatttagttgctgaactaaatattgattcgtactctggaagtgcaaggatgtgccttattggtgcggaccacttgagatgtccgcgcacatttaccagccctgaagcaatccagagaacagaggtttatgagtatgcaaaggttcttggtaattctcagtatatcctcttgccatttcaaccatacaagctgatatatgcatatatgcttgcggaggttgggaagatttctgattcactaaagtactgtcaagcatctctgaaggtgctcaagtcctctggtcgtgcacctgaactagaagcatggaagcaactgtttattaccctggaggaccggatacgtacccatcaacagggcggttatgcaacaaatcttgcccctggaaagattgttggaaagcttttcacatcacttgataaatctttgtcccgaatgatgggtacacaatctgcaccgttgcctcaactgccgcagggtgctgcaaatgagagaggtgtttattcttctcctgatacaaaagtagtaaatagtcagtcagtgatgtccatggcaccattagtgtcatctgcttcagagcagtctatgagtgaaattggaggaaatagtgtctatggcagggaagttgcacataacagaagtatttctgaaccagacttcggcaaaaccccccaacagcagggtgctgctgtatcaagtaaggcacagagcacatcaggttcaggcagttcacgctttggatggttggtgcagaagacaatagggcttgtttcaaaatctcaccgccaggcaaagctaggggaacagaacaagttctactatgacgagaagctgaagcggtgggttgaagaaggtgctgagatccctgccgaggagcccccacttcccccacctccaacaaaagtgccattccagaacagcgttccagatcccaactccaatgctcctcccactggtggaggttattcctcaaatcctcccgagcctagttccgggatgccaccgatgccacccacccagaaccagttctcagcacgtggaaggatgggtgttagatcaagatatgtggatacttttaacaagggtggcggtggtggtggcgcaaatgccttcggagtagcaacatcttatagcaaaccagcagctccttcaattgaaaccgcccgacaggatgaatcgtcgtcctcaccagcgatggaaacatcatttagttcgccgccatcactgatacagatgcagtcaagcattccgcggtacccaagtatggataacgtcagctcccccacaggcagcattaacagctcgatgtcaaggtcaagagcgtcatcatggagcggaacgtacccagagcagttgagcagcactgccgcttccaggtcacctgatggacagatgacgcagtcaccatcgatgcctggaagaagacctccgcacagccgttccaacagcgcgtcttcttccgcccagctcaatggtttgggtgaggatcttcacgaggtggagctctgacacctggccgcagattttgaccataatgtgatttatattaatagctgcatgtgtctagagagcaaagcaaaggaaattaaagtgcggtgtccctttttcaatttttttacatgtgaaagactgtggatgccgctgcattgtacagatagttgactcgttcgccagatgaaaaatgtataacaagagtcgtaggttcaagatagggagaagatgaaaccgtgatgattcatcattgttaaaaagatggactgtctgttggaaaaataaagctgattaataaccgcaataatgtcggtccgcatcttggtgttcatattcttatttgtgtgtatgcatttctttgttcctgtgtattatattactttgttattttgcgagtcactggagcacca

SEQ ID NO: 207919 - DNA, 5740 bp, Zea Mays
atcaaatctctacagacacctctagcggattagtgacgtcagcgcgcgcatcgcacacgcgtctcctccctctgctcccagtctccaatctcctcccttccccactgcggcggaagtccaccaaagcgaaaccaagagcggcccgaccagatccaccttcttcctccccccttcatgcaaccaaaccctagggactagggctaattcccctcctcctcctactccatggcctcggatttcgacgagaccgacgaagccttcttcgacaagctagtcaactccgacgacgacgacgatcccccggccgccgccgccgtgggggggctcgctgcgctatcgctgaccgatcaacccgacgcgccgccgcctcgcgagtccgagcctcgtgaccagcctgctgctgctgctgcggcggcagcggcaccgacggaggatgcggagcgtgagccctcgccggaggtgtatcctgcggccgtgctgctgcatccgccccccgacctcgctgccaccgtcggggcagatccggccggggacctcctgccggaagacggagaacccttctccggggccgcggctgtgccagaggatcatcagggcctggagccgtcgctgtcgtcgtctctctcagcaggcaccggcgatggcagcgcgccggatcgcaccgtctctggccacacggagagcaatgccagttcccagttggattccagcacagctgcggaggggtctgggcatcagagcgccaaatcgcagctggagtacacggatcccaggtatctagagagcctctaccctggctggaagtacgatgacgctacgcagcagtggtatcagggactgggcttgaacacaggcagacggcttctcagcctgagactgaggctggcaatcagcctgcagtggcaccacagaaagagggggaggcacagtgtgaacccaagccgatgcatacagaggtgggatatggggagagcaatgccacttcccagttcgattccagagctactgctgagggatacggggatcggagcgctgatgcgcaggtggagtacactgatcccagatatctagagagcctctaccctggctggaagtacgacgaggccacacatcagtggtatcaggtagataccctcaacacacagacttatgctgctcgtgatactggtggtgctgtggcagaccttgcgagtggcggtagtgttcagcagcaccaacagtttagtggttcgtacatacaaaacacttcacatccagagcctgctcttgagcttacagagccgacttctgagtcaaagcctcagcttgagcctgcggcggcccctcctcagaccgatgcttatcctgcggtggcatcacataaagaggagcagaaagagcatggatctgtaccggtgcatactaagcctgaagctcaggagattcctgccaatgctggtgatactgccacagtgacagagggtgggtccccagggtcagagaaaggcatccataccgccgtcaagcaagtgcagtggaacgactttggtgccagcactggtggggcggatctatttggtgacctcctgcccgatggagctgaagatgacttctttgagggcaccgtccctgtcagccaagacgtctcatccttggtaggtgctacaaatgttagcgcaccagatcacagcttctctgcaggagtgtataacactgccatgattagtgctggacacagcttctctgacggagttgataaaaatgctaactctcatttcggtcccagtggaagtagtgcagggtacggggatcaaagcactaatgcacagttgggctccactgatcccaaatacctggagagcctctacccggggtggaagtatgatgaggcgacacagcagtggtatcaggtagatacccacagtgcacagagttacgttgctgataatactggtgctgttgtagccgttgggagtgacaatacacagcaacatcagcagcagtttagtgcatcgtacttgcaaaacaatttacatgcagcacttgaaaccattgcggaagagagcagcaccaatgccatgagctgggtccagggtgggaccaacacaggacccccagaatacccaccgaacatgctgttctacgcagaatacccaggatggtactttgacaccaacactcaacaatggcaaacacttgagtcataccagcaaagtgttgcacatgttgcaactactgcagcagcctcagatgggttcgcagggacatgccataatgtagctcattacactgaggattcttatgcaagtagctataaccagcagagccagtggcaaccggattcgttcggtaataccatgcaggctgatgttttggggggcaagagcttgctaggtagttcctatggttctaatcagcaggctgggaatcagattgggcaacaggccaatgtggactctttaaatcacgagcctcatgtaaatacatttatgccttctacagggaatcagagttggtacagtggtttggagcattctacaagtaaggaattaaggtacaaaggatttgaaccttcaacaggtttccagactagtcgcaaggaattccagcctcctaaagatcaccaggctggtcacatggcagatgaacctttgacaagatatgggtatggtagttcaaatggggtcgtcaatacacaaaatttcgtaccaaaagagggtatgcacaagacacaaatgcatgatgactccactgcgcatacttatgctgcaagcaactattggggtactcagacctccatgggcagtgctcagcagcaactgactggtacaaatggtccatcccaacagtttggtttctcaccacatgagcagagatcatcagctggacgcccaccacacactgtggtatcctttggatttggggggaagcttgtagttcttaaagaaaccagctctatggctgcaaactttgacagcggaaatcagggcaattctggtcgaacggtatcagttcttaatattccagagattgttgctgataaaattgatcattcaagcatcgctaacggtggtgcatttagctacttccatgctttgtgtcgccatcctattcctggccctcttgttggtggaagtgctgcatcaaaggatctgaataaatggcttgatgatatgagtggcgtatatgaatcttctcagacagaattccagggaggggatgttcagaaggtgcttatttcgttgttgaaaatattgtgccaacactatggaaagcttcgttcatcctttgggtctgacccgtcacaagagggtatagatggcccagagatggcagtgacgaaacttttctcatcttgtaagagcagtgctaatatgaaagggtatggagctgttgtccattgcatgagaaatcttccctcagaaagccagattcagactactgcccaggaggttcaaagtctcttggtttctggtagaaggaaagaggcccttcaccaggcacaagaaggtcacctttggggccctgcactgatccttgctttacaacttggtgataagttttatgcggatactgtgaagaaaatggcccactgccattttgtttctggatcacccttgaggacactgtgccttcttattgctggacaacctgcagatgttttcagttttgagaatcctgttaacagtggtttgtcttctccccaacagcctgtagaggctgctcctaaaggtatgctggatgactggcaagagaatttggctattataacagcaaacaggacaaaaggtgatgaccttgtaattacccgccttggggattgcctttgggaagagaaaaatgaggttgcatctgcccactcgtgctatttagttgctgaactaaatattgattcgtactctggaagtgcaaggatgtgccttattggtgcggaccacttgagatgtccgcgcacatttaccagccctgaagcaatccagagaacagaggtttatgagtatgcaaaggttcttggtaattctcagtatatcctcttgccatttcaaccatacaagctgatatatgcatatatgcttgcggaggttgggaagatttctgattcactaaagtactgtcaagcatctctgaaggtgctcaagtcctctggtcgtgcacctgaactagaagcatggaagcaactgtttattaccctggaggaccggatacgtacccatcaacagggcggttatgcaacaaatcttgcccctggaaagattgttggaaagcttttcacatcacttgataaatctttgtcccgaatgatgggtacacaatctgcaccgttgcctcaactgccgcagggtgctgcaaatgagagaggtgtttattcttctcctgatacaaaagtagtaaatagtcagtcagtgatgtccatggcaccattagtgtcatctgcttcagagcagtctatgagtgaaattggaggaaatagtgtctatggcagggaagttgcacataacagaagtatttctgaaccagacttcggcaaaaccccccaacagggtgctgctgtatcaagtaaggcacagagcacatcaggttcaggcagttcacgctttggatggttggtgcagaagacaatagggcttgtttcaaaatctcaccgccaggcaaagctaggggaacagaacaagttctactatgacgagaagctgaagcggtgggttgaagaaggtgctgagatccctgccgaggagcccccacttcccccacctccaacaaaagtgccattccagaacagcgttccagatcccaactccaatgctcctcccactggtggaggttattcctcaaatcctcccgagcctagttccgggatgccaccgatgccacccacccagaaccagttctcagcacgtggaaggatgggtgttagatcaagatatgtggatacttttaacaagggtggcggtggtggtggcgcaaatgccttcggagtagcaacatcttatagcaaaccagcagctccttcaattgaaaccgcccgacaggatgaatcgtcgtcctcaccagcgatggaaacatcatttagttcgccgccatcactgatacagatgcagtcaagcattccgcggtacccaagtatggataacgtcagctcccccacaggcagcattaacagctcgatgtcaaggtcaagagcgtcatcatggagcggaacgtacccagagcagttgagcagcactgccgcttccaggtcacctgatggacagatgacgcagtcaccatcgatgcctggaagaagacctccgcacagccgttccaacagcgcgtcttcttccgcccagctcaatggtttgggtgaggatcttcacgaggtggagctctgacacctggccgcagattttgaccataatgtgatttatattaatagctgcatgtgtctagagagcaaagcaaaggaaattaaagtgcggtgtccctttttcaatttttttacatgtgaaagactgtggatgccgctgcattgtacagatagttgactcgttcgccagatgaaaaatgtataacaagagtcgtaggttcaagatagggagaagatgaaaccgtgatgattcatcattgttaaaaagatggactgtctgttggaaaaataaagctgattaataaccgcaataatgtcggtccgcatcttggtgttcatattcttatttgtgtgtatgcatttctttgttcctgtgtattatattactttgttattttgcgagtcactggagcacca

SEQ ID NO: 207920 - DNA, 5617 bp, Zea Mays
atcaaatctctacagacacctctagcggattagtgacgtcagcgcgcgcatcgcacacgcgtctcctccctctgctcccagtctccaatctcctcccttccccactgcggcggaagtccaccaaagcgaaaccaagagcggcccgaccagatccaccttcttcctccccccttcatgcaaccaaaccctagggactagggctaattcccctcctcctcctactccatggcctcggatttcgacgagaccgacgaagccttcttcgacaagctagtcaactccgacgacgacgacgatcccccggccgccgccgccgtgggggggctcgctgcgctatcgctgaccgatcaacccgacgcgccgccgcctcgcgagtccgagcctcgtgaccagcctgctgctgctgctgcggcggcagcggcaccgacggaggatgcggagcgtgagccctcgccggaggtgtatcctgcggccgtgctgctgcatccgccccccgacctcgctgccaccgtcggggcagatccggccggggacctcctgccggaagacggagaacccttctccggggccgcggctgtgccagaggatcatcagggcctggagccgtcgctgtcgtcgtctctctcagcaggcaccggcgatggcagcgcgccggatcgcaccgtctctggccacacggagagcaatgccagttcccagttggattccagcacagctgcggaggggtctgggcatcagagcgccaaatcgcagctggagtacacggatcccaggtatctagagagcctctaccctggctggaagtacgatgacgctacgcagcagtggtatcagggactgggcttgaacacaggcagacggcttctcagcctgagactgaggctggcaatcagcctgcagtggcaccacagaaagagggggaggcacagtgtgaacccaagccgatgcatacagaggtgggatatggggagagcaatgccacttcccagttcgattccagagctactgctgagggatacggggatcggagcgctgatgcgcaggtggagtacactgatcccagatatctagagagcctctaccctggctggaagtacgacgaggccacacatcagtggtatcaggtagataccctcaacacacagacttatgctgctcgtgatactggtggtgctgtggcagaccttgcgagtggcggtagtgttcagcagcaccaacagtttagtggttcgtacatacaaaacacttcacatccagagcctgctcttgagcttacagagccgacttctgagtcaaagcctcagcttgagcctgcggcggcccctcctcagaccgatgcttatcctgcggtggcatcacataaagaggagcagaaagagcatggatctgtaccggtgcatactaagcctgaagctcaggagattcctgccaatgctggtgatactgccacagtgacagagggtgggtccccagggtcagagaaaggcatccataccgccgtcaagcaagtgcagtggaacgactttggtgccagcactggtggggcggatctatttggtgacctcctgcccgatggagctgaagatgacttctttgagggcaccgtccctgtcagccaagacgtctcatccttggtaggtgctacaaatgttagcgcaccagatcacagcttctctgcaggagtgtataacactgccatgattagtgctggacacagcttctctgacggagttgataaaaatgctaactctcatttcggtcccagtggaagtagtgcagggtacggggatcaaagcactaatgcacagttgggctccactgatcccaaatacctggagagcctctacccggggtggaagtatgatgaggcgacacagcagtggtatcaggtagatacccacagtgcacagagttacgttgctgataatactggtgctgttgtagccgttgggagtgacaatacacagcaacatcagcagcagtttagtgcatcgtacttgcaaaacaatttacatgcagcacttgaaaccattgcggaagagagcagcaccaatgccatgagctgggtccagggtgggaccaacacaggacccccagaatacccaccgaacatgctgttctacgcagaatacccaggatggtactttgacaccaacactcaacaatggcaaacacttgagtcataccagcaaagtgttgcacatgttgcaactactgcagcagcctcagatgggttcgcagggacatgccataatgtagctcattacactgaggattcttatgcaagtagctataaccagcagagccagtggcaaccggattcgttcggtaataccatgcaggctgatgttttggggggcaagagcttgctaggtagttcctatggttctaatcagcaggctgggaatcagattgggcaacaggccaatgtggactctttaaatcacgagcctcatgtaaatacatttatgccttctacagggaatcagagttggtacagtggtttggagcattctacaagtaaggaattaaggtacaaaggatttgaaccttcaacaggtttccagactagtcgcaaggaattccagcctcctaaagatcaccaggctggtcacatggcagatgaacctttgacaagatatgggtatggtagttcaaatggggtcgtcaatacacaaaatttcgtaccaaaagagggtatgcacaagacacaaatgcatgatgactccactgcgcatacttatgctgcaagcaactattggggtactcagacctccatgggcagtgctcagcagcaactgactggtacaaatggtccatcccaacagtttggtttctcaccacatgagcagagatcatcagctggacgcccaccacacactgtggtatcctttggatttggggggaagcttgtagttcttaaagaaaccagctctatggctgcaaactttgacagcggaaatcagggcaattctggtcgaacggtatcagttcttaatattccagagattgttgctgataaaattgatcattcaagcatcgctaacggtggtgcatttagctacttccatgctttgtgtcgccatcctattcctggccctcttgttggtggaagtgctgcatcaaaggatctgaataaatggcttgatgatatgagtggcgtatatgaatcttctcagacagaattccagggaggggatgttcagaaggtgcttatttcgttgttgaaaatattgtgccaacactatggaaagcttcgttcatcctttgggtctgacccgtcacaagagggtatagatggcccagagatggcagtgacgaaacttttctcatcttgtaagagcagtgctaatatgaaagggtatggagctgttgtccattgcatgagaaatcttccctcagaaagccagattcagttttatgcggatactgtgaagaaaatggcccactgccattttgtttctggatcacccttgaggacactgtgccttcttattgctggacaacctgcagatgttttcagttttgagaatcctgttaacagtggtttgtcttctccccaacagcctgtagaggctgctcctaaaggtatgctggatgactggcaagagaatttggctattataacagcaaacaggacaaaaggtgatgaccttgtaattacccgccttggggattgcctttgggaagagaaaaatgaggttgcatctgcccactcgtgctatttagttgctgaactaaatattgattcgtactctggaagtgcaaggatgtgccttattggtgcggaccacttgagatgtccgcgcacatttaccagccctgaagcaatccagagaacagaggtttatgagtatgcaaaggttcttggtaattctcagtatatcctcttgccatttcaaccatacaagctgatatatgcatatatgcttgcggaggttgggaagatttctgattcactaaagtactgtcaagcatctctgaaggtgctcaagtcctctggtcgtgcacctgaactagaagcatggaagcaactgtttattaccctggaggaccggatacgtacccatcaacagggcggttatgcaacaaatcttgcccctggaaagattgttggaaagcttttcacatcacttgataaatctttgtcccgaatgatgggtacacaatctgcaccgttgcctcaactgccgcagggtgctgcaaatgagagaggtgtttattcttctcctgatacaaaagtagtaaatagtcagtcagtgatgtccatggcaccattagtgtcatctgcttcagagcagtctatgagtgaaattggaggaaatagtgtctatggcagggaagttgcacataacagaagtatttctgaaccagacttcggcaaaaccccccaacagggtgctgctgtatcaagtaaggcacagagcacatcaggttcaggcagttcacgctttggatggttggtgcagaagacaatagggcttgtttcaaaatctcaccgccaggcaaagctaggggaacagaacaagttctactatgacgagaagctgaagcggtgggttgaagaaggtgctgagatccctgccgaggagcccccacttcccccacctccaacaaaagtgccattccagaacagcgttccagatcccaactccaatgctcctcccactggtggaggttattcctcaaatcctcccgagcctagttccgggatgccaccgatgccacccacccagaaccagttctcagcacgtggaaggatgggtgttagatcaagatatgtggatacttttaacaagggtggcggtggtggtggcgcaaatgccttcggagtagcaacatcttatagcaaaccagcagctccttcaattgaaaccgcccgacaggatgaatcgtcgtcctcaccagcgatggaaacatcatttagttcgccgccatcactgatacagatgcagtcaagcattccgcggtacccaagtatggataacgtcagctcccccacaggcagcattaacagctcgatgtcaaggtcaagagcgtcatcatggagcggaacgtacccagagcagttgagcagcactgccgcttccaggtcacctgatggacagatgacgcagtcaccatcgatgcctggaagaagacctccgcacagccgttccaacagcgcgtcttcttccgcccagctcaatggtttgggtgaggatcttcacgaggtggagctctgacacctggccgcagattttgaccataatgtgatttatattaatagctgcatgtgtctagagagcaaagcaaaggaaattaaagtgcggtgtccctttttcaatttttttacatgtgaaagactgtggatgccgctgcattgtacagatagttgactcgttcgccagatgaaaaatgtataacaagagtcgtaggttcaagatagggagaagatgaaaccgtgatgattcatcattgttaaaaagatggactgtctgttggaaaaataaagctgattaataaccgcaataatgtcggtccgcatcttggtgttcatattcttatttgtgtgtatgcatttctttgttcctgtgtattatattactttgttattttgcgagtcactggagcacca

SEQ ID NO: 207921 - DNA, 5687 bp, Zea Mays
atcaaatctctacagacacctctagcggattagtgacgtcagcgcgcgcatcgcacacgcgtctcctccctctgctcccagtctccaatctcctcccttccccactgcggcggaagtccaccaaagcgaaaccaagagcggcccgaccagatccaccttcttcctccccccttcatgcaaccaaaccctagggactagggctaattcccctcctcctcctactccatggcctcggatttcgacgagaccgacgaagccttcttcgacaagctagtcaactccgacgacgacgacgatcccccggccgccgccgccgtgggggggctcgctgcgctatcgctgaccgatcaacccgacgcgccgccgcctcgcgagtccgagcctcgtgaccagcctgctgctgctgctgcggcggcagcggcaccgacggaggatgcggagcgtgagccctcgccggaggtgtatcctgcggccgtgctgctgcatccgccccccgacctcgctgccaccgtcggggcagatccggccggggacctcctgccggaagacggagaacccttctccggggccgcggctgtgccagaggatcatcagggcctggagccgtcgctgtcgtcgtctctctcagcaggcaccggcgatggcagcgcgccggatcgcaccgtctctggccacacggagagcaatgccagttcccagttggattccagcacagctgcggaggggtctgggcatcagagcgccaaatcgcagctggagtacacggatcccaggtatctagagagcctctaccctggctggaagtacgatgacgctacgcagcagtggtatcagggactgggcttgaacacaggcagacggcttctcagcctgagactgaggctggcaatcagcctgcagtggcaccacagaaagagggggaggcacagtgtgaacccaagccgatgcatacagaggtgggatatggggagagcaatgccacttcccagttcgattccagagctactgctgagggatacggggatcggagcgctgatgcgcaggtggagtacactgatcccagatatctagagagcctctaccctggctggaagtacgacgaggccacacatcagtggtatcaggtagataccctcaacacacagacttatgctgctcgtgatactggtggtgctgtggcagaccttgcgagtggcggtagtgttcagcagcaccaacagtttagtggttcgtacatacaaaacacttcacatccagagcctgctcttgagcttacagagccgacttctgagtcaaagcctcagcttgagcctgcggcggcccctcctcagaccgatgcttatcctgcggtggcatcacataaagaggagcagaaagagcatggatctgtaccggtgcatactaagcctgaagctcaggagattcctgccaatgctggtgatactgccacagtgacagagggtgggtccccagggtcagagaaaggcatccataccgccgtcaagcaagtgcagtggaacgactttggtgccagcactggtggggcggatctatttggtgacctcctgcccgatggagctgaagatgacttctttgagggcaccgtccctgtcagccaagacgtctcatccttggtaggtgctacaaatgttagcgcaccagatcacagcttctctgcaggagtgtataacactgccatgattagtgctggacacagcttctctgacggagttgataaaaatgctaactctcatttcggtcccagtggaagtagtgcagggtacggggatcaaagcactaatgcacagttgggctccactgatcccaaatacctggagagcctctacccggggtggaagtatgatgaggcgacacagcagtggtatcaggtagatacccacagtgcacagagttacgttgctgataatactggtgctgttgtagccgttgggagtgacaatacacagcaacatcagcagcagtttagtgcatcgtacttgcaaaacaatttacatgcagcacttgaaaccattgcggaagagagcagcaccaatgccatgagctgggtccagggtgggaccaacacaggacccccagaatacccaccgaacatgctgttctacgcagaatacccaggatggtactttgacaccaacactcaacaatggcaaacacttgagtcataccagcaaagtgttgcacatgttgcaactactgcagcagcctcagatgggttcgcagggacatgccataatgtagctcattacactgaggattcttatgcaagtagctataaccagcagagccagtggcaaccggattcgttcggtaataccatgcaggctgatgttttggggggcaagagcttgctaggtagttcctatggttctaatcagcaggctgggaatcagattgggcaacaggccaatgtggactctttaaatcacgagcctcatgtaaatacatttatgccttctacagggaatcagagttggtacagtggtttggagcattctacaagtaaggaattaaggtacaaaggatttgaaccttcaacaggtttccagactagtcgcaaggaattccagcctcctaaagatcaccaggctggtcacatggcagatgaacctttgacaagatatgggtatggtagttcaaatggggtcgtcaatacacaaaatttcgtaccaaaagagggtatgcacaagacacaaatgcatgatgactccactgcgcatacttatgctgcaagcaactattggggtactcagacctccatgggcagtgctcagcagcaactgactggtacaaatggtccatcccaacagtttggtttctcaccacatgagcagagatcatcagctggacgcccaccacacactgtggtatcctttggatttggggggaagcttgtagttcttaaagaaaccagctctatggctgcaaactttgacagcggaaatcagggcaattctggtcgaacggtatcagttcttaatattccagagattgttgctgataaaattgatcattcaagcatcgctaacggtggtgcatttagctacttccatgctttgtgtcgccatcctattcctggccctcttgttggtggaagtgctgcatcaaaggatctgaataaatggcttgatgatatgagtggcgtatatgaatcttctcagacagaattccagggaggggatgttcagaaggtgcttatttcgttgttgaaaatattgtgccaacactatggaaagcttcgttcatcctttgggtctgacccgtcacaagagggtatagatggcccagagatggcagtgacgaaacttttctcatcttgtaagagcagtgctaatatgaaagggtatggagctgttgtccattgcatgagaaatcttccctcagaaagccagattcagactactgcccaggaggttcaaagtctcttggtttctggtagaaggaaagaggcccttcaccaggcacaagaaggtcacctttggggccctgcactgatccttgctttacaacttggtgataagttttatgcggatactgtgaagaaaatggcccactgccattttgtttctggatcacccttgaggacactgtgccttcttattgctggacaacctgcagatgttttcagttttgagaatcctgttaacagtggtttgtcttctccccaacagcctgtagaggctgctcctaaaggtatgctggatgactggcaagagaatttggctattataacagcaaacaggacaaaaggttgcatctgcccactcgtgctatttagttgctgaactaaatattgattcgtactctggaagtgcaaggatgtgccttattggtgcggaccacttgagatgtccgcgcacatttaccagccctgaagcaatccagagaacagaggtttatgagtatgcaaaggttcttggtaattctcagtatatcctcttgccatttcaaccatacaagctgatatatgcatatatgcttgcggaggttgggaagatttctgattcactaaagtactgtcaagcatctctgaaggtgctcaagtcctctggtcgtgcacctgaactagaagcatggaagcaactgtttattaccctggaggaccggatacgtacccatcaacagggcggttatgcaacaaatcttgcccctggaaagattgttggaaagcttttcacatcacttgataaatctttgtcccgaatgatgggtacacaatctgcaccgttgcctcaactgccgcagggtgctgcaaatgagagaggtgtttattcttctcctgatacaaaagtagtaaatagtcagtcagtgatgtccatggcaccattagtgtcatctgcttcagagcagtctatgagtgaaattggaggaaatagtgtctatggcagggaagttgcacataacagaagtatttctgaaccagacttcggcaaaaccccccaacagcagggtgctgctgtatcaagtaaggcacagagcacatcaggttcaggcagttcacgctttggatggttggtgcagaagacaatagggcttgtttcaaaatctcaccgccaggcaaagctaggggaacagaacaagttctactatgacgagaagctgaagcggtgggttgaagaaggtgctgagatccctgccgaggagcccccacttcccccacctccaacaaaagtgccattccagaacagcgttccagatcccaactccaatgctcctcccactggtggaggttattcctcaaatcctcccgagcctagttccgggatgccaccgatgccacccacccagaaccagttctcagcacgtggaaggatgggtgttagatcaagatatgtggatacttttaacaagggtggcggtggtggtggcgcaaatgccttcggagtagcaacatcttatagcaaaccagcagctccttcaattgaaaccgcccgacaggatgaatcgtcgtcctcaccagcgatggaaacatcatttagttcgccgccatcactgatacagatgcagtcaagcattccgcggtacccaagtatggataacgtcagctcccccacaggcagcattaacagctcgatgtcaaggtcaagagcgtcatcatggagcggaacgtacccagagcagttgagcagcactgccgcttccaggtcacctgatggacagatgacgcagtcaccatcgatgcctggaagaagacctccgcacagccgttccaacagcgcgtcttcttccgcccagctcaatggtttgggtgaggatcttcacgaggtggagctctgacacctggccgcagattttgaccataatgtgatttatattaatagctgcatgtgtctagagagcaaagcaaaggaaattaaagtgcggtgtccctttttcaatttttttacatgtgaaagactgtggatgccgctgcattgtacagatagttgactcgttcgccagatgaaaaatgtataacaagagtcgtaggttcaagatagggagaagatgaaaccgtgatgattcatcattgttaaaaagatggactgtctgttggaaaaataaagctgattaataaccgcaataatgtcggtccgcatcttggtgttcatattcttatttgtgtgtatgcatttctttgttcctgtgtattatattactttgttattttgcgagtcactggagcacca

SEQ ID NO: 207922 - DNA, 5755 bp, Zea Mays
atcaaatctctacagacacctctagcggattagtgacgtcagcgcgcgcatcgcacacgcgtctcctccctctgctcccagtctccaatctcctcccttccccactgcggcggaagtccaccaaagcgaaaccaagagcggcccgaccagatccaccttcttcctccccccttcatgcaaccaaaccctagggactagggctaattcccctcctcctcctactccatggcctcggatttcgacgagaccgacgaagccttcttcgacaagctagtcaactccgacgacgacgacgatcccccggccgccgccgccgtgggggggctcgctgcgctatcgctgaccgatcaacccgacgcgccgccgcctcgcgagtccgagcctcgtgaccagcctgctgctgctgctgcggcggcagcggcaccgacggaggatgcggagcgtgagccctcgccggaggtgtatcctgcggccgtgctgctgcatccgccccccgacctcgctgccaccgtcggggcagatccggccggggacctcctgccggaagacggagaacccttctccggggccgcggctgtgccagaggatcatcagggcctggagccgtcgctgtcgtcgtctctctcagcaggcaccggcgatggcagcgcgccggatcgcaccgtctctggccacacggagagcaatgccagttcccagttggattccagcacagctgcggaggggtctgggcatcagagcgccaaatcgcagctggagtacacggatcccaggtatctagagagcctctaccctggctggaagtacgatgacgctacgcagcagtggtatcagggactgggcttgaacacaggcagacggcttctcagcctgagactgaggctggcaatcagcctgcagtggcaccacagaaagagggggaggcacagtgtgaacccaagccgatgcatacagaggtgggatatggggagagcaatgccacttcccagttcgattccagagctactgctgagggatacggggatcggagcgctgatgcgcaggtggagtacactgatcccagatatctagagagcctctaccctggctggaagtacgacgaggccacacatcagtggtatcaggtagataccctcaacacacagacttatgctgctcgtgatactggtggtgctgtggcagaccttgcgagtggcggtagtgttcagcagcaccaacagtttagtggttcgtacatacaaaacacttcacatccagagcctgctcttgagcttacagagccgacttctgagtcaaagcctcagcttgagcctgcggcggcccctcctcagaccgatgcttatcctgcggtggcatcacataaagaggagcagaaagagcatggatctgtaccggtgcatactaagcctgaagctcaggagattcctgccaatgctggtgatactgccacagtgacagagggtgggtccccagggtcagagaaaggcatccataccgccgtcaagcaagtgcagtggaacgactttggtgccagcactggtggggcggatctatttggtgacctcctgcccgatggagctgaagatgacttctttgagggcaccgtccctgtcagccaagacgtctcatccttggtaggtgctacaaatgttagcgcaccagatcacagcttctctgcaggagtgtataacactgccatgattagtgctggacacagcttctctgacggagttgataaaaatgctaactctcatttcggtcccagtggaagtagtgcagggtacggggatcaaagcactaatgcacagttgggctccactgatcccaaatacctggagagcctctacccggggtggaagtatgatgaggcgacacagcagtggtatcaggtagatacccacagtgcacagagttacgttgctgataatactggtgctgttgtagccgttgggagtgacaatacacagcaacatcagcagcagtttagtgcatcgtacttgcaaaacaatttacatgcagcacttgaaaccattgcggaagagagcagcaccaatgccatgagctgggtccagggtgggaccaacacaggacccccagaatacccaccgaacatgctgttctacgcagaatacccaggatggtactttgacaccaacactcaacaatggcaaacacttgagtcataccagcaaagtgttgcacatgttgcaactactgcagcagcctcagatgggttcgcagggacatgccataatgtagctcattacactgaggattcttatgcaagtagctataaccagcagagccagtggcaaccggattcgttcggtaataccatgcaggctgatgttttggggggcaagagcttgctaggtagttcctatggttctaatcagcaggctgggaatcagattgggcaacaggccaatgtggactctttaaatcacgagcctcatgtaaatacatttatgccttctacagggaatcagagttggtacagtggtttggagcattctacaagtaaggaattaaggtacaaaggatttgaaccttcaacaggtttccagactagtcgcaaggaattccagcctcctaaagatcaccaggctggtcacatggcagatgaacctttgacaagatatgggtatggtagttcaaatggggtcgtcaatacacaaaatttcgtaccaaaagagggtatgcacaagacacaaatgcatgatgactccactgcgcatacttatgctgcaagcaactattggggtactcagacctccatgggcagtgctcagcagcaactgactggtacaaatggtccatcccaacagtttggtttctcaccacatgagcagagatcatcagctggacgcccaccacacactgtggtatcctttggatttggggggaagcttgtagttcttaaagaaaccagctctatggctgcaaactttgacagcggaaatcagggcaattctggtcgaacggtatcagttcttaatattccagagattgttgctgataaaattgatcattcaagcatcgctaacggtggtgcatttagctacttccatgctttgtgtcgccatcctattcctggccctcttgttggtggaagtgctgcatcaaaggatctgaataaatggcttgatgatatgagtggcgtatatgaatcttctcagacagaattccagggaggggatgttcagaaggtgcttatttcgttgttgaaaatattgtgccaacactatggaaagcttcgttcatcctttgggtctgacccgtcacaagagggtatagatggcccagagatggcagtgacgaaacttttctcatcttgtaagagcagtgctaatatgaaagggtatggagctgttgtccattgcatgagaaatcttccctcagaaagccagattcagactactgcccaggaggttcaaagtctcttggtttctggtagaaggaaagaggcccttcaccaggcacaagaaggtcacctttggggccctgcactgatccttgctttacaacttggtgataagttttatgcggatactgtgaagaaaatggcccactgccattttgtttctggatcacccttgaggacactgtgccttcttattgctggacaacctgcagatgttttcagttttgagaatcctgttaacagtggtttgtcttctccccaacagcctgtagaggctgctcctaaaggtatgctggatgactggcaagagaatttggctattataacagcaaacaggacaaaaggtgatgaccttgtaattacccgccttggggattgcctttgggaagagaaaaatgaggttgcatctgcccactcgtgctatttagttgctgaactaaatattgattcgtactctggaagtgcaaggatgtgccttattggtgcggaccacttgagatgtccgcgcacatttaccagccctgaagcaatccagagaacagaggtttatgagtatgcaaaggttcttggtaattctcagtatatcctcttgccatttcaaccatacaagctgatatatgcatatatgcttgcggaggttgggaagatttctgattcactaaatgcattatgaaggtactgtcaagcatctctgaaggtgctcaagtcctctggtcgtgcacctgaactagaagcatggaagcaactgtttattaccctggaggaccggatacgtacccatcaacagggcggttatgcaacaaatcttgcccctggaaagattgttggaaagcttttcacatcacttgataaatctttgtcccgaatgatgggtacacaatctgcaccgttgcctcaactgccgcagggtgctgcaaatgagagaggtgtttattcttctcctgatacaaaagtagtaaatagtcagtcagtgatgtccatggcaccattagtgtcatctgcttcagagcagtctatgagtgaaattggaggaaatagtgtctatggcagggaagttgcacataacagaagtatttctgaaccagacttcggcaaaaccccccaacagcagggtgctgctgtatcaagtaaggcacagagcacatcaggttcaggcagttcacgctttggatggttggtgcagaagacaatagggcttgtttcaaaatctcaccgccaggcaaagctaggggaacagaacaagttctactatgacgagaagctgaagcggtgggttgaagaaggtgctgagatccctgccgaggagcccccacttcccccacctccaacaaaagtgccattccagaacagcgttccagatcccaactccaatgctcctcccactggtggaggttattcctcaaatcctcccgagcctagttccgggatgccaccgatgccacccacccagaaccagttctcagcacgtggaaggatgggtgttagatcaagatatgtggatacttttaacaagggtggcggtggtggtggcgcaaatgccttcggagtagcaacatcttatagcaaaccagcagctccttcaattgaaaccgcccgacaggatgaatcgtcgtcctcaccagcgatggaaacatcatttagttcgccgccatcactgatacagatgcagtcaagcattccgcggtacccaagtatggataacgtcagctcccccacaggcagcattaacagctcgatgtcaaggtcaagagcgtcatcatggagcggaacgtacccagagcagttgagcagcactgccgcttccaggtcacctgatggacagatgacgcagtcaccatcgatgcctggaagaagacctccgcacagccgttccaacagcgcgtcttcttccgcccagctcaatggtttgggtgaggatcttcacgaggtggagctctgacacctggccgcagattttgaccataatgtgatttatattaatagctgcatgtgtctagagagcaaagcaaaggaaattaaagtgcggtgtccctttttcaatttttttacatgtgaaagactgtggatgccgctgcattgtacagatagttgactcgttcgccagatgaaaaatgtataacaagagtcgtaggttcaagatagggagaagatgaaaccgtgatgattcatcattgttaaaaagatggactgtctgttggaaaaataaagctgattaataaccgcaataatgtcggtccgcatcttggtgttcatattcttatttgtgtgtatgcatttctttgttcctgtgtattatattactttgttattttgcgagtcactggagcacca

SEQ ID NO: 207923 - DNA, 5684 bp, Zea Mays
atcaaatctctacagacacctctagcggattagtgacgtcagcgcgcgcatcgcacacgcgtctcctccctctgctcccagtctccaatctcctcccttccccactgcggcggaagtccaccaaagcgaaaccaagagcggcccgaccagatccaccttcttcctccccccttcatgcaaccaaaccctagggactagggctaattcccctcctcctcctactccatggcctcggatttcgacgagaccgacgaagccttcttcgacaagctagtcaactccgacgacgacgacgatcccccggccgccgccgccgtgggggggctcgctgcgctatcgctgaccgatcaacccgacgcgccgccgcctcgcgagtccgagcctcgtgaccagcctgctgctgctgctgcggcggcagcggcaccgacggaggatgcggagcgtgagccctcgccggaggtgtatcctgcggccgtgctgctgcatccgccccccgacctcgctgccaccgtcggggcagatccggccggggacctcctgccggaagacggagaacccttctccggggccgcggctgtgccagaggatcatcagggcctggagccgtcgctgtcgtcgtctctctcagcaggcaccggcgatggcagcgcgccggatcgcaccgtctctggccacacggagagcaatgccagttcccagttggattccagcacagctgcggaggggtctgggcatcagagcgccaaatcgcagctggagtacacggatcccaggtatctagagagcctctaccctggctggaagtacgatgacgctacgcagcagtggtatcagggactgggcttgaacacaggcagacggcttctcagcctgagactgaggctggcaatcagcctgcagtggcaccacagaaagagggggaggcacagtgtgaacccaagccgatgcatacagaggtgggatatggggagagcaatgccacttcccagttcgattccagagctactgctgagggatacggggatcggagcgctgatgcgcaggtggagtacactgatcccagatatctagagagcctctaccctggctggaagtacgacgaggccacacatcagtggtatcaggtagataccctcaacacacagacttatgctgctcgtgatactggtggtgctgtggcagaccttgcgagtggcggtagtgttcagcagcaccaacagtttagtggttcgtacatacaaaacacttcacatccagagcctgctcttgagcttacagagccgacttctgagtcaaagcctcagcttgagcctgcggcggcccctcctcagaccgatgcttatcctgcggtggcatcacataaagaggagcagaaagagcatggatctgtaccggtgcatactaagcctgaagctcaggagattcctgccaatgctggtgatactgccacagtgacagagggtgggtccccagggtcagagaaaggcatccataccgccgtcaagcaagtgcagtggaacgactttggtgccagcactggtggggcggatctatttggtgacctcctgcccgatggagctgaagatgacttctttgagggcaccgtccctgtcagccaagacgtctcatccttggtaggtgctacaaatgttagcgcaccagatcacagcttctctgcaggagtgtataacactgccatgattagtgctggacacagcttctctgacggagttgataaaaatgctaactctcatttcggtcccagtggaagtagtgcagggtacggggatcaaagcactaatgcacagttgggctccactgatcccaaatacctggagagcctctacccggggtggaagtatgatgaggcgacacagcagtggtatcaggtagatacccacagtgcacagagttacgttgctgataatactggtgctgttgtagccgttgggagtgacaatacacagcaacatcagcagcagtttagtgcatcgtacttgcaaaacaatttacatgcagcacttgaaaccattgcggaagagagcagcaccaatgccatgagctgggtccagggtgggaccaacacaggacccccagaatacccaccgaacatgctgttctacgcagaatacccaggatggtactttgacaccaacactcaacaatggcaaacacttgagtcataccagcaaagtgttgcacatgttgcaactactgcagcagcctcagatgggttcgcagggacatgccataatgtagctcattacactgaggattcttatgcaagtagctataaccagcagagccagtggcaaccggattcgttcggtaataccatgcaggctgatgttttggggggcaagagcttgctaggtagttcctatggttctaatcagcaggctgggaatcagattgggcaacaggccaatgtggactctttaaatcacgagcctcatgtaaatacatttatgccttctacagggaatcagagttggtacagtggtttggagcattctacaagtaaggaattaaggtacaaaggatttgaaccttcaacaggtttccagactagtcgcaaggaattccagcctcctaaagatcaccaggctggtcacatggcagatgaacctttgacaagatatgggtatggtagttcaaatggggtcgtcaatacacaaaatttcgtaccaaaagagggtatgcacaagacacaaatgcatgatgactccactgcgcatacttatgctgcaagcaactattggggtactcagacctccatgggcagtgctcagcagcaactgactggtacaaatggtccatcccaacagtttggtttctcaccacatgagcagagatcatcagctggacgcccaccacacactgtggtatcctttggatttggggggaagcttgtagttcttaaagaaaccagctctatggctgcaaactttgacagcggaaatcagggcaattctggtcgaacggtatcagttcttaatattccagagattgttgctgataaaattgatcattcaagcatcgctaacggtggtgcatttagctacttccatgctttgtgtcgccatcctattcctggccctcttgttggtggaagtgctgcatcaaaggatctgaataaatggcttgatgatatgagtggcgtatatgaatcttctcagacagaattccagggaggggatgttcagaaggtgcttatttcgttgttgaaaatattgtgccaacactatggaaagcttcgttcatcctttgggtctgacccgtcacaagagtgctaatatgaaagggtatggagctgttgtccattgcatgagaaatcttccctcagaaagccagattcagactactgcccaggaggttcaaagtctcttggtttctggtagaaggaaagaggcccttcaccaggcacaagaaggtcacctttggggccctgcactgatccttgctttacaacttggtgataagttttatgcggatactgtgaagaaaatggcccactgccattttgtttctggatcacccttgaggacactgtgccttcttattgctggacaacctgcagatgttttcagttttgagaatcctgttaacagtggtttgtcttctccccaacagcctgtagaggctgctcctaaaggtatgctggatgactggcaagagaatttggctattataacagcaaacaggacaaaaggtgatgaccttgtaattacccgccttggggattgcctttgggaagagaaaaatgaggttgcatctgcccactcgtgctatttagttgctgaactaaatattgattcgtactctggaagtgcaaggatgtgccttattggtgcggaccacttgagatgtccgcgcacatttaccagccctgaagcaatccagagaacagaggtttatgagtatgcaaaggttcttggtaattctcagtatatcctcttgccatttcaaccatacaagctgatatatgcatatatgcttgcggaggttgggaagatttctgattcactaaagtactgtcaagcatctctgaaggtgctcaagtcctctggtcgtgcacctgaactagaagcatggaagcaactgtttattaccctggaggaccggatacgtacccatcaacagggcggttatgcaacaaatcttgcccctggaaagattgttggaaagcttttcacatcacttgataaatctttgtcccgaatgatgggtacacaatctgcaccgttgcctcaactgccgcagggtgctgcaaatgagagaggtgtttattcttctcctgatacaaaagtagtaaatagtcagtcagtgatgtccatggcaccattagtgtcatctgcttcagagcagtctatgagtgaaattggaggaaatagtgtctatggcagggaagttgcacataacagaagtatttctgaaccagacttcggcaaaaccccccaacagggtgctgctgtatcaagtaaggcacagagcacatcaggttcaggcagttcacgctttggatggttggtgcagaagacaatagggcttgtttcaaaatctcaccgccaggcaaagctaggggaacagaacaagttctactatgacgagaagctgaagcggtgggttgaagaaggtgctgagatccctgccgaggagcccccacttcccccacctccaacaaaagtgccattccagaacagcgttccagatcccaactccaatgctcctcccactggtggaggttattcctcaaatcctcccgagcctagttccgggatgccaccgatgccacccacccagaaccagttctcagcacgtggaaggatgggtgttagatcaagatatgtggatacttttaacaagggtggcggtggtggtggcgcaaatgccttcggagtagcaacatcttatagcaaaccagcagctccttcaattgaaaccgcccgacaggatgaatcgtcgtcctcaccagcgatggaaacatcatttagttcgccgccatcactgatacagatgcagtcaagcattccgcggtacccaagtatggataacgtcagctcccccacaggcagcattaacagctcgatgtcaaggtcaagagcgtcatcatggagcggaacgtacccagagcagttgagcagcactgccgcttccaggtcacctgatggacagatgacgcagtcaccatcgatgcctggaagaagacctccgcacagccgttccaacagcgcgtcttcttccgcccagctcaatggtttgggtgaggatcttcacgaggtggagctctgacacctggccgcagattttgaccataatgtgatttatattaatagctgcatgtgtctagagagcaaagcaaaggaaattaaagtgcggtgtccctttttcaatttttttacatgtgaaagactgtggatgccgctgcattgtacagatagttgactcgttcgccagatgaaaaatgtataacaagagtcgtaggttcaagatagggagaagatgaaaccgtgatgattcatcattgttaaaaagatggactgtctgttggaaaaataaagctgattaataaccgcaataatgtcggtccgcatcttggtgttcatattcttatttgtgtgtatgcatttctttgttcctgtgtattatattactttgttattttgcgagtcactggagcacca

SEQ ID NO: 207924 - DNA, 2842 bp, Zea Mays
cgctttcttcttcctctactcgcgccgccgcgtctcaagtctcaacgctgcgccaaaacggcaaaaccctaccctgacctgaaccccaaacccgccgcgcctcctcctttctcgtactgcaattcgggactagccgccgccagtctcgatggggaagaggagcggcagcagtaggaaggacaagaacaaggtcattctcccaccggagctgccgccggaaatacacgacgatgaggtggatgtcagcgaggaagacatcgagttctatgccaccgacagcagtaacgttacacccttccgccacttcgacaagaagtccatcgacaggtatgtcgggagggttgccgggcgcgacgagggcgaggtcgagcgcctctacgaagagcgccagaagcggaaggccacagaatcgtcggggagaccccgcgaggatgatgattatttggaggtcgaccccgtcgacgcactccccaccaagacgctgcaaggggagctcgtctacaatagaggaggaagtgaaggaggaactttcagctgaggaattattcgaaaaaaagaaggctcaacttgctgaactggggatgtctatgcttgaagatcctgagtcgaacattagatctctgaatgatatgctaagtataagcaatgacagagaccaaaaggttgttaaacttggtgtgatgtctttgcttgctgtgtttaaggacgttattccaagttatcggattaggcagctgacagaaaaggagctagcagtagaagtttcgaaagaagtgaagaagacaagatattatgagtacacacttattcgctgctacaaggcctacctgcagaaattgatatcgttggagaagcagccctacttttatactgtggctgttcgttgcatgtgtgctttattagacactgccccacattttaacttccgtgaaagcctattggctagtgtggtaaaaaatttaagctcctcagatgatgtagtaaggaaaatgtgttgtgaagcaataagatcattatttataaatgaaggaaaacatcgtggtgaggcaacaatagaagcagttaggttgattgcagatcatgtgaagctcaatgattgccaacttcatcctgatagcattgaggtcttcctgtctttgagatttgatgaagatattggaaaagatgagattcaggaggaaaaggtgaaaccaaagaggaataaacgttggcaaaaaaatcaggaggttccgaagcaattgccagttaatgataagaagaaaaccagacaggaactgatctcaaaagctagaaaggaggttgatgcagaccttagagcagtttccttcactcttgacccgaaggagagaaaagggatacaaaaagaaacactttctgctctgtttgagacttacttccgcattctgaagcatagtatggccgcttcaaattcaaggactaaggtgaataatgtttcccctggtggctcacacccacttctcactccatgcctggagggtttagggaaattttcacatttaattgatttggatttcatgggtgaacttatatcttgcctcaagaagctttctgggtatagtgaccgacaagacgaaattcccaatgataatgcactgtctgtctcagaacgtctgcagtgctgcatagttgtgtttaaagtctggaggagcaaccttgaggcactgaatgtggatctgcaggatttctttgtgcagctctataacctcatactggagtatcggcctgacagggatcatggcgaggtattggctgatgcgctgaagacacttctttgggaaggcagacagcatgatatgctaagagccgctgctttcatcaaacgattagccacatttgctctctcatttggctctgcagaagcaatagcagcattggtcacactgaagcatctcctccaaaaaaacagcaagtgccgcaatatgttggaaaatgattctggtggcggttctctgtcttgcttagttgcgaaatacaaccccgaagctacggatccatatctgagtggtgcactcgcttcagtcctctgggagctcagcctcctagagaagcattatgacatctcagtttcctcgatggcttcgaatatcttgagtatggcaaacctgaatcccacccagaacccagttcctatcttgaacgtgaaccctcttgaagcgtacagagacctgtcattggaaagggaactatcaaaaccggctagcaaagcattgccactgaacctcaaaaggaagcggcgtgccaaggagtttgttgcgctaagcccagatgtgcttcagaaggcagattgctcggtggacaaagacgagctcgaagagaagctgcagagccatttctccgtgctaagaggcatctctgagaatgagaggttgagggcagagctgaaccacacactgtcatccataaacatgtacaaggagtacaagaagcagaaaaggaaaaacatgaaagttaagaccggaaggaaaaaaaacagcaaggctttagccgtttaaggctttagccgtcttatctgttccggaggtctttgcgctcgaccggtggatgggtgtaattttcagttttttttgggcatatttcccattgactactatagtgcagttttctgccacccttttgccgtttctgcacaccacactatgaaagacttgtttgcatttgtgattttgggaaatggtttagggaagttgtagtttttccccatttttctcagtttctctatacgattttgaggggaaagcggatagattcttccctaacgcattatacattgatattcacttttatcattctcttattttaagtcttgtcggttacataagat

SEQ ID NO: 207925 - DNA, 1384 bp, Zea Mays
gtgcttggccagttggccacatgccttgccttgcctttgcctacctgttgatcgagccgagcgagcagggagagacacggcaccgagtgaggccgccgcatcctcctcctctccgatcctccagtccgcctgctgcctgcctcaacggatcgacgcgacaggagggagggaggaaggagacggtcgatcagagtctgagacggaggccgatccaccaccgcagcgacgagcgggaggagatgaagatcatcattgacacggatcccggcatcgatgacagcgtggccatcctgatggcattccagatgccgggcgtccaggtcctagggctcaccaccatcttcggaaactgcaccacagagcatgccacacgcaacgccttgatcctgtgcgagaaggcaagccatctagaggtcccagtagctgagggcagccatgagcctctcaagggaggaaagccgcacgttgctgacttcgttcatggacctgatggcctcgggaacgtagatcttcctgatcccactatcaagaaagtggaggaaagtgctaccgacttcttggttgataaggtctcgcgatttcctggagaggtctctgtgctcgccttgggtcctctgacaaacatagcattggccatcaagaaggatccctcattcgtgaaaaacgttaagaagatcgttgtgctgggtggagcgttctttgcggctggaaatgccactccttccgctgaagcaaatatccacagtgatccggaggcagccgacatggttttcacttctggggcggacatctacgtcgttggcctcaacatcacaacgcaagtcagcttcacagataaggatctcctggagctaagaaactcgcaagggaagtacgcacagttcctatgtgatgtatgcaagttctacttggactggcacaccgagtcttatggtgctcctgtgattttcctccacgatccggtcagctttgccgcgctagttcgtccggagctgttcacgttcaagaagggcgtggtgagggtggagacgcagggcatctgcgtcgggcatacttccatggacatgttgctgaagaagtggaactcagagaacccgtggactggctactcaccgatttcggtcgcatggacggtcgatgtgcccaaggtggtcgcgtttgtgaaggagctcgtcaccaagccgtgaaccaagttaactaacgtgttgtggtctcgcgcaccagatgtgcagcaaatttgagatgtcgatatatttactcacattcgaagcactgcaaacactattatctcaatagttggttcctgtggaggattgcaaatcaatttgagatgttttaaattgcagcatgtgccttcggccattgaatggtatgatgttttttt

SEQ ID NO: 207926 - DNA, 1342 bp, Zea Mays
gtgcttggccagttggccacatgccttgccttgcctttgcctacctgttgatcgagccgagcgagcagggagagacacggcaccgagtgaggccgccgcatcctcctcctctccgatccgagggagggaggaaggagacggtcgatcagagtctgagacggaggccgatccaccaccgcagcgacgagcgggaggagatgaagatcatcattgacacggatcccggcatcgatgacagcgtggccatcctgatggcattccagatgccgggcgtccaggtcctagggctcaccaccatcttcggaaactgcaccacagagcatgccacacgcaacgccttgatcctgtgcgagaaggcaagccatctagaggtcccagtagctgagggcagccatgagcctctcaagggaggaaagccgcacgttgctgacttcgttcatggacctgatggcctcgggaacgtagatcttcctgatcccactatcaagaaagtggaggaaagtgctaccgacttcttggttgataaggtctcgcgatttcctggagaggtctctgtgctcgccttgggtcctctgacaaacatagcattggccatcaagaaggatccctcattcgtgaaaaacgttaagaagatcgttgtgctgggtggagcgttctttgcggctggaaatgccactccttccgctgaagcaaatatccacagtgatccggaggcagccgacatggttttcacttctggggcggacatctacgtcgttggcctcaacatcacaacgcaagtcagcttcacagataaggatctcctggagctaagaaactcgcaagggaagtacgcacagttcctatgtgatgtatgcaagttctacttggactggcacaccgagtcttatggtgctcctgtgattttcctccacgatccggtcagctttgccgcgctagttcgtccggagctgttcacgttcaagaagggcgtggtgagggtggagacgcagggcatctgcgtcgggcatacttccatggacatgttgctgaagaagtggaactcagagaacccgtggactggctactcaccgatttcggtcgcatggacggtcgatgtgcccaaggtggtcgcgtttgtgaaggagctcgtcaccaagccgtgaaccaagttaactaacgtgttgtggtctcgcgcaccagatgtgcagcaaatttgagatgtcgatatatttactcacattcgaagcactgcaaacactattatctcaatagttggttcctgtggaggattgcaaatcaatttgagatgttttaaattgcagcatgtgccttcggccattgaatggtatgatgttttttt

SEQ ID NO: 207927 - DNA, 1203 bp, Zea Mays
gtgcttggccagttggccacatgccttgccttgcctttgcctacctgttgatcgagccgagcgagcagggagagacacggcaccgagtgaggccgccgcatcctcctcctctccgatcctccgcctgctgcctgcctcaacggatcgacgcgacaggagggagggaggaaggagacggtcgatcagagtctgagacggaggccgatccaccaccgcagcgacgagcgggaggagatgaagatcatcattgacacggatcccggcatcgggaggaaagccgcacgttgctgacttcgttcatggacctgatggcctcgggaacgtagatcttcctgatcccactatcaagaaagtggaggaaagtgctaccgacttcttggttgataaggtctcgcgatttcctggagaggtctctgtgctcgccttgggtcctctgacaaacatagcattggccatcaagaaggatccctcattcgtgaaaaacgttaagaagatcgttgtgctgggtggagcgttctttgcggctggaaatgccactccttccgctgaagcaaatatccacagtgatccggaggcagccgacatggttttcacttctggggcggacatctacgtcgttggcctcaacatcacaacgcaagtcagcttcacagataaggatctcctggagctaagaaactcgcaagggaagtacgcacagttcctatgtgatgtatgcaagttctacttggactggcacaccgagtcttatggtgctcctgtgattttcctccacgatccggtcagctttgccgcgctagttcgtccggagctgttcacgttcaagaagggcgtggtgagggtggagacgcagggcatctgcgtcgggcatacttccatggacatgttgctgaagaagtggaactcagagaacccgtggactggctactcaccgatttcggtcgcatggacggtcgatgtgcccaaggtggtcgcgtttgtgaaggagctcgtcaccaagccgtgaaccaagttaactaacgtgttgtggtctcgcgcaccagatgtgcagcaaatttgagatgtcgatatatttactcacattcgaagcactgcaaacactattatctcaatagttggttcctgtggaggattgcaaatcaatttgagatgttttaaattgcagcatgtgccttcggccattgaatggtatgatgttttttt

SEQ ID NO: 207928 - DNA, 1401 bp, Zea Mays
gtgcttggccagttggccacatgccttgccttgcctttgcctacctgttgatcgagccgagcgagcagggagagacacggcaccgagtgaggccgccgcatcctcctcctctccgatcctccgcctgctgcctgcctcaacggatcgacgcgacaggagggagggaggaaggagacggtcgatcagagtctgagacggaggccgatccaccaccgcagcgacgagcgggaggagatgaagatcatcattgacacggatcccggcatcgatgacagcgtggccatcctgatggcattccagatgccgggcgtccaggtcctagggctcaccaccatcttcggaaactgcaccacagagcatgccacacgcaacgccttgatcctgtgcgagaaggcaagccatctagaggtcccagtagctgagggcagccatgagcctctcaagggaggaaagccgcacgttgctgacttcgttcatggacctgatggcctcgggaacgtagatcttcctgatcccactatcaagaaagtggaggaaagtgctaccgacttcttggttgataaggtctcgcgatttcctggagaggtctctgtgctcgccttgggtcctctgacaaacatagcattggccatcaagaaggatccctcattcgtgaaaaacgttaagaagatcgttgtgctgggtggagcgttctttgcggctggaaatgccactccttccgctgaagcaaatatccacagtgatccggaggcagccgacatggttttcacttctggggcggacatctacgtcgttggcctcaacatcacaacgcaagtcagcttcacaggtcctgaagcaagatgaatacgataaggatctcctggagctaagaaactcgcaagggaagtacgcacagttcctatgtgatgtatgcaagttctacttggactggcacaccgagtcttatggtgctcctgtgattttcctccacgatccggtcagctttgccgcgctagttcgtccggagctgttcacgttcaagaagggcgtggtgagggtggagacgcagggcatctgcgtcgggcatacttccatggacatgttgctgaagaagtggaactcagagaacccgtggactggctactcaccgatttcggtcgcatggacggtcgatgtgcccaaggtggtcgcgtttgtgaaggagctcgtcaccaagccgtgaaccaagttaactaacgtgttgtggtctcgcgcaccagatgtgcagcaaatttgagatgtcgatatatttactcacattcgaagcactgcaaacactattatctcaatagttggttcctgtggaggattgcaaatcaatttgagatgttttaaattgcagcatgtgccttcggccattgaatggtatgatgttttttt

SEQ ID NO: 207929 - DNA, 623 bp, Zea Mays
atatgagaaggaagaaaaacttgatggtgatgctgcattgaacaaattcttccgtgacatctacaaggatgctgatgaagatatgcggagggccatgatgaagtcattcgtggaatcaaatggcactgttctctcaaccaattggaaagatgttggagcaaagaaggtagaagggagcccccctgatggtatggagctcaagaagtgggaatactaaagtttggactgcccatcttttgtaaatccaggtcttggaaactatgacctaattccgtccacccatagtgccatgagcttgcttggttaagtctctgcttttgtaagctttctgtatgacagtctagcgtgtgtctgagtgctacttgccgtagcttttgatggacataggtatgctattatgtggtatcgaccgggaaccatctgtggtatcaaagacagcaaactataatgtatggaatgcctattctttttggtctaagatgtttttcttgtcagcgtagtgtgatcttcacaactgaataatagaaactatgcagggacctatgttacagtggtccaccgttggcacagttgcatttgcgtctctttggtggatgaattgaatttatgggaaaattgatttc

SEQ ID NO: 207930 - DNA, 2258 bp, Zea Mays
gtcggctccgctccccccatcttgtcttgaaacgaaacccctcaaaccccagagccccaaaaccaccgggagactccgcgagatctgaactccatggtggccgccggggcagcagcggccgcgccccggctgaacccgtcgccgtccccgcaccgccgccgagcttcctccgcgctctccccggcaaagtccaacgccaacgccaacaccaacgccggcgacgcgcggcccaagcccaaggctaaggtcgtctcctcccgctacctcgcgcccttctccaggtccacctccagctcgacctccacctccacctccaccaccaccaccacttcgagctccaactccacctcgacatcgtcgtccacgccctcccgccgcttcgcgtcgccgctgccgaggcgctcggtctccgtcgaccgcccgcgcccagccccggctggcaatgctgccgtcggggagactgggggacccaaagcgggcaccaccaccaccacgaggagcctctccgtggcgttccagggccggtccttctccttcgagacgagcaaggcgaagccggccacgtccccgtctccgtcgcggcgaccagtggcttcggcggcgggggccatcacgccggagaggactcgtccaactatggggacagtgccggagagggggaagggttttgagggggtccatgctcaccacaggtggccaatgtcggcgaggctgtcgcaggggtttgaggggaacccgcttaccaaaagcttggattgctctttgcacaagagggacgctgctgtacttgctgctgtccggtcgctgcggcagtccatggtgtttgaggagggggcacggcgatcctcgttcgacagtggggactacttgatgtcgtcggacacagagagtgtgtcatctgggagcaattcagggtctcaggatgcaggtatcggcatttcgcacagagcacgaccatccccaaagggtatgagtgtgccagcacggttcttgcaggatgctgcagtcagcaggtcacaaagattcacagatcctggcacaccatacttggcgtatacctctgggttggctgcatctccaaggacagcgccggttaagaagtcactgcaaaatggctttgtttcgtccccactgaaccggtcagtcaggcaatcttcaccaagtaagcttaccggcaatccatcgaggagggtgtcaagcccatcacggtcgagaaattgtgtggggtcgggcacttcatcttgggatcaccagggaagaaactcatctggatctggttatgctttgaatggtgaagtgaggaggaggtggcatgggggtagtaaggttgactgtgagcatctgttgagaattttatccaatcgacatttgcagtggcggtgtgtgaacgcacaggctgaagctgcactttctgcacaaaaaatgacagcagagggatgcgtaaatctgttgctcttaagaggttccagctacagttataccggaacaattggaagctcatgacagttctaaagggacagatggggtatctagaagaatggtctttgttagagagggactatgtggattctctatctgtaactgtggatgctctaactgccagcattttgtgccttcctgtcactgatggagcaaaggctgatatccaagatgtgaaaaatgctgttggttctgctgttgatatcatgcaaacaataggaagctcaatatgttcattattagctaagctggctggaacaagtattttggtttctgatctttccaaagttgctacccaagagcgcactctaatggagcagtccagagaattgctgtccacactcgcaacaatgcatgtcaaatactgtagcctacaagggcagagagtacaggcaactgacaggagctccatgcatccctagccagactactataaccccccactaaccgaagaatgtaggtgcaactgcaaattctggtggcttggctggtgcccacagagcaatcctgactcatccgaagatgctatctaggctaggctagttccagtggtcttggtggctatggcccccctagttctggttgctgatttgatgtatgctaaccaatgcagaacagatggcatgcgccatgtgtatagatgtacctcatttgttggttttagtcgaggattaggtcagatgctaactagaaagattgggttccttttgttcatcagcagatgactaacgactaccagggaaatgcaatataacttctagcggtacgttggattcctt

SEQ ID NO: 207931 - DNA, 1372 bp, Zea Mays
aaaccgaaccgaagtgcaaccatccgtcacatcacaaaccgaaaaaggccgcgacgagccgaccagctctactgcccccttccggccttcggcgaccgtgacgagcaacgacgaccacggcgacgatggccgcttcctccctctgccacgggcacttgctcctgtttctcctcgtgtccgtcacatcggcctgcctcggtaccgcggcagcgcatcaagccgggtctggagagggttacacgatcgccggccgcgtcaagatcgatggcatgagtgagaagggctatggtcttccagccaagacatcaaacacaaaagtgatacttaatggcggccaaagggttacatttgccaggccagacggctactttgcattgtatcctacaaatgattcattaccctggaactcatctgattgaggtctcctcaattggttacttcttttcccctgtccgagttgatataagtgcaaggaatcctggatatattcaagcagcattgactgaaaccagaagggttctgaatgagcttgttctggaacctctgaaagaagagcagtactatgaggttagggagccgttctccatcatgtcacttttgaagagccccatggggttaatggttggttttatggtcttaatggtctttgtgatgcccaagatgatggagaacatagatcccgaggagatgaagcaagctcaagaacaaatgaggaacaaccctgtatcattctctggcttgctcgccagagcgcagggctagagaagtagactgtagacatgaggatactgcaaaggtcaaacattctagaatgtgagtaagagcactattaaagtgcttggcacgtcactcactcggggcaatttcctggggataagaaggaaatcctttccccctgtttttaccgtattttagggctagtttgggaacaccaatttcctaaaagatttatattttcccatgggaaaatgaactaatttcccttgggaaaataaaaatcttttggaaatttggggttccaaactagcccttaagttgtaatttgtctgcggtgtagaaccttctgaaacctctgagctagtgatgcgtcagattgagatattttgttcaatgtttgctgtttgaatcaggtgaatctttgacaccttgcttagtcatcatcagaccacggcggactgtggacatttttagacttgtgtagtgatgcgtcagagacctcgccaggatggacagagggatacccatgcaaatttgtgcacttatgcatccagctaggggtgtaatcggatcgaatacagagtatccagccatccgattcgtatccaacacatgtcagcgaatatgagtaatttttttaaaaaataaacgtccg

SEQ ID NO: 207932 - DNA, 3104 bp, Zea Mays
atccaattttgggtccgcagaacctcctcctctcgctccgccgccgccttcccctcgcccaccacgctttggtcccaaacccacggtcgctcatcctggacctccacgccatcgaggcagtgaagctgggctcattcgtgcaatcgtgctcaagtctggcatcaactcccccatctaccgggacctccacgcgctcgtctcccacccacgcctgctctccgttgttgcctcgctcctccatatgcccggcctcgtctgcaacgtcccctacacagcgctcccgtcgtcgtcctctgcgtcgaccgctccatccccatgctcatgcgccgcaaggaggccaagccttacgacatgattggtgagaccagaggagcacgagcgcaacctccgtcacccctaagatctcctcaccattgtggccatcctgcaagatcagtactcattatctattaagaagaggataggcactggagagtttgacttgcgatatttgagtacatcccattgctggcgctccgagtatctggccatactattgattcacataccagctaaatttaggaccatcccgattgaaggctcttcccacttaagtgattcttccttctgaatccattttttagcttattcattcggattatgacccataattatgtttttttgtttgcttgaattcggtcaaacaaactgagaaaagcgtggatcctctgaagaatgtctgaaaaaaatgatagacaagtccctagatttaccccaatttcacttgctctatagatttatagttctataatatgtgcttccttatcaatctttgttactcaattatgctagataatcacttgtccttaatctaattaacagtgttgtcatcatagatgaagctgacaacttagttgattccttgaataagatatacaagtcaaagcttacatcttcttaggttactctcacctttcattaacctttccatcacagtctggcaaatagtattttgccttgtgccataggtcattatacttagttgcaattgtattgctttgtgtttcattcaatgaacataaacatctacattccatgttgtccattagttatgatttttgctggaacataaatggcatatagctctgtattttgtgtgcctgatgctcattcagtactattgtcaaagcacaaaagggagatttaggaatttatttggcttataaaggggcataaacaaagagggtcttttagtggtggagttagcttagcttgcctatggggttgtatggcacattataagagattctatatatggtttcatctggtttaggtttagaattttcattttgaaagcaacattcagtccatacatgacttgagcatgctttctaaattgacatttttggtgtttacttgggctaaaaactaggattcttgcatttttctgccatgtgctgtttacaggtgaaattgtgttgttcagaaacaaactttggcatccgtttctcattctcctaactgcatttacatgtattcattttccttttggattgtagctgaaagcagtcctttcccacctagatgaataccttaatagattttacaatgttttgggagctaggaattgatgatacatccagaccttggtagttttaacaaggtcttccacacatgttctgatcaacaatcaagatggtagcactgtgtcttctatgaccacaaaccaattcttgttttcccttgacatcgataacataaacatagttgaattttgtcactttgtgaaagacatcaatataatccacaaggtaaatttcttaatctataaccactgtttgaaattggtagtctacaatctatttgatgctttaagtgaactttagaagtttatatcatttccaagaaaagtttacattaccttttccaattaatgttgactcaacatatataagtaactaccaaaatttatttggaatagaaattgaatattaacaaacaaaaaatatcttgtacttaaaatttgtatactaatataacagaactgcgacaaactcaatgatgggcacaaaagagctttgcacaatctcattccaggatcaacgactcatagatgtttttatcaacactgcacacattgtttgctgaaattagctcatgttattgatggtgtttgaaagaaacattaaagttttgcttcgacaaatgtcttttgctcagggcatctggcttggtgtttcttgtttggtgatacctgtacaagcaaatttggtgacctgctacttaaaaactgtttctgcaaagaggtcgtcttgactgatcgcaatgatgaagttctggaggcaagtgttgttgttatgatgaaggcagacccaagtattgaaagggatgatctgattttgctctaggagattgccatgtacatgcttcttgcatgtggagctgtctatgtgatcttgataagaaagatttgtggatgttgacccaacaggaaattgctactgaggtgcaaagtgaatccaagtgaaagtaattaggggagttagctatgtcaaatggaaagagagtggttgctaaaggataggaagctgaagctggatgaaggaagcaactacatgcaaccgatggcaataatgcattgcagggttgaggctcgttagaaatgtcaagttggtcccggacgtgggtatggtgcccgcaaggccgacagagctgagatcaagcactgagatcgtgccctcgtgcctacggctgcatgtcacacctggccagaggcataggctaccactactgttctaagaggacaacctgctcgatagctagcctaggatggccttcagttccagcaaggcttgtcggctcgtctcactgcagaacgctattgttggcgcctaattgaacgaagttgataccggtaggatcccatgaagcaacataagcagcagaagtctgacgaggaatgacatagatgcagtgctttcgtttgttgctactgaaaaaagatctgaaccaagtatttctgtaagtataccaacaagttagttgctactactttgtatattgatcttcgttggccgaatgtttgagtttttttcaaggcacaaacactttattttgagatctat

SEQ ID NO: 207933 - DNA, 1688 bp, Zea Mays
atccaattttgggtccgcagaacctcctcctctcgctccgccgccgccttcccctcgcccaccacgctttggtcccaaacccacggtcgctcatcctggacctccacgccatcgaggcagtgaagctgggctcattcgtgcaatcgtgctcaagtctggcatcaactcccccatctaccgggacctccacgcgctcgtctcccacccacgcctgctctccgttgttgcctcgctcctccatatgcccggcctcgtctgcaacgtcccctacacagcgctcccgtcgtcgtcctctgcgtcgaccgctccatccccatgctcatgcgccgcaaggaggccaagccttacgacatgattggtgagaccagaggagcacgagcgcaacctccgtcacccctaagatctcctcaccattgtggccatcctgcaagatcagtactcattatctattaagaaggttacggttagcttggtgtgtaagtgtgttggacaaatgaggtcccgtttttttactggatttatttgccttttcttttctgttttggatatttgaagtcttatttactagctattaatacattgtttttaagtcatcggccttgcaagcattgcctctttctttaaaattatctgatgactggtgaattctgttttgatcttttagattattggcattgaccttttatctcaaacgctgcgacccgtcattgttgaacttgcagaggataggcactggagagtttgacttgcgatatttgagtacatcccattgctggcgctccgagtatctggccatactattgattcacataccagctaaatttaggaccatcccgattgaaggctcttcccacttaactgtttctgcaaagaggtcgtcttgactgatcgcaatgatgaagttctggagtgttgttgttatgatgaaggcagacccaagtattgaaagggatgatctgattttgctctaggagattgccatgtacatgcttcttgcatgtggagctgtctatgtgatcttgataagaaagatttgtggatgttgacccaacaggaaattgctactgaggtgcaaagtgaatccaagtgaaagtaattaggggagttagctatgtcaaatggaaagagagtggttgctaaaggataggaagctgaagctggatgaaggaagcaactacatgcaaccgatggcaataatgcattgcagggttgaggctcgttagaaatgtcaagttggtcccggacgtgggtatggtgcccgcaaggccgacagagctgagatcaagcactgagatcgtgccctcgtgcctacggctgcatgtcacacctggccagaggcataggctaccactactgttctaagaggacaacctgctcgatagctagcctaggatggccttcagttccagcaaggcttgtcggctcgtctcactgcagaacgctattgttggcgcctaattgaacgaagttgataccggtaggatcccatgaagcaacataagcagcagaagtctgacgaggaatgacatagatgcagtgctttcgtttgttgctactgaaaaaagatctgaaccaagtatttctgtaagtataccaacaagttagttgctactactttgtatattgatcttcgttggccgaatgtttgagtttttttcaaggcacaaacactttattttgagatctat

SEQ ID NO: 207934 - DNA, 3123 bp, Zea Mays
atccaattttgggtccgcagaacctcctcctctcgctccgccgccgccttcccctcgcccaccacgctttggtcccaaacccacggtcgctcatcctggacctccacgccatcgaggcagtgaagctgggctcattcgtgcaatcgtgctcaagtctggcatcaactcccccatctaccgggacctccacgcgctcgtctcccacccacgcctgctctccgttgttgcctcgctcctccatatgcccggcctcgtctgcaacgtcccctacacagcgctcccgtcgtcgtcctctgcgtcgaccgctccatccccatgctcatgcgccgcaaggaggccaagccttacgacatgattggtgagaccagaggagcacgagcgcaacctccgtcacccctaagatctcctcaccattgtggccatcctgcaagatcagtactcattatctattaagaaggttacggttagcttggtgtaggataggcactggagagtttgacttgcgatatttgagtacatcccattgctggcgctccgagtatctggccatactattgattcacataccagctaaatttaggaccatcccgattgaaggctcttcccacttaagtgattcttccttctgaatccattttttagcttattcattcggattatgacccataattatgtttttttgtttgcttgaattcggtcaaacaaactgagaaaagcgtggatcctctgaagaatgtctgaaaaaaatgatagacaagtccctagatttaccccaatttcacttgctctatagatttatagttctataatatgtgcttccttatcaatctttgttactcaattatgctagataatcacttgtccttaatctaattaacagtgttgtcatcatagatgaagctgacaacttagttgattccttgaataagatatacaagtcaaagcttacatcttcttaggttactctcacctttcattaacctttccatcacagtctggcaaatagtattttgccttgtgccataggtcattatacttagttgcaattgtattgctttgtgtttcattcaatgaacataaacatctacattccatgttgtccattagttatgatttttgctggaacataaatggcatatagctctgtattttgtgtgcctgatgctcattcagtactattgtcaaagcacaaaagggagatttaggaatttatttggcttataaaggggcataaacaaagagggtcttttagtggtggagttagcttagcttgcctatggggttgtatggcacattataagagattctatatatggtttcatctggtttaggtttagaattttcattttgaaagcaacattcagtccatacatgacttgagcatgctttctaaattgacatttttggtgtttacttgggctaaaaactaggattcttgcatttttctgccatgtgctgtttacaggtgaaattgtgttgttcagaaacaaactttggcatccgtttctcattctcctaactgcatttacatgtattcattttccttttggattgtagctgaaagcagtcctttcccacctagatgaataccttaatagattttacaatgttttgggagctaggaattgatgatacatccagaccttggtagttttaacaaggtcttccacacatgttctgatcaacaatcaagatggtagcactgtgtcttctatgaccacaaaccaattcttgttttcccttgacatcgataacataaacatagttgaattttgtcactttgtgaaagacatcaatataatccacaaggtaaatttcttaatctataaccactgtttgaaattggtagtctacaatctatttgatgctttaagtgaactttagaagtttatatcatttccaagaaaagtttacattaccttttccaattaatgttgactcaacatatataagtaactaccaaaatttatttggaatagaaattgaatattaacaaacaaaaaatatcttgtacttaaaatttgtatactaatataacagaactgcgacaaactcaatgatgggcacaaaagagctttgcacaatctcattccaggatcaacgactcatagatgtttttatcaacactgcacacattgtttgctgaaattagctcatgttattgatggtgtttgaaagaaacattaaagttttgcttcgacaaatgtcttttgctcagggcatctggcttggtgtttcttgtttggtgatacctgtacaagcaaatttggtgacctgctacttaaaaactgtttctgcaaagaggtcgtcttgactgatcgcaatgatgaagttctggaggcaagtgttgttgttatgatgaaggcagacccaagtattgaaagggatgatctgattttgctctaggagattgccatgtacatgcttcttgcatgtggagctgtctatgtgatcttgataagaaagatttgtggatgttgacccaacaggaaattgctactgaggtgcaaagtgaatccaagtgaaagtaattaggggagttagctatgtcaaatggaaagagagtggttgctaaaggataggaagctgaagctggatgaaggaagcaactacatgcaaccgatggcaataatgcattgcagggttgaggctcgttagaaatgtcaagttggtcccggacgtgggtatggtgcccgcaaggccgacagagctgagatcaagcactgagatcgtgccctcgtgcctacggctgcatgtcacacctggccagaggcataggctaccactactgttctaagaggacaacctgctcgatagctagcctaggatggccttcagttccagcaaggcttgtcggctcgtctcactgcagaacgctattgttggcgcctaattgaacgaagttgataccggtaggatcccatgaagcaacataagcagcagaagtctgacgaggaatgacatagatgcagtgctttcgtttgttgctactgaaaaaagatctgaaccaagtatttctgtaagtataccaacaagttagttgctactactttgtatattgatcttcgttggccgaatgtttgagtttttttcaaggcacaaacactttattttgagatctat

SEQ ID NO: 207935 - DNA, 2955 bp, Zea Mays
atccaattttgggtccgcagaacctcctcctctcgctccgccgccgccttcccctcgcccaccacgctttggtcccaaacccacggtcgctcatcctggacctccacgccatcgaggcagtgaagctgggctcattcgtgcaatcgtgctcaagtctggcatcaactcccccatctaccgggacctccacgcgctcgtctcccacccacgcctgctctccgttgttgcctcgctcctccatatgcccggcctcgtctgcaacgtcccctacacagcgctcccgtcgtcgtcctctgcgtcgaccgctccatccccatgctcatgcgccgcaaggaggccaagccttacgacatgattggtgagaccagaggagcacgagcgcaacctccgtcacccctaagatctcctcaccattgtggccatcctgcaagatcagtactcattatctattaagaaggttacggttagcttggtgtgtaagtgtgttggacaaatgaggtcccgtttttttactggatttatttgccttttcttttctgttttggatatttgaagtcttatttactagctattaatacattgtttttaagtcatcggccttgcaagcattgcctctttctttaaaattatctgatgactggtgaattctgttttgatcttttagattattggcattgaccttttatctcaaacgctgcgacccgtcattgttgaacttgcagaggataggcactggagagtttgacttgcgatatttgagtacatcccattgctggcgctccgagtatctggccatactattgattcacataccagctaaatttaggaccatcccgattgaaggctcttcccacttaagtgattcttccttctgaatccattttttagcttattcattcggattatgacccataattatgtttttttgtttgcttgaattcggtcaaacaaactgagaaaagcgtggatcctctgaagaatgtctgaaaaaaatgatagacaagtccctagatttaccccaatttcacttgctctatagatttatagttctataatatgtgcttccttatcaatctttgttactcaattatgctagataatcacttgtccttaatctaattaacagtgttgtcatcatagatgaagctgacaacttagttgattccttgaataagatatacaagtcaaagcttacatcttcttaggttactctcacctttcattaacctttccatcacagtctggcaaatagtattttgccttgtgccataggtcattatacttagttgcaattgtattgctttgtgtttcattcaatgaacataaacatctacattccatgttgtccattagttatgatttttgctggaacataaatggcatatagctctgtattttgtgtgcctgatgctcattcagtactattgtcaaagcacaaaagggagatttaggaatttatttggcttataaaggggcataaacaaagagggtcttttagtggtggagttagcttagcttgcctatggggttgtatggcacattataagagattctatatatggtttcatctggtttaggtttagaattttcattttgaaagcaacattcagtccatacatgacttgagcatgctttctaaattgacatttttggtgtttacttgggctaaaaactaggattcttgcatttttctgccatgtgctgtttacaggtgaaattgtgttgttcagaaacaaactttggcatccgtttctcattctcctaactgcatttacatgtattcattttccttttggattgtagctgaaagcagtcctttcccacctagatgaataccttaatagattttacaatgttttgggagctaggaattgatgatacatccagaccttggtagttttaacaaggtcttccacacatgttctgatcaacaatcaagatggtagcactgtgtcttctatgaccacaaaccaattcttgttttcccttgacatcgataacataaacatagttgaattttgtcactttgtgaaagacatcaatataatccacaagggcatctggcttggtgtttcttgtttggtgatacctgtacaagcaaatttggtgacctgctacttaaaaactgtttctgcaaagaggtcgtcttgactgatcgcaatgatgaagttctggagtgttgttgttatgatgaaggcagacccaagtattgaaagggatgatctgattttgctctaggagattgccatgtacatgcttcttgcatgtggagctgtctatgtgatcttgataagaaagatttgtggatgttgacccaacaggaaattgctactgaggtgcaaagtgaatccaagtgaaagtaattaggggagttagctatgtcaaatggaaagagagtggttgctaaaggataggaagctgaagctggatgaaggaagcaactacatgcaaccgatggcaataatgcattgcagggttgaggctcgttagaaatgtcaagttggtcccggacgtgggtatggtgcccgcaaggccgacagagctgagatcaagcactgagatcgtgccctcgtgcctacggctgcatgtcacacctggccagaggcataggctaccactactgttctaagaggacaacctgctcgatagctagcctaggatggccttcagttccagcaaggcttgtcggctcgtctcactgcagaacgctattgttggcgcctaattgaacgaagttgataccggtaggatcccatgaagcaacataagcagcagaagtctgacgaggaatgacatagatgcagtgctttcgtttgttgctactgaaaaaagatctgaaccaagtatttctgtaagtataccaacaagttagttgctactactttgtatattgatcttcgttggccgaatgtttgagtttttttcaaggcacaaacactttattttgagatctat

SEQ ID NO: 207936 - DNA, 3180 bp, Zea Mays
atccaattttgggtccgcagaacctcctcctctcgctccgccgccgccttcccctcgcccaccacgctttggtcccaaacccacggtcgctcatcctggacctccacgccatcgaggcagtgaagctgggctcattcgtgcaatcgtgctcaagtctggcatcaactcccccatctaccgggacctccacgcgctcgtctcccacccacgcctgctctccgttgttgcctcgctcctccatatgcccggcctcgtctgcaacgtcccctacacagcgctcccgtcgtcgtcctctgcgtcgaccgctccatccccatgctcatgcgccgcaaggaggccaagccttacgacatgattgattattggcattgaccttttatctcaaacgctgcgacccgtcattgttgaacttgcagaggataggcactggagagtttgacttgcgatatttgagtacatcccattgctggcgctccgagtatctggccatactattgattcacataccagctaaatttaggaccatcccgattgaaggctcttcccacttaagtgattcttccttctgaatccattttttagcttattcattcggattatgacccataattatgtttttttgtttgcttgaattcggtcaaacaaactgagaaaagcgtggatcctctgaagaatgtctgaaaaaaatgatagacaagtccctagatttaccccaatttcacttgctctatagatttatagttctataatatgtgcttccttatcaatctttgttactcaattatgctagataatcacttgtccttaatctaattaacagtgttgtcatcatagatgaagctgacaacttagttgattccttgaataagatatacaagtcaaagcttacatcttcttaggttactctcacctttcattaacctttccatcacagtctggcaaatagtattttgccttgtgccataggtcattatacttagttgcaattgtattgctttgtgtttcattcaatgaacataaacatctacattccatgttgtccattagttatgatttttgctggaacataaatggcatatagctctgtattttgtgtgcctgatgctcattcagtactattgtcaaagcacaaaagggagatttaggaatttatttggcttataaaggggcataaacaaagagggtcttttagtggtggagttagcttagcttgcctatggggttgtatggcacattataagagattctatatatggtttcatctggtttaggtttagaattttcattttgaaagcaacattcagtccatacatgacttgagcatgctttctaaattgacatttttggtgtttacttgggctaaaaactaggattcttgcatttttctgccatgtgctgtttacaggtgaaattgtgttgttcagaaacaaactttggcatccgtttctcattctcctaactgcatttacatgtattcattttccttttggattgtagctgaaagcagtcctttcccacctagatgaataccttaatagattttacaatgttttgggagctaggaattgatgatacatccagaccttggtagttttaacaaggtcttccacacatgttctgatcaacaatcaagatggtagcactgtgtcttctatgaccacaaaccaattcttgttttcccttgacatcgataacataaacatagttgaattttgtcactttgtgaaagacatcaatataatccacaaggtaaatttcttaatctataaccactgtttgaaattggtagtctacaatctatttgatgctttaagtgaactttagaagtttatatcatttccaagaaaagtttacattaccttttccaattaatgttgactcaacatatataagtaactaccaaaatttatttggaatagaaattgaatattaacaaacaaaaaatatcttgtacttaaaatttgtatactaatataacagaactgcgacaaactcaatgatgggcacaaaagagctttgcacaatctcattccaggatcaacgactcatagatgtttttatcaacactgcacacattgtttgctgaaattagctcatgttattgatggtgtttgaaagaaacattaaagttttgcttcgacaaatgtcttttgctcagggcatctggcttggtgtttcttgtttggtgatacctgtacaagcaaatttggtgacctgctacttaaaaagtccgtgtttggtttacttgcttgttggcaccattgcaaaattgcatgttccttgtttggttgtatgaaaactgactatattatgacttgttgtatgcattattggtgtattatgcagctgtttctgcaaagaggtcgtcttgactgatcgcaatgatgaagttctggaggcaaggttgttgttatgatgaaggcagacccaagtattgaaagggatgatctgattttgctctaggagattgccatgtacatgcttcttgcatgtggagctgtctatgtgatcttgataagaaagatttgtggatgttgacccaacaggaaattgctactgaggtgcaaagtgaatccaagtgaaagtaattaggggagttagctatgtcaaatggaaagagagtggttgctaaaggataggaagctgaagctggatgaaggaagcaactacatgcaaccgatggcaataatgcattgcagggttgaggctcgttagaaatgtcaagttggtcccggacgtgggtatggtgcccgcaaggccgacagagctgagatcaagcactgagatcgtgccctcgtgcctacggctgcatgtcacacctggccagaggcataggctaccactactgttctaagaggacaacctgctcgatagctagcctaggatggccttcagttccagcaaggcttgtcggctcgtctcactgcagaacgctattgttggcgcctaattgaacgaagttgataccggtaggatcccatgaagcaacataagcagcagaagtctgacgaggaatgacatagatgcagtgctttcgtttgttgctactgaaaaaagatctgaaccaagtatttctgtaagtataccaacaagttagttgctactactttgtatattgatcttcgttggccgaatgtttgagtttttttcaaggcacaaacactttattttgagatctat

SEQ ID NO: 207937 - DNA, 3114 bp, Zea Mays
atccaattttgggtccgcagaacctcctcctctcgctccgccgccgccttcccctcgcccaccacgctttggtcccaaacccacggtcgctcatcctggacctccacgccatcgaggcagtgaagctgggctcattcgtgcaatcgtgctcaagtctggcatcaactcccccatctaccgggacctccacgcgctcgtctcccacccacgcctgctctccgttgttgcctcgctcctccatatgcccggcctcgtctgcaacgtcccctacacagcgctcccgtcgtcgtcctctgcgtcgaccgctccatccccatgctcatgcgccgcaaggaggccaagccttacgacatgattggtgagaccagaggagcacgagcgcaacctccgtcacccctaagatctcctcaccattgtggccatcctgcaagatcagtactcattatctattaagaaggttacggttagcttgaggataggcactggagagtttgacttgcgatatttgagtacatcccattgctggcgctccgagtatctggccatactattgattcacataccagctaaatttaggaccatcccgattgaaggctcttcccacttaagtgattcttccttctgaatccattttttagcttattcattcggattatgacccataattatgtttttttgtttgcttgaattcggtcaaacaaactgagaaaagcgtggatcctctgaagaatgtctgaaaaaaatgatagacaagtccctagatttaccccaatttcacttgctctatagatttatagttctataatatgtgcttccttatcaatctttgttactcaattatgctagataatcacttgtccttaatctaattaacagtgttgtcatcatagatgaagctgacaacttagttgattccttgaataagatatacaagtcaaagcttacatcttcttaggttactctcacctttcattaacctttccatcacagtctggcaaatagtattttgccttgtgccataggtcattatacttagttgcaattgtattgctttgtgtttcattcaatgaacataaacatctacattccatgttgtccattagttatgatttttgctggaacataaatggcatatagctctgtattttgtgtgcctgatgctcattcagtactattgtcaaagcacaaaagggagatttaggaatttatttggcttataaaggggcataaacaaagagggtcttttagtggtggagttagcttagcttgcctatggggttgtatggcacattataagagattctatatatggtttcatctggtttaggtttagaattttcattttgaaagcaacattcagtccatacatgacttgagcatgctttctaaattgacatttttggtgtttacttgggctaaaaactaggattcttgcatttttctgccatgtgctgtttacaggtgaaattgtgttgttcagaaacaaactttggcatccgtttctcattctcctaactgcatttacatgtattcattttccttttggattgtagctgaaagcagtcctttcccacctagatgaataccttaatagattttacaatgttttgggagctaggaattgatgatacatccagaccttggtagttttaacaaggtcttccacacatgttctgatcaacaatcaagatggtagcactgtgtcttctatgaccacaaaccaattcttgttttcccttgacatcgataacataaacatagttgaattttgtcactttgtgaaagacatcaatataatccacaaggtaaatttcttaatctataaccactgtttgaaattggtagtctacaatctatttgatgctttaagtgaactttagaagtttatatcatttccaagaaaagtttacattaccttttccaattaatgttgactcaacatatataagtaactaccaaaatttatttggaatagaaattgaatattaacaaacaaaaaatatcttgtacttaaaatttgtatactaatataacagaactgcgacaaactcaatgatgggcacaaaagagctttgcacaatctcattccaggatcaacgactcatagatgtttttatcaacactgcacacattgtttgctgaaattagctcatgttattgatggtgtttgaaagaaacattaaagttttgcttcgacaaatgtcttttgctcagggcatctggcttggtgtttcttgtttggtgatacctgtacaagcaaatttggtgacctgctacttaaaaactgtttctgcaaagaggtcgtcttgactgatcgcaatgatgaagttctggagtgttgttgttatgatgaaggcagacccaagtattgaaagggatgatctgattttgctctaggagattgccatgtacatgcttcttgcatgtggagctgtctatgtgatcttgataagaaagatttgtggatgttgacccaacaggaaattgctactgaggtgcaaagtgaatccaagtgaaagtaattaggggagttagctatgtcaaatggaaagagagtggttgctaaaggataggaagctgaagctggatgaaggaagcaactacatgcaaccgatggcaataatgcattgcagggttgaggctcgttagaaatgtcaagttggtcccggacgtgggtatggtgcccgcaaggccgacagagctgagatcaagcactgagatcgtgccctcgtgcctacggctgcatgtcacacctggccagaggcataggctaccactactgttctaagaggacaacctgctcgatagctagcctaggatggccttcagttccagcaaggcttgtcggctcgtctcactgcagaacgctattgttggcgcctaattgaacgaagttgataccggtaggatcccatgaagcaacataagcagcagaagtctgacgaggaatgacatagatgcagtgctttcgtttgttgctactgaaaaaagatctgaaccaagtatttctgtaagtataccaacaagttagttgctactactttgtatattgatcttcgttggccgaatgtttgagtttttttcaaggcacaaacactttattttgagatctat

SEQ ID NO: 207938 - DNA, 3030 bp, Zea Mays
atccaattttgggtccgcagaacctcctcctctcgctccgccgccgccttcccctcgcccaccacgctttggtcccaaacccacggtcgctcatcctggacctccacgccatcgaggcagtgaagctgggctcattcgtgcaatcgtgctcaagtctggcatcaactcccccatctaccgggacctccacgcgctcgtctcccacccacgcctgctctccgttgttgcctcgctcctccatatgcccggcctcgtctgcaacgtcccctacacagcgctcccgtcgtcgtcctctgcgtcgaccgctccatccccatgctcatgcgccgcaaggaggccaagccttacgacatgattgaggataggcactggagagtttgacttgcgatatttgagtacatcccattgctggcgctccgagtatctggccatactattgattcacataccagctaaatttaggaccatcccgattgaaggctcttcccacttaagtgattcttccttctgaatccattttttagcttattcattcggattatgacccataattatgtttttttgtttgcttgaattcggtcaaacaaactgagaaaagcgtggatcctctgaagaatgtctgaaaaaaatgatagacaagtccctagatttaccccaatttcacttgctctatagatttatagttctataatatgtgcttccttatcaatctttgttactcaattatgctagataatcacttgtccttaatctaattaacagtgttgtcatcatagatgaagctgacaacttagttgattccttgaataagatatacaagtcaaagcttacatcttcttaggttactctcacctttcattaacctttccatcacagtctggcaaatagtattttgccttgtgccataggtcattatacttagttgcaattgtattgctttgtgtttcattcaatgaacataaacatctacattccatgttgtccattagttatgatttttgctggaacataaatggcatatagctctgtattttgtgtgcctgatgctcattcagtactattgtcaaagcacaaaagggagatttaggaatttatttggcttataaaggggcataaacaaagagggtcttttagtggtggagttagcttagcttgcctatggggttgtatggcacattataagagattctatatatggtttcatctggtttaggtttagaattttcattttgaaagcaacattcagtccatacatgacttgagcatgctttctaaattgacatttttggtgtttacttgggctaaaaactaggattcttgcatttttctgccatgtgctgtttacaggtgaaattgtgttgttcagaaacaaactttggcatccgtttctcattctcctaactgcatttacatgtattcattttccttttggattgtagctgaaagcagtcctttcccacctagatgaataccttaatagattttacaatgttttgggagctaggaattgatgatacatccagaccttggtagttttaacaaggtcttccacacatgttctgatcaacaatcaagatggtagcactgtgtcttctatgaccacaaaccaattcttgttttcccttgacatcgataacataaacatagttgaattttgtcactttgtgaaagacatcaatataatccacaaggtaaatttcttaatctataaccactgtttgaaattggtagtctacaatctatttgatgctttaagtgaactttagaagtttatatcatttccaagaaaagtttacattaccttttccaattaatgttgactcaacatatataagtaactaccaaaatttatttggaatagaaattgaatattaacaaacaaaaaatatcttgtacttaaaatttgtatactaatataacagaactgcgacaaactcaatgatgggcacaaaagagctttgcacaatctcattccaggatcaacgactcatagatgtttttatcaacactgcacacattgtttgctgaaattagctcatgttattgatggtgtttgaaagaaacattaaagttttgcttcgacaaatgtcttttgctcagggcatctggcttggtgtttcttgtttggtgatacctgtacaagcaaatttggtgacctgctacttaaaaactgtttctgcaaagaggtcgtcttgactgatcgcaatgatgaagttctggaggcaagcccttctatttttggtttctggcagtgttgttgttatgatgaaggcagacccaagtattgaaagggatgatctgattttgctctaggagattgccatgtacatgcttcttgcatgtggagctgtctatgtgatcttgataagaaagatttgtggatgttgacccaacaggaaattgctactgaggtgcaaagtgaatccaagtgaaagtaattaggggagttagctatgtcaaatggaaagagagtggttgctaaaggataggaagctgaagctggatgaaggaagcaactacatgcaaccgatggcaataatgcattgcagggttgaggctcgttagaaatgtcaagttggtcccggacgtgggtatggtgcccgcaaggccgacagagctgagatcaagcactgagatcgtgccctcgtgcctacggctgcatgtcacacctggccagaggcataggctaccactactgttctaagaggacaacctgctcgatagctagcctaggatggccttcagttccagcaaggcttgtcggctcgtctcactgcagaacgctattgttggcgcctaattgaacgaagttgataccggtaggatcccatgaagcaacataagcagcagaagtctgacgaggaatgacatagatgcagtgctttcgtttgttgctactgaaaaaagatctgaaccaagtatttctgtaagtataccaacaagttagttgctactactttgtatattgatcttcgttggccgaatgtttgagtttttttcaaggcacaaacactttattttgagatctat

SEQ ID NO: 207939 - DNA, 3004 bp, Zea Mays
atccaattttgggtccgcagaacctcctcctctcgctccgccgccgccttcccctcgcccaccacgctttggtcccaaacccacggtcgctcatcctggacctccacgccatcgaggcagtgaagctgggctcattcgtgcaatcgtgctcaagtctggcatcaactcccccatctaccgggacctccacgcgctcgtctcccacccacgcctgctctccgttgttgcctcgctcctccatatgcccggcctcgtctgcaacgtcccctacacagcgctcccgtcgtcgtcctctgcgtcgaccgctccatccccatgctcatgcgccgcaaggaggccaagccttacgacatgattgaggataggcactggagagtttgacttgcgatatttgagtacatcccattgctggcgctccgagtatctggccatactattgattcacataccagctaaatttaggaccatcccgattgaaggctcttcccacttaagtgattcttccttctgaatccattttttagcttattcattcggattatgacccataattatgtttttttgtttgcttgaattcggtcaaacaaactgagaaaagcgtggatcctctgaagaatgtctgaaaaaaatgatagacaagtccctagatttaccccaatttcacttgctctatagatttatagttctataatatgtgcttccttatcaatctttgttactcaattatgctagataatcacttgtccttaatctaattaacagtgttgtcatcatagatgaagctgacaacttagttgattccttgaataagatatacaagtcaaagcttacatcttcttaggttactctcacctttcattaacctttccatcacagtctggcaaatagtattttgccttgtgccataggtcattatacttagttgcaattgtattgctttgtgtttcattcaatgaacataaacatctacattccatgttgtccattagttatgatttttgctggaacataaatggcatatagctctgtattttgtgtgcctgatgctcattcagtactattgtcaaagcacaaaagggagatttaggaatttatttggcttataaaggggcataaacaaagagggtcttttagtggtggagttagcttagcttgcctatggggttgtatggcacattataagagattctatatatggtttcatctggtttaggtttagaattttcattttgaaagcaacattcagtccatacatgacttgagcatgctttctaaattgacatttttggtgtttacttgggctaaaaactaggattcttgcatttttctgccatgtgctgtttacaggtgaaattgtgttgttcagaaacaaactttggcatccgtttctcattctcctaactgcatttacatgtattcattttccttttggattgtagctgaaagcagtcctttcccacctagatgaataccttaatagattttacaatgttttgggagctaggaattgatgatacatccagaccttggtagttttaacaaggtcttccacacatgttctgatcaacaatcaagatggtagcactgtgtcttctatgaccacaaaccaattcttgttttcccttgacatcgataacataaacatagttgaattttgtcactttgtgaaagacatcaatataatccacaaggtaaatttcttaatctataaccactgtttgaaattggtagtctacaatctatttgatgctttaagtgaactttagaagtttatatcatttccaagaaaagtttacattaccttttccaattaatgttgactcaacatatataagtaactaccaaaatttatttggaatagaaattgaatattaacaaacaaaaaatatcttgtacttaaaatttgtatactaatataacagaactgcgacaaactcaatgatgggcacaaaagagctttgcacaatctcattccaggatcaacgactcatagatgtttttatcaacactgcacacattgtttgctgaaattagctcatgttattgatggtgtttgaaagaaacattaaagttttgcttcgacaaatgtcttttgctcagggcatctggcttggtgtttcttgtttggtgatacctgtacaagcaaatttggtgacctgctacttaaaaactgtttctgcaaagaggtcgtcttgactgatcgcaatgatgaagttctggaggcaaggttgttgttatgatgaaggcagacccaagtattgaaagggatgatctgattttgctctaggagattgccatgtacatgcttcttgcatgtggagctgtctatgtgatcttgataagaaagatttgtggatgttgacccaacaggaaattgctactgaggtgcaaagtgaatccaagtgaaagtaattaggggagttagctatgtcaaatggaaagagagtggttgctaaaggataggaagctgaagctggatgaaggaagcaactacatgcaaccgatggcaataatgcattgcagggttgaggctcgttagaaatgtcaagttggtcccggacgtgggtatggtgcccgcaaggccgacagagctgagatcaagcactgagatcgtgccctcgtgcctacggctgcatgtcacacctggccagaggcataggctaccactactgttctaagaggacaacctgctcgatagctagcctaggatggccttcagttccagcaaggcttgtcggctcgtctcactgcagaacgctattgttggcgcctaattgaacgaagttgataccggtaggatcccatgaagcaacataagcagcagaagtctgacgaggaatgacatagatgcagtgctttcgtttgttgctactgaaaaaagatctgaaccaagtatttctgtaagtataccaacaagttagttgctactactttgtatattgatcttcgttggccgaatgtttgagtttttttcaaggcacaaacactttattttgagatctat

SEQ ID NO: 207940 - DNA, 1512 bp, Zea Mays
atccaattttgggtccgcagaacctcctcctctcgctccgccgccgccttcccctcgcccaccacgctttggtcccaaacccacggtcgctcatcctggacctccacgccatcgaggcagtgaagctgggctcattcgtgcaatcgtgctcaagtctggcatcaactcccccatctaccgggacctccacgcgctcgtctcccacccacgcctgctctccgttgttgcctcgctcctccatatgcccggcctcgtctgcaacgtcccctacacagcgctcccgtcgtcgtcctctgcgtcgaccgctccatccccatgctcatgcgccgcaaggaggccaagccttacgacatgattggtgagaccagaggagcacgagcgcaacctccgtcacccctaagatctcctcaccattgtggccatcctgcaagatcagtactcattatctattaagaaggttacggttagcttggtgtaggataggcactggagagtttgacttgcgatatttgagtacatcccattgctggcgctccgagtatctggccatactattgattcacataccagctaaatttaggaccatcccgattgaaggctcttcccacttaaggcatctggcttggtgtttcttgtttggtgatacctgtacaagcaaatttggtgacctgctacttaaaaactgtttctgcaaagaggtcgtcttgactgatcgcaatgatgaagttctggagtgttgttgttatgatgaaggcagacccaagtattgaaagggatgatctgattttgctctaggagattgccatgtacatgcttcttgcatgtggagctgtctatgtgatcttgataagaaagatttgtggatgttgacccaacaggaaattgctactgaggtgcaaagtgaatccaagtgaaagtaattaggggagttagctatgtcaaatggaaagagagtggttgctaaaggataggaagctgaagctggatgaaggaagcaactacatgcaaccgatggcaataatgcattgcagggttgaggctcgttagaaatgtcaagttggtcccggacgtgggtatggtgcccgcaaggccgacagagctgagatcaagcactgagatcgtgccctcgtgcctacggctgcatgtcacacctggccagaggcataggctaccactactgttctaagaggacaacctgctcgatagctagcctaggatggccttcagttccagcaaggcttgtcggctcgtctcactgcagaacgctattgttggcgcctaattgaacgaagttgataccggtaggatcccatgaagcaacataagcagcagaagtctgacgaggaatgacatagatgcagtgctttcgtttgttgctactgaaaaaagatctgaaccaagtatttctgtaagtataccaacaagttagttgctactactttgtatattgatcttcgttggccgaatgtttgagtttttttcaaggcacaaacactttattttgagatctat

SEQ ID NO: 207941 - DNA, 1327 bp, Zea Mays
atccaattttgggtccgcagaacctcctcctctcgctccgccgccgccttcccctcgcccaccacgctttggtcccaaacccacggtcgctcatcctggacctccacgccatcgaggcagtgaagctgggctcattcgtgcaatcgtgctcaagtctggcatcaactcccccatctaccgggacctccacgcgctcgtctcccacccacgcctgctctccgttgttgcctcgctcctccatatgcccggcctcgtctgcaacgtcccctacacagcgctcccgtcgtcgtcctctgcgtcgaccgctccatccccatgctcatgcgccgcaaggaggccaagccttacgacatgattgaggataggcactggagagtttgacttgcgatatttgagtacatcccattgctggcgctccgagtatctgggcatctggcttggtgtttcttgtttggtgatacctgtacaagcaaatttggtgacctgctacttaaaaactgtttctgcaaagaggtcgtcttgactgatcgcaatgatgaagttctggagtgttgttgttatgatgaaggcagacccaagtattgaaagggatgatctgattttgctctaggagattgccatgtacatgcttcttgcatgtggagctgtctatgtgatcttgataagaaagatttgtggatgttgacccaacaggaaattgctactgaggtgcaaagtgaatccaagtgaaagtaattaggggagttagctatgtcaaatggaaagagagtggttgctaaaggataggaagctgaagctggatgaaggaagcaactacatgcaaccgatggcaataatgcattgcagggttgaggctcgttagaaatgtcaagttggtcccggacgtgggtatggtgcccgcaaggccgacagagctgagatcaagcactgagatcgtgccctcgtgcctacggctgcatgtcacacctggccagaggcataggctaccactactgttctaagaggacaacctgctcgatagctagcctaggatggccttcagttccagcaaggcttgtcggctcgtctcactgcagaacgctattgttggcgcctaattgaacgaagttgataccggtaggatcccatgaagcaacataagcagcagaagtctgacgaggaatgacatagatgcagtgctttcgtttgttgctactgaaaaaagatctgaaccaagtatttctgtaagtataccaacaagttagttgctactactttgtatattgatcttcgttggccgaatgtttgagtttttttcaaggcacaaacactttattttgagatctat

SEQ ID NO: 207942 - DNA, 1696 bp, Zea Mays
atccaattttgggtccgcagaacctcctcctctcgctccgccgccgccttcccctcgcccaccacgctttggtcccaaacccacggtcgctcatcctggacctccacgccatcgaggcagtgaagctgggctcattcgtgcaatcgtgctcaagtctggcatcaactcccccatctaccgggacctccacgcgctcgtctcccacccacgcctgctctccgttgttgcctcgctcctccatatgcccggcctcgtctgcaacgtcccctacacagcgctcccgtcgtcgtcctctgcgtcgaccgctccatccccatgctcatgcgccgcaaggaggccaagccttacgacatgattggtgagaccagaggagcacgagcgcaacctccgtcacccctaagatctcctcaccattgtggccatcctgcaagatcagtactcattatctattaagaaggttacggttagcttggtgtgtaagtgtgttggacaaatgaggtcccgtttttttactggatttatttgccttttcttttctgttttggatatttgaagtcttatttactagctattaatacattgtttttaagtcatcggccttgcaagcattgcctctttctttaaaattatctgatgactggtgaattctgttttgatcttttagattattggcattgaccttttatctcaaacgctgcgacccgtcattgttgaacttgcagaggataggcactggagagtttgacttgcgatatttgagtacatcccattgctggcgctccgagtatctgggcatctggcttggtgtttcttgtttggtgatacctgtacaagcaaatttggtgacctgctacttaaaaactgtttctgcaaagaggtcgtcttgactgatcgcaatgatgaagttctggaggcaagtgttgttgttatgatgaaggcagacccaagtattgaaagggatgatctgattttgctctaggagattgccatgtacatgcttcttgcatgtggagctgtctatgtgatcttgataagaaagatttgtggatgttgacccaacaggaaattgctactgaggtgcaaagtgaatccaagtgaaagtaattaggggagttagctatgtcaaatggaaagagagtggttgctaaaggataggaagctgaagctggatgaaggaagcaactacatgcaaccgatggcaataatgcattgcagggttgaggctcgttagaaatgtcaagttggtcccggacgtgggtatggtgcccgcaaggccgacagagctgagatcaagcactgagatcgtgccctcgtgcctacggctgcatgtcacacctggccagaggcataggctaccactactgttctaagaggacaacctgctcgatagctagcctaggatggccttcagttccagcaaggcttgtcggctcgtctcactgcagaacgctattgttggcgcctaattgaacgaagttgataccggtaggatcccatgaagcaacataagcagcagaagtctgacgaggaatgacatagatgcagtgctttcgtttgttgctactgaaaaaagatctgaaccaagtatttctgtaagtataccaacaagttagttgctactactttgtatattgatcttcgttggccgaatgtttgagtttttttcaaggcacaaacactttattttgagatctat

SEQ ID NO: 207943 - DNA, 1621 bp, Zea Mays
atccaattttgggtccgcagaacctcctcctctcgctccgccgccgccttcccctcgcccaccacgctttggtcccaaacccacggtcgctcatcctggacctccacgccatcgaggcagtgaagctgggctcattcgtgcaatcgtgctcaagtctggcatcaactcccccatctaccgggacctccacgcgctcgtctcccacccacgcctgctctccgttgttgcctcgctcctccatatgcccggcctcgtctgcaacgtcccctacacagcgctcccgtcgtcgtcctctgcgtcgaccgctccatccccatgctcatgcgccgcaaggaggccaagccttacgacatgattggtgagaccagaggagcacgagcgcaacctccgtcacccctaagatctcctcaccattgtggccatcctgcaagatcagtactcattatctattaagaaggttacggttagcttggtgtgtaagtgtgttggacaaatgaggtcccgtttttttactggatttatttgccttttcttttctgttttggatatttgaagtcttatttactagctattaatacattgtttttaagtcatcggccttgcaagcattgcctctttctttaaaattatctgatgactggtgaattctgttttgatcttttagattattggcattgaccttttatctcaaacgctgcgacccgtcattgttgaacttgcagaggataggcactggagagtttgacttgcgatatttgagtacatcccattgctggcgctccgagtatctgctgtttctgcaaagaggtcgtcttgactgatcgcaatgatgaagttctggagtgttgttgttatgatgaaggcagacccaagtattgaaagggatgatctgattttgctctaggagattgccatgtacatgcttcttgcatgtggagctgtctatgtgatcttgataagaaagatttgtggatgttgacccaacaggaaattgctactgaggtgcaaagtgaatccaagtgaaagtaattaggggagttagctatgtcaaatggaaagagagtggttgctaaaggataggaagctgaagctggatgaaggaagcaactacatgcaaccgatggcaataatgcattgcagggttgaggctcgttagaaatgtcaagttggtcccggacgtgggtatggtgcccgcaaggccgacagagctgagatcaagcactgagatcgtgccctcgtgcctacggctgcatgtcacacctggccagaggcataggctaccactactgttctaagaggacaacctgctcgatagctagcctaggatggccttcagttccagcaaggcttgtcggctcgtctcactgcagaacgctattgttggcgcctaattgaacgaagttgataccggtaggatcccatgaagcaacataagcagcagaagtctgacgaggaatgacatagatgcagtgctttcgtttgttgctactgaaaaaagatctgaaccaagtatttctgtaagtataccaacaagttagttgctactactttgtatattgatcttcgttggccgaatgtttgagtttttttcaaggcacaaacactttattttgagatctat

SEQ ID NO: 207944 - DNA, 1332 bp, Zea Mays
atccaattttgggtccgcagaacctcctcctctcgctccgccgccgccttcccctcgcccaccacgctttggtcccaaacccacggtcgctcatcctggacctccacgccatcgaggcagtgaagctgggctcattcgtgcaatcgtgctcaagtctggcatcaactcccccatctaccgggacctccacgcgctcgtctcccacccacgcctgctctccgttgttgcctcgctcctccatatgcccggcctcgtctgcaacgtcccctacacagcgctcccgtcgtcgtcctctgcgtcgaccgctccatccccatgctcatgcgccgcaaggaggccaagccttacgacatgattgaggataggcactggagagtttgacttgcgatatttgagtacatcccattgctggcgctccgagtatctgggcatctggcttggtgtttcttgtttggtgatacctgtacaagcaaatttggtgacctgctacttaaaaactgtttctgcaaagaggtcgtcttgactgatcgcaatgatgaagttctggaggcaagtgttgttgttatgatgaaggcagacccaagtattgaaagggatgatctgattttgctctaggagattgccatgtacatgcttcttgcatgtggagctgtctatgtgatcttgataagaaagatttgtggatgttgacccaacaggaaattgctactgaggtgcaaagtgaatccaagtgaaagtaattaggggagttagctatgtcaaatggaaagagagtggttgctaaaggataggaagctgaagctggatgaaggaagcaactacatgcaaccgatggcaataatgcattgcagggttgaggctcgttagaaatgtcaagttggtcccggacgtgggtatggtgcccgcaaggccgacagagctgagatcaagcactgagatcgtgccctcgtgcctacggctgcatgtcacacctggccagaggcataggctaccactactgttctaagaggacaacctgctcgatagctagcctaggatggccttcagttccagcaaggcttgtcggctcgtctcactgcagaacgctattgttggcgcctaattgaacgaagttgataccggtaggatcccatgaagcaacataagcagcagaagtctgacgaggaatgacatagatgcagtgctttcgtttgttgctactgaaaaaagatctgaaccaagtatttctgtaagtataccaacaagttagttgctactactttgtatattgatcttcgttggccgaatgtttgagtttttttcaaggcacaaacactttattttgagatctat

SEQ ID NO: 207945 - DNA, 2183 bp, Zea Mays
atccaattttgggtccgcagaacctcctcctctcgctccgccgccgccttcccctcgcccaccacgctttggtcccaaacccacggtcgctcatcctggacctccacgccatcgaggcagtgaagctgggctcattcgtgcaatcgtgctcaagtctggcatcaactcccccatctaccgggacctccacgcgctcgtctcccacccacgcctgctctccgttgttgcctcgctcctccatatgcccggcctcgtctgcaacgtcccctacacagcgctcccgtcgtcgtcctctgcgtcgaccgctccatccccatgctcatgcgccgcaaggaggccaagccttacgacatgattgaggataggcactggagagtttgacttgcgatatttgagtacatcccattgctggcgctccgagtatctggccatactattgattcacataccagctaaatttaggaccatcccgattgaaggctcttcccacttaagtgattcttccttctgaatccattttttagcttattcattcggattatgacccataattatgtttttttgtttgcttgaattcggtcaaacaaactgagaaaagcgtggatcctctgaagaatgtctgaaaaaaatgatagacaagtccctagatttaccccaatttcacttgctctatagatttatagttctataatatgtgcttccttatcaatctttgttactcaattatgctagataatcacttgtccttaatctaattaacagtgttgtcatcatagatgaagctgacaacttagttgattccttgaataagatatacaagtcaaagcttacatcttcttagggcatctggcttggtgtttcttgtttggtgatacctgtacaagcaaatttggtgacctgctacttaaaaagtccgtgtttggtttacttgcttgttggcaccattgcaaaattgcatgttccttgtttggttgtatgaaaactgactatattatgacttgttgtatgcattattggtgtattatgcagctgtttctgcaaagaggtcgtcttgactgatcgcaatgatgaagttctggaggcaaggttcagttgtttaggaattcattcactgatacatcttattattcagttgaagcgccacatatattgtgttgttgttatgatgaaggcagacccaagtattgaaagggatgatctgattttgctctaggagattgccatgtacatgcttcttgcatgtggagctgtctatgtgatcttgataagaaagatttgtggatgttgacccaacaggaaattgctactgaggtgcaaagtgaatccaagtgaaagtaattaggggagttagctatgtcaaatggaaagagagtggttgctaaaggataggaagctgaagctggatgaaggaagcaactacatgcaaccgatggcaataatgcattgcagggttgaggctcgttagaaatgtcaagttggtcccggacgtgggtatggtgcccgcaaggccgacagagctgagatcaagcactgagatcgtgccctcgtgcctacggctgcatgtcacacctggccagaggcataggctaccactactgttctaagaggacaacctgctcgatagctagcctaggatggccttcagttccagcaaggcttgtcggctcgtctcactgcagaacgctattgttggcgcctaattgaacgaagttgataccggtaggatcccatgaagcaacataagcagcagaagtctgacgaggaatgacatagatgcagtgctttcgtttgttgctactgaaaaaagatctgaaccaagtatttctgatcactgcgttgaaaaggaaaaaaagagagacaaaaccagaaaaaaggaggaaaactggctatatgggcctaccttggcccactgcggggatgcgacccactgcaaaagccggcccgcgcgcggccttctcgcacagaggcggtggtcacattccaatcagaatcctataattattagtaataactcgcagcctatgtgtactgttttctattgttcattggactcgatcggtttgcgctcaacactcctaggagtttttcttcttcttcttcttgtttcttggatgcatgcttgctagttgctacgtaacacttctttttaatgcaagtaacttattagcgttgcctgaaattca

SEQ ID NO: 207946 - DNA, 4522 bp, Zea Mays
atccaattttgggtccgcagaacctcctcctctcgctccgccgccgccttcccctcgcccaccacgctttggtcccaaacccacggtcgctcatcctggacctccacgccatcgaggcagtgaagctgggctcattcgtgcaatcgtgctcaagtctggcatcaactcccccatctaccgggacctccacgcgctcgtctcccacccacgcctgctctccgttgttgcctcgctcctccatatgcccggcctcgtctgcaacgtcccctacacagcgctcccgtcgtcgtcctctgcgtcgaccgctccatccccatgctcatgcgccgcaaggaggccaagccttacgacatgattgaggataggcactggagagtttgacttgcgatatttgagtacatcccattgctggcgctccgagtatctggtatcttgttctattgttgctaccctgattcttcatcacctatgaccgtgatagtgcttaccctattgagtgcctaactcagtttagtgcataagcgtgctcttttgatatatagtttatgactttgccatcagctgttttgatgtattcctatgcttacaaattctataatgttaactgtatatgtttccttacatcttaattcatcgtgtttcccattgcacggtttattccctacatttccctgtcctacatttggtacttgattacttgttagaaggtgcaaatcagctcctcaattgctgtgagatcaatacaatttaatcattaatgattattttttgttacacattatcttttattacaaattaactcgagtccactgatctgagctgaaaagcttaagagtcctctctgggtatgcttaagtgttagtagtaccggtttcctgaaaaaaaagaggggctaataatttcaagctcttttcatatagttctataattatgtgccgttgtgaacgtcgccttcttcatttcctacctgtgcgatccccttttaattgagttttcacagttgccggtatattttttgtcgcatcaaccttaagaactccatgtattaaggttgtaggatattattgttggattaggtgaactataatcaaaacaaaaaaaatatccagatactctcataattatgtgaatattttttctcaaatcaagtaggagaactgcttgtcatttcattgagaggaagaaaattaagtacatctaaaggaaaggatcctcaaatactagaagaaaataagtacatctagaagacattattagttgtagggatacacgcctgaggacaacaatcaaaagccctatgccgccatcctcaaggtctatgatcatatcagggaccaaacgttgccgaataaactgctgatatgtttagtttcatgaaattttaattttacttgattcatttgtaggattgaatagatttcgctgaacttgaagggttggttactattggtgttcttttaccatgaaatatgagatcaggctaggttttggctgtagcattttcgtattgacgttgtgcttagactataattcacctttatttacatccatggattagttgttgtattggtcagtttgctcatatcctctttctttttgttttgttttggatttttggactttggttgctttagatctgtgagctgctacttgtattttaaattgatcacaaaccgcttactgcaatgcaggccatactattgattcacataccagctaaatttaggaccatcccgattgaaggctcttcccacttaagtgattcttccttctgaatccattttttagcttattcattcggattatgacccataattatgtttttttgtttgcttgaattcggtcaaacaaactgagaaaagcgtggatcctctgaagaatgtctgaaaaaaatgatagacaagtccctagatttaccccaatttcacttgctctatagatttatagttctataatatgtgcttccttatcaatctttgttactcaattatgctagataatcacttgtccttaatctaattaacagtgttgtcatcatagatgaagctgacaacttagttgattccttgaataagatatacaagtcaaagcttacatcttcttaggttactctcacctttcattaacctttccatcacagtctggcaaatagtattttgccttgtgccataggtcattatacttagttgcaattgtattgctttgtgtttcattcaatgaacataaacatctacattccatgttgtccattagttatgatttttgctggaacataaatggcatatagctctgtattttgtgtgcctgatgctcattcagtactattgtcaaagcacaaaagggagatttaggaatttatttggcttataaaggggcataaacaaagagggtcttttagtggtggagttagcttagcttgcctatggggttgtatggcacattataagagattctatatatggtttcatctggtttaggtttagaattttcattttgaaagcaacattcagtccatacatgacttgagcatgctttctaaattgacatttttggtgtttacttgggctaaaaactaggattcttgcatttttctgccatgtgctgtttacaggtgaaattgtgttgttcagaaacaaactttggcatccgtttctcattctcctaactgcatttacatgtattcattttccttttggattgtagctgaaagcagtcctttcccacctagatgaataccttaatagattttacaatgttttgggagctaggaattgatgatacatccagaccttggtagttttaacaaggtcttccacacatgttctgatcaacaatcaagatggtagcactgtgtcttctatgaccacaaaccaattcttgttttcccttgacatcgataacataaacatagttgaattttgtcactttgtgaaagacatcaatataatccacaaggtaaatttcttaatctataaccactgtttgaaattggtagtctacaatctatttgatgctttaagtgaactttagaagtttatatcatttccaagaaaagtttacattaccttttccaattaatgttgactcaacatatataagtaactaccaaaatttatttggaatagaaattgaatattaacaaacaaaaaatatcttgtacttaaaatttgtatactaatataacagaactgcgacaaactcaatgatgggcacaaaagagctttgcacaatctcattccaggatcaacgactcatagatgtttttatcaacactgcacacattgtttgctgaaattagctcatgttattgatggtgtttgaaagaaacattaaagttttgcttcgacaaatgtcttttgctcagggcatctggcttggtgtttcttgtttggtgatacctgtacaagcaaatttggtgacctgctacttaaaaactgtttctgcaaagaggtcgtcttgactgatcgcaatgatgaagttctggaggcaagtgttgttgttatgatgaaggcagacccaagtattgaaagggatgatctgattttgctctaggagattgccatgtacatgcttcttgcatgtggagctgtctatgtgatcttgataagaaagatttgtggatgttgacccaacaggaaattgctactgaggtgcaaagtgaatccaagtgaaagtaattaggggagttagctatgtcaaatggaaagagagtggttgctaaaggataggaagctgaagctggatgaaggaagcaactacatgcaaccgatggcaataatgcattgcagggttgaggctcgttagaaatgtcaagttggtcccggacgtgggtatggtgcccgcaaggccgacagagctgagatcaagcactgagatcgtgccctcgtgcctacggctgcatgtcacacctggccagaggcataggctaccactactgttctaagaggacaacctgctcgatagctagcctaggatggccttcagttccagcaaggcttgtcggctcgtctcactgcagaacgctattgttggcgcctaattgaacgaagttgataccggtaggatcccatgaagcaacataagcagcagaagtctgacgaggaatgacatagatgcagtgctttcgtttgttgctactgaaaaaagatctgaaccaagtatttctgatcactgcgttgaaaaggaaaaaaagagagacaaaaccagaaaaaaggaggaaaactggctatatgggcctaccttggcccactgcggggatgcgacccactgcaaaagccggcccgcgcgcggccttctcgcacagaggcggtggtcacattccaatcagaatcctataattattagtaataactcgcagcctatgtgtactgttttctattgttcattggactcgatcggtttgcgctcaacactcctaggagtttttcttcttcttcttcttgtttcttggatgcatgcttgctagttgctacgtaacacttctttttaatgcaagtaacttattagcgttgcctgaaattca

SEQ ID NO: 207947 - DNA, 1344 bp, Zea Mays
cgtcttctccctctcccctagatccttcgacgccgccctccctcagctcattccctgccgccgctcatctgctggccttgtctcactgccgcccaaccattttcctccctcaagctagcacgcagcctcaactcctctcccacctcacgcacgtctctcccagccgttccttcatttctctggctcgtccttctccatgaggtcgcgccctgctgcgccgtcgtgctggtcgccggctgagcccccttcagtgcctgacgccgcatctccctggtgctcacctctgtttccccctgcgttggacgacctcgcactccctccctgctccagatttctccatgccacctcccatggacgccagccctcagccatggatgccgaaccccctctctttagtgcctttctttacagcccctgcgtcgccgtgcgtgtaaggtgtttgtataaatgctcaagaggagtgacgtgtcatggccaacccttttggcgtcgtcggatgtttgatgttttgtgcatcccgtctacgacgccgtcgaccatcggtgaggattcgttcttgctttgtcatttcatcgatcgacgtctatttgctaatatgaattgtgtttatgtgcctatgtgtgttgaggagcgaaatccgtgaaatctaggtgaagaagagacggagcacgtcgtcgtcatggttgcagctttgcttttgtcgtcgtggagcctccaccagcgccgtgtagcaggactgctcttatgtgttattggtgctattccgcttgtacggccaacgaaataggtcctactacacaagggaaatagaggataccatactcttagctttacagaagcctgaagtgtatgatgacattgctcgcgctacatgctgcaaatttgggatagatagacctcaagttgtacctgtgcaaggactacctcaggtttgaaccatacttatggaatgcatgtaagaggtttgtgttggagcaccgggctggcgagaaccgtgctccaatcatttcagatgatagccccaacaaagatatcaacaatgccttctataatatcgtgatgctgaaaaagaaaagatgaaatggaactcaaattttagtggtcgcacaagtgtggagccagttgatgaccaagtttttcaattagtattttagtttgaatttagagtacacatatgtatgagttatttgacaatgcttgtttatgagagattgaatgatacctatctatattatattaattataatgttattaaataaatgtgtatatgtatatttctctttcaaattattataatgtgttatctcaaaatgattataaattgaagaatgtactttaaatctt

SEQ ID NO: 207948 - DNA, 553 bp, Zea Mays
gaagaaggacgtgctccttcgtattaccaggatgtctttcagccgcagattagcaggccgcctgcgctccttgcccctaagcctcgtttccggtgtacgactccaacgacgacgagatggcctccccgctccgtcggagcttcccctccctcggccgcgcgcttctcacgccggcgccggcgcggatgctctccgcggaggcctccgatgccctcgttgagatcaagcctggggagattgggatggtctccggcatccccgaggagcacctccgccgtaaggttgtaatttattcaccagctaggactgcatctcagcaaggttcaggcaaagttgggagatggaaaattaactttttgtcaacccaaaagtgggagaacccattgatgggatggacatctactggggatccatatgctaatgtcggtgaagcaggacttacattcaacagtgcggagtcagcaaaagcatttgctgaaaaacatggatggaattatgtggtacggaaacggcatacacctcttttgaagtacaaaccctcactactacatat

SEQ ID NO: 207949 - DNA, 3633 bp, Zea Mays
gcggcctccagcaccagtgtggcaacacaacagtatacagagcgcagggcgaaccacgtgacagaggaagtcgtgcagacggcgaggcagcccaacggttgttcggccggccatttcgcaatctctcctcgccgctcatccctgagcgcacgcaaaagaaagggacgtgagtagctgcaatggcgagccatcagcgcggaggaggtcgggttggcggcggcggctggggtcaggcgaaccccaacgttattcagggccaggcggggcggggctacggcggcggtcgaggtggtcagtactacggcgacgacagccgcggtcgaggtggtcagtactacggcgacgacagcggcggacgtggcggcggcaggggcggtggtcgtggcttcgacggccgcgacggcggcggataccaggaaggtcgtggcgggggccgcggcggcggcggataccaggaagggcgtggcgggggccgcggcggcggcagataccaggaaggacgtggtggtggccggggtggcggcggctactactatgaaggacgtggcggggaccgtggtggcggcggctactatggaggacatggtgggggctaccaggaaggccgtggcgggggccgaggtggtcgcggctaccagggacagggaggcagcgactacggccgcgagcgcgggcatggcggcctacaaaccccacgtcctgctctgcgccaagccggtccgcccctcgcggaccgctacgcggccgacgcagccgcgttgagggacaagttcaagacgatggacattcaccgcgacgagcccatgtttccagcgcgcccgggcttcggcgccgtggggacgccgtgcgtcgtcaaggccaaccacttctttgtcggcctcgtcgaaaagggcctgcaccactacgacgtggccatctcaccagagacgacgctaaggggcatatacaggcaagtcatgtcgaagctggtttccgagaaccggcagaccgagcttggcggccgcctgcctgcatacgacgggcagaagtcactgttcaccgccggagagctgcccttcaagaccaaggaattcgttgtcaccttgtctggcaggatggaaaggaggtacaaggtggtgatcaagcatgccacggcggtcagcctcgaccagctgttgatgctcatggcagggtacccaacggacatcccggcgcaggcgctgcaggtgcttgacattgtgctgcgtgacattgtgctcaacgaacgcaacaccatggagtacgttgcagttggccggtccttcttctcaccactcatagactcaatgggacccaagaaccttggcttgggtgtggagggatggaagggtttctatcagaccatcaggccgacacaaaaaggcttatctgtgatcatagacatttcttcatcagctttcattcgacccctgccactgattgactttgttatggagattctgaacaaagataacaggacctttagaagtattacttccatggatcttgtcaagctcaagaaagccctcaagggtatgaggattgaagtcacacaccgaggagacatacgccggaagtaccgaattgccagcttgacaaacagtcctccatcttcacagttctttgaatcatctgctggagttcagaagtccgtagcagattacttcagagaggcataccatctggaaatgcactatgattttctcccatgcctccaagttggcagtgatcagaggccgaattacctccctatggaggtttgcaagatagtagctggacagcaataccggaagaagttggaaggccaacaggtctctaaactaatggactccacctgccagcgcccatctctccgcgaggacaacatttgtcagattgttgagcaaaatgactacaataaaactgagcgtgcaagtgaatttggcatggaggttgattatcgtcctacttcagtgcaggctagagttctgccagctcccactctgaagtaccgtggcactggatctgacagtttgtgttgtccaaaggatggtcagtggaacatgataaaaaagcaagtagtagatggtgcaagggtgggcaactgggcctgcgttaacttttgtcaagagttgcgtgcagatggtgttggtaaattttgctctgatctggtcaagtggtctcgcactactggagtggacatggataacttgagacttccaatatataccgctcgtcctgaacaagctgaaactgatcttcgtaggctctatcaggatgctcggaacaagctaagagggcaaaagtttgatcttttgcttgctatactgccagagaaaaatggcagcttatatggtaatttcaaaaggatctgcgagacagagattggtatcatgtcgcagtgttgtttggataaaaatgttagaagtgcaggccctgcatattttgctaatgttgctattaagatcaatgccaagtttggaggaagaaacttagaatttgctaatcccaaagaaagcttaccgggtgttacaattgaaccaacaattatatttggtgctgatgtcactcaccctgccgctctagatgataccgccccttccattgcttctgttgttgcctcccaagactggcccaaggtggctaactataatgggattgtccgtgcacaaggtcatcgtaaagagctcatcaatggcctggaagacattgtcaaggaactcctacttgcattcgaggagaggtctaagcggagacccaagcagctgatcttctacagggatggcgtaagtgagggccaattcaaacaagtgctggaacaagaaatccctgagatagagaaggcatggaaagctctttacaatgagaagccaaagatcaccttcctagtggtgcagaagaggcaccacacaaggctcttcccaaacaacccaaatgatcgccaatgggcggacaagagtggaaatattctacctggcactgttgttgacaaggatatctgccacccaacagaatttgatttcttcctgtgcagccatgctgggatcaagggaactagccgtcctgcgcattaccatgtcctgagagacgacaacaacttcactgcagacgcgctgcagtctctcacatataacctatgcttcttgtattcaagctgcactcgctctgtgtcaatcgctcccccagcatactacgcccacaagttagcgttccgcgcccgcttctacgtcaaccaagactctgatgcggcgacaagtgtcggctcttatggttcatcagctccctctgctgctgctgctgctgctggtccgaagccgcttccggagatcaagggtgaactgagaaggctcatgttctactgctagtccttgaccacgggaaaccctttcctgaacaaggctttgctcttctgaagactgaacaaggctgctgcattatttattatgaacaagcctgaacaaggctgcattatactagcttaacgtttgtagtttgcattttatttcatataaacgatccaagtctttgccgaacttgattattatattcagttattcagcattcacgggacgctagagggaaaaatcgaaattttgaaacgctttggtgaaccattttatattcagttaagcattccaattaaggcattgttcggtt

SEQ ID NO: 207950 - DNA, 3512 bp, Zea Mays
agaaaaggactcgccctcgccatcgccatcgccatcgcccgggacgtgagtagctgcaatggcgagccatcagcgcggaggaggtcgggttggcggcggcggctggggtcaggcgaaccccaacgttattcagggccaggcggggcggggctacggcggcggtcgaggtggtcagtactacggcgacgacagccgcggtcgaggtggtcagtactacggcgacgacagcggcggacgtggcggcggcaggggcggtggtcgtggcttcgacggccgcgacggcggcggataccaggaaggtcgtggcgggggccgcggcggcggcggataccaggaagggcgtggcgggggccgcggcggcggcagataccaggaaggacgtggtggtggccggggtggcggcggctactactatgaaggacgtggcggggaccgtggtggcggcggctactatggaggacatggtgggggctaccaggaaggccgtggcgggggccgaggtggtcgcggctaccagggacagggaggcagcgactacggccgcgagcgcgggcatggcggcctacaaaccccacgtcctgctctgcgccaagccggtccgcccctcgcggaccgctacgcggccgacgcagccgcgttgagggacaagttcaagacgatggacattcaccgcgacgagcccatgtttccagcgcgcccgggcttcggcgccgtggggacgccgtgcgtcgtcaaggccaaccacttctttgtcggcctcgtcgaaaagggcctgcaccactacgacgtggccatctcaccagagacgacgctaaggggcatatacaggcaagtcatgtcgaagctggtttccgagaaccggcagaccgagcttggcggccgcctgcctgcatacgacgggcagaagtcactgttcaccgccggagagctgcccttcaagaccaaggaattcgttgtcaccttgtctggcaggatggaaaggaggtacaaggtggtgatcaagcatgccacggcggtcagcctcgaccagctgttgatgctcatggcagggtacccaacggacatcccggcgcaggcgctgcaggtgcttgacattgtgctgcgtgacattgtgctcaacgaacgcaacaccatggagtacgttgcagttggccggtccttcttctcaccactcatagactcaatgggacccaagaaccttggcttgggtgtggagggatggaagggtttctatcagaccatcaggccgacacaaaaaggcttatctgtgatcatagacatttcttcatcagctttcattcgacccctgccactgattgactttgttatggagattctgaacaaagataacaggacctttagaagtattacttccatggatcttgtcaagctcaagaaagccctcaagggtatgaggattgaagtcacacaccgaggagacatacgccggaagtaccgaattgccagcttgacaaacagtcctccatcttcacagttctttgaatcatctgctggagttcagaagtccgtagcagattacttcagagaggcataccatctggaaatgcactatgattttctcccatgcctccaagttggcagtgatcagaggccgaattacctccctatggaggtttgcaagatagtagctggacagcaataccggaagaagttggaaggccaacaggtctctaaactaatggactccacctgccagcgcccatctctccgcgaggacaacatttgtcagattgttgagcaaaatgactacaataaaactgagcgtgcaagtgaatttggcatggaggttgattatcgtcctacttcagtgcaggctagagttctgccagctcccactctgaagtaccgtggcactggatctgacagtttgtgttgtccaaaggatggtcagtggaacatgataaaaaagcaagtagtagatggtgcaagggtgggcaactgggcctgcgttaacttttgtcaagagttgcgtgcagatggtgttggtaaattttgctctgatctggtcaagtggtctcgcactactggagtggacatggataacttgagacttccaatatataccgctcgtcctgaacaagctgaaactgatcttcgtaggctctatcaggatgctcggaacaagctaagagggcaaaagtttgatcttttgcttgctatactgccagagaaaaatggcagcttatatggtaatttcaaaaggatctgcgagacagagattggtatcatgtcgcagtgttgtttggataaaaatgttagaagtgcaggccctgcatattttgctaatgttgctattaagatcaatgccaagtttggaggaagaaacttagaatttgctaatcccaaagaaagcttaccgggtgttacaattgaaccaacaattatatttggtgctgatgtcactcaccctgccgctctagatgataccgccccttccattgcttctgttgttgcctcccaagactggcccaaggtggctaactataatgggattgtccgtgcacaaggtcatcgtaaagagctcatcaatggcctggaagacattgtcaaggaactcctacttgcattcgaggagaggtctaagcggagacccaagcagctgatcttctacagggatggcgtaagtgagggccaattcaaacaagtgctggaacaagaaatccctgagatagagaaggcatggaaagctctttacaatgagaagccaaagatcaccttcctagtggtgcagaagaggcaccacacaaggctcttcccaaacaacccaaatgatcgccaatgggcggacaagagtggaaatattctacctggcactgttgttgacaaggatatctgccacccaacagaatttgatttcttcctgtgcagccatgctgggatcaagggaactagccgtcctgcgcattaccatgtcctgagagacgacaacaacttcactgcagacgcgctgcagtctctcacatataacctatgcttcttgtattcaagctgcactcgctctgtgtcaatcgctcccccagcatactacgcccacaagttagcgttccgcgcccgcttctacgtcaaccaagactctgatgcggcgacaagtgtcggctcttatggttcatcagctccctctgctgctgctgctgctgctggtccgaagccgcttccggagatcaagggtgaactgagaaggctcatgttctactgctagtccttgaccacgggaaaccctttcctgaacaaggctttgctcttctgaagactgaacaaggctgctgcattatttattatgaacaagcctgaacaaggctgcattatactagcttaacgtttgtagtttgcattttatttcatataaacgatccaagtctttgccgaacttgattattatattcagttattcagcattcacgggacgctagagggaaaaatcgaaattttgaaacgctttggtgaaccattttatattcagttaagcattccaattaaggcattgttcggtt

SEQ ID NO: 207951 - DNA, 566 bp, Zea Mays
ctctcagatatttcatgaacattagtgtggagcaatggcaagttgaagaaagtgagagggatggctcgccccacatccgcaccacccatggcggcgcagcatggcgagaccgaccgtctgtcgctgacggtccttatcactctgcctttggacaatatcgtctcgcccttggtcccgctctccaatgcggccggagaaggccgcgaggccgaggcaaacggtgccggagccgacgacgaggatggatggaggtttcactctttcctactggaggactatgcgtggagggtgtacaaccagcggcttcagttcaaggatccattggtccggtatcggatatgatatttgccgcgatgatctatagcgcttctttttttccttttggtgtgccaatatgcaactcatgtcatgtgtgacttcgtgttgtgatctactatttgccttcggagtggtttgagtacatcccgccttgggtttcaatgtatgttgctgacgttttgacctttgctcaaatacctgagccgctgagggattcggacaagcagtaggattctatacgaacttcc

SEQ ID NO: 207952 - DNA, 1421 bp, Zea Mays
gcgggcggatgacgtcgcggtggggcgctgctgcgcgcttgctctcctgccttgtgcgtgcgttggaacgtggaagaataacgacaacgcctaataacgagaaaagaaaacccaagacttcgtcgtcaccaaaaaaataaagcagaaaaaaacagagagtagtagactacgacagcgtccgtcgaaccggagggtcggaggcggaggcgaagatgaggaagaagctcggcacccggttccccgcgcatttattgtattccttcaggctggttttgaatcttcaaaacctcttgttctgttgtcatggaaacaacgtggttgaagttccaagctacacacatctgtatggtttgcactgcaggctcgaatcaaaaagataatgcaagcagatgaggatgttggaaagattgcattagcagtgcctgttttagtctcgagggctcttgaattgtttttacaagatttaattgaccggacttatgaaattactcttcaaagtggagcaaagacactgaattccttccacctgaagcaatgtgtgaagaggtacagttcttttgatttcctaactgaagttgtcagcaaggtaccagatcttggtggtgctgattcatgtggagatgaaagagtgttacctagaagaagaaagtcaaatggcagtgacccagagaatgatgaatcaagatctagtaaaatggctataagaaatgcaaataccagccccagaggacgtgggaggggtcgaggcagagggcgaggtcggccaccaaccaagagaaaggaagttggttacgtacaatttgaagatgagagcagcatgtttgctgaacaaggtgaaaccttaccaggagagggaacagttccagagatcaacagcggcaacgagattacgcctcaaagcacgcaacctccgctaacagcccctgcgcaagctacaaattctaaggtggaagaagcaagcaccgatcatcagtcagattggcctatgccagatgccactggaaacatcggtgttgggccatctggttttggacatctgacagtgcaggttgatgaagatgaggactacgacaatgaggactagtcagggccatcctctcactgtatgcgctaacaggactgttctggtgttgtaaaatgtaaatatagcttgaagtagctgccgcagcttagctatgattgtctgttatgaggttatgtagttgccctgtgtaacttctgtaattgctttttagttgccttttctctacatgattgactgtcaaagcgttttgtcatatttaacccagtatgtttgagcaggggtcgactatttctaagtattttgactttattcgactagtatttgagcagtcatctgatgctccgcaggtttttgttgacttgtggtgcagtcagctgctagtatgaaaattggtagg

SEQ ID NO: 207953 - DNA, 2178 bp, Zea Mays
gcgggcggatgacgtcgcggtggggcgctgctgcgcgcttgctctcctgccttgtgcgtgcgttggaacgtggaagaataacgacaacgcctaataacgagaaaagaaaacccaagacttcgtcgtcaccaaaaaaataaagcagaaaaaaacagagagtagtagactacgacagcgtccgtcgaaccggagggtcggaggcggaggcgaagatgaggaagaagctcggcacccggttccccgcgatcctcgctcttccgggcgggatccggtggacgcagcccgccgttaacgcgcggcttctctttttggttccgtgggcggggatttggctgggttcttggtggggggcgccgtgggtggaggcgggctcgggctcagatcggctcctgtgctcgcgcgtgcgcggggaagtaatttcgtttcgttttgttttgttttcattctttccttccacttttttgagggtctacgtctatcgagagttcggattctcgttgctcaacagaggacatcgacaattaattatccggcttctgcactcgtgttgtgttgagcgggtggacggtggagagatttgtggccgctcgcggctgactagatcactgctgatgaaatttggtgagtgttagtccgtgtgaacgggacgccctgatgtgatctctatgccctgttgtgtagatgcaagggatgaggtagatcctgctgccgtgcatgtggtttggttgcaagatctccagatcttgcgagcatgtattgcgggccccatgtatttctggggatactcaacatgtgatctggtgcaggagtactttagcagtagaatttgtgtgagtccctcatcatgggggtttttattatggtctggtaggtgtactggagtggagtttgaaaccacagtaacttccattgttatgttggtctacatatgtgtttggtgatggaactatttgttggagtctgatgttgtagtgctgtaggttctggtgttttcccttggttggagttccaaggtgcgaaaggctggttttgaatcttcaaaacctcttgttctgttgtcatggaaacaacgtggttgaagttccaagctacacacatctgtatggtttgcactgcaggctcgaatcaaaaagataatgcaagcagatgaggatgttggaaagattgcattagcagtgcctgttttagtctcgagggctcttgaattgtttttacaagatttaattgaccggacttatgaaattactcttcaaagtggagcaaagacactgaattccttccacctgaagcaatgtgtgaagaggtacagttcttttgatttcctaactgaagttgtcagcaaggtaccagatcttggtggtgctgattcatgtggagatgaaagagtgttacctagaagaagaaagtcaaatggcagtgacccagagaatgatgaatcaagatctagtaaaatggctataagaaatgcaaataccagccccagaggacgtgggaggggtcgaggcagagggcgaggtcggccaccaaccaagagaaaggaagttggttacgtacaatttgaagatgagagcagcatgtttgctgaacaaggtgaaaccttaccaggagagggaacagttccagagatcaacagcggcaacgagattacgcctcaaagcacgcaacctccgctaacagcccctgcgcaagctacaaattctaaggtggaagaagcaagcaccgatcatcagtcagattggcctatgccagatgccactggaaacatcggtgttgggccatctggttttggacatctgacagtgcaggttgatgaagatgaggactacgacaatgaggactagtcagggccatcctctcactgtatgcgctaacaggactgttctggtgttgtaaaatgtaaatatagcttgaagtagctgccgcagcttagctatgattgtctgttatgaggttatgtagttgccctgtgtaacttctgtaattgctttttagttgccttttctctacatgattgactgtcaaagcgttttgtcatatttaacccagtatgtttgagcaggggtcgactatttctaagtattttgactttattcgactagtatttgagcagtcatctgatgctccgcaggtttttgttgacttgtggtgcagtcagctgctagtatgaaaattggtagg

SEQ ID NO: 207954 - DNA, 1096 bp, Zea Mays
gttagcgttacggtccgttctgcaatccaaacatccgatggagcccctatcctgcacgcccgcagaaccgtgccaccgcccctcccgagacttccgccacgcctccccaccgtgcgagattgccgcccccggccgcgagtgtgctgtgtgcccgtcgagacaactgttgtctccttccccaacctgcagaatcgtgcccaccaccgccacctctcgcgcgaggcccgggtctgcggccaccggcacagccagcatccttccctgcctgctcgctatgcatcatgtccgcgttcagcgagacaaccgtcgtcctcccttgctgagttaagtctccttgtgtgcagatgaaggcaatggagtatggatctgtgccagtatagataagcttttccagctatgaatcaaggtaaaaacgaaaaagcactaatttgggcaatccatcagtttgatatgatttagttgaaatgttttttgtatccagagtgagtagaaaccgcatgactatgagaagcttgagtatgggccaaagtaggatttacatcagttaattgacggttatatatgttacgtacaagttataagcttttccatttatatgtacttgtaaccaggggggtcagaggtgtatggttgtcgcaatacaacaatgtctctatacatcatctcaacctatggagatttgtctctttctcaagcacttgatgactttaacaatgaccctttgcattgggatcgacagatcaagggtgggatggttaggggttcgttgcggccatagccttcattgcaaggcttattcctccataaggaagctgtgaactgggcatctgctagagaaccacatgacctacatgaggcaccaactcctgaaattaagggtacaagtatcttatttttaaaggagggagagcaaggatctgtagccttgagaccccatacagatagatgcacaatatgtgtgaacaaaaaaaaacaaacaagaattatttcctataaaaatatatgtacaaatctgtgttggatgattctaatctttgaacacagggctttcattgcttcggatttggatttctgtggtttatatgtgcatcaattg

SEQ ID NO: 207955 - DNA, 724 bp, Zea Mays
ggagcccctatcctgcacgcccgcagaaccgtgccaccgcccctcccgagacttccgccacgcctccccaccgtgcgagattgccgcccccggccgcgagtgtgctgtgtgcccgtcgagacaactgttgtctccttccccaacctgcagaatcgtgcccaccaccgccacctctcgcgcgaggcccgggtctgcggccaccggcacagccagcatccttccctgcctgctcgctatgcatcatgtccgcgttcagcgagacaaccgtcgtcctcccttgctgagttaagtctccttgtgtgcagatgaaggcaatggagtatggatctgtgccagtatagataagcttttccagctatgaatcaagatcaagggtgggatggttaggggttcgttgcggccatagccttcattgcaaggcttattcctccataaggaagctgtgaactgggcatctgctagagaaccacatgacctacatgaggcaccaactcctgaaattaagggtacaagtatcttatttttaaaggagggagagcaaggatctgtagccttgagaccccatacagatagatgcacaatatgtgtgaacaaaaaaaaacaaacaagaattatttcctataaaaatatatgtacaaatctgtgttggatgattctaatctttgaacacagggctttcattgcttcggatttggatttctgtggtttatatgtgcatcaattg

SEQ ID NO: 207956 - DNA, 1043 bp, Zea Mays
gcagaaccgtgccaccgcccctcccgagacttccgccacgcctccccaccgtgcgagattgccgcccccggccgcgagtgtgctgtgtgcccgtcgagacaactgttgtctccttccccaacctgcagaatcgtgcccaccaccgccacctctcgcgcgaggcccgggtctgcggccaccggcacagccagcatccttccctgcctgctcgctatgcatcatgtccgcgttcagcgagacaaccgtcgtcctcccttgctgagttaagtctccttgtgtgcagatgaaggcaatggagtatggatctgtgccagtatagataagcttttccagctatgaatcaaggggggtcagaggtgtatggttgtcgcaatacaacaatgtctctatacatcatctcaacctatggagatttgtctctttctcaagcacttgatgactttgtaagtttgcaatctcaagggagaatagctatcctgtcacgggctgttcattgtgcacaatcaacatctcttaatagatcaaataatgttctgaacaacagcataggtcaaagttgcaatcggaaggctcaggaagctgattgagtgaagctatcttattttctgacgttacttgcttcttgaatttaacataatttacttcccaatgtgcagaacaatgaccctttgcattgggatcgacagatcaagggtgggatggttaggggttcgttgcggccatagccttcattgcaaggcttattcctccataaggaagctgtgaactgggcatctgctagagaaccacatgacctacatgaggcaccaactcctgaaattaagggtacaagtatcttatttttaaaggagggagagcaaggatctgtagccttgagaccccatacagatagatgcacaatatgtgtgaacaaaaaaaaacaaacaagaattatttcctataaaaatatatgtacaaatctgtgttggatgattctaatctttgaacacagggctttcattgcttcggatttggatttctgtggtttatatgtgcatcaattg

SEQ ID NO: 207957 - DNA, 1508 bp, Zea Mays
aagagactcactgctactcgcgctcttgccaccgtctactctccaacccttctgccatccctcggcaccagctcgctgacgctaccgccacccctaccgccaggcgctcatctacaagtgcctggcgtccggcaagcccatcccttcctacctcatgccgccgctccgccgcatcctcgactccgccctcgccacgtcgccgtccctcgcctacccgccgcaaccctcactgggctggggctgcttcgggatgggcttcacccggaaggccgacgaggacccggagcccgggcggtgccggcgcacggacggcaagaagtggcgctgctccaaggaggcgtacccggactccaagtactgcgagaagcacatgcaccggggcaagaaccgttcaagaaagcctgtggaaatgtccttggccacgccggccccggcgccggcccccgccgccgccacaaccgccaccgccacctcatccccggcgccgtcctaccaccgcccggcccacgacgccacgccgtctccgtaccacgcgctgtatggaggcggcggcggcggcggcggtagcccttactcggcgtcggcacgcccaggagcaaccggaggcggcggcgcgtaccaccacgcgcagcatgtgagccccttccacctccacctcgagaccacccacccgcacccgccgccgccctacaactactccgccgaccagagggactacgcgtacgggcacgcggccgccaaggaggtcggcgagcacgccttcttctcggacggcgcgggcgagcgggtcgaccggcaggccgcggcggggcagtggcagttcaggcagctcggggtggagacgaagccgggccccacgccgctgttccccgtcgccgggtacgggcacggcgcggcgtcgccgtacggcgtggagatgggcaaggacgacgacgagcaggaggagaggcgccgccagcactgcttcgttcttggagccgacctgcggctggagcggccgtcgtcgggccatggccatggccatgaccatgacgacgccgccgccgcgcagaagccgctccggcccttcttcgacgagtggccgcaccagaagggggacaaggccgggtcgtggatggggctcgacggcgagacgcagctctccatgtccatccccatggccgccaccgacctccccgtcacctcccgcttccgtaacgacgagtgatgccacatcaaacctggcgctggaaactcggaacgtatggtgctgatgctgaccatgagatgtaccgtttcgctcaaggccggccgtcatcaccacggccacatcaaaccggtttgaagaacttgggaaggccgaatgaaacctccagaagaatgatctgtcctctttttctccattttcttttttcttttagtattactctgtattgcttcgcgtgtaatatgttttcctgtaatatcaagtgagggcgtttctgaattctcatgcagcatttgggctcagtgactgttatatctcgtga

SEQ ID NO: 207958 - DNA, 1027 bp, Zea Mays
gtaataagcaagtcacaaccaatcaatccgtcttcttcctttttctctccagcagaagccggtcctgttcatctgttcttcatcaggtggggttgctttgctgagttcccatcgccatgagcggacagaacttgcgtagcatacaattcttcttcttctttctttctttttttttcttcttcttctggaggtcaagcgcttacctgaagccgactgctttccagcttccatcagtcgggtactctactcactcaccagcaaaagggtactgtactgacgcgcttgcttcttttttttttcccccttgtccaccgtgtcccttgaaaacgaaagtcccgccgctgctgaggtacggcaagtactgcgggatcctgtacagcggctgcccaggcgagaagccctgcgacgcgctcgacgcctgctgcatggtccacgaccactgcgtcgacacccacaacaatgactacctgaacacgcggtgcaacgagaacctgctgagctgcctcgacggggtgagcccggcggggccgacgttcccggggaacgagtgcgacgtcggccagacggcgtccgtcatacgtggggtcatcgagtcggcggtgctcgcgggcaagatccttcacaagcgcgacgacggccagtagccggcgtcctggcagtggcaggacaggagcgggccgacctgagtcagtgaggctagctcgcggttggtacagacagtataaagccgcttgtgctggatttcaaggttatgaacggccggaccacctgttggagttcgtttacgtattaggtttagttcatttactttaaaataaaatttagaataaatgtcaaagattcgtcatgaatctgaattcgtcttgtgcaacaaatttaaaactcaatccattaaactcaagtcagattttgtttttttaatctttttatgtgtggttatcctgaatataatctccctatataatagagttccctttaaatgtcaatgagaaacaatcaatctactgtaggttgaggttttagacaa

SEQ ID NO: 207959 - DNA, 1794 bp, Zea Mays
actgacaaaaatctctatataagcacagtgtccggcatcttggccccttccccacccttcgccctttcaaggaggccggcctcgcctcacactcccgcccgcctccggcgattcatccacccaataaaggtttgggcgcgctcggtgggcggcgtactccagggtcatcgttagttggacgggctagggtgctttctcaccgggggaagggaagcgaatccaaacgatggagaagaagaaggtggcgatcccgctggtgtgccacggtcactcgcggccggtggtggatctcttctacagccccgtcacacccgatggttacttcctcatcagcgccagcaaggacacaaatccaatgcttcgtaatggtgagactggtgactggattgggacttttcaaggtcataaaggagctgtttggagctgttgccttgacaggaatgctctgagggctgcatctgcttctgctgacttctcggctaaagtatgggatgcacttactggtgatgaactacattcatttgaacataagcatatagttcgggcatgtgctttctctgaggacacccaccttttactcactggaggcatggaaaagactttgcgtgtgtatgatattaatcgtcctgatgcagctccaagagagcttgacaaatcacctggttctgtccgaactgctgcctggcttcatagtgaccaaactatattgagttcctgcactgacatgggtggagtaaggctatgggatgtgagaacaggtaaaattgtccaaactcttgaaaccaaggcttctattactagtgcagaagtaagccaggatggcaggttcatcactacagcagatggctcaagtgtaaaattttgggacgcgaatcacttcggccttgtgaaaagctatgatatgccgtgcaatgtggagtcagcttcacttgaacccaagtctgggagtaaatttgtagctggaggagaagatttgtgggttcatgtattcgatttcttcactggtgaagaaatagcttgtaacaaagggcatcatggaccggtccactgtgtccggtttgcacctggtggtgaatcatacgcatcgggttcagaagatggcaccattaggatctggcagcttagcccagttaatgctgatgacgacgaggcggccaatgcaaatggcaaggcaaatgctgcagtgaacgaggttacaaccaagctcgagggcggcttccacattcccaaggagggacaggctggggggtaggacctcatgtgctttgttgtggtgcttgtggttcttattgcgaggagattgcccatagggctgccacggtcattcagtttctccctgcagagccatcaacacctgtttgcgatccaagggtatcatggcttcaagagtcatcaccctggtaactggggaaaaaccatacccctcgtaagcatggtggtgggtttttggatggggccttcgctttgatagaacatagcaactgtagtgtcaaaaataaacaagagaatacaacttgggtaggtatcgtgtcttcggtcattaaagtgaagtattctgtatcgccgccagtaatttttgtggcttttgatgttggaacgccgattttcaaatcaaagctgacgaccacttcttgatcatgaggcaatatagatagcgtcatgcccatatcaaatgacagatttctctgctcactggacatgcttttttggtggcatccgcggacacgatacgtgaaatttagttttatgttattgtacacctacccgaaattcatgattggtttaggaatccca

SEQ ID NO: 207960 - DNA, 1492 bp, Zea Mays
agaaaacagttggcacttggcaggatgtaccttaatggatagacacaaatccaatgcttcgtaatggtgagactggtgactggattgggacttttcaaggtcataaaggagctgtttggagctgttgccttgacaggaatgctctgagggctgcatctgcttctgctgacttctcggctaaagtatgggatgcacttactggtgatgaactacattcatttgaacataagcatatagttcgggcatgtgctttctctgaggacacccaccttttactcactggaggcatggaaaagactttgcgtgtgtatgatattaatcgtcctgatgcagctccaagagagcttgacaaatcacctggttctgtccgaactgctgcctggcttcatagtgaccaaactatattgagttcctgcactgacatgggtggagtaaggctatgggatgtgagaacaggtaaaattgtccaaactcttgaaaccaaggcttctattactagtgcagaagtaagccaggatggcaggttcatcactacagcagatggctcaagtgtaaaattttgggacgcgaatcacttcggccttgtgaaaagctatgatatgccgtgcaatgtggagtcagcttcacttgaacccaagtctgggagtaaatttgtagctggaggagaagatttgtgggttcatgtattcgatttcttcactggtgaagaaatagcttgtaacaaagggcatcatggaccggtccactgtgtccggtttgcacctggtggtgaatcatacgcatcgggttcagaagatggcaccattaggatctggcagcttagcccagttaatgctgatgacgacgaggcggccaatgcaaatggcaaggcaaatgctgcagtgaacgaggttacaaccaagctcgagggcggcttccacattcccaaggagggacaggctggggggtaggacctcatgtgctttgttgtggtgcttgtggttcttattgcgaggagattgcccatagggctgccacggtcattcagtttctccctgcagagccatcaacacctgtttgcgatccaagggtatcatggcttcaagagtcatcaccctggtaactggggaaaaaccatacccctcgtaagcatggtggtgggtttttggatggggccttcgctttgatagaacatagcaactgtagtgtcaaaaataaacaagagaatacaacttgggtaggtatcgtgtcttcggtcattaaagtgaagtattctgtatcgccgccagtaatttttgtggcttttgatgttggaacgccgattttcaaatcaaagctgacgaccacttcttgatcatgaggcaatatagatagcgtcatgcccatatcaaatgacagatttctctgctcactggacatgcttttttggtggcatccgcggacacgatacgtgaaatttagttttatgttattgtacacctacccgaaattcatgattggtttaggaatccca

SEQ ID NO: 207961 - DNA, 1351 bp, Zea Mays
ttccaatcagcgttgctgctcatttaattttcccttttacaaaattggatgcatttactggtgatgaactacattcatttgaacataagcatatagttcgggcatgtgctttctctgaggacacccaccttttactcactggaggcatggaaaagactttgcgtgtgtatgatattaatcgtcctgatgcagctccaagagagcttgacaaatcacctggttctgtccgaactgctgcctggcttcatagtgaccaaactatattgagttcctgcactgacatgggtggagtaaggctatgggatgtgagaacaggtaaaattgtccaaactcttgaaaccaaggcttctattactagtgcagaagtaagccaggatggcaggttcatcactacagcagatggctcaagtgtaaaattttgggacgcgaatcacttcggccttgtgaaaagctatgatatgccgtgcaatgtggagtcagcttcacttgaacccaagtctgggagtaaatttgtagctggaggagaagatttgtgggttcatgtattcgatttcttcactggtgaagaaatagcttgtaacaaagggcatcatggaccggtccactgtgtccggtttgcacctggtggtgaatcatacgcatcgggttcagaagatggcaccattaggatctggcagcttagcccagttaatgctgatgacgacgaggcggccaatgcaaatggcaaggcaaatgctgcagtgaacgaggttacaaccaagctcgagggcggcttccacattcccaaggagggacaggctggggggtaggacctcatgtgctttgttgtggtgcttgtggttcttattgcgaggagattgcccatagggctgccacggtcattcagtttctccctgcagagccatcaacacctgtttgcgatccaagggtatcatggcttcaagagtcatcaccctggtaactggggaaaaaccatacccctcgtaagcatggtggtgggtttttggatggggccttcgctttgatagaacatagcaactgtagtgtcaaaaataaacaagagaatacaacttgggtaggtatcgtgtcttcggtcattaaagtgaagtattctgtatcgccgccagtaatttttgtggcttttgatgttggaacgccgattttcaaatcaaagctgacgaccacttcttgatcatgaggcaatatagatagcgtcatgcccatatcaaatgacagatttctctgctcactggacatgcttttttggtggcatccgcggacacgatacgtgaaatttagttttatgttattgtacacctacccgaaattcatgattggtttaggaatccca

SEQ ID NO: 207962 - DNA, 1430 bp, Zea Mays
atttctttgtttgcttcaatgcttcctgtgacatgaatgtggacgtgctaaagttcatatactgccactctgatcggccagcaactttaaactgggcatatttatcaatgtgtttgtaaagtatgggatgcacttactggtgatgaactacattcatttgaacataagcatatagttcgggcatgtgctttctctgaggacacccaccttttactcactggaggcatggaaaagactttgcgtgtgtatgatattaatcgtcctgatgcagctccaagagagcttgacaaatcacctggttctgtccgaactgctgcctggcttcatagtgaccaaactatattgagttcctgcactgacatgggtggagtaaggctatgggatgtgagaacaggtaaaattgtccaaactcttgaaaccaaggcttctattactagtgcagaagtaagccaggatggcaggttcatcactacagcagatggctcaagtgtaaaattttgggacgcgaatcacttcggccttgtgaaaagctatgatatgccgtgcaatgtggagtcagcttcacttgaacccaagtctgggagtaaatttgtagctggaggagaagatttgtgggttcatgtattcgatttcttcactggtgaagaaatagcttgtaacaaagggcatcatggaccggtccactgtgtccggtttgcacctggtggtgaatcatacgcatcgggttcagaagatggcaccattaggatctggcagcttagcccagttaatgctgatgacgacgaggcggccaatgcaaatggcaaggcaaatgctgcagtgaacgaggttacaaccaagctcgagggcggcttccacattcccaaggagggacaggctggggggtaggacctcatgtgctttgttgtggtgcttgtggttcttattgcgaggagattgcccatagggctgccacggtcattcagtttctccctgcagagccatcaacacctgtttgcgatccaagggtatcatggcttcaagagtcatcaccctggtaactggggaaaaaccatacccctcgtaagcatggtggtgggtttttggatggggccttcgctttgatagaacatagcaactgtagtgtcaaaaataaacaagagaatacaacttgggtaggtatcgtgtcttcggtcattaaagtgaagtattctgtatcgccgccagtaatttttgtggcttttgatgttggaacgccgattttcaaatcaaagctgacgaccacttcttgatcatgaggcaatatagatagcgtcatgcccatatcaaatgacagatttctctgctcactggacatgcttttttggtggcatccgcggacacgatacgtgaaatttagttttatgttattgtacacctacccgaaattcatgattggtttaggaatccca

SEQ ID NO: 207963 - DNA, 1379 bp, Zea Mays
gctaaagttcatatactgccactctgatcggccagcaactttaaactgggcatatttatcaatgtgtttgtatgggatgcacttactggtgatgaactacattcatttgaacataagcatatagttcgggcatgtgctttctctgaggacacccaccttttactcactggaggcatggaaaagactttgcgtgtgtatgatattaatcgtcctgatgcagctccaagagagcttgacaaatcacctggttctgtccgaactgctgcctggcttcatagtgaccaaactatattgagttcctgcactgacatgggtggagtaaggctatgggatgtgagaacaggtaaaattgtccaaactcttgaaaccaaggcttctattactagtgcagaagtaagccaggatggcaggttcatcactacagcagatggctcaagtgtaaaattttgggacgcgaatcacttcggccttgtgaaaagctatgatatgccgtgcaatgtggagtcagcttcacttgaacccaagtctgggagtaaatttgtagctggaggagaagatttgtgggttcatgtattcgatttcttcactggtgaagaaatagcttgtaacaaagggcatcatggaccggtccactgtgtccggtttgcacctggtggtgaatcatacgcatcgggttcagaagatggcaccattaggatctggcagcttagcccagttaatgctgatgacgacgaggcggccaatgcaaatggcaaggcaaatgctgcagtgaacgaggttacaaccaagctcgagggcggcttccacattcccaaggagggacaggctggggggtaggacctcatgtgctttgttgtggtgcttgtggttcttattgcgaggagattgcccatagggctgccacggtcattcagtttctccctgcagagccatcaacacctgtttgcgatccaagggtatcatggcttcaagagtcatcaccctggtaactggggaaaaaccatacccctcgtaagcatggtggtgggtttttggatggggccttcgctttgatagaacatagcaactgtagtgtcaaaaataaacaagagaatacaacttgggtaggtatcgtgtcttcggtcattaaagtgaagtattctgtatcgccgccagtaatttttgtggcttttgatgttggaacgccgattttcaaatcaaagctgacgaccacttcttgatcatgaggcaatatagatagcgtcatgcccatatcaaatgacagatttctctgctcactggacatgcttttttggtggcatccgcggacacgatacgtgaaatttagttttatgttattgtacacctacccgaaattcatgattggtttaggaatccca

SEQ ID NO: 207964 - DNA, 1380 bp, Zea Mays
ggtgcttaggtggtcgcttaggcgtctggctggtgactcgcctcgctgtagcatcgtgataaccattaaagtatgggatgcacttactggtgatgaactacattcatttgaacataagcatatagttcgggcatgtgctttctctgaggacacccaccttttactcactggaggcatggaaaagactttgcgtgtgtatgatattaatcgtcctgatgcagctccaagagagcttgacaaatcacctggttctgtccgaactgctgcctggcttcatagtgaccaaactatattgagttcctgcactgacatgggtggagtaaggctatgggatgtgagaacaggtaaaattgtccaaactcttgaaaccaaggcttctattactagtgcagaagtaagccaggatggcaggttcatcactacagcagatggctcaagtgtaaaattttgggacgcgaatcacttcggccttgtgaaaagctatgatatgccgtgcaatgtggagtcagcttcacttgaacccaagtctgggagtaaatttgtagctggaggagaagatttgtgggttcatgtattcgatttcttcactggtgaagaaatagcttgtaacaaagggcatcatggaccggtccactgtgtccggtttgcacctggtggtgaatcatacgcatcgggttcagaagatggcaccattaggatctggcagcttagcccagttaatgctgatgacgacgaggcggccaatgcaaatggcaaggcaaatgctgcagtgaacgaggttacaaccaagctcgagggcggcttccacattcccaaggagggacaggctggggggtaggacctcatgtgctttgttgtggtgcttgtggttcttattgcgaggagattgcccatagggctgccacggtcattcagtttctccctgcagagccatcaacacctgtttgcgatccaagggtatcatggcttcaagagtcatcaccctggtaactggggaaaaaccatacccctcgtaagcatggtggtgggtttttggatggggccttcgctttgatagaacatagcaactgtagtgtcaaaaataaacaagagaatacaacttgggtaggtatcgtgtcttcggtcattaaagtgaagtattctgtatcgccgccagtaatttttgtggcttttgatgttggaacgccgattttcaaatcaaagctgacgaccacttcttgatcatgaggcaatatagatagcgtcatgcccatatcaaatgacagatttctctgctcactggacatgcttttttggtggcatccgcggacacgatacgtgaaatttagttttatgttattgtacacctacccgaaattcatgattggtttaggaatccca

SEQ ID NO: 207965 - DNA, 2187 bp, Zea Mays
ctcaaatctaagcaccccgacgaaatcgcctaatccaaaccgcctatgcacgttggctggccctactaaacggagaagccccaccacaaacgctactcgccgccgcggcgcgcagacgactgcgactccgcgatggacgaggaggaaagggaggaggtgggagagtacaagctgcaagggttggttgggaggggctcgttcgccgaggtgcaccgtgccgcgcaccgccgcactggcgcgcccgcggcggtcaaggcgatcgaccgccgcctcgtcgacaagcgcgtccacgacggcatcctgcaggagagggagatactcaggagcatcgaccaccccaacatcctccgcctcctcgacaccatcgacaccacgaacatgatgtacctggtgctggagtactgcgacggaggcgacctggacgcgtttctccacaagcacggccggctgccggaggccgtagccaaggacttgatgcggcagctcgcggaagggctgaaggtgctgagggggaggaacatcgtgcaccgggacctcaaaccacagaaccttctcctatcaaccaacggggatgacatcgtattgaaaattggtgactttgggtttgccaggtcgctggtgcatgaaaatttagctgctacaatatgtgggtcgccatattatatggcaccagaaatttggcaagggaaggactatgatgcaaagtcggacttgtggagtgttggtatcattctttttcagctagtcacagggaagttgccattcaccgggagtaatgcttttcagctgcaccaaaatgtcatggctaccgatgatcttaacttcccttcagaaattgaagctgatttatgtcctgattgcattgatttgtgcagaagactcctgcaccgtgatccaaagaagagaataagttttgaagaaatcttcaatcacaagtttttggcaacaacaaggaaatgctatgaatcctgtcatgctgtagaattaagagataactgccagacaatcacctctcctgttgtcctaaaaacaaagtctggaagtattgaatcaaaaaatccgaaagtttttgattcatgggagtggattgaacgagaatatgtgcttgttccggaaaactgtacttctatggaaatgtcttcactcaacatcaagtccacaaaggatgatatggatacaagaacggtcagctatggagtcagccactgtggattgtagacgagggaaaccacctgattatattacaagacttcattctctgaatcaatatgttcttgttcttgcggatcttgctcgggaaaagctatctaaaggcctgtacctggaggcgttatcaattgaacttgtattattaactatctggaaagaggcacttgatgcatgtagcttgctcatggatacatcagatggtgaaaaattctctaaatcttgtcaagaacatttccttgctaagagtggccactcacctatgaatgtagtacaaggattggatttcactcggacggcttctattttttcttggcttgaaagtgggtttatgaaggcatatgatcgtgcagagaagatatcacatgtattacggaaaagtgatgataacaccgagatgccagatgcagtggatgttacattccaaactgctttgtaatatgagaagagtagagctgcgaatgaagttttaggaaatcaaagcagatccgcagagctatattcgaagtctatcatcttgctcacgtttttagtacaggaagcatctatgttgccactaaatccaccgctttccctttcgcctttggatcagcaacgcatccgtaggtacatagctaatttgaacagccatctctgcagtgctcaggttccagggcaacggcagagatcagtccaccatgttgctttttgtctaggaggtggtgttcaatgctttggtgtcatgaacctttgtaaaattgtagttgccgaacaccatgatcctgcccccttttttgtatatatatagataataacaccacatgctctatatggtcgccccttaccatatgttcaaatgactctgaactttatatatttgcaagtgccttgtttgcacatgtaaaaagaaacgggtttcgaaccttctcgcgactgcatactctccgatcctttctagtaccaaggggtgatcatggtcagggatgagtcaattcattggag

SEQ ID NO: 207966 - DNA, 817 bp, Zea Mays
ctcggcactcttcgcccctcttccttggtccaatggcgtcgtctctcggctccgacgacagtgccggctccgccgccgccgtctgctgcatgtgcggcgaccatggcctgccgctggagctgtaccggtgcgacctctgccgcatccgtacacagcacagcgacctgtacccggcggcggcggcggcggggccgtaccggagctgcaactggtgcctcaggcagggcggcgcagacgtcggagggggttgtcattcgccgtcaccggttaataaggtgtccgcggcggcaggaacaggaaccagacggaggatcagcatcaacggttctcgtggcgacggcgagtcggcgaccgctatggatgctccagcaggtcagcgttctcggcggaccccaggaagccgatcaagaagcctgaaaagggccgtgaagaaagagcggtgcagcggccggagccggtgctcacgacgttgtctaaggaaacgaggggggtggtgcagcctgccaagccgcggttcaaggtgaagaaggtgcggcggtacaagttactcgcggaggtgatctgctagtatcagtaatttagtatagtagtagtcagtggcggaggactaaataaaattaagatatagactgggtcgctgggccattgtagtttggatgaattgcttatgaaatattacttattagtctatggttagcagatcatgtatatagtcatgtaaaataatttttactataggatgtactatttatagaatgaactctaaagtaaaagattatataaagtagcaagcttctagagataaccttagaattag

SEQ ID NO: 207967 - DNA, 1356 bp, Zea Mays
cacggccacagtaccacacagaacagtagcaccgggctccgggcaccagggcaggcgaattcctaggttcgctggagcctggtccgagggatggccgccgcctcgctcgcgttggcgagtcctctccggcttctcctccgcgtccgtcacccgcgcggagccatcgccgtcccgtgctacttcatctcgcgagcaccgccattgccgttgcagcagcgagggatttggcggtgaaaggaagcgtggacaggaattcagcggaggaagtcaggaacattctgaatatggcagaaagggcttcccaacgaagaaatgtttttcacaccaattttcttactccacctatagtgaaagaggctatgctggcacttgaaaagtttgcagataccaaagcagtagctcagggtggctaccctcaggctgagaggtgccgaatatctgttggacacccggacgtcatgacaagtaacccagatgtggttgctgctttgagcatctcagggaatttccggttggaatcttgttctcatggtgactttcttggtgctattcttgggacaggaataacaagggagaaagttggagatattcttttgcagggggaacgaggtgcccaggtccttgttgacccagaacttgttgactatctgatttctacccttgaaaaggtggggaaagttggtgtttcatgcactcagattcctttgcttgctctagaatatgaaccaccaaggaccaattcatttaaaactgtagaatcatcgctcagggttgatgcccttgccagtgcaggatttaaaatctcacgcacgaagcttgctagcttgataagttctggtgatgttcgtgtgaattggacaccaacaacaaaaaatggagttaccctcaaatctggagatgttgtttctgttagtgggatgggaaggttaaagattggggaaattgtgactacgaggaaaggaaaatatgcggttgagttgattcgctatttgtaatcatggaactggtctactttcatgtctgaaactctgaatttaacggtacacattttctcctatatgtgatgagaatcatgtattaagtattacttctcagtgaagttgaaagtgatgcacaaatctgagtatatttgtagtattcattgactgctttagcttcgtaatgcaaatattcttataggtcaagaatttcataaagtcgtcagtgtacattcattatttcaaataataagcaccaaagggccaggttgctttggatcttccatcgcttctgtgttatcaccaacatagtcttgtacaactctgcaatatcgaatcacttctacttctgttagtactttctgatctgaagcttaaa

SEQ ID NO: 207968 - DNA, 1297 bp, Zea Mays
cacggccacagtaccacacagaacagtagcaccgggctccgggcaccagggcaggcgaattcctaggttcgctggagcctggtccgagggatggccgccgcctcgctcgcgttggcgagtcctctccggcttctcctccgcgtccgtcacccgcgcggagccatcgccgtcccgtgctacttcatctcgcgaggacggtatagcaccgccattgccgttgcagcagcgagggatttggcggtgaaaggaagcgtggacaggaattcagcggaggaagtcaggaacattctgaatatggcagaaagggcttcccaacgaagaaatgtttttcacaccaattttcttactccacctatagtgaaagaggctatgctggcacttgaaaagtttgcagataccaaagcagtagctcagggtggctaccctcaggctgagaggtgccgaatatctgttggacacccggacgtcatgacaagtaacccagatgtggttgctgctttgagcatctcagggaatttccggttggaatcttgttctcatggtgactttcttggtgctattcttgggacaggaataacaagggagaaagttggagatattcttttgcaggtggggaaagttggtgtttcatgcactcagattcctttgcttgctctagaatatgaaccaccaaggaccaattcatttaaaactgtagaatcatcgctcagggttgatgcccttgccagtgcaggatttaaaatctcacgcacgaagcttgctagcttgataagttctggtgatgttcgtgtgaattggacaccaacaacaaaaaatggagttaccctcaaatctggagatgttgtttctgttagtgggatgggaaggttaaagattggggaaattgtgactacgaggaaaggaaaatatgcggttgagttgattcgctatttgtaatcatggaactggtctactttcatgtctgaaactctgaatttaacggtacacattttctcctatatgtgatgagaatcatgtattaagtattacttctcagtgaagttgaaagtgatgcacaaatctgagtatatttgtagtattcattgactgctttagcttcgtaatgcaaatattcttataggtcaagaatttcataaagtcgtcagtgtacattcattatttcaaataataagcaccaaagggccaggttgctttggatcttccatcgcttctgtgttatcaccaacatagtcttgtacaactctgcaatatcgaatcacttctacttctgttagtactttctgatctgaagcttaaa

SEQ ID NO: 207969 - DNA, 1621 bp, Zea Mays
cacggccacagtaccacacagaacagtagcaccgggctccgggcaccagggcaggcgaattcctaggttcgctggagcctggtccgagggatggccgccgcctcgctcgcgttggcgagtcctctccggcttctcctccgcgtccgtcacccgcgcggagccatcgccgtcccgtgctacttcatctcgcgagcaccgccattgccgttgcagcagcgagggatttggcggtgaaaggaagcgtggacaggaattcagcggaggaagtcaggaacattctgaatatggcagaaagggcttcccaacgaagaaatgtttttcacaccaattttcttactccacctatagtgaaagaggctatgctggcacttgaaaagtttgcagataccaaagcagtagctcagggtggctaccctcaggctgagaggtgccgaatatctgttggacacccggacgtcatgacaagtaacccagatgtggttgctgctttgagcatctcagggaatttccggttggaatcttgttctcatggtgactttcttggtgctattcttgggacaggaataacaagggagaaagttggagatattcttttgcagggggaacgaggtgcccaggtccttgttgacccagaacttgttgactatctgatttctacccttgaaaaggtggggaaagttggtgtttcatgcactcagattcctttgcttgctctagaatatgaaccaccaaggaccaattcatttaaaactgtagaatcatcgctcagggttgatgcccttgccagtgcaggatttaaaatctcacgcacgaagcttgctagcttgataagttctggtgatgttcgtgtgaattggacaccaacaacaaaaaatggagttaccctcaaatctggagatgttgtttctgttagtgggatgggaaggttaaagattggggaaattgtgactacgaggaaaggaaaatatgcggttgagttgattcgctatttgtaatcatggaactggtctactttcatgtctgaaactctgaatttaacggttgaagcaaaagtcccgtggctcctgtgtttttttgggtcaaattattagctactatctcacgaaaaacatactcagaatccttgtacactgaagtattgctgtatttttagctaaatattatctatatgtcgctgtgtttggttagatgtaggaatgggagtttagaggtttgtttgtttggtggggataagagttttgactggatggggatgggagaatagggggtaaactcccaccaaatttttacgtggaaggtggatgcccccgcactgtccatcatgatttatgacgcaattttttactctcaagtctcaaaccctcacataaacaaaggtcatgaagtcattttccaactatcacttttgatgctttcacaaaccaacttccaagtgaatttcctccgccaacatctattgctactgctgaatccaatgctcttgccacttgccagaggcaccgtatgtggttgcccatgtttagagtcagagagagtaccatgggccttctggctgaaagaagctgcaaccactctcctgttcttaacaacacaatatgctattttttgtgttctcttttac

SEQ ID NO: 207970 - DNA, 1269 bp, Zea Mays
caaaaaaaacatgtgtggcgcgcaaattagtggctgccccaaataccagccgcgccgccgcagcccaaaaccctatctcccttcccgtaattccagtcgtcgcgctccacccaaaaattgatgccgccgccgccaatcgccgtccacagccgcgcgccctagccggccggttgcaaccgccgtcccagccgcgcgcccaagcaggccggcccccaacgccgtcgccgtgatcctattacctgatgcggcggcaccaaacctcgcaaggtcgaagcccgtacgccgccctttgtcgcccaccgctcccagctatctacgtcctactcctgcccctggctatacctatgactgcgtctcggcagccggcgccctgtggaagccctccgcttcatatccccgtgctgtcgtgcagccagctgccaggagggacacctgaccacacaaaatggataggtttttttagcagcaaacaagactttatcgatgtagttgaggcaatattcagaggtgcgatgaaaggcaaactgatagtgtcttgcccccttcctcctgagaggataccaagattctaacttcttttcaaggatgtctgagaaaactgcagctcatcacgtgcacacaatcagctacctagcccaaggtttgtatttaatcacgttcatcaaatatgatgggtatagatttcttgtttggtctactagtcaagcaagagaatgcccttcgttttgctgaggatgcaaaccagttgtgctatggcacctgcctttagtgtcttccttacttcctattcatatggcgattctatgagtatggcacgagcagtagaagctataaaggagggaggtcctagaggtagtaagtcacttgtttactccatgatgacaatagcaagcagatcgcggtggtgcctatggatgctacaacaagaaagatcaaaagttcttttggatggatgcagctagatattttgttttgtattttctccaaaagagaaatttgcaagtgaacttaaaattgtgaaaccaacatgtggttgtactagctagtatctctaagctttcacaagccaaacttagtgttgttgctgcttattttaatctttattacaacaaaagcaaacttgtgaactttatgtgaatgcagtacaattgttattgtcatgaatgaaaacatgagctatgtatgaatgcagtacaattgctatgtatgaatgtagtataattgttatctgatgttgatgataattggaaactgctagtaatatatttt

SEQ ID NO: 207971 - DNA, 1394 bp, Zea Mays
caaaaaaaacatgtgtggcgcgcaaattagtggctgccccaaataccagccgcgccgccgcagcccaaaaccctatctcccttcccgtaattccagtcgtcgcgctccacccaaaaattgatgccgccgccgccaatcgccgtccacagccgcgcgccctagccggccggttgcaaccgccgtcccagccgcgcgcccaagcaggccggcccccaacgccgtcgccgtgatcctattacctgatgcggcggcaccaaacctcgcaaggtcgaagcccgtacgccgccctttgtcgcccaccgtgagtcacccctccggtcctccctccttaccccctcgccaagtccctagaggtcgctcaacgctggatctgccacgaccctaggctcccagctatctacgtcctactcctgcccctggctatacctatgactgcgtctcggcagccggcgccctgtggaagccctccgcttcatatccccgtgctgtcgtgcagccagctgccaggagggacacctgaccacacaaaatggataggtttttttagcagcaaacaagactttatcgatgtagttgaggcaatattcagaggtgcgatgaaaggcaaactgatagtgtcttgcccccttcctcctgagaggataccaagattctaacttcttttcaaggatgtctgagaaaactgcagctcatcacgtgcacacaatcagctacctagcccaaggtttgtatttaatcacgttcatcaaatatgatgggtatagatttcttgtttggtctactagtcaagcaagagaatgcccttcgttttgctgaggatgcaaaccagttgtgctatggcacctgcctttagtgtcttccttacttcctattcatatggcgattctatgagtatggcacgagcagtagaagctataaaggtaaaattggccagctatgcataactatgaattcccaaacacttgttttgaccctttttgtttgaccatcattttttatttgcacgtgaactgctcaaattatatggtacaaatgtcttgggttagagatgtaagttttttctgaactactttgtttacatgtgttttcagtatgcaaatattgctatgtctcaatttataaagcaataaaaagtcattgttgtctatttaacacgcaccttctgtgacaatggccatttcgtcacaattaatggcgtcaccaaaatactacctatgacaaataaacactagttagtgacgtaatcataatgtcactgaaggcctaaaatgttgtagtgtattttgagtagcagcaaggtgtccttgagtagcagcaaggacacttgtttgatcaacatagcacggaccctagcaaggacacttgagtagttgctctctaaaattcatgcagct

SEQ ID NO: 207972 - DNA, 1184 bp, Zea Mays
caaaaaaaacatgtgtggcgcgcaaattagtggctgccccaaataccagccgcgccgccgcagcccaaaaccctatctcccttcccgtaattccagtcgtcgcgctccacccaaaaattgatgccgccgccgccaatcgccgtccacagccgcgcgccctagccggccggttgcaaccgccgtcccagccgcgcgcccaagcaggccggcccccaacgccgtcgccgtgatcctattacctgatgcggcggcaccaaacctcgcaaggtcgaagcccgtacgccgccctttgtcgcccaccgacacctgaccacacaaaatggataggtttttttagcagcaaacaagactttatcgatgtagttgaggcaatattcagaggtgcgatgaaaggcaaactgatagtgtcttgcccccttcctcctgagaggataccaagattctaacttcttttcaaggatgtctgagaaaactgcagctcatcacgtgcacacaatcagctacctagcccaaggtttgtatttaatcacgttcatcaaatatgatgggtatagatttcttgtttggtctactagtcaagcaagagaatgcccttcgttttgctgaggatgcaaaccagttgtgctatggcacctgcctttagtgtcttccttacttcctattcatatggcgattctatgagtatggcacgagcagtagaagctataaaggtaaaattggccagctatgcataactatgaattcccaaacacttgttttgaccctttttgtttgaccatcattttttatttgcacgtgaactgctcaaattatatggtacaaatgtcttgggttagagatgtaagttttttctgaactactttgtttacatgtgttttcagtatgcaaatattgctatgtctcaatttataaagcaataaaaagtcattgttgtctatttaacacgcaccttctgtgacaatggccatttcgtcacaattaatggcgtcaccaaaatactacctatgacaaataaacactagttagtgacgtaatcataatgtcactgaaggcctaaaatgttgtagtgtattttgagtagcagcaaggtgtccttgagtagcagcaaggacacttgtttgatcaacatagcacggaccctagcaaggacacttgagtagttgctctctaaaattcatgcagct

SEQ ID NO: 207973 - DNA, 886 bp, Zea Mays
gtccggtccatccgggcccacttgtcatctgactcagtgtgtgtgagtgggctactaggcgtcttccactcttcctctcctttccagaccccagagccagagatcaaccacctgcggcggcgatggggatcggtgagcacttcgagggcgtgaagcagcactgggcgagcaacttcgccttcctcgactactacaagaaggtctacggccgcgccgagcccctccccaagtggtccgacgccgacgtcgacgagttcatcgcctccgacccggtctacgggccccagctcaaggccctgcgggagtcgaggaagtttgcgctcgccggggccttcgccggcgccgcccacctcggcggcgtcgcgctcaagtactccaaggcgccgcacggcgtcgtgctggcgaccgggttcggggcgatcacgggcgccgtgctggggtccgaggtggcggagcactggtaccagctctacaagatggacaagcagggggccaaccttaggttcatctactggtgggaggacaaggtctcaggtccgtcctgtcccccgtgccatcttgtcctctctgacgatccagttcctgtttagtgtacgtggttaattctggacagaagagctgaaccatgttgaattgaatgatgcctatttgagcattccagtttgacaaaaacattgatgtctattatctgtaatccttattgttttgttttgtttcctagtttttctctaataaggtgcgtatcggttgtggaaaccaactggacgatgtatttttcatctctgtcagtagtgacatttatccttagtacttacaatgtttatggtcaatctggtgcaaacagcaaatcctctccgttttcaagtgggactgtgctaaaacgccc

SEQ ID NO: 207974 - DNA, 1513 bp, Zea Mays
ctgccaccactattgtattgtctattgcagttgatatggatgcaaaagagggcacaactactggggtatctgccaaggacagggcaaaaacggtcatgactcttgcatctcctgactctaagcctgaggacctcaaccgccctggtcatattttccctttgaaatacagagaagggggtgttctgaaacgagctggacacaccgaggcatctgttgaccttgccatgttggctggattacctcctgttgctgtcctttgtgaaattgtggatgatgcagatggttctatggctcgcctaccaaagttgcgtgtctttgctgaaaaggagaacttaaagattatatctattgctgacttgattaggtataggaggaaaagagacaggctaattgaacgcgcttctgttgcacgcttgcctttgaaatggggcaatgtccatgcatattgctacaaatctgttattgatggcattgagcatattgccatggtgaaaggtgatattggtgacggccaagacattttggtgagggtgcactctgagtgcctcacaggcgacatttttggatccgcaagatgtgattgtggcgaccagcttgcgatggcaatggagatgattgagaaggctggaaggggtgtattagtctatctccgtggacatgaaggaaggggtattggtctgggccacaagcttcgtgcttataacttacaggatgatgggcgtgatactgtggaagctaatgaggaacttggtcttcctgtggactcacgggaatacgggattggcgcacagatattgcgggatctaggagtccgttcaatgaagctgatgactaataaccctgcgaaatatagtggtctcaagggctatggattgagcattgcgggcagggtgcccttgattacgccaattaccagtgagaaccgtaggtacctggagactaaaagaacaaagatgggacatgtatatgggttggccaatgcgcaggccaacctagcaaatggcagccagagcacagaagagaatcattaggcccccaagcatgtttccattattattccagcaatccagcttggtgacacaaaagagtgatatgattcttcgtttggggagttcctgaaatcttctcccccgatatttccgtagattctttcgcaaaaaagccgatatttcggtagatcgatttgttcttcaattgtaactgtaggtttcaaggtggctaatgagtaatgagcctaataatgaacggtaggtttcaagatggccagtaatgatatacacggagttagtcgtcataatgtactgtgttgagttttacgactttatcgccttggtgtggttgtcctgatggagttgtgatcgaatggtgtggcttttcactgccctttccttcacccactaaaaagcatagaatgtggagaattttaccttgagccattatagaagtttataatactttatgtgccacgaaatttttggttgtccctcttcatttcttcgtgcaaagttttctg

SEQ ID NO: 207975 - DNA, 2262 bp, Zea Mays
ctcccacccgcgcccacgcccacgcccacgcccacggccgcaccaaccaccaggcaccagccccgatttcctcctaatcaatcacaccatcaaaccaaaacccaaacagcacttctcctgcaatcgccgacgtcgccggaggcttcgccggccggagcagcgccgacgggtgcaattcttcaaagggtgcagtgtatccaaggagacaaagggaccggtccgcagtttcttcactgcaaattcaaagagcaccaaggtgaaatcagcgggcttgaaagtagcatcatccttcaaaaatgatggtggttatccagctggcggtgtctcttggaaggacgacactctattgccaaaaagcacaaccattcgtggccaggaccattcggttgctgaccctgtactcccaatggattccatgattacgccagaaatcctctctgctaatgtggaacgtgttatagacatgtttgcagatgatgacactgatactgaacttgatttggatagcccgacagagggcttcacatcaattgcagaagccattgaggacatacagcaaggaaaacttgtgattgttgttgatgatgaatcaagggaaaatgaaggagatctgataatggctgcctccttggttaccccagaggctatggcttttatagtaaggcatgggacaggaattgtttgtgtcagcatgaaagaagatgatctggaaagactgagccttcctttgatggttaccacaaaagaaaatgaggagaagctatgcactgctttcactgttacagtggatgcaaaagagggcacaactactggggtatctgccaaggacagggcaaaaacggtcatgactcttgcatctcctgactctaagcctgaggacctcaaccgccctggtcatattttccctttgaaatacagagaagggggtgttctgaaacgagctggacacaccgaggcatctgttgaccttgccatgttggctggattacctcctgttgctgtcctttgtgaaattgtggatgatgcagatggttctatggctcgcctaccaaagttgcgtgtctttgctgaaaaggagaacttaaagattatatctattgctgacttgattaggtataggaggaaaagagacaggctaattgaacgcgcttctgttgcacgcttgcctttgaaatggggcaatgtccatgcatattgctacaaatctgttattgatggcattgagcatattgccatggtgaaaggtgatattggtgacggccaagacattttggtgagggtgcactctgagtgcctcacaggcgacatttttggatccgcaagatgtgattgtggcgaccagcttgcgatggcaatggagatgattgagaaggctggaaggggtgtattagtctatctccgtggacatgaaggaaggggtattggtctgggccacaagcttcgtgcttataacttacaggatgatgggcgtgatactgtggaagctaatgaggaacttggtcttcctgtggactcacgggaatacgggattggcgcacagatattgcgggatctaggagtccgttcaatgaagctgatgactaataaccctgcgaaatatagtggtctcaagggctatggattgagcattgcgggcagggtgcccttgattacgccaattaccagtgagaaccgtaggtacctggagactaaaagaacaaagatgggacatgtatatgggttggccaatgcgcaggccaacctagcaaatggcagccagagcacagaagagaatcattaggcccccaagcatgtttccattattattccagcaatccagcttggtgacacaaaagagtgatatgattcttcgtttggggagttcctgaaatcttctcccccgatatttccgtagattctttcgcaaaaaagccgatatttcggtagatcgatttgttcttcaattgtaactgtaggtttcaaggtggctaatgagtaatgagcctaataatgaacggtaggtttcaagatggccagtaatgatatacacggagttagtcgtcataatgtactgtgttgagttttacgactttatcgccttggtgtggttgtcctgatggagttgtgatcgaatggtgtggcttttcactgccctttccttcacccactaaaaagcatagaatgtggagaattttaccttgagccattatagaagtttataatactttatgtgccacgaaatttttggttgtccctcttcatttcttcgtgcaaagttttctg

SEQ ID NO: 207976 - DNA, 1427 bp, Zea Mays
gaacacggcgacccgccgctgtgcatcgcgccccaaaccccggccaccaatcacccaccactacaacctgcgatcaatccgggaatcagccccgattcctaccagctatgccattggaactacaataattttggtgcagataaatcctgaaaaggcccgggaggagtttcggacagtaagtcaaaaaaatggaggaacaggagtaaaagatttcatggatagcatgggccttggggtgcttgttgagcagcttggagagttaaaattgggggaattgttggacacaccaccacctggcttggatgaagcaattgcaatttctaaggttatgcaattccttgaagcacaagaatacagcatgtttagtcgcattgtatttgacactgcccctacgggccatacactccggttattatccttgccagatttcttggatgcgtccattgggaaaatcttgaagctgaggagtaagattgcttctgcaacatcagctattaaatcagtatttggacaagaggtccaacagcaggatgcagcgaacaaattagagcaactcagagaaaggatggtcaaagtaagagagcttttccgcgacacggaatcaacagagtttataatcgtgacaatcccaacggtgatggcaatcagtgagtcatcaagactgcattcttcgttgcaaaaggaaagtgttcctgtaaggagactcattgtgaaccaagttctgccaccttcaacatcggactgtaaattctgttctataaaaagaaaggatcaaacgcgtgcattggatatgatacggactgacccagagttaaaaggtttgaacattatccaagcacctcttgtggacatggagattagaggtgttccggctctcaattttttgggtgatatactgtggaagtaacttcagttatgggaaacaggatcgcttataagggtgcttaattggccaatatcactgttagcctgctgcacaattgcactgctctgcaactagcaatctgtgggctcttctggttgtttccagctaacaattgcacaataagcttaagttgtttccagctacaatacagcacaacacattctccatggtgcgttaaatctgagtagaaagcaccaaattggagggttttgctgcactcctgcactagcatttgatgacctgttactcttggcagtgatgcagattggatttagccccaaattaggctaattgaagtgaaatgctgtaatatttatccttttatcaattatccccaagattaatagcaacacttgtggccttttggttcggcgactttgtaaaactcttcgtttcttatgtgccatctcaattttgtacaagaaatgtgttttctcttctccctcactggggcagttattcaggatattttaagctttggtttagctgccttgcaatgatg

SEQ ID NO: 207977 - DNA, 1636 bp, Zea Mays
ataagattgcatgcagataaggattagaagataagatttgttagagagaaaataggagatctatctcattagataaggattagaagggagtataaataattgtaagcaccactctatagatcaagcagaaacaagattgttccggcttcccagagggagccgggagattactgtgacctagctgcccctttcctcgcgcctctcttctctcacgcgcggtgaacacggcgacccgccgctgtgcatcgcgccccaaaccccggccaccaatcacccaccactacaacctgcgatcaatccgggaatcagccccgattcctaccagctatgccattggaactacaataaataaatcctgaaaaggcccgggaggagtttcggacagtaagtcaaaaaaatggaggaacaggagtaaaagatttcatggatagcatgggccttggggtgcttgttgagcagcttggagagttaaaattgggggaattgttggacacaccaccacctggcttggatgaagcaattgcaatttctaaggttatgcaattccttgaagcacaagaatacagcatgtttagtcgcattgtatttgacactgcccctacgggccatacactccggttattatccttgccagatttcttggatgcgtccattgggaaaatcttgaagctgaggagtaagattgcttctgcaacatcagctattaaatcagtatttggacaagaggtccaacagcaggatgcagcgaacaaattagagcaactcagagaaaggatggtcaaagtaagagagcttttccgcgacacggaatcaacagagtttataatcgtgacaatcccaacggtgatggcaatcagtgagtcatcaagactgcattcttcgttgcaaaaggaaagtgttcctgtaaggagactcattgtgaaccaagttctgccaccttcaacatcggactgtaaattctgttctataaaaagaaaggatcaaacgcgtgcattggatatgatacggactgacccagagttaaaaggtttgaacattatccaagcacctcttgtggacatggagattagaggtgttccggctctcaattttttgggtgatatactgtggaagtaacttcagttatgggaaacaggatcgcttataagggtgcttaattggccaatatcactgttagcctgctgcacaattgcactgctctgcaactagcaatctgtgggctcttctggttgtttccagctaacaattgcacaataagcttaagttgtttccagctacaatacagcacaacacattctccatggtgcgttaaatctgagtagaaagcaccaaattggagggttttgctgcactcctgcactagcatttgatgacctgttactcttggcagtgatgcagattggatttagccccaaattaggctaattgaagtgaaatgctgtaatatttatccttttatcaattatccccaagattaatagcaacacttgtggccttttggttcggcgactttgtaaaactcttcgtttcttatgtgccatctcaattttgtacaagaaatgtgttttctcttctccctcactggggcagttattcaggatattttaagctttggtttagctgccttgcaatgatg

SEQ ID NO: 207978 - DNA, 2131 bp, Zea Mays
cctcacccacatactctcccctggttgggcctgtgctgtgtggccgctctccctccacccaacccaaccaagaaacagaggcccccgctcaagctccgagagacagagaactccatggccgccatggacctcctctccggcaagctcatacgctccctgcgtctccattcctcactcctcccctctgctccttcctcctcccgcgccttcgaggtctccgcctcccgcaccgtcagggaagagttcttcagcgccttcgaggaggagatggaggtcaagcggcggctcgagcaggtgcaggcggcgctcgagggcgccactgaagacatggacctcatgggccggctcctcgatgagctcgacctgctgcagcgccgctcccaggacgtggacctcgatatggtggacgtcaaggtgcagaagctcatgccagagctcgggttcatgcctgaggacgccgaccgcctcgtcgcctccttcagcggtgggtggaaaatgaggatgtctctaggcaagatacttcttcaggaccctgatttgcttttgcttgatgagcctacgaatcatgtcgatttggataccattgagtggctggagatgtatctcaagacgcaggatgtgccgatggtcattatatctcatgacagggcgttccttgatcagttgtgcacaaagatagtggaaactgaatttggtgtgtccaagacatacaagggtaactattcagagtacattctagcaaaggcggtagcagtggaggcacagtatgctgcgtgggagaagcaacagaaggaaattgaacagacaaaggagctgataaacagacttggtgctggagttaatgcagggcgtgcttccagcgagcagaagaaattggagaagcttgaaaaagaagggttgattgagaaacctttccaaaggaagcagctaaagatcagattccctgagcgtggaagaagtgggagaactgtgttgacgataaacaatcttcaattcggatttgagaataagactttgttcaacaatgctaatctgatagtagagagaggtgaaaagatagctattattgggcccaatggttgtgggaagagcacactgcttaaacttatgttggggatggagaagccacaaggtggtgaggtgcttcttggggagcataatgtgttgccgaactattttgagcagaatcaggcagaagctcttgatttagagaagaccgtgttagacactgtagcagaagctgcggaagattggatacttgatgatatcaaaggtctccttggccgttgcaacttcagggatgacatgctggatagaaaagttcagtttttaagtggtggagagaaggcaaggcttgcattttgcaagttcatggtgactccatctactctactcatcttggatgaaccgacaaaccatcttgatatcccatcaaaagaaatgcttgaggaggcaatatcagaatatactggcaccgtcataacagtttctcatgaccggtacttcataaaacaaattgtcaacagagtcatcgaagtgaaagatcagactatccaagactatcaaggagattacaattactaccttgagaggaaccttgaagcccgagaaagggaacttgcccgcgaggaagagctcgaggagagagcccccaaagtaaaagccaagtccaagatgtcgaagagaaagccgtcaggaagaagcagaagatgcaggccttccagcagagcaagcagaaatccaagtcgcttaagaactcgaagcggtggaactgagattttttcgtcgttcgtagaggcggcgttggcgttcgtcacaatgcagaatgccatctgagacaccttgcaatgcagataccagtgtttgctactctgcctgctgtgccgtatgctataatagtcgccatatcagcagaagcactgcaaatacatcatcagaaagtagccctagtagcaatgaatgtagaagatcgtgaaaaaaaaaatactgtaactataagcaggaagcgttatgtgaccttgtacataatacatgcactttcggatggaggaacggcttattttttggatgaacggaataatggaatcaaatcgcacagcatttcagaattattatgcccttcaactccagg

SEQ ID NO: 207979 - DNA, 1602 bp, Zea Mays
attcatatcacttctgtcctgtgaaaatggcggatgaactacgctcaacgtctgtgggtcagaagttccatgggcagtccgtgctgttgagcagaatctcttcctattccgccatgaacaaccctgtattcaacaatgcctattctgcttacaatgtgccccagaggtcatatcatgggatgaatgcaactgctggactctcatctgtcatggcaccatctcctgtctttgcttctgccccaaaagagaaaggcttttctggatttatgatcgactttatgatgggtggagtttctgctgctgtctccaagacagctgcagctccgattgagcgtgtcaagcttttgattcagaaccaggatgaaatgctcaagactggcaggctttctgaaccgtacaagggtattggggactgctttggccggacaatcagagatgagggttttgtctcactgtggagaggaaacacagctaatgtcatccgttacttccccacacaggcattgaactttgcgttcaaggatcacttcaagcgcatgttcaactttaagaaggacaaggatgggtactggaagtggtttgctggaaatctggcttctggtggagctgctggtgcttgctctctattctttgtctattctctggactacgcccgtacgcgtttggccaatgatgccaaggctgcaaagaagggtggtgagaggcagttcaatggactcgttgatgtttaccgcaagacccttgccagtgatggtattcgtggcctctaccgtggattcaatatctcttgtgtggggatcattgtgtaccgaggtctttactttggtatgtatgattccctgaagccagtgcttcttgttggtaccctgcaggataacttcttggccagcttcttgctcgggtggggtataaccattggtgctggccttgcctcctaccccattgacactgttcgccgtcgcatgatgatgacatctggtgaggccgtcaagtacaacagctccttggacgctttcaagcagattgtcgcaaaggagggtaccaagtccctcttcaagggtgctggcgcaaacatcctccgcgctgtagctggtgctggtgtccttgctgggtacgacaagctccaggtggttgtcttcggcaagaagtacgggtctggtggtggctaaggatgtataatgatgatgacgacgaacaacaaacatgatgttttaggtgcctcctttaagtaaacatacgtacggaccctcgacaccattttaagttcgctctcgcagaggctggtgagtttgtagcgtggctgtgaccgcacctctttttatgtcagagattggaaataagtgacgttagaaattgctgtcttgctgcatcagttttttatactccgttttttgttttgcgcgtgcaaagggttgctcgaatgtatctatgtaggtttcggaatcacagcttactatgtttgatgaaggtgtatgttctgtgacctttggcagcatcacttcatctgtctagcgctacatgattttaaggatcatctggtattattacggtaacactcgatgtttgatgggggtagtgaatgctcatatgagtgggttcgag

SEQ ID NO: 207980 - DNA, 2686 bp, Zea Mays
ggggttccgagtcttggaggaatgtgcaactgagtgactgctgagctgtagataaatgtgaggagttgaggacattatttacaaacaaatggtatgtagtattccagatctgaagaactagacggagcatatacaacagaagtgatagtatatgaatagtaaggattttctccaacaaaaattcttccataatctctagatctatcacattaagttatgtcacatgttttgctgaaagcaatagtaacagactcatagtgtccttctggaagaatatgtcctgaagtaaactaatgtaaaagtcaacctttgtaattaattcgagcttagtagtggtcttgtagtgacagtactttagtactttattctcatgacttcttgtgcttactaagctttggcagtaagcttttaatttgcatcttccagcagaagctatatgttagagtcaatttgttctaactgtaaaccatcaaaataactcataactgtatctggtaatacacaaactaaaaattcttgttactctgtttgaaatatcgttatttactgtagttgtttctggtgttataatgtaataaaaaagacagatccagtatcagtggcttccacatgcgtgaagtttaggcgaaggaataaccgaggcaagctttgccctgtatcttgcagagagactacactgactgaatctaggacttctggattaatggaaaggcttctcaccactttgttagacttgtccttctctggtgttatactgtcatctgataaaataattcaatagcaagctaagcaacagtatacttcatacatggcagagctcaactttgacttctcagggcttaaaattgaatttatatgacatagcttgtttcatttcagatcatctgtttttcttaagtcatcgcttgtttgattgggttttcagttagcaacatcatagttagcagcccaagattaagaattgtagtatcttctgaagattaagacctcagtcattctccgaaagtatcaatacttggaagtatgaaactgtagatcatgaacacagtgtttcgtcaatgttttttgaacaacttatgttatgtgcttgatttttaaaggagtcagttgacaaccagtgttcatttcttttcagctttaatagtaaataactgatcattaggtgcaattttctattcaagcaaccatgttacatgatcagttggtatttatggcacatcaattttgttagttgcgatgctagcattctgaactgtgtcatcatggtttgcttttagaactattatacatagataataattgatttggagaacacttcaattcctgtaacaaacacgcaagttacgctagcatgtcatgtcatgtgcttattaattcaaaaacaataattgtgtgcatgaacaatagatctgtacggattgtttcaatcgtcaaatcatgaagcatccgctgccgtgatggaaatgcattgcattattcatttccgattctttgacatcatacattctatacgtgtatccttactgttttttattaaaagtggtgattatatagatcaaaatataagtagtgccgatatcatcatttgttgtcagctaacggatcattccttgtgccttctaaatatgattgaaattgtcaatagcaaaatgttgaatacctagctattgaaaatttgcattgtcaaggtttcacgcaacataaagatgtggtgctattttttttagttctgttcatttttcatagcaaagtttggagtacttttattttgttcccctttattcaccttaatctatgcagatttattatctatttatatgcagtaataactaaaaacgactgtgctgctatgttataaaatgattctttgtacaagttatttaatctatcatcacaatttatataaggtaatttatggtcatatagtcatgtctgtcagatacagtagtcatttcctcttttggcatatgatatttggttcttcaatagagaaccaatgatatgtatacttattaaccagtcatggctgccgctaggccgctagtactttgtttacttaggattgattttgaagaagattggcaatgcaagtaagcttccaacaggtctgagcatataaaatggacttgatgcatcactctttttagaaaggtaaaacctgagctcaccaaacactttctagctctgccttgagggaagaatagcaccattgaaaggacaatgcaaacaccaaacaaaaagggcgaagcgcagcaaaggggccggaaaagaagtcctcaacgattttctgttaattgaatgatatggcatcctagagtttgttgagaaacataggtgccattatatttgtctgaagtcccaaagctctcaatctattatgcctacaaggctagctgcatatgcatcattagccacttacacttcaattattcgtgactaagaattcaggaatctttttcttgattatatagacttctgtacaatctgtctcccttctcttatttacttggttgaaaagaccaataatggataagaatctattatttgagaggttaagatgtgatcacataagtccctgtaattgttgctccttgctaacgttcacttaatgagaaaaaatactaataacataaaatttctgccactttacttcactcattgctcattgaagtaaaaaatgttgtgg

SEQ ID NO: 207981 - DNA, 1052 bp, Zea Mays
aaaataagttgggatagactaaagttggaatccaactgaaactaagtcaaggtttttggaaggggtggagaagagatggatttcttacagcaacagggaattaaagttgaagttatcccaggaattacttctgcttcgggtattgcagcagagctaggcattccgttaacccatagaggtgttgctaccagtgtcagatttttaactggccactccagaaatggtgggacagatccactatatgtagctggaaatgcggctgatccagacactactttggttgtgtatatgggtttgtcaacacttccatcacttgctccaaagttaatgaagcacggcctgccaccagatacccctgctgttgcagtagagcgcgggactacaccccaacaacgaacggtgttcgcctcgttgaaggatcttgtggatgaagtcaagtcagccgatctagtttctccaactctaataattattgggaaagtggtatccttgtcacccttctgggttgagtcatctgaacatgatgcactgaaagttcagagctcgtatgcaaatgaggccagatgacaacagattttcttggtttttagtgactggacaatacttgagaaatgcaagatcccagatatgggagcacaggttcgacctggtgtacacagaaacatctcaggaagcatggatcctgaatggcggatggtagcttaagcttataacagacttggggcagaagcgcacttggactgatcatgcttgattctttggcctaatctacatgagattcacaatttttcgatttagttgagttcgacaatagttgtgtgcttctttgttactagtagccatgtacgtgcggcgcacgcgtgtttacgattctatgccctagcatagtaaggctattccaacgctgccacgttatgattttatgataatgggagtttcgtagcaccatgataatgagaaatagtgctacgaagctcttattatatgacaagtgccataaatcgtagcacttatgattttatgataatggggagcttcgtagagctctttct

SEQ ID NO: 207982 - DNA, 1104 bp, Zea Mays
gggcattctgcaataacgatttcaagaggagattcacgagctgctgctgagctttgcggaggccggtgccaatgttgtgcgcttgaaaggtggcgatcctctggtttttggaaggggtggagaagagatggatttcttacagcaacagggaattaaagttgaagttatcccaggaattacttctgcttcgggtattgcagcagagctaggcattccgttaacccatagaggtgttgctaccagtgtcagatttttaactggccactccagaaatggtgggacagatccactatatgtagctggaaatgcggctgatccagacactactttggttgtgtatatgggtttgtcaacacttccatcacttgctccaaagttaatgaagcacggcctgccaccagatacccctgctgttgcagtagagcgcgggactacaccccaacaacgaacggtgttcgcctcgttgaaggatcttgtggatgaagtcaagtcagccgatctagtttctccaactctaataattattgggaaagtggtatccttgtcacccttctgggttgagtcatctgaacatgatgcactgaaagttcagagctcgtatgcaaatgaggccagatgacaacagattttcttggtttttagtgactggacaatacttgagaaatgcaagatcccagatatgggagcacaggttcgacctggtgtacacagaaacatctcaggaagcatggatcctgaatggcggatggtagcttaagcttataacagacttggggcagaagcgcacttggactgatcatgcttgattctttggcctaatctacatgagattcacaatttttcgatttagttgagttcgacaatagttgtgtgcttctttgttactagtagccatgtacgtgcggcgcacgcgtgtttacgattctatgccctagcatagtaaggctattccaacgctgccacgttatgattttatgataatgggagtttcgtagcaccatgataatgagaaatagtgctacgaagctcttattatatgacaagtgccataaatcgtagcacttatgattttatgataatggggagcttcgtagagctctttct

SEQ ID NO: 207983 - DNA, 1804 bp, Zea Mays
tgacacttgtagaagaagcgggagatggtgcggatggagtgcgagcggtgggctcggaaggggatcaacataacgtaccagatccgggaggaccgcaaggggtacaaggccggcgcgctgcgggcggggatgaggcacgcgtacgtgcgcgactgcgagtacgtggccatcttcgacgccgacttccagcccgacccggactacctcaagcgcaccatcccctacctcgtccacaacccggagatcgccctcgtccaggcgcgctggagattcgtgaacgcggacgagtgcctgatgacgaggatgcaggagatgtccctggactaccacttcaccgtggagcaggaagtgagctcctccgtctgcgccttctttggattcaacggcaccgccggcgtgtggcgcatctccgcggtgaacgaggctggggggtggaaggaccggaccacggtggaggacatggatctggccatccgggccagcctcaagggctggaagttcgtctacctcggtgacgtccaggtgaaaagcgagctgccgagtaccttcaaggccttccggttccagcagcacaggtggtcgtgcggcccggcgaacctgttcaggaagatgctcatggagattgtgacgaacaagaaagtgacgatctggaagaagatccacgtcatctacaacttcttcctgatacgcaagatcatcgcgcacatcatcaccttctcgttctactgcgtcatcatcccggcaaccatcttcgtccccgaggtccgcatacccaagtggggctgcgtctacatcccctcggccatcaccctcctcaactctgtcggcactcccaggtctttccacctgcttttcttctgggtcgccttcgagaacgtcatgtccctgcacagaacaaaggccacgctgatcggcttgctggaggccggcagggccaacgagtgggtggtgacggcgaagctcggcagcgccatgaagatgaaatcggctaacaaagcggggctcaggaagcagttcatgaggatatgggagaggctgcacgtcacggagctcggggtggcagccttcctcttctcctgcggctggtacgatcttgcgtacgggagggaccatttcttcatctacctcttcttccagtctgtcgcgtttttcatcgtcggcgtcggctacgtcggcaccatcgtcccgcagtcgtagcggaagcgtgtccagatcatccgcttctctctggttttcgcattgtgtcttgggtaagtttcgtagtggatgaccggtttgaggtaaagatcatgcatgcggtcctctcttccatcgtctttttttggggaccggccgtgtgtgcttcgtcgaccttcggctgcatgcgcggtgttttactgtaaaataggaaagcagtgttgcaagatcgctgcaggagaatttagagattggtgccacatgggcaggagatgtcctggtgtttctgcttatatgctatatcaactatgtgatgtgttttaagggggggtgcaggatggctgcttccaatgtactagtaacatacagagaaacaggttcagacatgtgttcagaaaaaaaagagtcaactattcagccttcttgtagcatgctacattttacatgcgttctcctgttatgtgggcgtattaattagtatgaagcagtagcctctattgagtagagatgagtagatgacaatgggacctgattccccgcgaggaatttccctattaggagacaggtatgagactaatttagtccccaccggatctaagtagggaaatttaatctccgtcaggttcgc

SEQ ID NO: 207984 - DNA, 1558 bp, Zea Mays
cgcacggccctgacgccgtcggcgtcggtgaacgcggacgagtgcctgatgacgaggatgcaggagatgtccctggactaccacttcaccgtggagcaggaagtgagctcctccgtctgcgccttctttggattcaacggcaccgccggcgtgtggcgcatctccgcggtgaacgaggctggggggtggaaggaccggaccacggtggaggacatggatctggccatccgggccagcctcaagggctggaagttcgtctacctcggtgacgtccaggtgaaaagcgagctgccgagtaccttcaaggccttccggttccagcagcacaggtggtcgtgcggcccggcgaacctgttcaggaagatgctcatggagattgtgacgaacaagaaagtgacgatctggaagaagatccacgtcatctacaacttcttcctgatacgcaagatcatcgcgcacatcatcaccttctcgttctactgcgtcatcatcccggcaaccatcttcgtccccgaggtccgcatacccaagtggggctgcgtctacatcccctcggccatcaccctcctcaactctgtcggcactcccaggtctttccacctgcttttcttctgggtcgccttcgagaacgtcatgtccctgcacagaacaaaggccacgctgatcggcttgctggaggccggcagggccaacgagtgggtggtgacggcgaagctcggcagcgccatgaagatgaaatcggctaacaaagcggggctcaggaagcagttcatgaggatatgggagaggctgcacgtcacggagctcggggtggcagccttcctcttctcctgcggctggtacgatcttgcgtacgggagggaccatttcttcatctacctcttcttccagtctgtcgcgtttttcatcgtcggcgtcggctacgtcggcaccatcgtcccgcagtcgtagcggaagcgtgtccagatcatccgcttctctctggttttcgcattgtgtcttgggtaagtttcgtagtggatgaccggtttgaggtaaagatcatgcatgcggtcctctcttccatcgtctttttttggggaccggccgtgtgtgcttcgtcgaccttcggctgcatgcgcggtgttttactgtaaaataggaaagcagtgttgcaagatcgctgcaggagaatttagagattggtgccacatgggcaggagatgtcctggtgtttctgcttatatgctatatcaactatgtgatgtgttttaagggggggtgcaggatggctgcttccaatgtactagtaacatacagagaaacaggttcagacatgtgttcagaaaaaaaagagtcaactattcagccttcttgtagcatgctacattttacatgcgttctcctgttatgtgggcgtattaattagtatgaagcagtagcctctattgagtagagatgagtagatgacaatgggacctgattccccgcgaggaatttccctattaggagacaggtatgagactaatttagtccccaccggatctaagtagggaaatttaatctccgtcaggttcgc

SEQ ID NO: 207985 - DNA, 2527 bp, Zea Mays
cgaatgtgacctttggaacagtggaaataagacatttgtgttcttatctccaagacctaaagaaggcttcagctgaagaaatgcgtagaagtgtttacgcaaattatgctgcattcatcagaacatctaaggagatatcagaccttgaaggggaactgttgtcaattagaaatctgcttaatacacaggcagctttaattcacggtctatctgaaggagttcagatagattcattaacttcaggccctgaaggttctgcagaagacgacatatccaaggttgaagatcaggagccttcagaaattcagaaatggtctgcagattttcctgacatgcttgacgttttgctagctgagcgaagagtggatgaagcactggatgcactggatgaagcagaacgggttgctgttgatgcaaaacgaaaacagactctaactgcagctgaagtttcggctttgaaaagatctatctctgataatcggcagaggctggcagatcagcttgctgaagctgcttgtcagtcttctactcgtggtattgagcttcgagctgcagcttctgccctcaaaagacttggtgatggcccccgagctcacagcctcttactgagtgcacataatcaaaggcttcaatgcaatatgcaaactatacatccatctagtacttcatatggtggggcatacactgcggcacttgcccaacaggttttttcagtcatagctcaggcactaagtgactctgtggatgtttttggtaatgagtcatgttatgcatctgaactggtaacgtgggctaccaagcaggttatgtcctttgcgctcctggtgaagaggcatgtgttgtcctcttgtgcagctgctggaggcttgagggcagctgcagaatgtgttcagatatcacttggccattgttttttgctggaagctcgtggtctgtctgtttcctctgttctcctcaaacaattcaagcccagtttagtgcaagcattagatgctaacttgaggagaattgaggagagtactgctgcactagcagcagctgataactggatactcacatatcccctaactggtattcgtccattaactagatcgtctgctgctaatttggcacttcagccaaagctctctagtagcgcacaccgtttcaattcaatggttcaggatttctttgaggacattgcaccactacttagcttgcaattgggtggttcatcaatggatgggatcacacaaattttcaattcatatgtaaacttgcttataagtgctttacctggttctatggatgatgaagctaacttagatggtttaggtaataagattgttagaatggcagagactgaagagcagcagttagctttattagctaatgcatctttactagctgaggagttgctacctagagcagctatgaagttatcgtcaataaaccagtctatggatgatttgcataaaagaggaacagataaacaaaaccgtgtgcctgagcaacgtgagtggaaaagaaaactacaacgaatggtggacaggttgagagataatttttgcaggcagcatgctcttgaacttatatttacagatgaaggtgatactcatctcagtgcagaaatgtatatcagtatggacaatactgttgaagaaccagaatgggttccgtctccaattttccaggaactgtatgtaaagttaaacaggatggcaagcattgccgcagaaatgtttgttggtagagaaagatttgctactttactgatgatgcgcctcactgagacagtcatactgtggctctcagaagaccaggccttttgggaagagattgaacaaggagcaaagcctttaggccccctaggtctgcaacagttctacctggacatgcaatttgtcatcatatttgggcaaggtcgttttctctctagacatgtacatcaagtcattttggatgtcattgatagagcaatggctgcattttctgctactggaatgaaccctgatagtgtccttccgggcgacgattggttcatggatgtctcccaagaagttgtcagcatgatcagtggaaggggtagagttgctaatggtgacagggaagtaaacagcccaacggcctcagtttcagcgcactccatttcttcgttcaaatcccatggcagctcctagtttgcaagtcggtattctttgtaggcaggtcattgtataataatcattagtatattctttcaacctattcctccactcatttgttttttcttttctttttcagaacttttgtgatagtatagtatagatggataattgtttgacctaggaaaataaatcttttttagtaattttgttttagggtgtgtttggttgaggagtggttccattccattttttggttgttcggttttcaataaaaataatagcggagtggctcttgtatctttatatgaaaatttactataaatagttggaacgctatcgctccataaaaacgaccggatgtgagcggtcgctctcgctccataaaaacgaccggatgtaag

SEQ ID NO: 207986 - DNA, 2699 bp, Zea Mays
aaatcattcgtctccctccccttcgttggttcgtttgattgattggggagcaacaactcccaccacccgcaaccgcagcaatctcccctcgccaactccgtctcggccgcaacccattcgccattgccgaggaggaggaagcccggtcgtctattctggatctcggatggcgtcggccaagtcgtcgcggtcgcggcccgcgggccactcgggggtgttcccggtgggcagcgccgccgcggtggggagcgggggcggcggtggcgacggcggggtgcagctcgccgacaagctcaagatcttcaaaaccgacaacttcgatcccgacgcctacgtgcagtccaagtgccagaccatgaacgagaaggaaataagacatttgtgttcttatctccaagacctaaagaaggcttcagctgaagaaatgcgtagaagtgtttacgcaaattatgctgcattcatcagaacatctaaggagatatcagaccttgaaggggaactgttgtcaattagaaatctgcttaatacacaggcagctttaattcacggtctatctgaaggagttcagatagattcattaacttcaggccctgaaggttctgcagaagacgacatatccaagctgagcgaagagtggatgaagcactggatgcactggatgaagcagaacgggttgctgttgatgcaaaacgaaaacagactctaactgcagctgaagtttcggctttgaaaagatctatctctgataatcggcagaggctggcagatcagcttgctgaagctgcttgtcagtcttctactcgtggtattgagcttcgagctgcagcttctgccctcaaaagacttggtgatggcccccgagctcacagcctcttactgagtgcacataatcaaaggcttcaatgcaatatgcaaactatacatccatctagtacttcatatggtggggcatacactgcggcacttgcccaacaggttatgtcctttgcgctcctggtgaagaggcatgtgttgtcctcttgtgcagctgctggaggcttgagggcagctgcagaatgtgttcagatatcacttggccattgttttttgctggaagctcgtggtctgtctgtttcctctgttctcctcaaacaattcaagcccagtttagtgcaagcattagatgctaacttgaggagaattgaggagagtactgctgcactagcagcagctgataactggatactcacatatcccctaactggtattcgtccattaactagatcgtctgctgctaatttggcacttcagccaaagctctctagtagcgcacaccgtttcaattcaatggttcaggatttctttgaggacattgcaccactacttagcttgcaattgggtggttcatcaatggatgggatcacacaaattttcaattcatatgtaaacttgcttataagtgctttacctggttctatggatgatgaagctaacttagatggtttaggtaataagattgttagaatggcagagactgaagagcagcagttagctttattagctaatgcatctttactagctgaggagttgctacctagagcagctatgaagttatcgtcaataaaccagtctatggatgatttgcataaaagaggaacagataaacaaaaccgtgtgcctgagcaacgtgagtggaaaagaaaactacaacgaatggtggacaggttgagagataatttttgcaggcagcatgctcttgaacttatatttacagatgaaggtgatactcatctcagtgcagaaatgtatatcagtatggacaatactgttgaagaaccagaatgggttccgtctccaattttccaggaactgtatgtaaagttaaacaggatggcaagcattgccgcagaaatgtttgttggtagagaaagatttgctactttactgatgatgcgcctcactgagacagtcatactgtggctctcagaagaccaggccttttgggaagagattgaacaaggagcaaagcctttaggccccctaggtctgcaacagttctacctggacatgcaatttgtcatcatatttgggcaaggtcgttttctctctagacatgtacatcaagtcattttggatgtcattgatagagcaatggctgcattttctgctactggaatgaaccctgatagtgtccttccgggcgacgattggttcatggatgtctcccaagaagttgtcagcatgatcagtggaaggggtagagttgctaatggtgacagggaagtaaacagcccaacggcctcagtttcagcgcactccatttcttcgttcaaatcccatggcagctcctagtttgcaagtcggtattctttgtaggcaggtcattgtataataatcattagtatattctttcaacctattcctccactcatttgttttttcttttctttttcagaacttttgtgatagtatagtatagatggataattgtttgacctaggaaaataaatcttttttagtaattttgttttagggtgtgtttggttgaggagtggttccattccattttttggttgttcggttttcaataaaaataatagcggagtggctcttgtatctttatatgaaaatttactataaatagttggaacgctatcgctccataaaaacgaccggatgtgagcggtcgctctcgctccataaaaacgaccggatgtaag

SEQ ID NO: 207987 - DNA, 1378 bp, Zea Mays
atcaatggtgggctgcaaaacaatttccgcaagcaggttcgcaaattgcttccatcttcttagcaactggactggacgggccggcgggctacgtacggcccaaaagcaaagctccctctctgctactccgaccgacatcctcagaaagaccagttagactagaccaccgccgctccacgcttccaccctctgctgcgggacgagctcgagaggttcgccggcgctcctgctcggccgacggccgtcgccgcgcgataataggccaggagacgcggagagatgctgtcgtccgccgccttctcctcctcaccgctgctgcgcggagccccgctgcggacccggcacctgctcctggcccctcccgcgcgcgcgcacggcggcgcggcgagccgcgcccgcggtggccttccgaggttccacgccccgtctctcccttcgtccaagggtgaggtgattcgcatccaaggagacgagttctggcacatgacgcgggttttgcgccttggcgttaacgacaaggttgaactattcaatggggtgggcagtttagctgaaggattcatacataaagttgacaaaggtggctcaggtgttgagttattagaggatgctaggatcatagctcctcaaggcatccaatggcatgtctttgctgcgtttgggacactgaaaggcggacgtgcggattggcttatagagaaatgaacttggagcttctagtgttacccctctcctgacagaacgatgtcacacaatagcggaaaatcgggtggataggttgcaacgccttgtgctggctgcagttaaacaatgccagaggatacatgaaatgtcgctgaaatccccaattcagataaggcaccttctacctgttgtatcacagtcaaagcttgctttcttagcatcagcggaagcgcctcctctttttagtgttctgccagaatccagcattgaacaaagtgggcttctgattattgggcctgaaggagacttcacagcagaggaggtacattcactgaaatcagcaggtgcggcccctgttggtcttggtccatgcaggctacgggttgagacagccacgatatccctcctatctgctctcatgctctggtcagatgctaaacaccggtaaagacagcaatgcaggtaatctaaggacagttctctcagtcatctttatggtatactagtcctctttcaggtgattagtaccatgaaataccattcaggatctagttggattcagtaaccaaaaccatgggtaattattccattggatctcagaacgcatttcagtaagagcttggtcttgggcttgaccagcatggacgatgagcatctcaatacacgatgttttgtttgagttatgttatcttag

SEQ ID NO: 207988 - DNA, 1342 bp, Zea Mays
gccccagcttatacaccagcagtgtgaaaaaataacattgaaagataaatccttgggggattgcaagctttcgctgtgcggttgcggtcgctccccttcccgactccggccagaagcagcgacggtgccggcagccggttactccactcggcggcggcccatcctttcatgttttctcctccagtcctacaaatacaggacacaacacgcttgctcttgtgatactctattaaggggtccaagaccgagatatccccgtgtatggaaaactcgtaagaaaattgggactatttccaagtcacagaagcttgttgaatgtattaaaggtctgtctaatgtaaaggaggaagtttatggagcgcttgactcttttgttgcatgggaactggagtttcccttgatagtagtaaagaaggcactgaagaaacttgaagacgaaaaggaatggaaacgaataattcaggtcattaaatggatgttcaacaaaggtcaggggaagacaatggggagctattacaccttgttgaatgctttgatcgaggacggacggattgaggaagcagaagagttatttagaatggtattctcacgatatatggagggtttgcctcgtacatttttcatgagaattatttctttctattacagtgctggagagcatgataagatgttcgaggaaagctttgctcaaagaaacattagttggggataattatccaagcattcttatgatgtcttacacctaaattttccagatttttgctgatatggaggaactaggcgtaagaccagatggttctattatcaggatgctaggtgatgtatttcaaaagatagagatgatggacaaatacgaaaagttaaaaaagaaatacccaccaccgaaatgggaatatcgatacatcaaaggcaagcgcattagaattagagtttaccctgatagtaaaactgaagagacggcaaaaggagaccatgacaatgatgaactcggagaggtagaaagtatacagcttgataatgaattggaagaagaagcaagctcaggcctcgacaggagtgtattggacgatgcaacttgtggagaccttgaatatatataattcagagcttccatttggttttttttaatgcctgcttaatcaaagcggcctggagcaaattgaaccgatcccacggcggtaacaccacaacaacaacgagcgccatcctcttcgcgtctgtgagctcaccgcggcggcgtgtacgcggatgcgaacgacagtgcgtacggggacgcatctgggcgggtagacactcgttgcagtcttgcggcttgctttttctccaacgatttcacgcacat

SEQ ID NO: 207989 - DNA, 1608 bp, Zea Mays
ctcctcaaatattctcgcccgcccggcctcccctttcctccatcctcatcaaccatttcattccttcctgacttcctcctcccgcacgcagcgcagcttgcaacccgcaacgaaccaaggccgcgccgcgcgcgccctgccggccgtcagagggaaacccagctctaactgaagtgccggctacatatactgctgtgctagctagctagctagctactcttctggtcctgagcgcacgtacgccatggctcaggaggacgtccacctggacgatgccggcctggcgctgggcctgtccctcggcggcggcggcggcggcggagcctccgccgcggcgcgccacggtaccagcagaagccggctgagcacggaggcgccgcgcacgctggagccgccgtcgctgacgctgagcatgccggacgaagcgacggcgaccgcgaccggcgggtccggcggcagcggcggggccgcgcgcagcgtgtcgtcgcggtcagtggagggcgtgaagcgggagcgcgtggacgacgccgagggcgagcgggcgtcgtcgacggccgccgcggcgcgggccggcgccggcgccgaggacgacgacgacgggagcacgcggaagaagctgaggctgaccaaggagcagtccaagctcctggaggaccgcttcaaggaccacagcaccctcaacccgaagcagaaaatcgcgttggcgaagcaactgaagctgaggccacggcaggtggaggtgtggttccaaaacaggcgagcaaggacgaagctgaagcagacggaggtggactgcgagctgctgaagcgctgctgcgagtcgctgagcgaggagaaccggcggctgcagcgggagctacaggagctccgcgcgctcaagcagctcgccggcccgcacccacatcaggcgccgtcgtcgtcgcccgccgccgcgacgcagggcgtgccggtgccggtgccggtgccgccgccgttgtacgtgcagatgcagatgcagctgccgatgccggccgccacgctgagcctctgcccgtcctgcgagcgcctgcgcggcgggcccaaggccgagcccgacaggccccaggcagccacccaccgcttcttcaaccccttcacccactccgccgcctgctgaatgatgattttgcttgcgcgcgcctgcgctgcagctgcgcaccagcacgcgcatctaccttggcgtacgtgcgcgtgcatgatgcatgagcaagcaacacgcagcggcggcagcgcgcgaacagatagcggcaccgcccaccaccgtaccgcagatactagctaccacgtacgtagcaaccatgggatttcttcaggtccagcagcacattcagttgaaaaaaccagcaatactggcgcgatggcacacaacatatgtgatttcttcatgttcagcccaaagaatagcatttctgaaacaattataagctgctcctagacacagtacaaaactatttaaaacttggcaacttgctgcggtgtcatatgtaaaagaagggttgtctaggaaggaaaatataggttggcaatggcaagagtctgctgctccaacaactccctgcttctatggacctccgtgggagccttactttg

SEQ ID NO: 207990 - DNA, 743 bp, Zea Mays
tccgaattgtctaaggcctccagaattataatagagtaatatattttggcatgttggtggctagtggtggatcagacattccggtgtggttcctgtacctttttgtgataacaaatttgtcctttgcagcggtacaaacacataaatggtatcttcagaaatttgaagattaccctcgttctcgctacgcaatcgttccatttgtatgctagatgtccccataaatgccaacagcatttgttgtctgttttcatctgcttgcaccagtcaggcatgcaacagatattgatgtaaatgtgactatgcaatgttgaacttaagtagttccgatcattctgaatgtgcttagaaggttataaggttatgtttgtgtatgtagattataacacacagatatttgatgtaaagtagtattaattaatactttttagcattaatgaaaatgaagtccttcagaaccagaggcttatcaaggactagtgaccatctaactgatagtgaaacaaatggtgttattgttcatcatacttccattgtgtcagtgtttcatgtcatcattgatgcttgtttgatcttaggtaagttatgcctggtactcagatctctgctaagcactgtgttgggtcttaaatttcaatcggtgtgtttggatctttgattatgtcaatcccaaatttctaattctgaggttttctcaggtttctgctgtttacagcagactcaaacccttactgggaatggag

SEQ ID NO: 207991 - DNA, 1736 bp, Zea Mays
cactcgactaatcaggttaactccctgccgtcccgcttccagaaagaaccgatctaaaacctccccgccacgcgaagcaaaatcgcgtgccttcccccgacagattcacttccctccttcccactccaagcaccaagctaccaacccgaactgcctcacggccgcgccggtcactgcctccgccgcgccgcgtcgccactcgccaccccgcgcgcactagtctttgccatggcgctgcgtggcagcatccaaatggatacgggaagcgggcccgcgctccagtacctcctgtgcctcgcctgggtcgcggcgaccctccccatcgccgccgccgcgctgccgatccccgcggccgctggcggcaggttcatccacggcctgctctgcgccttctcgtcccgcgggaagacagtcaggccctcgtcctcgtcctcgtccaaggcgaggttcaccgtttcacaaaaatgcttcttgcatttttacgtggtgggtgcggttgtgacgactagcttgctacttgcaatatggttctatgcatacatgaaaatgacacctttgatgccagaacaatcgagttactccacaattgctagtcatcttgttggtggttcaaattcattccatttggcaaatttctggtcatcacgccccatggaacacaagtatcgtgtctggcgtactgtatttgtacttatattgatggaaattcaggtcctgagacgcctatatgagactgaacatgtcttccactacagtccttcagctcaaatgcacatcataggatacctaacggctactatgtggccgcacctttatcacttgctagttcttgtcttcctgaagcaatacagtatcttcgatatcaaatagctgagttcatagtgaagggtagagcaagaatgccagatctatcaattgacccatcacatctcttgaagcctcttctaaagttggggtggtgccagtggattggtgctgttattttcatctggggctcactccatcagatccgctgccatgcaattcttgtaatatattttggcatgttggtggctagtggtggatcagacattccggtgtggttcctgtacctttttgtgataacaaatttgtcctttgcagcggtacaaacacataaatggtatcttcagaaatttgaagattaccctcgttctcgctacgcaatcgttccatttgtatgctagatgtccccataaatgccaacagcatttgttgtctgttttcatctgcttgcaccagtcaggcatgcaacagatattgatgtaaatgtgactatgcaatgttgaacttaagtagttccgatcattctgaatgtgcttagaaggttataaggttatgtttgtgtatgtagattataacacacagatatttgatgtaaagtagtattaattaatactttttagcattaatgaaaatgaagtccttcagaaccagaggcttatcaaggactagtgaccatctaactgatagtgaaacaaatggtgttattgttcatcatacttccattgtgtcagtgtttcatgtcatcattgatgcttgtttgatcttaggtaagttatgcctggtactcagatctctgctaagcactgtgttgggtcttaaatttcaatcggtgtgtttggatctttgattatgtcaatcccaaatttctaattctgaggttttctcaggtttctgctgtttacagcagactcaaacccttactgggaatggag

SEQ ID NO: 207992 - DNA, 1943 bp, Zea Mays
ggcgggcccacgcggcagcgagcgacagagacgagaccggctacctcatccacccccaccaggtgcactgcactgcacacctcgctcgccgccggtcggtcgtctccttctctctctctctccgtccgactatacaatacaattccactgcgtggcagggtccagctccttatcctgtccccctcgcccctttcccttccccgcccgtctcctccccctccctgcctctccgcccacccacccactgacccacccacccatctcgctcgcgcgcgccgggatttctcgccttcgctcaatcgctccgcggctctcctcctgcgcgccggccggtcgatccgggcgccggggcccgaggtgcgccgcggcggaggctctgccgggccggattcgctgatcggtcggttggtaggttcggttgttaggtaggtaggtaggttggttggtcgcgggcatgtccacggcggtggcgcggccggcgcacggcggcttccggcagtcggggagcgggaagccggatccggaggacgcggacaggatgagggacgccaacgggtacttggtccaagaacgtgagaaggaagaggaagagcgtggcggtgaggcggcggcggcggggagggaggaagaggcgctgtcggaggcctcgtcgatcggcgcggcgtcgtccgacagctcctccatcggcgagaactccgcgtccgacaaggagggcagcgacggggaggaggaggaggtggaaggcaaggcgcaggggctcggcatgatggggctggccacgctccagtccttggacgatgccctgcccaccaagcggggcctgtccaacttctacgcgggcaagtccaagtcgttcacgagcctggcggaggcggctgcgacggcggccgccaaggagatcgcgaagccggagaacccgttcaacaagcggcggcgcgtgctgcgggcgtggtcgcggcggcgggcgtcgtgcagcgcgctggccaccgcgtacctgccgccgctgctggccccggaccacgcggtggtggaggaggacgacgaggagggcgcggacgacgaggacgaggacgagggccagcacgggcgcggcgggctcaggggcaggaggccgcccacgttcccgtccccgcggctgagcgcgcacgccaccgccggccagatggcgagggccgggtcgtttcggtccccgaggtccttctccatgacggacctccacagcgcggagtacgagtaggcagcgacagacagcagccacgattagagccagagcacctctggtctgtctccttcctcctctaggcgccagaagagcaccaggattcaggtttcagggcttcgcgcaaagccagtggcagcatgccagcatgggatggatcatggatgccgaaaagaagaaagcgaggaggaatgggatgggtcatgcatgcatgccgaaaataatgttcaggagatgctggcgatgttgtgtttgcgttgctcctcttgcctctgcacctgctgctggtgactcgcgggagcagacaaacggtgggtgatgatgagtcctacgccgccggcctaatcccatcgaagacaaccctaatctaagcatgacattatcgacagcggcagggttcgtggagaaggcagcgacaaatccaagcatacagcacgagaagaaaaaaaaaagatcttttctcacaagtagggctgacaatgggctataaattttgcactataagatttaagtatcgaagcgggttaggatcagactctatttatagtcatttttgaactataatttatttaaggctttgacattttacgaagaactatttggatcacgatccattaccactcctactcacaaggcagccgtagcatagcagtggccagtgggtaggtctggtggcacagtccatggttgacttgtttgcaatgaaaggttgcttggtttgtac

SEQ ID NO: 207993 - DNA, 3874 bp, Zea Mays
ccaaaaattcgccgattttggtctgggaaagtattccctggtgccgactaggcgacgggaccaccaaaaaccactctcttgtgcgcgagcatcgttaaaattggccacgccgccgccgccggccggcgaggagccggtactgtctgcttgctcttcttttcaccgaaccaaaacgcccgccggaaagggtcaaaggggaaacagagatctcggtttgcagtgatgaagcttcgctgatgagctggcgcccgtccactcgcaacgacgctggacaaaagactagccgtcccgtcccgtcacggcccggcgacctggcaaggagaactgcagcgacagcgacagcgacctctggacaatcggctgtgacggtctttctcgtttgttttatagataggaaagaaataaagataagggttaaagctttctcgtagcctcctcagaacatacgggcgattgtcttttcgccggtgagccattaattccgtcgagctgatttcttcttgctggttttgccggttttatttttttcttttattggtaattcttggccgtggcgactgacgattccttttggcgcttgtaatagcacaagcatagctaaagtcgtcccgtttcctcctggtttcaatctgtttggaacttttgttagttccggtccatagggggaatcgtactatcctgtggtcaaaattgtcgcttctttcttttgtcgctctctctatacacaccaaaaagaaggaaaaaaaaccacgattttttctcccaactttgagtaattaccgagtgtttcttcaagtcggagctcggctctgtgcttagccgggaccctatacttggggttttggcgggtccatcggaatggtcagcgggaatctgctctaccggaggaagcgctcgtggcgtgccgatgagttcgtgagccggagcacgctgcaattgctcgactttgatgatggctcaccaccagagcatgcatggagaaggaaactaagtagtcatgctaatagattgaaggagttcaatgtcacattcagagaagcaattagaatgatgaaacttggtctccgactttggtcatacattcgggaagaagcttctcacggaaggaaagcaccaatcgatccattcactagagagggcaacaagccctcagcctcgcaaggagtacctcttggtgggatggggagtggtagtatttcaagaggctttaggggagaattcaagcattggcagataactcctggttcttgtgaaatgtcacctgtgatggccaatcaattttcgatctttgtcactcggggaggaaccaagaaatacgcttcagttttgtcgcctggtcaacttgatggtttgaagaaatctactgatgatggtatatcatcctgggactggaaattaaagggtgatcgttcaacgtatcatgctttgtttcctcgagcatggactgtttatgatggcgagccagatcctgaactgaaagtatcctgccgtcaaatatctccatttattccccatgattaccaggagagcagccttcctacctctgtttttgtatacactctagtgaatactggaaaggaaagagcaaaagttagcctattgatgacttgggcgaattctataggaggactttcacatcattctggggatcatgtaaatgagccattcgtagggaaaaatggagtttctggtgttcttctacatcacaagacagccaataataatcctcctgtaacatttgcaattgcggcatgtgaaaatcaaaatgtaaatgtcacagtattgcctgtttttgggctttctggagaaagttctgttactgctaggggaatgtggggcacaatggttcaggatggttcctttgatcaagataatctcaatactggtcctagcatgccttctttgctgggcgatacagtttgtgcagcagtttctgcttccacctgggttgaaccacatggaagatgtgcagttgtatttgcattggcttggtcttctcctcaggttaaatttaaaaaggggagtacatactacaggagatatacaaagttttatggaacttctccaagatcagcagtaaatttggtagaggacgctttgatgaagtataaacattgggaagaagagattgataagtggcagaccccggttctccaagatgagaggcttccagaatggtacaagattacactctttaatgagctgtacttcctagttgctggtggaaccgtttggattgatagtggatctttggtgtctgatgctgataacaagtcgaatccagaggaaagtaatttgtcacatgagatcgatgacaaagaaaatgttgggaaatttttgtaccttgaaggaatagaatacttcatgtggtgcacctatgatagctgttttgcgggaagataacagaagagtcagatttcttgctgatggtacctggggtattcgtaaagtaatcggtgctgtcgcccatgatcttggagcacatgatccttggcatgaattgaatgcttacaacatacatgacacaagtagatggaaagatcttaatcccaagttcgttcttcagatttacagggattttgctgcaacaggtgacaagtcatttggcaaggatgtctggcctgcagtctgtactgctatggaatacatggaacaattcgatcatgatggtgatggtatgattgaaaatgatggatttcctgatcaaacttacgatgcttggacagttcaaggagtaagtgcatattgtggttgcctctggcttgctgcccttcaagctgcggcagcactggccggaagccttggacatgatgactatgctgagaggtgcatgacaagatttgtgaaagctaaaactgtatttgaagccaggttatggaatggttcacacttcaattatgacagtggtacaagttatagtagccgttccatccaggcagatcagctggctggacaatggtatactgcatcgtcaggtttgcctcctctatttgatgaggataggataaaatgcacgcttcagaaaatatttgactacaatgtgatgagggtgaaaggaggacgtatgggagccgtgaatggtatgcatccaaatgggaaggtagatgaaacctgtatgcagtcaagagaaatctggacaggagtaacatatagtttagcagcaacgatgctgctccatggaatggagcatcaggccttcactactgcagaaggcatttatactgcaggatggtctgaagagggctatgggtactggttccaaactccagaagcatggacaattgatggccattacaggtcactaatttatatgcgcccccttgcaatctgggcaatgcagtgggccttgtcgcctccaaggtcgatactggaggcgccgaaggtaaatacaatggacagagctcacatttctccaggcaccttccaatttctccaggatagcgttagaaagatgacaccaaaaaacggttgttttggaaacactgtaattaacttggattgctgatgtgacggtagcacttgtatctcgcactgtccaatgtatgtttacggagcacctcatttagaaaatgttgagtgtgaaacgggtgctatattctgttcagcctttgcagttatgtggtgtacctctctgatgtaaattgcatctcacagtgggccggactttgtaaattgttgtacagaaaacgtacatatgataatgccgtgttaccctgatattcatgacaccgtttaccacaaaaatctgtacagtttattgttcatatagtattttagaacgagtacttgtcagattggcgtaagacaatgtcctcttagcgctgtactcttgatggtatatatagatgtacatgtgaatgatttatgacttgtt

SEQ ID NO: 207994 - DNA, 3854 bp, Zea Mays
ccctggtgccgactaggcgacgggaccaccaaaaaccactctcttgtgcgcgagcatcgttaaaattggccacgccgccgccgccggccggcgaggagccggtactgtctgcttgctcttcttttcaccgaaccaaaacgcccgccggaaagggtcaaaggggaaacagagatctcggtttgcagtgatgaagcttcgctgatgagctggcgcccgtccactcgcaacgacgctggacaaaagactagccgtcccgtcccgtcacggcccggcgacctggcaaggagaactgcagcgacagcgacagcgacctctggacaatcggctgtgacggtctttctcgtttgttttatagataggaaagaaataaagataagggttaaagctttctcgtagcctcctcagaacatacgggcgattgtcttttcgccggtgagccattaattccgtcgagctgatttcttcttgctggttttgccggttttatttttttcttttattggtaattcttggccgtggcgactgacgattccttttggcgcttgtaatagcacaagcatagctaaagtcgtcccgtttcctcctggtttcaatctgtttggaacttttgttagttccggtccatagggggaatcgtactatcctgtggtcaaaattgtcgcttctttcttttgtcgctctctctatacacaccaaaaagaaggaaaaaaaaccacgattttttctcccaactttgagtaattaccgagtgtttcttcaagtcggagctcggctctgtgcttagccgggaccctatacttggggttttggcgggtccatcggaatggtcagcgggaatctgctctaccggaggaagcgctcgtggcgtgccgatgagttcgtgagccggagcacgctgcaattgctcgactttgatgatggctcaccaccagagcatgcatggagaaggaaactaagtagtcatgctaatagattgaaggagttcaatgtcacattcagagaagcaattagaatgatgaaacttggtctccgactttggtcatacattcgggaagaagcttctcacggaaggaaagcaccaatcgatccattcactagagagggcaacaagccctcagcctcgcaaggagtacctcttggtgggatggggagtggtagtatttcaagaggctttaggggagaattcaagcattggcagataactcctggttcttgtgaaatgtcacctgtgatggccaatcaattttcgatctttgtcactcggggaggaaccaagaaatacgcttcagttttgtcgcctggtcaacttgatggtttgaagaaatctactgatgatggtatatcatcctgggactggaaattaaagggtgatcgttcaacgtatcatgctttgtttcctcgagcatggactgtttatgatggcgagccagatcctgaactgaaagtatcctgccgtcaaatatctccatttattccccatgattaccaggagagcagccttcctacctctgtttttgtatacactctagtgaatactggaaaggaaagagcaaaagttagcctattgatgacttgggcgaattctataggaggactttcacatcattctggggatcatgtaaatgagccattcgtagggaaaaatggagtttctggtgttcttctacatcacaagacagccaataataatcctcctgtaacatttgcaattgcggcatgtgaaaatcaaaatgtaaatgtcacagtattgcctgtttttgggctttctggagaaagttctgttactgctaggggaatgtggggcacaatggttcaggatggttcctttgatcaagataatctcaatactggtcctagcatgccttctttgctgggcgatacagtttgtgcagcagtttctgcttccacctgggttgaaccacatggaagatgtgcagttgtatttgcattggcttggtcttctcctcaggttaaatttaaaaaggggagtacatactacaggagatatacaaagttttatggaacttctccaagatcagcagtaaatttggtagaggacgctttgatgaagtataaacattgggaagaagagattgataagtggcagaccccggttctccaagatgagaggcttccagaatgatagtggatctttggtgtctgatgctgataacaagtcgaatccagaggaaagtaatttgtcacatgagatcgatgacaaagaaaatgttgggaaatttttgtaccttgaaggaatagaatacttcatgtggtgcacctatgatgtacacttctatgcctcctttgctcttttggatctgtttcctaagattgaattgagcattcaacgtgattttgctagagctgttttgcgggaagataacagaagagtcagatttcttgctgatggtacctggggtattcgtaaagtaatcggtgctgtcgcccatgatcttggagcacatgatccttggcatgaattgaatgcttacaacatacatgacacaagtagatggaaagatcttaatcccaagttcgttcttcagatttacagggattttgctgcaacaggtgacaagtcatttggcaaggatgtctggcctgcagtctgtactgctatggaatacatggaacaattcgatcatgatggtgatggtatgattgaaaatgatggatttcctgatcaaacttacgatgcttggacagttcaaggagtaagtgcatattgtggttgcctctggcttgctgcccttcaagctgcggcagcactggccggaagccttggacatgatgactatgctgagaggtgcatgacaagatttgtgaaagctaaaactgtatttgaagccaggttatggaatggttcacacttcaattatgacagtggtacaagttatagtagccgttccatccaggcagatcagctggctggacaatggtatactgcatcgtcaggtttgcctcctctatttgatgaggataggataaaatgcacgcttcagaaaatatttgactacaatgtgatgagggtgaaaggaggacgtatgggagccgtgaatggtatgcatccaaatgggaaggtagatgaaacctgtatgcagtcaagagaaatctggacaggagtaacatatagtttagcagcaacgatgctgctccatggaatggagcatcaggccttcactactgcagaaggcatttatactgcaggatggtctgaagagggctatgggtactggttccaaactccagaagcatggacaattgatggccattacaggtcactaatttatatgcgcccccttgcaatctgggcaatgcagtgggccttgtcgcctccaaggtcgatactggaggcgccgaaggtaaatacaatggacagagctcacatttctccaggcaccttccaatttctccaggatagcgttagaaagatgacaccaaaaaacggttgttttggaaacactgtaattaacttggattgctgatgtgacggtagcacttgtatctcgcactgtccaatgtatgtttacggagcacctcatttagaaaatgttgagtgtgaaacgggtgctatattctgttcagcctttgcagttatgtggtgtacctctctgatgtaaattgcatctcacagtgggccggactttgtaaattgttgtacagaaaacgtacatatgataatgccgtgttaccctgatattcatgacaccgtttaccacaaaaatctgtacagtttattgttcatatagtattttagaacgagtacttgtcagattggcgtaagacaatgtcctcttagcgctgtactcttgatggtatatatagatgtacatgtgaatgatttatgacttgtt

SEQ ID NO: 207995 - DNA, 828 bp, Zea Mays
aggctcgccacgtcctctgttccgtccagatcgtctggctcggactcggtaatcacgattccagaggaggcagcggcggcgggactctagaaccttccgagaatccgagttccttctgcgtcccttcacccttctcgttgcgctcaccacaggcaattcgaccgttcacagagaattgaatcatggaaggagggggtagcaacacgcccttctaccgcggcaacagcaccgcactcgccaccaacccttctgctgctgctgctgctgctgctgcgaatggggcacagaaaggggacagggaggctgccatcgatgccgagatagtgagggttaacgacctaccagctcatagttcctacgccatacaccgcatgaaggtgctaaacaaacttcgtcatctgctgtccatcaagaggactacatctcaagatgaggagctcgaacttctcttcgcaagcctttcaatctaaagtgtatccttgataagccagtattttaaccctgctagcatgcttccttatagtttcgaagtgcaaggagatcccgttacttgtctgtatcataactcataaattgttcgaaactttgattgaggatgtggcgtgctctgctcctctaaacctggacgatgtggaatggtgggaaaaccccccctactattgtgttgtttgtgaatgtaccgttgtaaccacaagtgaacttgctgtctcggacaagaattattagctaaataaccatggtactgtttgttgacttcttggatttgatactctttttttaattatgaaagcgctggatctaatatctggtacaagaacaggtatgctc

SEQ ID NO: 207996 - DNA, 627 bp, Zea Mays
atggcgtgtgggtggcttcatcctgtccctgcaggggccgccacggtcgccgccctgtggccgtgcttcctttccccggttcgtcagagcttcaccaaggaggctaccgtactgttatttcctatgtctgaattctcaacttctgcctctgatgagcagctaaaccaattccaacgttggaagctacctttgaacgctgccaagtcgcagagggagtcatggaaccttgctgatcgctcaagttcaggatcttctgaaggagttgctgctgctagcagacccgcagacgctcccactgctcagagtgctctgcccatgacacgtagcgtggatgcggtcccaggtgcgcctattgttatttctggatactggactggccccggtgtagatgatggctgtggtagtgttgaggccgtgctccagaggattgcataatgttttcgcttgcggttaactagggcaattgtaacctgtgtcaaagcaacaactggaccatataaggttatatttttctttattcagagctctattttcccttggggttagttcttttcttcgccattacgtcgctattttcagtgcacccaacatcaacagcatacaggtgaatcattctatttatcttta

SEQ ID NO: 207997 - DNA, 1088 bp, Zea Mays
ggagatccgacagcaaccaagaagcttctctcttcctcgccagtgcccaccccgccagccggcacgaagcgcggcgttaatatctcccctcccttccctcttctggtctccgccccgctccttgcctccgatccccaattcctccttcggatctcgcattcagcgcagcgcaggtgtgaaggaagggggacgcggaggaagatggggctcgcgttcgggaagctcttcagccggctcttcgccaagaaggagatgcggatcctcatggtcggcctcgacgccgccggtaaaaccaccatcctctacaagctcaagctcggcgagatcgtcaccaccatccccaccatcggtttcaatgttgaaactgttgagtacaagaacattagcttcactgtctgggatgtcgggggtcaggacaagatcagacctctttggaggcattacttccagaacacccagggtcttatctttgttgtggacagcaatgaccgtgaccgtgttgttgaagccagagatgagctccacaggatgctgaacgaggatgagctacgtgatgctgtgctgcttgtttttgccaacaagcaagatcttcccaatgcctggactggctgtccagcaacattgcgagcaaggcttgaggcctaccttgaatgtcaaccgcgaactgactaggagctccggatgtatcatggaaactcaggacagaatcgcagttgcaacctgttagatgtcttctaccggcactatatatattttttgtttgatgtgtaatgatgttactgttcaacgtttattaccctactatactgttggatgttctttggacctgtttcatttcgcacaaggattggacttccaatatcatgctacattttacattcgtggtaaatacctgattagaaagttagccgaggagatccaatgtcatggtacatggaaatccagattaggttaaacattcttaagtatacagaagactggtaccctagccaccactttttttagcagttgtgtttttttcatttgtctagaattctcaatcctggtgaagcggtgtcattttgatttgattgtaagctttagttgaa

SEQ ID NO: 207998 - DNA, 1177 bp, Zea Mays
cagcaaccaagaagcttctctcttcctcgccagtgcccaccccgccagccggcacgaagcgcggcgttaatatctcccctcccttccctcttctggtctccgccccgctccttgcctccgatccccaattcctccttcggatctcgcattcagcgcagcgcaggtgtgaaggaagggggacgcggaggaagatggggctcgcgttcgggaagctcttcagccggctcttcgccaagaaggagatgcggatcctcatggtcggcctcgacgccgccggtaaaaccaccatcctctacaagctcaagctcggcgagatcgtcaccaccatccccaccatcggtttcaatgttgaaactgttgagtacaagaacattagcttcactgtctgggatgtcgggggtcaggacaagatcagacctctttggaggcattacttccagaacacccagggtcttatctttgttgtggacagcaatgaccgtgaccgtgttgttgaagccagagatgagctccacaggatgctgaacgaggatgagctacgtgatgctgtgctgcttgtttttgccaacaagcaagatcttcccaatgccatgaatgctgctgagattactgacaagcttggattacactccctgcgccagcgacactgagcacttgtgccacaactggcgagggtctgtatgaaggcctggactggctgtccagcaacattgcgagcaaggcttgaggcctaccttgaatgtcaaccgcgaactgactaggagctccggatgtatcatggaaactcaggacagaatcgcagttgcaacctgttagatgtcttctaccggcactatatatattttttgtttgatgtgtaatgatgttactgttcaacgtttattaccctactatactgttggatgttctttggacctgtttcatttcgcacaaggattggacttccaatatcatgctacattttacattcgtggtaaatacctgattagaaagttagccgaggagatccaatgtcatggtacatggaaatccagattaggttaaacattcttaagtatacagaagactggtaccctagccaccactttttttagcagttgtgtttttttcatttgtctagaattctcaatcctggtgaagcggtgtcattttgatttgattgtaagctttagttgaa

SEQ ID NO: 207999 - DNA, 1154 bp, Zea Mays
ctcgccagtgcccaccccgccagccggcacgaagcgcggcgttaatatctcccctcccttccctcttctggtctccgccccgctccttgcctccgatccccaattcctccttcggatctcgcattcagcgcagcgcaggaagggggacgcggaggaagatggggctcgcgttcgggaagctcttcagccggctcttcgccaagaaggagatgcggatcctcatggtcggcctcgacgccgccggtaaaaccaccatcctctacaagctcaagctcggcgagatcgtcaccaccatccccaccatcggtttcaatgttgaaactgttgagtacaagaacattagcttcactgtctgggatgtcgggggtcaggacaagatcagacctctttggaggcattacttccagaacacccagggtcttatctttgttgtggacagcaatgaccgtgaccgtgttgttgaagccagagatgagctccacaggatgctgaacgaggatgagctacgtgatgctgtgctgcttgtttttgccaacaagcaagatcttcccaatgccatgaatgctgctgagattactgacaagcttggattacactccctgcgccagcgacactggtacatccagagcacttgtgccacaactggcgagggtctgtatgaaggcctggactggctgtccagcaacattgcgagcaaggcttgaggcctaccttgaatgtcaaccgcgaactgactaggagctccggatgtatcatggaaactcaggacagaatcgcagttgcaacctgttagatgtcttctaccggcactatatatattttttgtttgatgtgtaatgatgttactgttcaacgtttattaccctactatactgttggatgttctttggacctgtttcatttcgcacaaggattggacttccaatatcatgctacattttacattcgtggtaaatacctgattagaaagttagccgaggagatccaatgtcatggtacatggaaatccagattaggttaaacattcttaagtatacagaagactggtaccctagccaccactttttttagcagttgtgtttttttcatttgtctagaattctcaatcctggtgaagcggtgtcattttgatttgattgtaagctttagttgaa

SEQ ID NO: 208000 - DNA, 1058 bp, Zea Mays
ccgtcgcctggatgcgctggggaatttgcgatccgtgtgaaggaagggggacgcggaggaagatggggctcgcgttcgggaagctcttcagccggctcttcgccaagaaggagatgcggatcctcatggtcggcctcgacgccgccggtaaaaccaccatcctctacaagctcaagctcggcgagatcgtcaccaccatccccaccatcggtttcaatgttgaaactgttgagtacaagaacattagcttcactgtctgggatgtcgggggtcaggacaagatcagacctctttggaggcattacttccagaacacccagggtcttatctttgttgtggacagcaatgaccgtgaccgtgttgttgaagccagagatgagctccacaggatgctgaacgaggatgagctacgtgatgctgtgctgcttgtttttgccaacaagcaagatcttcccaatgccatgaatgctgctgagattactgacaagcttggattacactccctgcgccagcgacactggtacatccagagcacttgtgccacaactggcgagggtctgtatgaaggcctggactggctgtccagcaacattgcgagcaaggcttgaggcctaccttgaatgtcaaccgcgaactgactaggagctccggatgtatcatggaaactcaggacagaatcgcagttgcaacctgttagatgtcttctaccggcactatatatattttttgtttgatgtgtaatgatgttactgttcaacgtttattaccctactatactgttggatgttctttggacctgtttcatttcgcacaaggattggacttccaatatcatgctacattttacattcgtggtaaatacctgattagaaagttagccgaggagatccaatgtcatggtacatggaaatccagattaggttaaacattcttaagtatacagaagactggtaccctagccaccactttttttagcagttgtgtttttttcatttgtctagaattctcaatcctggtgaagcggtgtcattttgatttgattgtaagctttagttgaa

SEQ ID NO: 208001 - DNA, 1705 bp, Zea Mays
cactcccccacttcgacccgggggcgccctctctctgtctccggaacccttccagccttctcgctcctggaacccagacctcaacccttccgtccccgaccatcgacccccgaaggacctggcggtgtccagatttccagaagcatcccccatccagcccccggcgatcgtgcggaacctggcggctggggacgcgggagaagcggcgagggctagctggagatggacacggcggagaagatgcggtggcccttttcggacggcagcgtcaccgatctcctggacgcccgcagcctccacggctcccccgacattaagaaaaaagcacagtttcattcttctctagtgcaaaagcttgctttggaaaaggagatggagggtcatgttggttgcgtgaatgctatcgcgtggaactcaagtggttcgcttcttgtatcaggatcagatgacactagaattaacctctggaattataataatcgagagctggtgcatgatattgacactggccattctgcaaatatcttttgcaccaagtttgtccctgaaacatgtgatgaagtagtagtttctggagcaggagatgcagaggttcgtgttttcaatatgtctcgattaagtggcagaaggcctagagaaatttctatggaaccaacaatggtttaccagtgtcactcaaaaagggtcaagaaactagctgttgaacttggcaatcctaacgtagtgtggagtgcaagcgaggatggtactctgagacaacatgattttcgggagtgtagttcctgtcctcgtgcaggatccgctaatcaggaatgtcacaatgtgcttcttgatctacggtgcggagcaaagaagtctttagccgatttacccaaacatccattggcactgaagtcttgtgacattagctctgtttgtccccatcaaatcattgtcggtgggagtgatgcatttgctaggctgtatgataggagaatgcttccaccattgagctcgtgccaaaccaaaacgaagccgccaccgtgcgttaaaatgttctgcccattgcatcttgctaacagtaagacatatttgcaccttacacatgttgcattcagcccaaatgggaaggaggttcttttaagttacagtggtgaacatgtttatctgtttgatgttgacccagataatctgagttcagttagatacacagcagactatgtacgggaacaattatttgtacccccttttcacaaagtaccagcaaaagaacatgcaaaagaaaagaagacttcagtaaatacagctccaagaaatttgtctagggtagatatgtgcaagaaatttatgcaagttgcaacaagatctctggagataggcaagaacttaatgcacgggattgaagcatgcagtgaagttcttgaatcaacggaaccagatattgatgatgacatgaggcatgggtttttgtgtactcgagcagcattgtacctaaagaggaagtggaaaaatgatgtttacatggcgattcgggattgtaatagagcgcggaagattgatgccacatcatatcaagcgcacctacatatggctgaggcactattgcagttaggaagactgaaggaggcatctgagtatgcagaggcagcaaataggcttcttccccctcattgtcaattgagccagcaggtggatgatttcaagcaacgcgttgcttcaggtgagt

SEQ ID NO: 208002 - DNA, 1701 bp, Zea Mays
cactcccccacttcgacccgggggcgccctctctctgtctccggaacccttccagccttctcgctcctggaacccagacctcaacccttccgtccccgaccatcgacccccgaaggacctggcggtgtccagatttccagaagcatcccccatccagcccccggcgatcgtgcggaacctggcggctggggacgcgggagaagcggcgagggctagctggagatggacacggcggagaagatgcggtggcccttttcggacggcagcgtcaccgatctcctggacgcccgcagcctccacggctcccccgacattaagaaaaaagcacagtttcattcttctctagtgcaaaagcttgctttggaaaaggagatggagggtcatgttggttgcgtgaatgctatcgcgtggaactcaagtggttcgcttcttgtatcaggatcagatgacactagaattaacctctggaattataataatcgagagctggtgcatgatattgacactggccattctgcaaatatcttttgcaccaagtttgtccctgaaacatgtgatgaagtagtagtttctggagcaggagatgcagaggttcgtgttttcaatatgtctcgattaagtggcagaaggcctagagaaatttctatggaaccaacaatggtttaccagtgtcactcaaaaagggtcaagaaactagctgttgaacttggcaatcctaacgtagtgtggagtgcaagcgaggatggtactctgagacaacatgattttcgggagtgtagttcctgtcctcgtgcaggatccgctaatcaggaatgtcacaatgtgcttcttgatctacggtgcggagcaaagaagtctttagccgatttacccaaacatccattggcactgaagtcttgtgacattagctctgtttgtccccatcaaatcattgtcggtgggagtgatgcatttgctaggctgtatgataggagaatgcttccaccattgagctcgtgccaaaccaaaacgaagccgccaccgtgcgttaaaatgttctgcccattgcatcttgctaacagtaagacatatttgcaccttacacatgttgcattcagcccaaatgggaaggaggttcttttaagttacagtggtgaacatgtttatctgtttgatgttgacccagataatctgagttcagttagatacacagcagactatgtacgggaacaattatttgtacccccttttcacaaagtaccagcaaaagaacatgcaaaagaaaagaagacttcagtaaatacagctccaagaaatttgtctaggatatgtgcaagaaatttatgcaagttgcaacaagatctctggagataggcaagaacttaatgcacgggattgaagcatgcagtgaagttcttgaatcaacggaaccagatattgatgatgacatgaggcatgggtttttgtgtactcgagcagcattgtacctaaagaggaagtggaaaaatgatgtttacatggcgattcgggattgtaatagagcgcggaagattgatgccacatcatatcaagcgcacctacatatggctgaggcactattgcagttaggaagactgaaggaggcatctgagtatgcagaggcagcaaataggcttcttccccctcattgtcaattgagccagcaggtggatgatttcaagcaacgcgttgcttcaggtgagt

SEQ ID NO: 208003 - DNA, 1702 bp, Zea Mays
cactcccccacttcgacccgggggcgccctctctctgtctccggaacccttccagccttctcgctcctggaacccagacctcaacccttccgtccccgaccatcgacccccgaaggacctggcggtgtccagatttccagaagcatcccccatccagcccccggcgatcgtgcggaacctggcggctggggacgcgggagaagcggcgagggctagctggagatggacacggcggagaagatgcggtggcccttttcggacggcagcgtcaccgatctcctggacgcccgcagcctccacggctcccccgacattaagaaaaaagcacagtttcattcttctctagtgcaaaagcttgctttggaaaaggagatggagggtcatgttggttgcgtgaatgctatcgcgtggaactcaagtggttcgcttcttgtatcaggatcagatgacactagaattaacctctggaattataataatcgagagctggtgcatgatattgacactggccattctgcaaatatcttttgcaccaagtttgtccctgaaacatgtgatgaagtagtagtttctggagcaggagatgcagaggttcgtgttttcaatatgtctcgattaagtggcagaaggcctagagaaatttctatggaaccaacaatggtttaccagtgtcactcaaaaagggtcaagaaactagctgttgaacttggcaatcctaacgtagtgtggagtgcaagcgaggatggtactctgagacaacatgattttcgggagtgtagttcctgtcctcgtgcaggatccgctaatcaggaatgtcacaatgtgcttcttgatctacggtgcggagcaaagaagtctttagccgatttacccaaacatccattggcactgaagtcttgtgacattagctctgtttgtccccatcaaatcattgtcggtgggagtgatgcatttgctaggctgtatgataggagaatgcttccaccattgagctcgtgccaaaccaaaacgaagccgccaccgtgcgttaaaatgttctgcccattgcatcttgctaacaaagaagacatatttgcaccttacacatgttgcattcagcccaaatgggaaggaggttcttttaagttacagtggtgaacatgtttatctgtttgatgttgacccagataatctgagttcagttagatacacagcagactatgtacgggaacaattatttgtacccccttttcacaaagtaccagcaaaagaacatgcaaaagaaaagaagacttcagtaaatacagctccaagaaatttgtctaggatatgtgcaagaaatttatgcaagttgcaacaagatctctggagataggcaagaacttaatgcacgggattgaagcatgcagtgaagttcttgaatcaacggaaccagatattgatgatgacatgaggcatgggtttttgtgtactcgagcagcattgtacctaaagaggaagtggaaaaatgatgtttacatggcgattcgggattgtaatagagcgcggaagattgatgccacatcatatcaagcgcacctacatatggctgaggcactattgcagttaggaagactgaaggaggcatctgagtatgcagaggcagcaaataggcttcttccccctcattgtcaattgagccagcaggtggatgatttcaagcaacgcgttgcttcaggtgagt

SEQ ID NO: 208004 - DNA, 1704 bp, Zea Mays
cactcccccacttcgacccgggggcgccctctctctgtctccggaacccttccagccttctcgctcctggaacccagacctcaacccttccgtccccgaccatcgacccccgaaggacctggcggtgtccagatttccagaagcatcccccatccagcccccggcgatcgtgcggaacctggcggctggggacgcgggagaagcggcgagggctagctggagatggacacggcggagaagatgcggtggcccttttcggacggcagcgtcaccgatctcctggacgcccgcagcctccacggctcccccgacattaagaaaaaagcacagtttcattcttctctagtgcaaaagcttgctttggaaaaggagatggagggtcatgttggttgcgtgaatgctatcgcgtggaactcaagtggttcgcttcttgtatcaggatcagatgacactagaattaacctctggaattataataatcgagagctggtgcatgatattgacactggccattctgcaaatatcttttgcaccaagtttgtccctgaaacatgtgatgaagtagtagtttctggagcaggagatgcagaggttcgtgttttcaatatgtctcgattaagtggcagaaggcctagagaaatttctatggaaccaacaatggtttaccagtgtcactcaaaaagggtcaagaaactagctgttgaacttggcaatcctaacgtagtgtggagtgcaagcgaggatggtactctgagacaacatgattttcgggagtgtagttcctgtcctcgtgcaggatccgctaatcaggaatgtcacaatgtgcttcttgatctacggtgcggagcaaagaagtctttagccgatttacccaaacatccattggcactgaagtcttgtgacattagctctgtttgtccccatcaaatcattgtcggtgggagtgatgcatttgctaggctgtatgataggagaatgcttccaccattgagctcgtgccaaaccaaaacgaagccgccaccgtgcgttaaaatgttctgcccattgcatcttgctaacagtaagaagacatatttgcaccttacacatgttgcattcagcccaaatgggaaggaggttcttttaagttacagtggtgaacatgtttatctgtttgatgttgacccagataatctgagttcagttagatacacagcagactatgtacgggaacaattatttgtacccccttttcacaaagtaccagcaaaagaacatgcaaaagaaaagaagacttcagtaaatacagctccaagaaatttgtctaggatatgtgcaagaaatttatgcaagttgcaacaagatctctggagataggcaagaacttaatgcacgggattgaagcatgcagtgaagttcttgaatcaacggaaccagatattgatgatgacatgaggcatgggtttttgtgtactcgagcagcattgtacctaaagaggaagtggaaaaatgatgtttacatggcgattcgggattgtaatagagcgcggaagattgatgccacatcatatcaagcgcacctacatatggctgaggcactattgcagttaggaagactgaaggaggcatctgagtatgcagaggcagcaaataggcttcttccccctcattgtcaattgagccagcaggtggatgatttcaagcaacgcgttgcttcaggtgagt

SEQ ID NO: 208005 - DNA, 1708 bp, Zea Mays
cactcccccacttcgacccgggggcgccctctctctgtctccggaacccttccagccttctcgctcctggaacccagacctcaacccttccgtccccgaccatcgacccccgaaggacctggcggtgtccagatttccagaagcatcccccatccagcccccggcgatcgtgcggaacctggcggctggggacgcgggagaagcggcgagggctagctggagatggacacggcggagaagatgcggtggcccttttcggacggcagcgtcaccgatctcctggacgcccgcagcctccacggctcccccgacattaagaaaaaagcacagtttcattcttctctagtgcaaaagcttgctttggaaaaggagatggagggtcatgttggttgcgtgaatgctatcgcgtggaactcaagtggttcgcttcttgtatcaggatcagatgacactagaattaacctctggaattataataatcgagagctggtgcatgatattgacactggccattctgcaaatatcttttgcaccaagtttgtccctgaaacatgtgatgaagtagtagtttctggagcaggagatgcagaggttcgtgttttcaatatgtctcgattaagtggcagaaggcctagagaaatttctatggaaccaacaatggtttaccagtgtcactcaaaaagggtcaagaaactagctgttgaacttggcaatcctaacgtagtgtggagtgcaagcgaggatggtactctgagacaacatgattttcgggagtgtagttcctgtcctcgtgcaggatccgctaatcaggaatgtcacaatgtgcttcttgatctacggtgcggagcaaagaagtctttagccgatttacccaaacatccattggcactgaagtcttgtgacattagctctgtttgtccccatcaaatcattgtcggtgggagtgatgcatttgctaggctgtatgataggagaatgcttccaccattgagctcgtgccaaaccaaaacgaagccgccaccgtgcgttaaaatgttctgcccattgcatcttgctaacagtaagaagacatatttgcaccttacacatgttgcattcagcccaaatgggaaggaggttcttttaagttacagtggtgaacatgtttatctgtttgatgttgacccagataatctgagttcagttagatacacagcagactatgtacgggaacaattatttgtacccccttttcacaaagtaccagcaaaagaacatgcaaaagaaaagaagacttcagtaaatacagctccaagaaatttgtctagggtagatatgtgcaagaaatttatgcaagttgcaacaagatctctggagataggcaagaacttaatgcacgggattgaagcatgcagtgaagttcttgaatcaacggaaccagatattgatgatgacatgaggcatgggtttttgtgtactcgagcagcattgtacctaaagaggaagtggaaaaatgatgtttacatggcgattcgggattgtaatagagcgcggaagattgatgccacatcatatcaagcgcacctacatatggctgaggcactattgcagttaggaagactgaaggaggcatctgagtatgcagaggcagcaaataggcttcttccccctcattgtcaattgagccagcaggtggatgatttcaagcaacgcgttgcttcaggtgagt

SEQ ID NO: 208006 - DNA, 1704 bp, Zea Mays
cactcccccacttcgacccgggggcgccctctctctgtctccggaacccttccagccttctcgctcctggaacccagacctcaacccttccgtccccgaccatcgacccccgaaggacctggcggtgtccagatttccagaagcatcccccatccagcccccggcgatcgtgcggaacctggcggctggggacgcgggagaagcggcgagggctagctggagatggacacggcggagaagatgcggtggcccttttcggacggcagcgtcaccgatctcctggacgcccgcagcctccacggctcccccgacattaagaaaaaagcacagtttcattcttctctagtgcaaaagcttgctttggaaaaggagatggagggtcatgttggttgcgtgaatgctatcgcgtggaactcaagtggttcgcttcttgtatcaggatcagatgacactagaattaacctctggaattataataatcgagagctggtgcatgatattgacactggccattctgcaaatatcttttgcaccaagtttgtccctgaaacatgtgatgaagtagtagtttctggagcaggagatgcagaggttcgtgttttcaatatgtctcgattaagtggcagaaggcctagagaaatttctatggaaccaacaatggtttaccagtgtcactcaaaaagggtcaagaaactagctgttgaacttggcaatcctaacgtagtgtggagtgcaagcgaggatggtactctgagacaacatgattttcgggagtgtagttcctgtcctcgtgcaggatccgctaatcaggaatgtcacaatgtgcttcttgatctacggtgcggagcaaagaagtctttagccgatttacccaaacatccattggcactgaagtcttgtgacattagctctgtttgtccccatcaaatcattgtcggtgggagtgatgcatttgctaggctgtatgataggagaatgcttccaccattgagctcgtgccaaaccaaaacgaagccgccaccgtgcgttaaaatgttctgcccattgcatcttgctaacagtaagaagacatatttgcaccttacacatgttgcattcagcccaaatgggaaggaggttcttttaagttacagtggtgaacatgtttatctgtttgatgttgacccagataatctgagttcagttagatacacagcagactatgtacgggaacaattatttgtacccccttttcacaaagtaccagcaaaagaacatgcaaaagaaaagaagacttcagtaaatacagctccaagaaatttgtctagggtagatatgtgcaagaaatttatgcaagttgcaacaagatctctggagataggcaagaacttaatgcacgggattgaagcatgcagtgaagttcttgaatcaacggaaccagatattgatgatgacatgaggcatgggtttttgtgtactcgagcagcattgtacctaaagaggaagtggaaaaatgatgtttacatggcgattcgggattgtaatagagcgcggaagattgatgccacatcatatcaagcgcacctacatatggctgaggcactattgcaggaagactgaaggaggcatctgagtatgcagaggcagcaaataggcttcttccccctcattgtcaattgagccagcaggtggatgatttcaagcaacgcgttgcttcaggtgagt

SEQ ID NO: 208007 - DNA, 1700 bp, Zea Mays
cactcccccacttcgacccgggggcgccctctctctgtctccggaacccttccagccttctcgctcctggaacccagacctcaacccttccgtccccgaccatcgacccccgaaggacctggcggtgtccagatttccagaagcatcccccatccagcccccggcgatcgtgcggaacctggcggctggggacgcgggagaagcggcgagggctagctggagatggacacggcggagaagatgcggtggcccttttcggacggcagcgtcaccgatctcctggacgcccgcagcctccacggctcccccgacattaagaaaaaagcacagtttcattcttctctagtgcaaaagcttgctttggaaaaggagatggagggtcatgttggttgcgtgaatgctatcgcgtggaactcaagtggttcgcttcttgtatcaggatcagatgacactagaattaacctctggaattataataatcgagagctggtgcatgatattgacactggccattctgcaaatatcttttgcaccaagtttgtccctgaaacatgtgatgaagtagtagtttctggagcaggagatgcagaggttcgtgttttcaatatgtctcgattaagtggcagaaggcctagagaaatttctatggaaccaacaatggtttaccagtgtcactcaaaaagggtcaagaaactagctgttgaacttggcaatcctaacgtagtgtggagtgcaagcgaggatggtactctgagacaacatgattttcgggagtgtagttcctgtcctcgtgcaggatccgctaatcaggaatgtcacaatgtgcttcttgatctacggtgcggagcaaagaagtctttagccgatttacccaaacatccattggcactgaagtcttgtgacattagctctgtttgtccccatcaaatcattgtcggtgggagtgatgcatttgctaggctgtatgataggagaatgcttccaccattgagctcgtgccaaaccaaaacgaagccgccaccgtgcgttaaaatgttctgcccattgcatcttgctaacagtaagaagacatatttgcaccttacacatgttgcattcagcccaaatgggaaggaggttcttttaagttacagtggtgaacatgtttatctgtttgatgttgacccagataatctgagttcagttagatacacagcagactatgtacgggaacaattatttgtacccccttttcacaaagtaccagcaaaagaacatgcaaaagaaaagaagacttcagtaaatacagctccaagaaatttgtctaggatatgtgcaagaaatttatgcaagttgcaacaagatctctggagataggcaagaacttaatgcacgggattgaagcatgcagtgaagttcttgaatcaacggaaccagatattgatgatgacatgaggcatgggtttttgtgtactcgagcagcattgtacctaaagaggaagtggaaaaatgatgtttacatggcgattcgggattgtaatagagcgcggaagattgatgccacatcatatcaagcgcacctacatatggctgaggcactattgcaggaagactgaaggaggcatctgagtatgcagaggcagcaaataggcttcttccccctcattgtcaattgagccagcaggtggatgatttcaagcaacgcgttgcttcaggtgagt

SEQ ID NO: 208008 - DNA, 2408 bp, Zea Mays
cactcccccacttcgacccgggggcgccctctctctgtctccggaacccttccagccttctcgctcctggaacccagacctcaacccttccgtccccgaccatcgacccccgaaggacctggcggtgtccagatttccagaagcatcccccatccagcccccggcgatcgtgcggaacctggcggctggggacgcgggagaagcggcgagggctagctggagatggacacggcggagaagatgcggtggcccttttcggacggcagcgtcaccgatctcctggacgcccgcagcctccacggctcccccgacattaagaaaaaagcacagtttcattcttctctagtgcaaaagcttgctttggaaaaggagatggagggtcatgttggttgcgtgaatgctatcgcgtggaactcaagtggttcgcttcttgtatcaggatcagatgacactagaattaacctctggaattataataatcgagagctggtgcatgatattgacactggccattctgcaaatatcttttgcaccaagtttgtccctgaaacatgtgatgaagtagtagtttctggagcaggagatgcagaggttcgtgttttcaatatgtctcgattaagtggcagaaggcctagagaaatttctatggaaccaacaatggtttaccagtgtcactcaaaaagggtcaagaaactagcttcctggatgaactgccttttggagaacttgaagttactctttaggttgaacttggcaatcctaacgtagtgtggagtgcaagcgaggatggtactctgagacaacatgattttcgggagtgtagttcctgtcctcgtgcaggatccgctaatcaggaatgtcacaatgtgcttcttgatctacggtgcggagcaaagaagtctttagccgatttacccaaacatccattggcactgaagtcttgtgacattagctctgtttgtccccatcaaatcattgtcggtgggaggtaacctagcttctggtcatcaacagtcagtagataacaagccttttgtgtttttatacctgactaatgactagcacttctctgctacatgatgttcatgcagtgatgcatttgctaggctgtatgataggagaatgcttccaccattgagctcgtgccaaaccaaaacgaagccgccaccgtgcgttaaaatgttctgcccattgcatcttgctaacagtaagaacagaaatggatcaaaatgggcactcctaaagcgaatacacatggaaaattacgctcattgagtgagatattatttagacctgatgttggtggttcatcagaggaggggcgagaagattcagattatgatgatgaaatggagttggactatgagacatcagtatctggtgatgaaagccgagagaatgatcaagatatcttacggggcagattaagttaccgatttcatcaaagagaggatcaaaccaatgaacacactggtgagaatgggtcaatcgagttcgctcaaaacgatgattttgcttttcagtcagatgttgccatcgatatgaaacaaagatatgttgcacactgcaacgttggaacagatatcaaacaagccagctttcttggtgagcaaggggagttcattgccagtggaagtgatgatggtagatggtttatatgggagaaaagaacaggaaggcttattaaaatgcttgcaggggatggagctgtctcatcccttcgattgtgctgttgcaacaagcggaattgataacacaataaagctttggacacccgatgcaaatgctacatctatggttgctggaccagaacttgatgtattaagtgccatagagaataaccagcggacgttatgtcggaagcgtcaaattgtactgccttttgaatttttggaacgagttcggatgcgagagttttcagaaagtttcgagtgtaaccagagctgatttactatcgctggagttgctgagcttcttcaggaaaagggtaatagttggaagaatgatatcatccaagctacaagcagcctatgtttgaagtagtgaaatcgcaaggccttgctacgaatagagtgtagacacacctggatagataagcaggtgtgctggtgctgaaactattacttgagatgtcaataaacattggaattatgttgtggtttggggtggtataatgattcatacgtgtgtaatgcagtgtggattcattccctttacagattgtagatataggtgaaattctgcagtaagtgaaaatcacaaatgtaaatgtgcggtattgtctctgcgtgccgcaggcaggtcatgctagtttgtggttgacgattggggcatatcttcccgtatggcttgttcaattatttctaatacatacggattcctaatacatggggattggaagattggga

SEQ ID NO: 208009 - DNA, 2274 bp, Zea Mays
cactcccccacttcgacccgggggcgccctctctctgtctccggaacccttccagccttctcgctcctggaacccagacctcaacccttccgtccccgaccatcgacccccgaaggacctggcggtgtccagatttccagaagcatcccccatccagcccccggcgatcgtgcggaacctggcggctggggacgcgggagaagcggcgagggctagctggagatggacacggcggagaagatgcggtggcccttttcggacggcagcgtcaccgatctcctggacgcccgcagcctccacggctcccccgacattaagaaaaaagcacagtttcattcttctctagtgcaaaagcttgctttggaaaaggagatggagggtcatgttggttgcgtgaatgctatcgcgtggaactcaagtggttcgcttcttgtatcaggatcagatgacactagaattaacctctggaattataataatcgagagctggtgcatgatattgacactggccattctgcaaatatcttttgcaccaagtttgtccctgaaacatgtgatgaagtagtagtttctggagcaggagatgcagaggttcgtgttttcaatatgtctcgattaagtggcagaaggcctagagaaatttctatggaaccaacaatggtttaccagtgtcactcaaaaagggtcaagaaactagctgttgaacttggcaatcctaacgtagtgtggagtgcaagcgaggatggtactctgagacaacatgattttcgggagtgtagttcctgtcctcgtgcaggatccgctaatcaggaatgtcacaatgtgcttcttgatctacggtgcggagcaaagaagtctttagccgatttacccaaacatccattggcactgaagtcttgtgacattagctctgtttgtccccatcaaatcattgtcggtgggagtgatgcatttgctaggctgtatgataggagaatgcttccaccattgagctcgtgccaaaccaaaacgaagccgccaccgtgcgttaaaatgttctgcccattgcatcttgctaacagtaagaacagaaatggatcaaaatgggcactcctaaagcgaatacacatggaaaattacgctcattgagtgagatattatttagacctgatgttggtggttcatcagaggaggggcgagaagattcagattatgatgatgaaatggagttggactatgagacatcagtatctggtgatgaaagccgagagaatgatcaagatatcttacggggcagattaagttaccgatttcatcaaagagaggatcaaaccaatgaacacactggtgagaatgggtcaatcgagttcgctcaaaacgatgattttgcttttcagatgttgccatcgatatgaaacaaagatatgttgcacactgcaacgttggaacagatatcaaacaagccagctttcttggtgagcaaggggagttcattgccagtggaagtgatgatggtagatggtttatatgggagaaaagaacaggaaggcttattaaaatgcttgcaggggatggagctgttgtgaactgcatacagtctcatcccttcgattgtgctgttgcaacaagcggaattgataacacaataaagctttggacacccgatgcaaatgctacatctatggttgctggaccagaacttgatgtattaagtgccatagagaataaccagcggacgttatgtcggaagcgtcaaattgtactgccttttgaatttttggaacgagttcggatgcgagagttttcagaaagtttcgagtgtaaccagagctgatttactatcgctggagttgctgagcttcttcaggaaaagggtaatagttggaagaatgatatcatccaagctacaagcagcctatgtttgaagtagtgaaatcgcaaggccttgctacgaatagagtgtagacacacctggatagataagcaggtgtgctggtgctgaaactattacttgagatgtcaataaacattggaattatgttgtggtttggggtggtataatgattcatacgtgtgtaatgcagtgtggattcattccctttacagattgtagatataggtgaaattctgcagtaagtgaaaatcacaaatgtaaatgtgcggtattgtctctgcgtgccgcaggcaggtcatgctagtttgtggttgacgattggggcatatcttcccgtatggcttgttcaattatttctaatacatacggattcctaatacatggggattggaagattggga

SEQ ID NO: 208010 - DNA, 2425 bp, Zea Mays
cactcccccacttcgacccgggggcgccctctctctgtctccggaacccttccagccttctcgctcctggaacccagacctcaacccttccgtccccgaccatcgacccccgaaggacctggcggtgtccagatttccagaagcatcccccatccagcccccggcgatcgtgcggaacctggcggctggggacgcgggagaagcggcgagggctagctggagatggacacggcggagaagatgcggtggcccttttcggacggcagcgtcaccgatctcctggacgcccgcagcctccacggctcccccgacattaagaaaaaagcacagtttcattcttctctagtgcaaaagcttgctttggaaaaggagatggagggtcatgttggttgcgtgaatgctatcgcgtggaactcaagtggttcgcttcttgtatcaggatcagatgacactagaattaacctctggaattataataatcgagagctggtgcatgatattgacactggccattctgcaaatatcttttgcaccaagtttgtccctgaaacatgtgatgaagtagtagtttctggagcaggagatgcagaggttcgtgttttcaatatgtctcgattaagtggcagaaggcctagagaaatttctatggaaccaacaatggtttaccagtgtcactcaaaaagggtcaagaaactagcttcctggatgaactgccttttggagaacttgaagttactctttaggttgaacttggcaatcctaacgtagtgtggagtgcaagcgaggatggtactctgagacaacatgattttcgggagtgtagttcctgtcctcgtgcaggatccgctaatcaggaatgtcacaatgtgcttcttgatctacggtgcggagcaaagaagtctttagccgatttacccaaacatccattggcactgaagtcttgtgacattagctctgtttgtccccatcaaatcattgtcggtgggaggtaacctagcttctggtcatcaacagtcagtagataacaagccttttgtgtttttatacctgactaatgactagcacttctctgctacatgatgttcatgcagtgatgcatttgctaggctgtatgataggagaatgcttccaccattgagctcgtgccaaaccaaaacgaagccgccaccgtgcgttaaaatgttctgcccattgcatcttgctaacagtaagaacagaaatggatcaaaatgggcactcctaaagcgaatacacatggaaaattacgctcattgagtgagatattatttagacctgatgttggtggttcatcagaggaggggcgagaagattcagattatgatgatgaaatggagttggactatgagacatcagtatctggtgatgaaagccgagagaatgatcaagatatcttacggggcagattaagttaccgatttcatcaaagagaggatcaaaccaatgaacacactggtgagaatgggtcaatcgagttcgctcaaaacgatgattttgcttttcagtcagatgttgccatcgatatgaaacaaagatatgttgcacactgcaacgttggaacagatatcaaacaagccagctttcttggtgagcaaggggagttcattgccagtggaagtgatgatggtagatggtttatatgggagaaaagaacaggaaggcttattaaaatgcttgcaggggatggagctgttgtgaactgcatacagtctcatcccttcgattgtgctgttgcaacaagcggaattgataacacaataaagctttggacacccgatgcaaatgctacatctatggttgctggaccagaacttgatgtattaagtgccatagagaataaccagcggacgttatgtcggaagcgtcaaattgtactgccttttgaatttttggaacgagttcggatgcgagagttttcagaaagtttcgagtgtaaccagagctgatttactatcgctggagttgctgagcttcttcaggaaaagggtaatagttggaagaatgatatcatccaagctacaagcagcctatgtttgaagtagtgaaatcgcaaggccttgctacgaatagagtgtagacacacctggatagataagcaggtgtgctggtgctgaaactattacttgagatgtcaataaacattggaattatgttgtggtttggggtggtataatgattcatacgtgtgtaatgcagtgtggattcattccctttacagattgtagatataggtgaaattctgcagtaagtgaaaatcacaaatgtaaatgtgcggtattgtctctgcgtgccgcaggcaggtcatgctagtttgtggttgacgattggggcatatcttcccgtatggcttgttcaattatttctaatacatacggattcctaatacatggggattggaagattggga

SEQ ID NO: 208011 - DNA, 2416 bp, Zea Mays
cactcccccacttcgacccgggggcgccctctctctgtctccggaacccttccagccttctcgctcctggaacccagacctcaacccttccgtccccgaccatcgacccccgaaggacctggcggtgtccagatttccagaagcatcccccatccagcccccggcgatcgtgcggaacctggcggctggggacgcgggagaagcggcgagggctagctggagatggacacggcggagaagatgcggtggcccttttcggacggcagcgtcaccgatctcctggacgcccgcagcctccacggctcccccgacattaagaaaaaagcacagtttcattcttctctagtgcaaaagcttgctttggaaaaggagatggagggtcatgttggttgcgtgaatgctatcgcgtggaactcaagtggttcgcttcttgtatcaggatcagatgacactagaattaacctctggaattataataatcgagagctggtgcatgatattgacactggccattctgcaaatatcttttgcaccaagtttgtccctgaaacatgtgatgaagtagtagtttctggagcaggagatgcagaggttcgtgttttcaatatgtctcgattaagtggcagaaggcctagagaaatttctatggaaccaacaatggtttaccagtgtcactcaaaaagggtcaagaaactagcttcctggatgaactgccttttggagaacttgaagttactctttaggttgaacttggcaatcctaacgtagtgtggagtgcaagcgaggatggtactctgagacaacatgattttcgggagtgtagttcctgtcctcgtgcaggatccgctaatcaggaatgtcacaatgtgcttcttgatctacggtgcggagcaaagaagtctttagccgatttacccaaacatccattggcactgaagtcttgtgacattagctctgtttgtccccatcaaatcattgtcggtgggaggtaacctagcttctggtcatcaacagtcagtagataacaagccttttgtgtttttatacctgactaatgactagcacttctctgctacatgatgttcatgcagtgatgcatttgctaggctgtatgataggagaatgcttccaccattgagctcgtgccaaaccaaaacgaagccgccaccgtgcgttaaaatgttctgcccattgcatcttgctaacagtaagaacagaaatggatcaaaatgggcactcctaaagcgaatacacatggaaaattacgctcattgagtgagatattatttagacctgatgttggtggttcatcagaggaggggcgagaagattcagattatgatgatgaaatggagttggactatgagacatcagtatctggtgatgaaagccgagagaatgatcaagatatcttacggggcagattaagttaccgatttcatcaaagagaggatcaaaccaatgaacacactggtgagaatgggtcaatcgagttcgctcaaaacgatgattttgcttttcagtcagatgttgccatcgatatgaaacaaagatatgttgcacactgcaacgttggaacagatatcaaacaagccagctttcttggtgagcaaggggagttcattgccagtggaagtgatgatggtagatggtttatatgggagaaaagaacaggaaggcttattaaaatgcttgcaggggatggagctgttgtgaactgcatacagtctcatcccttcgattgtgctgttgcaacaagcggaattgataacacaataaagctttggacacccgatgcaaatgctacatctatggttgctggaccagaacttgatgtattaagtgccatagagaataaccagcggacgttatgtcggaagcgtcaaattgtactgccttttgaatttttggaacgagttcggatgcgagagttttcagaaagtttcgagtgtaaccagagctgatttactatcgctggagttgctgaggaaaagggtaatagttggaagaatgatatcatccaagctacaagcagcctatgtttgaagtagtgaaatcgcaaggccttgctacgaatagagtgtagacacacctggatagataagcaggtgtgctggtgctgaaactattacttgagatgtcaataaacattggaattatgttgtggtttggggtggtataatgattcatacgtgtgtaatgcagtgtggattcattccctttacagattgtagatataggtgaaattctgcagtaagtgaaaatcacaaatgtaaatgtgcggtattgtctctgcgtgccgcaggcaggtcatgctagtttgtggttgacgattggggcatatcttcccgtatggcttgttcaattatttctaatacatacggattcctaatacatggggattggaagattggga

SEQ ID NO: 208012 - DNA, 2389 bp, Zea Mays
cactcccccacttcgacccgggggcgccctctctctgtctccggaacccttccagccttctcgctcctggaacccagacctcaacccttccgtccccgaccatcgacccccgaaggacctggcggtgtccagatttccagaagcatcccccatccagcccccggcgatcgtgcggaacctggcggctggggacgcgggagaagcggcgagggctagctggagatggacacggcggagaagatgcggtggcccttttcggacggcagcgtcaccgatctcctggacgcccgcagcctccacggctcccccgacattaagaaaaaagcacagtttcattcttctctagtgcaaaagcttgctttggaaaaggagatggagggtcatgttggttgcgtgaatgctatcgcgtggaactcaagtggttcgcttcttgtatcaggatcagatgacactagaattaacctctggaattataataatcgagagctggtgcatgatattgacactggccattctgcaaatatcttttgcaccaagtttgtccctgaaacatgtgatgaagtagtagtttctggagcaggagatgcagaggttcgtgttttcaatatgtctcgattaagtggcagaaggcctagagaaatttctatggaaccaacaatggtttaccagtgtcactcaaaaagggtcaagaaactagcttcctggatgaactgccttttggagaacttgaagttactctttaggttgaacttggcaatcctaacgtagtgtggagtgcaagcgaggatggtactctgagacaacatgattttcgggagtgtagttcctgtcctcgtgcaggatccgctaatcaggaatgtcacaatgtgcttcttgatctacggtgcggagcaaagaagtctttagccgatttacccaaacatccattggcactgaagtcttgtgacattagctctgtttgtccccatcaaatcattgtcggtgggaggtaacctagcttctggtcatcaacagtcagtagataacaagccttttgtgtttttatacctgactaatgactagcacttctctgctacatgatgttcatgcagtgatgcatttgctaggctgtatgataggagaatgcttccaccattgagctcgtgccaaaccaaaacgaagccgccaccgtgcgttaaaatgttctgcccattgcatcttgctaacagtaagaacagaaatggatcaaaatgggcactcctaaagcgaatacacatggaaaattacgctcattgagtgagatattatttagacctgatgttggtggttcatcagaggaggggcgagaagattcagattatgatgatgaaatggagttggactatgagacatcagtatctggtgatgaaagccgagagaatgatcaagatatcttacggggcagattaagttaccgatttcatcaaagagaggatcaaaccaatgaacacactggtgagaatgggtcaatcgagttcgctcaaaacgatgattttgcttttcagtcagatgttgccatcgatatgaaacaaagatatgttgcacactgcaacgttggaacagatatcaaacaagccagctttcttggggagttcattgccagtggaagtgatgatggtagatggtttatatgggagaaaagaacaggaaggcttattaaaatgcttgcaggggatggagctgttgtgaactgcatacagtctcatcccttcgattgtgctgttgcaacaagcggaattgataacacaataaagctttggacacccgatgcaaatgctacatctatggttgctggaccagaacttgatgtattaagtgccatagagaataaccagcggacgttatgtcggaagcgtcaaattgtactggcatccaaaggatgaaaggaatcggtttgctatggtgagctaaacacaattacaccttttgtttagcttcttcaggaaaagggtaatagttggaagaatgatatcatccaagctacaagcagcctatgtttgaagtagtgaaatcgcaaggccttgctacgaatagagtgtagacacacctggatagataagcaggtgtgctggtgctgaaactattacttgagatgtcaataaacattggaattatgttgtggtttggggtggtataatgattcatacgtgtgtaatgcagtgtggattcattccctttacagattgtagatataggtgaaattctgcagtaagtgaaaatcacaaatgtaaatgtgcggtattgtctctgcgtgccgcaggcaggtcatgctagtttgtggttgacgattggggcatatcttcccgtatggcttgttcaattatttctaatacatacggattcctaatacatggggattggaagattggga

SEQ ID NO: 208013 - DNA, 2740 bp, Zea Mays
ttgttgcctctcccgacgcccctccctaccctacttcaaaacatttcaaaccactctacgcgactacgcctccttcctctcctcaccccctccccctccactcgctcgccactgaggcgcctgaccagtgatcgtaccatctcccctcgaccacagtccaccgcccgtcaccgccccgccccgcccgctcgacgaggccgcggccgccgcgccgggtggtgaagagggtgctgctatgagtagcgctgtgaaggaccaactgcagcagatgtcgacgacgtacgattctctcctgttggagctcaacatgatttgggatgaggtcggtgagcccgacatggcgagggaccggatgctgctggagctcgagcaggaatggctcgacgtctacaggaggaaggtcgaccaggccaatcggtgcagggcccagttgcggcaggccattgcggatgcagaggccgagctcgctggcatctgctcggccatgagcgagccaccgatacatgttagacagtcaaatcagaagttacatggtttaagggaggaattgaatgcgattgtcccatacttggaggagatgagaaagaagaaagttgaaagatgggaccaatttgttgatgtcatagagcaaattaagaaggttgcatctgaaatcaggccttcagattttgtacccttcataattcctgtggatcagtctgatctgtcattaagaaagctggatgagctaacgaaagagctacaatcccttcagaaggagaagagtgatcggctgaagcaagtgatggaacatcttagcactttgcatttgttatgcgaggtgcttggtgtagatttcaaacaaacggtatacgaggtgcaccctagcctgggtgaggctgatggatcaaagaacctaagcaacagtacaattgagagacttgcatcagctgtaaacagattgcgtgaattgaaagtccagaggatgcaaaagcttcaagatttggcatctagcatgcttgaactttggaatctcatggatacaccgcttgaagagcagcagatgttccagaatttaacgtgcaatattgctgcttcagaacatgaaataactgggcctaacaccctctctactgacttcctcagctacgtggaatctgaagttttaagacttgaacagcttaaagcgagcaagatgaaagacctcgttcttaaaaagaagacagaactggaagatcataggagacgtgctcatttgattggtgaggaaggttatgcagccgaatttagcgatgaggctattgaggcaggagctgtcgatcctgcgctggtgctggaacaaattgaggctcacattgccacagtgaaagaggaagcttttagccgtaaggatattcttgagaaggttgaaagatggctgaatgcatgtgaggaggaagcttggctggaagattataacaaagacgacaatcgttataatgccgggaggggggcccacttgacactcaaaagggctgagaaagctcgtattttggttaacaagatcccaggactggtagatgttttgaccacaaaaattgtagcttgggagacagaaagaggaaaggagttcacatatgatggtgtccgcctgcggtcaatgcttgaagactacataatcattcgccaggagaaagagctagagaagaagaggcaaagggatcagaagaagatccaggatcaactcaaagctgagcaggaagcgctgtatggatcaaaaccaagtccatctaagactcaaagcacgaagaaggtgcctagacaatccatgggtggtgcgaaccgaagactgtctcttggtggagccacaacgcaagcccccaaaacagatataatgcactccaagacagctcgtgctgcgaagaaggctgaagatttgggcgctttatctcctagtagcagaggcttggacattgccggtcttcccatcaagaaactatctttcaacgcaagcactctgcgagaggcagaaacaccacgcaagccttttgcccagatcatgccaggaaacaatgtctcgtcgatgcctgcgcggcccatctccaacgacacagaggaagagaacaaaacccccaaaacatttgcagggctcaatccaaaaacgccggtgacagtgacggctcctatgcagttggcggtgacaccagctgtggccaacaaggtcatagccactcctgcaacccttttccaggagaaggcagagtcgccagcgctgcctggggacatcgagtactcgttcgaagagaggcgactcgccgtttacctggccaggcaagtggcattttttgttcattcaccttctcccagttgcgctaatacccagctattacttagttgaaagctgagctgactgcgatttctcggcagaggccaatgttacctgttggtcgatactcgatagtagtgggcctcggtcttactttgcactactattcattcatagccatattgctactagccagtaaagggagtttttagtcttgagagcttgtggtctgcatcgtaagttgtatagctttatacggtgcatcgtcgatgacctgttattgttattatatggtttattactgttatccaaatatcttgtctcatgttaagttcctcatcgtaaatctttaggataatctgatttgatcgccaggaataatcgtcatcctggaatctgtcgtagtgtgggtgtgttcaatctttcagagctgcagtgtctgctgcggtgtgcccg

SEQ ID NO: 208014 - DNA, 542 bp, Zea Mays
cgcgaccccgcgccagcgccaccgtctccgccaccgccaaggccgggccgtcatcctcccatgccgcaggggctcgggaacaacacgggcgactacgcgcggctcgccgcggcgctgcgggacgaccacggcctccccgcggccgtcgtggcgcgggtcacccgccccgactggctccgcaacgccgcgggcctcgccgacgccagctactggcggggcaccctccgcccgcgccccgtgctcgactggtacctgaagagggtggacgacgcggtgtccgaggcgagggagctatgcgcgccaggagggaagatatcactgatagggcattcagctgggggctggctcgcgcgcgtgtacatggcagagtttgatgcttccgacataagtctactcctcacccttggcactcctcacctgtatggttcctcaatcatgactcaaaagtggactaatgtatgattaatcgcttagtgtttatgctggagattcttttaattaaattgtgtggttcttatctctagtgaactaatgtgtggatc

SEQ ID NO: 208015 - DNA, 2942 bp, Zea Mays
tttcaccccttgttttcgacatgccattgctcctccctcaaacgccacggcttttttcacgaaccaactgtgacaatccagtcaattctgatctctaggccctcgcttccccttcctgtggatgccatcggggcgctcaccgggacaacatactcctcgacagcgacgccgccgcgcttccttgaggaaagctcgtagctgcccccgcgcaaagctccggtctttcttggccctgacccctcctccccgccgccggcgccgcgtgagcacgccgcgcttggcttgatgctcgacttctgcgcgccccacgggcccgccaagctcccggttgcgtctgtcgctggggtgcgagtcgccggcaggtggttgtggcgatcggcggcggttggggcggtgcgccatggcgtctccgcgcgggcctcatccttcggttcccggatcgggctcgattctcagaattttcacacaagggacctctcccagttgttgtggatcggtccggtgccaggtgacatcgcagagattgaggcctactgccgcatattccgtgctgccgagcagctccatactgcagtcatgtcagcactctgtgatccagagacaggagagtgccctgtacgctatgatgttgaatcagaggatctgccggtgctggaagacaaggttgctgccgtccttggctgcatgctggcgttgctgaaccggggaaggaatgaggtgctctcagggagatcaggtgttgcaagtgccttccagggatctgaggacagcactgctgataggatcccaccgctcgccttgttccgtggagacatgaagcgttgctgtgagagtatgcaggtggcgcttgcaagctaccttgtgccaagtgaacctagggggttggacatatggaggaagctgcagagattaaagaacacttgttatgatgcaggtttcccgagggctgatggttatccatgtccgacattgtttgcaaattggtttccagtgtacctttcgattgtgtcagatgattcaggaatggatgagctagaggttgcattttggaggggaggacaagtcagtgaggagggactggcatggctacttggaaagggattcaaaactattgttgatctccgggaagaagatgttaaagatgatttgtacctttcagcagttcaggaagctgtctcatctgggaagatagaggtggtgaatatgccagttgagattggaactgcaccatcagctgaacaggttcagcaatttgcagctcttgtgtcagatggcgcaaagaagcccatttatctctacagcaaagaaggtgtttctaggacgtctgcaatggtctcaagatggaaacagtatgttactcgttcagagagattggctgtccaaaatcactctctaaatgggaatggtaacatcctgacaaatcacaagaccatgcagcacactggcataccaagttcctctccgaatggagctgaaaatggtatgataacagaatctgataggaccatgaacaatggggaatcaagtgagatagacatagatacagctcgtcataatctggaggtcactaatgccctttgtaatgatcaaagcactcaacaaggtgaaatgcctgacaccgtggcagaactcttgtcaaactttaaactggagagtaacccccttaaagcacaatttcctacttgcgatgttttctctagaaaagagatgaccaagttttttagaagcaaaacagtttatccaaaatctgttctgaactctaggagacgatcaagtagcttggttataaggagaaaacaaaatctctgcacggagcgtagtggaaccaatgactatgaagcagcagagtttgcagttctcagaagttcaaatggaaaatcatttgacagtgattatattctatcagttgcttcaggtatcactgatggaaaaccttcaaacaatgaagcctcattaattgaggaaaaggaaagggaagtttcagttgccactattgacactagagcatctgccaacagttctaatagaaaggttcaggttggatcacaagaatctgctgaaaagaatagtaccccttatcttgagagaaacaaatcagataatgttgatagaaatatgtgtgcatctgcaactggtgttgttagactccagtcaagaagaaaagcagagatgtttctagtacgtactgatggattttcttgtactagagaaaaagtaacagaatcatctctggcttttacgcatcctagtacccagcaacagatgcttatgtggaaatcacctccaaagactgtcttacttttgaagaaattaggagatgagctcatggaagaagctaaagaggttgcttcatttctgcatcatcaagaaaagatgaatgttcttgtggaacctgatgttcatgatacatttgctagaattccaggttatggttttgtgcaaaccttctatactcaagataccagtgaccttcatgagcgaattgattttgttacatgcttgggtggtgatggactcattttgcatgcatcaaacttatttagaacttctgtaccacctgttgtctccttcaatctcggatctcttgggttcttaacttcacataatttcgaaggtttcagacaagatttgagagatttaatccatgggaacaacacacttggaatttatataactcttagaatgcgtctaagatgtgagatctttcgcaaaggaaaatcaatgcctggtaaagtgtttgatgtgctgaatgaagttgttgttgatcgaggttccaatccatacctatcaaaaattgagtgttatgagcataaccaccttatcactaaggtgcaagctgacggggtgatagttgcaacaccaactggcagcacagcatattctactgcagcagggggatcaatggattgttataactagtggacctgagggctgatgccagt

SEQ ID NO: 208016 - DNA, 3322 bp, Zea Mays
tttcaccccttgttttcgacatgccattgctcctccctcaaacgccacggcttttttcacgaaccaactgtgacaatccagtcaattctgatctctaggccctcgcttccccttcctgtggatgccatcggggcgctcaccgggacaacatactcctcgacagcgacgccgccgcgcttccttgaggaaagctcgtagctgcccccgcgcaaagctccggtctttcttggccctgacccctcctccccgccgccggcgccgcgtgagcacgccgcgcttggcttgatgctcgacttctgcgcgccccacgggcccgccaagctcccggttgcgtctgtcgctggggtgcgagtcgccggcaggtggttgtggcgatcggcggcggttggggcggtgcgccatggcgtctccgcgcgggcctcatccttcggttcccggatcgggctcgattctcagaattttcacacaagggacctctcccagttgttgtggatcggtccggtgccaggtgacatcgcagagattgaggcctactgccgcatattccgtgctgccgagcagctccatactgcagtcatgtcagcactctgtgatccagagacaggagagtgccctgtacgctatgatgttgaatcagaggatctgccggtgctggaagacaaggttgctgccgtccttggctgcatgctggcgttgctgaaccggggaaggaatgaggtgctctcagggagatcaggtgttgcaagtgccttccagggatctgaggacagcactgctgataggatcccaccgctcgccttgttccgtggagacatgaagcgttgctgtgagagtatgcaggtggcgcttgcaagctaccttgtgccaagtgaacctagggggttggacatatggaggaagctgcagagattaaagaacacttgttatgatgcaggtttcccgagggctgatggttatccatgtccgacattgtttgcaaattggtttccagtgtacctttcgattgtgtcagatgattcaggaatggatgagctagaggttgcattttggaggggaggacaagtcagtgaggagggactggcatggctacttggaaagggattcaaaactattgttgatctccgggaagaagatgttaaagatgatttgtacctttcagcagttcaggaagctgtctcatctgggaagatagaggtggtgaatatgccagttgagattggaactgcaccatcagctgaacaggttcagcaatttgcagctcttgtgtcagatggcgcaaagaagcccatttatctctacagcaaagaaggtgtttctaggacgtctgcaatggtctcaagatggaaacagtatgttactcgttcagagagattggctgtccaaaatcactctctaaatgggaatggtaacatcctgacaaatcacaagaccatgcagcacactggcataccaagttcctctccgaatggagctgaaaatggtatgataacagaatctgataggaccatgaacaatggggaatcaagtgagatagacatagatacagctcgtcataatctggaggtcactaatgccctttgtaatgatcaaagcactcaacaaggtgaaatgcctgacaccgtggcagaactcttgtcaaactttaaactggagagtaacccccttaaagcacaatttcctacttgcgatgttttctctagaaaagagatgaccaagttttttagaagcaaaacagtttatccaaaatctgttctgaactctaggagacgatcaagtagcttggttataaggagaaaacaaaatctctgcacggagcgtagtggaaccaatgactatgaagcagcagagtttgcagttctcagaagttcaaatggaaaatcatttgacagtgattatattctatcagttgcttcaggtatcactgatggaaaaccttcaaacaatgaagcctcattaattgaggaaaaggaaagggaagtttcagttgccactattgacactagagcatctgccaacagttctaatagaaaggttcaggttggatcacaagaatctgctgaaaagaatagtaccccttatcttgagagaaacaaatcagataatgttgatagaaatatgtgtgcatctgcaactggtgttgttagactccagtcaagaagaaaagcagagatgtttctagtacgtactgatggattttcttgtactagagaaaaagtaacagaatcatctctggcttttacgcatcctagtacccagcaacagatgcttatgtggaaatcacctccaaagactgtcttacttttgaagaaattaggagatgagctcatggaagaagctaaagaggttgcttcatttctgcatcatcaagaaaagatgaatgttcttgtggaacctgatgttcatgatacatttgctagaattccaggttatggttttgtgcaaaccttctatactcaagataccagtgaccttcatgagcgaattgattttgttacatgcttgggtggtgatggactcattttgcatgcatcaaacttatttagaacttctgtaccacctgttgtctccttcaatctcggatctcttgggttcttaacttcacataatttcgaaggtttcagacaagatttgagagatttaatccatgggaacaacacacttggaatttatataactcttagaatgcgtctaagatgtgagatctttcgcaaaggaaaatcaatgcctggtaaagtgtttgatgtgctgaatgaagttgttgttgatcgaggttccaatccatacctatcaaaaattgagtgttatgagcataaccaccttatcactaaggtgcaagctgacggggtgatagttgcaacaccaactggcagcacagcatattctactgcagcagggggatcaatggttcatccaaacgtcccatgcatgctgtttactccaatctgccctcactcactgtcatttagacctgtcatccttccggattctgcccggcttgaattaaagataccagatgaggcaagaagcaatgcatgggtttcgtttgatggcaaaaggaggcagcaactgtcaagaggagattctcctgatcaggtgtctcaactggaacgagagattggaccagaaggcattataggcactagaaaattttttattgtttctgtacatatgtaaatttatacacatatagttttgtttttctgccaacatgtacaacgtgtaacatcaaagaatcttgcacgtaaggagctccgtagcttactttatccatgtattcacgtgcttcacaaatcaacttatatattatatgcccgtacgttgc

SEQ ID NO: 208017 - DNA, 1959 bp, Zea Mays
gtgtccatcactccatccatatgagagaggagaatatgcgccatgctcccggagtccctgtagcacaatactgtcagtacatactcctatatagatatgcaggcttccccgtaagacaagccgctcttcacctcggattgcgccttcaattcgttcgtccttccatgtcgattgattcttgattgattgggagtgggggaaaaggagagccggggagggaaaggcaaagcagagcccgtagcgtccttgtcacagacagacagacagatagatagattgttggctatggcgtcgtcgagggggcctctcgccgcgctgctactgctggccgcctgcgccgccttcttccctgccgccggagccgccggcacgccggacgggtcggaggagtggggctacgtggaagtccggcccaaggcgcacatgttctggtggctgtaccacagcccacagcgcgtggacaacggcaagacgccatggccgacagtgctgtggctacagggagggccgggcgcgtccggcgtcgggtacggcaacttcatggagatcgggccgctggacgagaagcttaagccccgcgcaaccacatggctcgccaaggccgacctcctcttcgtggacaacccggttggcacggggttcagctacgtggacggcggcgacaagagcctgatggcgtccacctcgccggcgtcgccctcggggatagctggatctcgccgctcgacttcgtgttgtcgtgggggccgttgctgtaccaggtgtcccgggtggacgagaagggcctgcagcagtgcaacagcgtggcggccaagatcaaggagcagctggagaaggggcagttcgcggacgccgaggcctcgtggtcggagctggagggcgtcgtcctcgccagctccaactccgtcaacttctacaactttctcaaggacgaggcgtcgggggacgccaccgccactgccacagcggcggtgtcgacactggcgtccttcaggcgccggggcggctactcgggctacctcagctccatggcggcgtcttcgtcgtcgtcagcaggcggcttcgacgggctcatgaacacggtcatcaagaagaagctcggcatcatcccaaaggatctcaagtggggagagcagtcagacgacgtgttcgatgctctggctggagacttcatgaagcccaggatacaggaggtggaccagctcctcaagctggcgtcaatgtcaccatctacagcggacagctcgacctcatctgcgcgaccaaaggcaccatggactgggttcagaagctcaagtgggacgacctcaacagtttcctgagctctcctagaacgcccatctactgcgacaaggaggggcagtccggcacccaggccttcgtcaagtcctacaagaacctcaatttctactggatactcgaagccggacacatggtaattaacgaatggtacccctggacaacccttgccctgcgctcaagatgctggctgacattacgcgatctcctgccgagtagcaggaggaagaaaacaaggcgacggaatggaacggcctgacaccagttcttcaagattcttctcttttcatacagtcagagaaaaataagtcattggtggtagcattcatacatgcaacaataaacacaaaggaaaaggtagtgataggatcagacagatatttaattcggcagatattattgtgtagcaccgctatagagcttgcagctgaatttccaacatgatgatctgattgacagtgcttctcctgtctcaactcaacacctgagctgacacgatctcgcctcctttctgaattgcctctgctcccttgtattaaccgtaacgactaatatgcaattagacctatgtataagcctgcaaacgagcatcctagtctgtttaatcatgatttaactgtatatagttatagtttgttaggggcttctttataaatctat

SEQ ID NO: 208018 - DNA, 994 bp, Zea Mays
tagcgtaatagtgttgtcacaccgtggtattttttaaacagtaacccatccacccatccatcggggatcaccaggggagcaagatgtcgactgccaccgccgcaagattgcccgctcccagatccggggcaagctatcactatcagaccgcggctccggcggccaacaccctctccttcgccggccacgcgaggcaggcggcccgcgcgtccgggccacggctgtccagcaggttcgtggcggccgcggcggccgtgctgcacaaggtgaagctggtcggcccggacgggacggagcacgagttcgaggcccccgacgacacctacatcctcgaggcggccgagaccgccggggtggagctgcccttctcctgccgcgccgggtcctgctccacctgcgccgggaggatgtcggccggcgaggtcgaccagtcggaggggtccttcctcgacgacggccagatggccgaggggtacctcctcacctgcatctcctaccccaaggcagactgcgtcatccacacccacaaggaggaggacctgtactagagattgggttgctttatgcatatgcagtggctgctccaaaggtggtggtgcgttcgttgctgttccgtgccaccagcggaaggggggtttcgttgttgagatgggctagttcttgtcatcaatttcggtcgttcgatgagatcatggcatatgagttgtggcaataatgctggcaatatggttttgcaattcaaactgcaaatgtgaccagcaatgtcaaaaactgcacactgtgtctgtgtgcgaacttgtgaaattggcattgagttcaattggctagttggctcgagatttcagttttcatctccatttagaggtcatttgggcctaagttggtgcttagtgtggccggatagaagcccactaaggccttgttcgtttgtgtcggattggtgggtcggaacgatttctagccggattgtttctctaatttatataaactttga

SEQ ID NO: 208019 - DNA, 760 bp, Zea Mays
atcagctgcactgtcctcccacaagacaactcaccagacacctttcctcctcccccctgaccccggcccattcaggtgaatgtgccaagcagttgttcctacaacgtggtgactgttaaatgtgggcattgtacaatggtgctgtccatggatctcagtcccttccatcagcaggcacgcactgtcccagacaaccaggttgtccagaacagagggtttcagtataacaattttgggagctacgagcaagcctcgtcaagaaatctacgaacgcctcccatgtatccagtgtcaaacaatcagccacaagtgccaccaatacgaccctcagagaagagacagcgtgttccatcagcatacaacagattcatcaaggaagaaatacaaaggataaagacgagcaacccagagattagccacagggaagcattcagtgctgcagcaaagaattgggctcatctccctcggctccatttcggcctcagcgtcgctgacggcggcggcggcagcaactagggaagacgatgattacggatcgagctcttcgccttacacatatatatatgcagtgtgctatgtcgtgcttggattttgtaagccttattaagttttttgacaacctgtgttttcagacctgttgcgtacttgcatgcatgaatcctgcattgcgtgcagtaattaacatgtttgatgctatatatgatatatgcatgcatggtgtacaacattactaaataaatggaaaatatttgttcaagaa

SEQ ID NO: 208020 - DNA, 3342 bp, Zea Mays
ctagctcctggcaggcaaagcgaagcttacacagacagggaaggaagcaaccgaagcagccaggaagcagccgttggcaaggcgcagtccctctcacctcacattccccgtctgggcatctccctcgcatctcctccacaggccacagcgccaccgcggcggcgtgccttttacaaatccgaggggcgtaaggaattccgccgcgtcctcccagaagaaaaacaaaagcgacaagcggctcgccctgcgggaggacccgacgacagctcactcgcgtgcgccacccatccacctccccgagacccgacccagatctcatctcgcgcgcggcggtccatggccaccgccgccaccgcttcccacccggcttccgcctccacctccggccgcgacgctctcgccgccgcctcctcctcccccgccgccgtctgcctcgtcccgttcaggtggtgggcgcgggtgcgggaggaggaggcggcgggcggggtgcagtacgcggccaccgccgccgcgtcgccctcctactacggcctcaggctgcttcacagcttgctgcacccggatctcgtcctgcgcctcgagcgcggggagtgccgcgccggtggcgggaacggaggcgggcgcagctacgcgctcgtcccggccgacgagctctccagggcgctcgccaggcaaaactctggtttgggtttacaaaataagcactcctttgctggagatagtgctggtgcttatcctttggtgcttaggatctctgtccgagaaacaagtatcttgacactgaagatcagcaaaaaggacaatccatttgagaattacaaacgggctaacaagatttttaatgtggattctcaaccagttcatgtttgggatttttcagggcagacaaacctaatattaatgaatgaatggaatagactacatgactgctgccatgcagatcaagagaatcttctggaagtgcaagtctatgcaatgtctgactccttaacatccaaaattggtggtaccaacaaagaaaattatggagatattagtgatatgaattctgattcgtcttacagaagttttggaagagctggttctatggggttaataggattggagaatctcggaaatacttgctttatgaacagttcaattcaatgtttggctcacacaccaaaacttgttgaatacttccttggtgattatgccaaaaatataaaccggactaatccattgggattgaacggtgaacttgccttggcgtttggagaactgttgaggagcttatggaccactgacggaaaaccagttccacctcattatttcaaggaaaaaattgcatgttttgctcctcagtttggtggctttaatcagcatgattcacaggaacttcttgcttttttactggatggtctccatgaagatcttaaccaggttaaatgtaaaccgtatgaagaagcaaaggatgcaagtggccgtcctgacgaagaagtagcagatgagtactggagcaaccatttagctcgaaatgactctgttatagttgatacatgccatggacagtacaaatctacattaacttgtcctacttgcattttcagcactgatggtagcagagaaccatgctcgtatgacgtcagtgtgccaaaatttgggactctgagtgatcttgttcaggctttaagcattgtttgcctacttggagatgatgagatcctgctggttacagaggtctataataactgcatcatccgatacttggaggagccttcagattcagtttcattgctgagggatggagataaactagcagcataccgtctacccaaaagacatgagaaatccccccttgtggtttttacacaccaacattttgtccagcattctagtgatggtaatttaactccacaaatgagggagtttgaggccccacttttggcagcacttccagaggaaattagtggattatctcttcaggatatctacctaaagttgttgagtccatttcaactttccaacggggctagttcgcttaatgattgtatggagtctaatagtgactccgtcgatacgccttctgattcaggcagtatcaattttcagaacagccaattggaagatggccctgaaagcaaccactgtagtgctagtgaatgtgaagtaacaaaaggacctgatgatttatacgatggggtttctggttctaacaaggaagcacatatggacttcgaattttatttaaaaagtgaaaggggcgagggccagcaacagaagatagaaattaatgagctccatttattattggagacagcaccaagccggttgcatgtgaatgtccactggctacagaatgcttcaagaaaatatgccacctcaatgctgaacaatctacctgagatccacaagctcgagcttatcccgaaaggaactgaagattctgttgcactacatggttgtctggaagcctttctaaaagaggaaccgttggggccggaggacatgtggtattgcccgcgctgcaagaagcatcagcaagcgatgaagaaactggatctgtggaggctgcccgaggttctggtgatccacctcaaacggttctcctacacccagttcacaaggaacaagctggagacgttcgtcgacttccccaccgtcgatttggacctgtcgtcctacgtcgcggacaagagcgagcagccgagcagccattatcgcctgtacgctgttagcaaccactacggaaacatgggagggggccattacaccgccagcatctatcatgaggaagggaaggggtggtacaagttcgatgacgactgcgtgacccctatgagcgaggacagcataaagaccccggctgcctatgttctgttctacagacgagagtgactgactggggattgaagcgcatttttctgcaggtgggttttggcgtgtctgagttttctaacgtttcggcatttgaatctctcaagccatactgacgcctaccggtgatacaacaacattatgtacagattcatctgccaacaggagagagagagagagagagagagagagagagagagagagagagagagagagagagagagagagagacctagctcagtgcaatattctttttttcgcatcagctcacagtattcttatatgggtagtacatggaccccacccacccgcacacaccaacattgtaattcctccgacttcaaccggtgatcacatcacattcaccattaaagaaagggtcaatagacacatcttttgtcgtcgcgcatcgaatcggagccagggcgatgtagtggcagtcgtgaccagcccccgttctgatcggttgggcgtgcgacaacgacg

SEQ ID NO: 208021 - DNA, 3137 bp, Zea Mays
tcatctcgcgcgcggcggtccatggccaccgccgccaccgcttcccacccggcttccgcctccacctccggccgcgacgctctcgccgccgcctcctcctcccccgccgccgtctgcctcgtcccgttcaggtggtgggcgcgggtgcgggaggaggaggcggcgggcggggtgcagtacgcggccaccgccgccgcgtcgccctcctactacggcctcaggctgcttcacagcttgctgcacccggatctcgtcctgcgcctcgagcgcggggagtgccgcgccggtggcgggaacggaggcgggcgcagctacgcgctcgtcccggccgacgagctctccagggcgctcgccaggcaaaactctggtttgggtttacaaaataagcactcctttgctggagatagtgctggtgcttatcctttggtgcttaggatctctgtccgagaaacaagtatcttgacactgaagatcagcaaaaaggacaatccatttgagaattacaaacgggctaacaagatttttaatgtggattctcaaccaggcagacaaacctaatattaatgaatgaatggaatagactacatgactgctgccatgcagatcaagagaatcttctggaagtgcaagtctatgcaatgtctgactccttaacatccaaaattggtggtaccaacaaagaaaattatggagatattagtgatatgaattctgattcgtcttacagaagttttggaagagctggttctatggggttaataggattggagaatctcggaaatacttgctttatgaacagttcaattcaatgtttggctcacacaccaaaacttgttgaatacttccttggtgattatgccaaaaatataaaccggactaatccattgggattgaacggtgaacttgccttggcgtttggagaactgttgaggagcttatggaccactgacggaaaaccagttccacctcattatttcaaggaaaaaattgcatgttttgctcctcagtttggtggctttaatcagcatgattcacaggaacttcttgcttttttactggatggtctccatgaagatcttaaccaggttaaatgtaaaccgtatgaagaagcaaaggatgcaagtggccgtcctgacgaagaagtagcagatgagtactggagcaaccatttagctcgaaatgactctgttatagttgatacatgccatggacagtacaaatctacattaacttgtcctacttgcagtaaaacatctgtcacctttgacccatttatgtacttatctttgcctgtaccttccacggcaaagagggtaatgactgtaacagttttcagcactgatggtagcagagaaccatgctcgtatgacgtcagtgtgccaaaatttgggactctgagtgatcttgttcaggctttaagcattgtttgcctacttggagatgatgagatcctgctggttacagaggtctataataactgcatcatccgatacttggaggagccttcagattcagtttcattgctgagggatggagataaactagcagcataccgtctacccaaaagacatgagaaatccccccttgtggtttttacacaccaacattttgtccagcattctagtgatggtaatttaactccacaaatgagggagtttgaggccccacttttggcagcacttccagaggaaattagtggattatctcttcaggatatctacctaaagttgttgagtccatttcaactttccaacggggctagttcgcttaatgattgtatggagtctaatagtgactccgtcgatacgccttctgattcaggcagtatcaattttcagaacagccaattggaagatggccctgaaagcaaccactgtagtgctagtgaatgtgaagtaacaaaaggacctgatgatttatacgatggggtttctggttctaacaaggaagcacatatggacttcgaattttatttaaaaagtgaaaggggcgagggccagcaacagaagatagaaattaatgagctccatttattattggagacagcaccaagccggttgcatgtgaatgtccactggctacagaatgcttcaagaaaatatgccacctcaatgctgaacaatctacctgagatccacaagctcgagcttatcccgaaaggaactgaagattctgttgcactacatggttgtctggaagcctttctaaaagaggaaccgttggggccggaggacatgtggtattgcccgcgctgcaagaagcatcagcaagcgatgaagaaactggatctgtggaggctgcccgaggttctggtgatccacctcaaacggttctcctacacccagttcacaaggaacaagctggagacgttcgtcgacttccccaccgtcgatttggacctgtcgtcctacgtcgcggacaagagcgagcagccgagcagccattatcgcctgtacgctgttagcaaccactacggaaacatgggagggggccattacaccgccagcatctatcatgaggaagggaaggggtggtacaagttcgatgacgactgcgtgacccctatgagcgaggacagcataaagaccccggctgcctatgttctgttctacagacgagagtgactgactggggattgaagcgcatttttctgcaggtgggttttggtcggcaatccagagcagactgcctccctacacagtttgctgcttcaggcgtgtctgagttttctaacgtttcggcatttgaatctctcaagccatactgacgcctaccggtgatacaacaacattatgtacagattcatctgccaacaggagagagagagagagagagagagagagagagagagagagagagagagagagagagagagagagagacctagctcagtgcaatattctttttttcgcatcagctcacagtattcttatatgggtagtacatggaccccacccacccgcacacaccaacattgtaattcctccgacttcaaccggtgatcacatcacattcaccattaaagaaagggtcaatagacacatcttttgtcgtcgcgcatcgaatcggagccagggcgatgtagtggcagtcgtgaccagcccccgttctgatcggttgggcgtgcgacaacgacg

SEQ ID NO: 208022 - DNA, 2824 bp, Zea Mays
cactggtttcaactgcaacatgcaaaactctggtttgggtttacaaaataagcactcctttgctggagatagtgctggtgcttatcctttggtgcttaggatctctgtccgagaaacaagtatcttgacactgaagatcagcaaaaaggacaatccatttgagaattacaaacgggctaacaagatttttaatgtggattctcaaccagttcatgtttgggatttttcagggcagacaaacctaatattaatgaatgaatggaatagactacatgactgctgccatgcagatcaagagaatcttctggaagtgcaagtctatgcaatgtctgactccttaacatccaaaattggtggtaccaacaaagaaaattatggagatattagtgatatgaattctgattcgtcttacagaagttttggaagagctggttctatggggttaataggattggagaatctcggaaatacttgctttatgaacagttcaattcaatgtttggctcacacaccaaaacttgttgaatacttccttggtgattatgccaaaaatataaaccggactaatccattgggattgaacggtgaacttgccttggcgtttggagaactgttgaggagcttatggaccactgacggaaaaccagttccacctcattatttcaaggaaaaaattgcatgttttgctcctcagtttggtggctttaatcagcatgattcacaggaacttcttgcttttttactggatggtctccatgaagatcttaaccaggttaaatgtaaaccgtatgaagaagcaaaggatgcaagtggccgtcctgacgaagaagtagcagatgagtactggagcaaccatttagctcgaaatgactctgttatagttgatacatgccatggacagtacaaatctacattaacttgtcctacttgcagtaaaacatctgtcacctttgacccatttatgtacttatctttgcctgtaccttccacggcaaagagggtaatgactgtaacagttttcagcactgatggtagcagagaaccatgctcgtatgacgtcagtgtgccaaaatttgggactctgagtgatcttgttcaggctttaagcattgtttgcctacttggagatgatgagatcctgctggttacagaggtctataataactgcatcatccgatacttggaggagccttcagattcagtttcattgctgagggatggagataaactagcagcataccgtctacccaaaagacatgagaaatccccccttgtggtttttacacaccaacattttgtccagcattctagtgatggtaatttaactccacaaatgagggagtttgaggccccacttttggcagcacttccagaggaaattagtggattatctcttcaggatatctacctaaagttgttgagtccatttcaactttccaacggggctagttcgcttaatgattgtatggagtctaatagtgactccgtcgatacgccttctgattcaggcagtatcaattttcagaacagccaattggaagatggccctgaaagcaaccactgtagtgctagtgaatgtgaagtaacaaaaggacctgatgatttatacgatggggtttctggttctaacaaggaagcacatatggacttcgaattttatttaaaaagtgaaaggggcgagggccagcaacagaagatagaaattaatgagctccatttattattggagacagcaccaagccggttgcatgtgaatgtccactggctacagaatgcttcaagaaaatatgccacctcaatgctgaacaatctacctgagatccacaagctcgagcttatcccgaaaggaactgaagattctgttgcactacatggttgtctggaagcctttctaaaagaggaaccgttggggccggaggacatgtggtattgcccgcgctgcaagaagcatcagcaagcgatgaagaaactggatctgtggaggctgcccgaggttctggtgatccacctcaaacggttctcctacacccagttcacaaggaacaagctggagacgttcgtcgacttccccaccgtcgatttggacctgtcgtcctacgtcgcggacaagagcgagcagccgagcagccattatcgcctgtacgctgttagcaaccactacggaaacatgggagggggccattacaccgccagcatctatcatgaggaagggaaggggtggtacaagttcgatgacgactgcgtgacccctatgagcgaggacagcataaagaccccggctgcctatgttctgttctacagacgagagtgactgactggggattgaagcgcatttttctgcaggtgggttttggtcggcaatccagagcagactgcctccctacacagtttgctgcttcaggcgtgtctgagttttctaacgtttcggcatttgaatctctcaagccatactgacgcctaccggtgatacaacaacattatgtacagattcatctgccaacaggagagagagagagagagagagagagagagagagagagagagagagagagagagagagagagagagacctagctcagtgcaatattctttttttcgcatcagctcacagtattcttatatgggtagtacatggaccccacccacccgcacacaccaacattgtaattcctccgacttcaaccggtgatcacatcacattcaccattaaagaaagggtcaatagacacatcttttgtcgtcgcgcatcgaatcggagccagggcgatgtagtggcagtcgtgaccagcccccgttctgatcggttgggcgtgcgacaacgacg

SEQ ID NO: 208023 - DNA, 1137 bp, Zea Mays
cttggtggcacctagtccctaggcagatttgctggtaaacttattggacgttactatgacagtcaagggaatcctacgaaatatctgaagggtgtagaaatgaaggcaaagagaggtgcacagcttcttgaaaagcagaagagtgatgaagctaaaatacctggctgcaattcaaaatggagccagcaagaaggtggagaagtctggtgcgacacgggctatccaagattggtgaggaggccaggtgacatagctctgaccggacaagttagccaaaggtgcgcttgcttccaggaaaacgagctggacaaagccgggctagtggtgtacgaagggtgtgattacctgtcccagtcttgcaaagtaaactaggccgtgcgtctcccttccacggacttgttgctttggggggtactcaaacgcaaggttcatcagttacgggggcgctgcgacattccacgagcacccaccagccacgcatgcatcatgaaggcgggcctttctgctctgtcccgcgtgaaacacctggtgcaacgtcgtggttcagttcagatgcctagatacgcaattgattggaagatacccgcgatcgaatcaaatgatggtaacgctgcgccgccacgggcaagatctcgatcctaaaggctgtccgtgttaataggcatggggccttgggctgtcgattgatcgaggctgccttgcaagttgcgccgtctgcaccataggctacctccatcaatgaaatgcatttttttggagagtcattttagccatttgcatagcgaacagtgtgtgcgtgtgtggtacgcaaatttttgtttctccaagttggatcatgcatatgcagatttatacagtgccgtgcgagaggcattttacgtttgcatacccctaacccctttgcgtgatctgttggagatagatcccaaactcattctctctgctgcaaaatacacgctctttggattgacgatggtatatttccaaaccaaatgtcttccttaaagcacgaggactgctgcagccggttccccgtacgtttctcttgaactcattgaatcataaccatcactgcgtagtaggcagacttgaaagcaaaccatacagaaaacgtcaaaaatttgcagacagatccag

SEQ ID NO: 208024 - DNA, 1168 bp, Zea Mays
ttatcgctagctggtgatggtttgactgattccttacagggtttatcaagcagtgagatttgctggtaaacttattggacgttactatgacagtcaagggaatcctacgaaatatctgaagggtgtagaaatgaaggcaaagagaggtgcacagcttcttgaaaagcagaagagtgatgaagctaaaatacctggctgcaattcaaaatggagccagcaagaaggtggagaagtctggtgcgacacgggctatccaagattggtgaggaggccaggtgacatagctctgaccggacaagttagccaaaggtgcgcttgcttccaggaaaacgagctggacaaagccgggctagtggtgtacgaagggtgtgattacctgtcccagtcttgcaaagtaaactaggccgtgcgtctcccttccacggacttgttgctttggggggtactcaaacgcaaggttcatcagttacgggggcgctgcgacattccacgagcacccaccagccacgcatgcatcatgaaggcgggcctttctgctctgtcccgcgtgaaacacctggtgcaacgtcgtggttcagttcagatgcctagatacgcaattgattggaagatacccgcgatcgaatcaaatgatggtaacgctgcgccgccacgggcaagatctcgatcctaaaggctgtccgtgttaataggcatggggccttgggctgtcgattgatcgaggctgccttgcaagttgcgccgtctgcaccataggctacctccatcaatgaaatgcatttttttggagagtcattttagccatttgcatagcgaacagtgtgtgcgtgtgtggtacgcaaatttttgtttctccaagttggatcatgcatatgcagatttatacagtgccgtgcgagaggcattttacgtttgcatacccctaacccctttgcgtgatctgttggagatagatcccaaactcattctctctgctgcaaaatacacgctctttggattgacgatggtatatttccaaaccaaatgtcttccttaaagcacgaggactgctgcagccggttccccgtacgtttctcttgaactcattgaatcataaccatcactgcgtagtaggcagacttgaaagcaaaccatacagaaaacgtcaaaaatttgcagacagatccag

SEQ ID NO: 208025 - DNA, 2168 bp, Zea Mays
cgaagacgtacgttgactcgagtctgccccggctcagcccaatcagcttgtcggccagctcctctcgtcgatcgtttccaccaaatccaccggtctgccggccccgtcttccgctccgacgacccggagccggaggtctgtccagttggtagtcgcctcaagcaccaattcgcccctccgccgaagctaagctgctcggtcccaagggcatccctagctggctgaggcggatcggtagcaaaaccgatactgttacgttgccacggaggcagtttgatttggtggacctaacggccttgcggatctcttgggagccagagcgatggcgcgcggtgctcgcttcctccttgttctcgcgctgctggtcgcgctacttgccgtcgtcttccagctttatcgcctcaggaagccgaggttgtggacagtggaggagctatcgctgtacaatggaaccgatgaggggttgcccatactactcgcgattttgggctcagtgtttgacgtcacaaaagggaggtcacattatggccctggaggaggttatcatcattttgctgggagggatgcatcacgggcatttgtttctggaaattttacaggtgatggtttgactgattccttacagggtttatcaagcagtgaggtaaacagcattgttgattggaggaagttttactttgaaagatatatgtgagctcctttctaagagccaccttcatgttcttcatgttacttatttccttcatgaggcttcatagaactgtatgcagttttccaggaaatgctaggtgctaggctggcagcttggtggcacctagtccctaggcaggctagtggagcacgatttggaacactaattatgtgtttgtgctatagcacttgctctagattctcttgatcatgttcttaaatccatcaccaccatatgtccataccatgtgttattcagttagtaccaaatgtgtataccatatggaacacacagtggatcatgttagagaaactactcaactcataatatatacccttgtaacatttcttggcatatatgatgcagatttgctggtaaacttattggacgttactatgacagtcaagggaatcctacgaaatatctgaagggtgtagaaatgaaggcaaagagaggtgcacagcttcttgaaaagcagaagagtgatgaagctaaaatacctggctgcaattcaaaatggagccagcaagaaggtggagaagtctggtgcgacacgggctatccaagattggtgaggaggccaggtgacatagctctgaccggacaagttagccaaaggtgcgcttgcttccaggaaaacgagctggacaaagccgggctagtggtgtacgaagggtgtgattacctgtcccagtcttgcaaagtaaactaggccgtgcgtctcccttccacggacttgttgctttggggggtactcaaacgcaaggttcatcagttacgggggcgctgcgacattccacgagcacccaccagccacgcatgcatcatgaaggcgggcctttctgctctgtcccgcgtgaaacacctggtgcaacgtcgtggttcagttcagatgcctagatacgcaattgattggaagatacccgcgatcgaatcaaatgatggtaacgctgcgccgccacgggcaagatctcgatcctaaaggctgtccgtgttaataggcatggggccttgggctgtcgattgatcgaggctgccttgcaagttgcgccgtctgcaccataggctacctccatcaatgaaatgcatttttttggagagtcattttagccatttgcatagcgaacagtgtgtgcgtgtgtggtacgcaaatttttgtttctccaagttggatcatgcatatgcagatttatacagtgccgtgcgagaggcattttacgtttgcatacccctaacccctttgcgtgatctgttggagatagatcccaaactcattctctctgctgcaaaatacacgctctttggattgacgatggtatatttccaaaccaaatgtcttccttaaagcacgaggactgctgcagccggttccccgtacgtttctcttgaactcattgaatcataaccatcactgcgtagtaggcagacttgaaagcaaaccatacagaaaacgtcaaaaatttgcagacagatccag

SEQ ID NO: 208026 - DNA, 894 bp, Zea Mays
ggttttccatctagggttaggtcaaggcctccccgagcctctctatatgaacggagacaaggcagccgccgccgtccccattaacatcaccgagacctatcgccgcagaaccaccgaatccacggcatcggagagtgtagaggttagtactaggcggaggtcaagatggtgtgcatccggcaggcgactatcgacgacctgctggcgatgcaggcgtgcaacttgatgtgcctgccggagaactaccagatgaagtactacctctaccacatgctgtcttggccgcagctcctcttcgtcgccgaggactacggcggccgcatcgtcggctacgtgctcgccaagatggaggaggacccctccgagccctgccacggccacatcacctccctcgcggtgctccgctcccaccgcaagctcgggctcgccaccaagctcatgtccgccgcgcaggcagccatggaccaggtcttcggcgccgagtacgtctccctccacgtccgccgatccaaccgcgccgccttcaacctctacacctccactctcgggtaccagatccacgacatcgaggccaagtactacgccgatggagaggacgcgttcgacatgcgcaagcctctccggcagccgcaacctaagaagcaccaccatcaccaccaccacggccccggtgggtgctgctcccacgacgcacctacggcgacgactggttcttctcctcagtcttttagttcgccggataagaaggctaacacttgacggatgagttgttcgttgttctcaaactgtgattttggttgaccgatcaaatcagtagttacgttgtagaatgtgtagtgtatgtagggaaatttgctttttggtcgcttatccttttagctcgctaaaatacac

SEQ ID NO: 208027 - DNA, 1786 bp, Zea Mays
ggcccgggccactgcactgcgccatccaaggacgactggacgaggaagaaaaaggatttcgaaaaagcgacgctgccgggtatatatacggcgccggcgccgaggagagaggaccccggccgatcccgcacccctgactgtcagccgcgatccgctcttttttgcgtgcagcggcggagcaggagagatggcgtcggaggccaaggacgtgggcatcctcgccatggacatctacttcccgcccaactgcgtgctccaggaagagttggaaacacatgatggcgtgagcaaagggaagtataccattgggcttgggcaggaaagtatggcattttgcactgaagttgaggatgttatttcgatgagcttgacagtggtgaagtccctcctgaaaaattataacattgacccaatgtgcattggacgtttggaagttggcagtgaaacagtaatagacaagagcaagtctataaagacatggctgatgcagatatttgaggaatctggcaatactgatattgaaggagttgactcctcgaatgcatgttatggtggaacagctgcattgtttaattgtgttaactgggttgaaagcaagtcatgggatggtcgctatggacttgttgtttgcacagacagtgcggtttacgctgaaggtccggctcgccctactggtggtgcggctgctattgcaatgctgattggaccaaatgctcctatttgttttgaaagtaaatatagaggatctcatatggcccatgtatacgacttttacaagcccgatcttgcgagtgaatatccggtggttgatgggaagctatcacaaacatgctacctcatggcattggactcctgctacaatgtattttgcaaaaagtatgaaaaacatgaggggaagcagttttcaatttctgatgcagattatgttgtgttccattctccatacaacaagcttgtacagaaaagcttcgctcgtttgtactacaatgatttcttgagaaactgcagcacggttgatggagagtcaagggaaaaattggcaccctatgcaggcttgtcatctgaagaaagctaccagagtcgcgaccttgaaaaggcatctcagcaagtcgccaagaatctgtacgagaccaaggttcagccaacaacattgatcccaaaacaagttgggaatatgtatacagcatcactctacgcagctcttgcatcggttgtccatagtaggcatgaaactctggccagaggattgttatgttttcgtatggcagtgggttgacatcaacaatgttctctttcatgattaatgaaggccatcaccctttcagtctgctaaacatcgcaaacatactggatatttccaagaagctgaaggcaaggcacgtggttcccccagagaaatttgtggaggcactgaaactgatggagcaccgctatggggcaagagatttcgtgacgaatcaagatacaagtctgctatccgcaggcacatactatctcacgcacgttgactccaagtacagaaggttctacgacgtgaaaggtgacggtgtcgccactgcaatgtccaacggccactgatctttcttctgcccgaagctgcaacaagtcaaataacagagaatcactggctacatccaggttatgctgatgaatgcacgatttcatgtttaacacgatcaatgcatctggttacatccaggttatgctgatgaatggacattttggttccatccccatatcctaatgtagtcactatataattcctttccctctttgatgaagtttc

SEQ ID NO: 208028 - DNA, 1356 bp, Zea Mays
atggaggtcttggcgacatcgacacccagcactcgtagcatgccttgttgcccaggttatgaacagtttggaatctcaagaaaaggctcacaggacaacactgatgaatactgcacaatattctatgaaaaggagaaggtttcacatctctggctaatcatttctgtggagcttactgaaggtggcactttttggttgtcggaatcaccatcggttccaggaagcatttcatggggagcaaaggcaccctgcattgcaacatgggcaatatcctgtaatgtgattctttttcttgctctttattgttctattgttttcttagtatcttgatggcagtgaagattgttgccttaacatgatgtacacacgtttcaactcaaaagactagaaccacctggattcagtttccagatcgtaaatacaaatcttgatgaagttagccctcgtgctcgacgaagaagtgctttacttacatggcaacatatagcatcgctgccacccaatttgcctgttatctattgtggaggcttcaatacacagaaggaatctatgactgggcggtttttgcttggcagatccagagaacatggtgttgttggtgatatgagagatgcttggccaaatgctcgagtgcgaaaaaatgtttcactaatacacacatatcatggatttaaaggggagaaacaaggtgccctggaatttcttaaattgatatttagagctctttgcctctgctgggatcgacagacacaggacttgcatatcgactggatcttgtttagaggacgcccattggttcctgcactttgtgaggtcattaatgacaatatagatggtgtttatccgtcgtcgcacttccctatctttgccgagtttttgcttccacgctcagtccgcctagctgagacaccttcatagctattgtgtcaattttctgttctatttttcccaatcttattttgattacggctgattgtttctttcgaccacttcaccatgatcttgcggtaacccccctttacaaccattgttgggtttctttctgttatcccattccgcaaaacaagacaatgcacatgtgcatccttgtatgtttcctgtcactagtccctattatgtgttcgccttagctttgttatcttcttaaagttcactttttccttatgtcattgatttttagactgtcatatataccgtgtatatatatggtatgaatatgttgtcatgtatagtcggccgatccttgtatatgttataccgttatatatgaagtgtgtatagagatattgggagatttcatttggttctgtttccataaaccatgagatctctcctctctttatatatatatcttta

SEQ ID NO: 208029 - DNA, 1228 bp, Zea Mays
atggaggtcttggcgacatcgacacccagcactcgtagcatgccttgttgcccaggttatgaacagtttggaatctcaagaaaaggctcacaggacaacactgatgaatactgcacaatattctatgaaaaggagaaggtggagcttactgaaggtggcactttttggttgtcggaatcaccatcggttccaggaagcatttcatggggagcaaaggcaccctgcattgcaacatgggcagtttcaactcaaaagactagaaccacctggattcagtttccagatcgtaaatacaaatcttgatgaagttagccctcgtgctcgacgaagaagtgctttacttacatggcaacatatagcatcgctgccacccaatttgcctgttatctattgtggaggcttcaatacacagaaggaatctatgactgggcggtttttgcttggcagatccagagaacatggtgttgttggtgatatgagagatgcttggccaaatgctcgagtgcgaaaaaatgtttcactaatacacacatatcatggatttaaaggggagaaacaaggtgccctggaatttcttaaattgatatttagagctctttgcctctgctgggatcgacagacacaggacttgcatatcgactggatcttgtttagaggacgcccattggttcctgcactttgtgaggtcattaatgacaatatagatggtgtttatccgtcgtcgcacttccctatctttgccgagtttttgcttccacgctcagtccgcctagctgagacaccttcatagctattgtgtcaattttctgttctatttttcccaatcttattttgattacggctgattgtttctttcgaccacttcaccatgatcttgcggtaacccccctttacaaccattgttgggtttctttctgttatcccattccgcaaaacaagacaatgcacatgtgcatccttgtatgtttcctgtcactagtccctattatgtgttcgccttagctttgttatcttcttaaagttcactttttccttatgtcattgatttttagactgtcatatataccgtgtatatatatggtatgaatatgttgtcatgtatagtcggccgatccttgtatatgttataccgttatatatgaagtgtgtatagagatattgggagatttcatttggttctgtttccataaaccatgagatctctcctctctttatatatatatcttta

SEQ ID NO: 208030 - DNA, 822 bp, Zea Mays
gaaccatatcgtcagggtctcgaaaacacctcttgggctattactaaagaacatggtgttgttggtgatatgagagatgcttggccaaatgctcgagtgcgaaaaaatgtttcactaatacacacatatcatggatttaaaggggagaaacaaggtgccctggaatttcttaaattgatatttagagctctttgcctctgctgggatcgacagacacaggacttgcatatcgactggatcttgtttagaggacgcccattggttcctgcactttgtgaggtcattaatgacaatatagatggtgtttatccgtcgtcgcacttccctatctttgccgagtttttgcttccacgctcagtccgcctagctgagacaccttcatagctattgtgtcaattttctgttctatttttcccaatcttattttgattacggctgattgtttctttcgaccacttcaccatgatcttgcggtaacccccctttacaaccattgttgggtttctttctgttatcccattccgcaaaacaagacaatgcacatgtgcatccttgtatgtttcctgtcactagtccctattatgtgttcgccttagctttgttatcttcttaaagttcactttttccttatgtcattgatttttagactgtcatatataccgtgtatatatatggtatgaatatgttgtcatgtatagtcggccgatccttgtatatgttataccgttatatatgaagtgtgtatagagatattgggagatttcatttggttctgtttccataaaccatgagatctctcctctctttatatatatatcttta

SEQ ID NO: 208031 - DNA, 1874 bp, Zea Mays
gccgaaatgacgcggacgcccccgtaaaaaggacgcgccaaagggccgcactccattggccgtttatatctgtggcgccggccgcgggacgcgtagccagacgcagaccccctgcctgttgccctgtcgcagtctagcatcaggcatccatcggcgagagcgagagcgagagcgttcgcagcaagcctacctcaccttgcctgcctgtctgcctgtctgtctgtctccagagctgcgcttgtccggagacggagccgactgaacatggccggagatccgggggacgcgccggaggtgggaggcggcggcatacgctccgtgctcaccacggcctcgctcgtcgctccctccggggacgaggttcagtttcgggagatcgacggcaagatcatcggcctctacttcgcggcaaactggtatccgaaatgcgaggctttcaccccggtgctggccgcggcctacgagcagctcaaggagcgcggcgccggcttcgaggtcgtgctggtgtcgtgcgacgaggaccggccgtcgttcgagcggttccacggaaccatgccgtggccagcggtgcctttcggcgacctcagctgcaagaagcgcctcagcgagaggttccaggtggagggcatcccgcgcctggtggtgctcgctccggacggcggcgcggtggtacacccggacgccgccgacctcgtgcaccgctacggcgagagggcgttcccgttcacggccgcgagggtggcggagctggaggcggatgaccagcgcaagtacgcgtcccagacgctggagaagctcttctccgtcagcgggaaagagtacgtgatgaacagtggtaataatgaaaaggttccggtctcgagcctggtggggaagacggtggggctctacttctcggctaaccattgcgcgccgtgtatcaagttcacgacgaagctggcggccatctacagcagcctcaggggcaaggcggaggacttcgaggtcgtgtacgtccccatggacagggaggaggacgggtacctgcgctcctgcggcgacatgccgtggctggcgctcccctacgacggcgcgacggtgacgcgggacggccggaacctggtgaacctctacttcgacatggccttcccgttcacggacgcgcagatcaggctgctgcaggaggcggaggacgaggcggccaaggagtacccgcggtcgctgcgccaccggggacaccgccacgagctcagcatcgtgtcggagaagtccgggggagggccctacatctgctgcgagtgcgaggagcagggactcggctgggcgtaccagtgcatcgcctgcggctacgagatacacctcaggtgcggccagaatgcggagggcggcagcgcaggaactgcttagctagctaggcgacgtacggcagtcggcagcatgccagcataacagcatcactggagtggtgtctacctattagactgctgcatgcgtattggacttggacatggtctgtgtttgatcccaacaaacgtcagcttgctctacgtcaagcaagtctgatgctaaagtagtcaaatagatagatgagaaatgcatagccttccttgtaaggcttagtaggtggttagctgagtgaacaacaaaatgaagctgcagcaatcaatcaatctactgtggcaggtgttatgcaaatcttgctgcactgcccaaccaaactactgcattttccagtgcgccttcttcgagcctaatttgacaccactgaaattaggctttatgtgcatagtgataaacaggatgtacctctgaaccgaagtaatcctttttgaggtacatttaacaagtatgcaaaaagacccgaggactacaatggccacttatgctataatttg

SEQ ID NO: 208032 - DNA, 1115 bp, Zea Mays
attctacttggcgactaaggacgcgagtgcccctggtgtccagtgttttaaaggcgtcgcctaggcgtccaggcgctcaagcaattcgaggcgccttgctcgcctaccttgcctaggcgtccaggcggtggccatttttcttgcctcaccataccaccttaagaaccatgctggtgtcaaggatgatggggtgctgcaccatgtttgttggaatggcattgtctctaattggtctgattgaccttgtgatggtggaggagtcgatggacacagtggctgatgcacctcaagggacaggttgcattgctattgcattgaccaacctacatgttcacgtctgtttagcaccttgttctgcctatttgctttgatgcagtgcatggttcgaagagcttcacaagcagagttcagagagttgctgaattgaaaaggggaattggagaagtcagaaaattctatcgggaactctctacatgatggatatctcaatatgggcacctggaaggtaagggaaacacacgcccattctcacaattgagcagatgttcatgcttcctgcaactccccattttgcattcagaaggtcataatttggtaatacatggcaaacggatgtgagtttatagtataactgtctgtattgaaactataacatcttaggaaatagtcaaattaaatttgggcctggatataaaattgggattctgtttcaagtgtaccatgtactaaattgaattgtaacatatgaatggatgctagaaattccaataaattcaccgctacaattacctgcgtggtttttgccttaggtgatcgttactattctcatcatttcatacattgtccagatcattactattctcatcattgcatacattgtccaatatctctcttttttatgcggggcatgccagattgttcaccgtctgaaaatctataggttgttaagatttcacatttaaacatgagttatactctaattgccattctttgtggagagtcatgtaatagtgatgttgcaaacatcacgctctcgacgtaacttttttgagaggagtacaacacgcgttcacacacgttattgtggcatctttttctcgttgcaagacatgcgc

SEQ ID NO: 208033 - DNA, 1962 bp, Zea Mays
gccaagcttctttactcgggagccttttatgtcaaagttggcaaccttccccgagtggccgagttcctcactcagctggggacaccacccggccaccctcacctctcaatatacataccaccaccaccttcatcaacccctgggcctggcactcatagctcgttcgtagcaagagagagagagagaagagtgggaagtctcacgccatcagggagaggggagcgaggatcacatctctcgtagcgcgcgcgaagctatataataatggaggtggccatggccgtgaaggtgctgctgagcctgtgctgcgtgggggcgtgcggcctcgccgtgtacctctaccacatcctctggctcgtgccgcagaaggtcctcgccaagttcgaggaccagaagatcggcgggccgcggccgtcgttcccgtacggcaacctcgccgacatgagggaggcggccgccgctgcgaaggctgcgcgcgcgtcggcacgcagtagcggcagcggcggcggcggtggcggcggcatcgtgcacgactaccgcccggcggtgctgccctactacgagaaatggaggaaagagtacgggcatggtggatctgatggtcgattctgcacagccactgcttatgtcatgggaagagagagttgatagaaatggtgggatcacagacattaagatcgacgatgacatcagggcttactctgcagatgtgatctctagaacgtgctttggaagcagctacatcaaaggaaaggaaatctttatgaagatcagagaactccagcaggctgtgtccaagccaaatgtgctagctgaaatgactggcctaaggttctttccttcaatgaggaacaagcaggcctgggagcttcacaaacaagtccgcaaactaattcttgaaatcgtaaaggaaagtggagaagacaggaacttactgagtgcaattcttcacagcgcaagcaccagtagggtgggcattgccgaggcagagaactttatagtggataactgcaagagcatatattttgcaggacatgagagcacagctgttacagctgcgtggtgtctaatgctccttggactgcacccagaatggcagaatcgagtacgagaagaggtgcatgaagtctgcagaggccagccagtagactcacggtcacttcagaagatgaaaaatttgacaatggtgatccaggaaaccttgaggttgtacccagcaggtgcctttgtttcaaggcaggccctccaggaactgaagctcggtggcgtacatataccaaaaggtgtcaacatctacatccctgtctccacaatgcatcttgacccagagctatgggggcctgatgtgaaagagttcaacccagagcgcttctctgatgttcgaccccagctacattcatacttgccatttggtgctggggcccgaacctgcctagggcagggatttgctatggctgagctcaagatcctcatctctctcatcgtctccaagtttgttttgaagctctcaccacactaccagcattctccaacactgaaactcattgtggagccagaacttggtgtagacctcaccttaacgaaagtgcaaagtgtctgtactaagaggggcactgcaatttagtcatacaatgtcatggaatgaaacctgtgctatggtgaatgcagcttcccctgcggagaggggacaatttgtacagagacagctcatactatctacgcatgatcttttcaatgtgcatgattatagtaagaaatggtgccaaatgatccaatcatttataccaacattgtatgggaaaactatacagctattaaatttagtaatgaaacgaaatatattggaacattattaaggtgttcaattgacgccaccacagatatttgatgcttgtactgatgctgcataccaaacatatgaatatacatcaagcctctcattcgaattgcagcagaaatggg

SEQ ID NO: 208034 - DNA, 718 bp, Zea Mays
gccttttggctaagatcaagtgtagtatctgttcttatcagtagactgcccctgctttcatgtcatacttcttaggacctggcaatctattttgacctgtattgctcttcttgtttataggcacatgctgtttcagcgattttgaattttagtgagaattgtacataagaaatcggcgaagcatcatggctcctgacgaagcaggggctgcgaccagcgcgctggacgttgctgggaggcggctgctgtctagaggcagcgacagagctcatgattgttgagacctttgatactagattggaggcgatggagagttttactaatgggaatgttcgattactgaagcatgagcgtagcattgtcgcagaggatgatcttgaccagcgatggcaggaagccactggagagtctgtttctgaggtcatattcctcagcaaacacactgcagtctccaaacgtccagcactcacagtgcatccaattggtgtgccacatctgaaggaggatgaaaccccaccccaaggaggaactcctggatgggcagcaattccaagtcctcgaattggaccttggctccggttgatgcaaaagatagctgtagaacaaggccttgttccagagtttgaggttacgcttgaggctactcaccatggaccagttaccagcacacccaccatgtttgttgagataggtttctacactcccatcatgtctactg

SEQ ID NO: 208035 - DNA, 1746 bp, Zea Mays
ttttcttgtagcgcgctgagcaacgcaagtaagatggccggcaagcgccgccatcctgccatcgggatcgatctgggcacgacctactcctgcattggggtgtggcagaacgaccgcgtggagatcatcgccaacgaccaaggcaaccgaaccaccccatcctacgtcgccttcaccggctccaggcgcctcatcggggatgctgccaagaaccaggccgaaatgaaccccagcaacacaatcttcggtgggtgccattccaagcggctcattggtagaagatttagcgatgcttctgtacagagtgacattaagcactggcccttcaaggtcatttctggacctgatgacaagcctctgattgttgttcagtacaggggtgtggagcatcagtttgcagctgaagagatctcctcgatggttctcgtcaagatgcgggagactgctgaagcctatcttggcaccaccatcagggatgccgttgtcactgttcctgcctgctccacggacttgcagaggcaggccacctggaatgccggagtgcttgctagtctcaatgttatgcgcatcatccctgagcccactgctgctgctttggcttatggtcttgacaggaagtctgctcaggttcagggtttatacaatgttctcgtgtttgaccttggaggtggtacctttgatgtctctgttctcgacaaagtggagggtgtctttgaggtcttagccacagctggtgccgctcaccttggaggtgaggacttcgacaaccggatggtgaaccactttgttcaggaattcaagagaaagacgaaggaggacatcagtggcaaccccagggctctcaggagactaaggacggcctgcgagagggcgaagaggaccctctcctccactttagaggccaccattgagattgactgtttgtacgaggacatcaacttctactcaaccatcactcgcgccaggtttgaggagctcaacatggatctcttcaggaagtgcattgacattgtggaggactgcctcagcgatgctaaaatggacgtgggctcggttcatgatgttgtccttgttggtggctcctctagaattccaaaggtccagcagtttctccaagagctcttcaacgggaagaagcttttcaagagcatcaaccctgacgaggctgttgcttacggagctactatccaggctgcaatcatgagtggagaggatgagatacaggactacctcatgaacgatgctacgcctctttctcttgggttggccacggatgggggtgtgatgaccgtgctgattccgaagaacgcaaccatccccacaaggaaggaggtggtcttgtcaactgactccgacaaccagccttgtatccgtatccaggtgtacgaaggtgagggggccatggctcgcgacaacaacctgttgggtgagtttgagttctccattcctccagcccccaagggtgttccacagatcactattacatttcatatcgatgccgactgcatcctcgatgtcgcagctgaggacaaaactaccggcgagaagatgaggaaaaccatcaccaagaggttccgtttaaagcattaaattatttattatttatcaccatatgtaattaaaaagagatgaactctagaaattctgacagaaattagaaacatagcaattttctaattttagtttcatagacattaatgatcaacgccaataatatccaatgggtggagtcttttgggtgctatg

SEQ ID NO: 208036 - DNA, 1345 bp, Zea Mays
ttttcttgtagcgcgctgagcaacgcaagtaagatggccggcaagcgccgccatcctgccatcgggatcgatctgggcacgacctactcctgcattggggtgtggcagaacgaccgcgtggagatcatcgccaacgaccaaggcaaccgaaccaccccatcctacgtcgccttcaccggctccaggcgcctcatcggggatgctgccaagaaccaggccgaaatgaaccccagcaacacaatcttcgattccaagcggctcattggtagaagatttagcgatgcttctgtacagagtgacattaagcactggcccttcaaggtcatttctggacctgatgacaagcctctgattgttgttcagtacaggggtgtggagcatcagtttgcagctgaagagatctcctcgatggttctcgtcaagatgcgggagactgctgaagcctatcttggcaccaccatcagggatgccgttgtcactgttcctgcctgctccacggacttgcagaggcaggccacctggaatgccggagtgcttgctagtctcaatgttatgcgcatcatccctgagcccactgctgctgctttggcttatggtcttgacaggaagtctgctcaggttcagggtttatacaatgttctcgtgtttgaccttggaggtggtacctttgatgtctctgttctcgacaaagtggagggtgtctttgaggtcttagccacagctggtgccgctcaccttggaggtgaggacttcgacaaccggatggtgaaccactttgttcaggaattcaagagaaagacgaaggaggacatcagtggcaaccccagggctctcaggagactaaggacggcctgcgagagggcgaagaggaccctctcctccactttagaggccaccattgagattgactgtttgtacgaggacatcaacttctactcaaccatcactcgcgccaggtttgaggagctcaacatggatctcttcaggaagtgagggggccatggctcgcgacaacaacctgttgggtgagtttgagttctccattcctccagcccccaagggtgttccacagatcactattacatttcatatcgatgccgactgcatcctcgatgtcgcagctgaggacaaaactaccggcgagaagatgaggaaaaccatcaccaagaggttccgtttaaagcattaaattatttattatttatcaccatatgtaattaaaaagagatgaactctagaaattctgacagaaattagaaacatagcaattttctaattttagtttcatagacattaatgatcaacgccaataatatccaatgggtggagtcttttgggtgctatg

SEQ ID NO: 208037 - DNA, 1605 bp, Zea Mays
ttttcttgtagcgcgctgagcaacgcaagtaagatggccggcaagcgccgccatcctgccatcgggatcgatctgggcacgacctactcctgcattggggtgtggcagaacgaccgcgtggagatcatcgccaacgaccaaggcaaccgaaccaccccatcctacgtcgccttcaccggctccaggcgcctcatcggggatgctgccaagaaccaggccgaaatgaaccccagcaacacaatcttcgattccaagcggctcattggtagaagatttagcgatgcttctgtacagagtgacattaagcactggcccttcaaggtcatttctggacctgatgacaagcctctgattgttgttcagtacaggggtgtggagcatcagtttgcagctgaagagatctcctcgatggttctcgtcaagatgcgggagactgctgaagcctatcttggcaccaccatcagggatgccgttgtcactgttcctgcctgctccacggacttgcagaggcaggccacctggaatgccggagtgcttgctagtctcaatgttatgcgcatcatccctgagcccactgctgctgctttggcttatggtcttgacaggaagtctgctcaggttcagggtttatacaatgttctcgtgtttgaccttggaggtggtacctttgatgtctctgttctcgacaaagtggagggtgtctttgaggtcttagccacagctggtgccgctcaccttggaggtgaggacttcgacaaccggatggtgaaccactttgttcaggaattcaagagaaagacgaaggaggacatcagtggcaaccccagggctctcaggagactaaggacggcctgcgagagggcgaagaggaccctctcctccactttagaggccaccattgagattgactgtttgtacgaggacatcaacttctactcaaccatcactcgcgccaggtttgaggagctcaacatggatctcttcaggaagtgcattgacattgtggaggactgcctcagcgatgctaaaatggacgtgggctcggttcatgatgttgtccttgttggtggctcctctagaattccaaaggtccagcagtttctccaagagctcttcaacgggaagaagcttttcaagagcatcaaccctgacgaggctgttgcttacggagctactatccaggctgcaatcatgagtggagaggatgagatacaggactacctcatgaacgatgctacgcctctttctcttgggttggccacggatgggggtgtgatgaccgtgctgattccgaagaacgcaaccatccccacaaggaaggaggtggtcttgtcaactgactccgacaaccagccttgtatccgtatccaggtgtacgaagctgaggacaaaactaccggcgagaagatgaggaaaaccatcaccaagaggttccgtttaaagcattaaattatttattatttatcaccatatgtaattaaaaagagatgaactctagaaattctgacagaaattagaaacatagcaattttctaattttagtttcatagacattaatgatcaacgccaataatatccaatgggtggagtcttttgggtgctatg

SEQ ID NO: 208038 - DNA, 516 bp, Zea Mays
catgcaatttttcaactgaacgagaacttggcagggtgagtacggagtagtgtacaagggagttctgcattgagctgtcgtagagagcacagacaggcactctagccaacgttgttggctgggattgggacacaaaagcgtgatgagggatgagaagcacaggaggagtaggtctgtcctcatcatagatatatgcaagccatccaggtgaggtgaagtggcgacacacaggagcctgggcaagctcagctcatctcatctcaggctctactaaaaaggattagctcatctcaagagaaaagaataacattgtagcccactacaataaccacactattaccaggcttgaaattccctttttgtttgtttgtcatagaaccagggcttcatgacaagaaatgatctccttctcaagtgtgcttacatagtggtgcagacgtgcgttagcatccatgttgatgcctcgcttagatgctgagatggtggttacagtccgtatgcttacaagaaagcgag

SEQ ID NO: 208039 - DNA, 561 bp, Zea Mays
taccaatcatacaatgctccttggctacccacacgatagaccaatgctccgtcagttccttgcacagggtctgttttgagtacattacctaacaattcatagcaacctcaaccgccagctggttgttttagtatgttgtgcatatgctggtcaacctcctcacatgaataacatgctcactcgattgcttactttggccggccatgctttggcaaatgtaacattcataaatgcatgtaaatgcactttacatattctagattggccatatattgcacatacatgcgcattgaaatatgtcattggtaatgatagaatgtggaatgctaattacctaggcagagacaaggcctataaatgccattgatatcaatctttttcccttctgtttaacaaatttgtaatgcagttgttcaatgcaactcttgtcctcccaattttttgtgcagtaatgtttggctggccaaaaggatttggcaatcgcttatctttgactcaataccttatgacctcgaaaaggtttgaacccgttagggactaaagatgccaaaagtatattgt

SEQ ID NO: 208040 - DNA, 1367 bp, Zea Mays
ctgaccaccacgcgaccattcttggatccacctaagttcgaactttgggtgataatacttttagctgttgcgagtgtgtcatttgctgctttagtggctgctctactttggattatcatgcacagacattattcccgtgcctcatcgatgaagatagagttgcaagttgcaagggaattctcgtaccaggagctgtctgcagcgaccagcaacttcttcaaggacaggaagctcggcgcgggccagttcggggaggtgtacagaggtgagctgccggaccctctcatgccgccggtggcggtgaagaggctgacgaggcagatggaggcgcggacccggaaggactacgtgaccgagatcatgaccttgggccggctcagccaccggaacctagtgaagctcgtcggctggtgtcaaggcggcaatgagctgctgctcgtgtacgagctggtaacgaacaggagcctcgacgagcacctccacaggtcagagcgcctgctggcgtggcctgagaggtacaggatagtgctcggcataggctccgccatagagtacctccacaccggcgaccagaaccccatcctgcaccgcgacatcaagcccagcaacgtgatgctggacgatgacttcgaggccaagctcggcgacttcgggctcgtgaggcagatccatccaggacatggctcttccctcgagggcaccgtcatgatcgggactagggcgtacatggatcccgtatgcatgagcaccaacacggcgagcacagcgtccgacatatacagcttcggagtgctgctgttggagatcgccaccggcctgatgccgaccgaggtggcgggcccaggaggcctcctctccaacaccctcatcagcactgtccgggaatactacggcaggggatcggtcctcgagatggctgataggcggctgaacggcgacttcgacgagggcgagatggagcgggtgctgctcgtcggtctcttgtgtgtccagcaggatcgccgtcaccggccggaaatcagaatcgctgtcaacatgctctcgaatctcaagcttccgagtcctagaattcgttcctgaaaagattcactcgccaataatagggtgccttgcctctcgaatctcaggcttccgactcccagattcgttcctgtatgtacatagtgctttgtgagttagcatttggtctggctttgatcacgtattcctctataaactagcaagctggctcgcacaagaactaatgtgatgtttggttcacatatttgtaatgtaacgggtaacagataacgttaaatcatgtttatctaagtccaatcgtaatcgaataccatactaaaaattaatatcggtctattcaaacttat

SEQ ID NO: 208041 - DNA, 2182 bp, Zea Mays
aataagtatatagatgtaccagtctgtgatgcaacaatccatgactctgttaggttatattatttgccaagatacaaatacatattcaaaataactctccctttttagagaaaaggaaaagaaaataaatctttcacggtggtagatttcatatttgtatttctaagttgccacataatcatgaaagaaatgaaaccttggttaaaacagcctctcatagtgaagagtttcattcagcacagtttcacaattaatatgcaagagataatatgtctaggtaatgattaacatgcgtgagaagggctttcttcttactccctccgtttctttttagttgtcgctggatagttcaattttgcactgtctatcgacaactaaaacgaaacggaggaagtactatctacccaaagttgtattaccccctttgttgagttttttttttaaattttttttgttggacctaatatgccgagacgaagatctgttccccactaatgattacttatcaaatatgtaggtaattgagaaaacggatttagaaggttgatttgatatatttcatgatagatggaatcaatatctaccttaattagatgaagattttagatgttactttagatatgttcataattgtagagatgagtaatttgggaaaataaattagatccaaatgctaattattaccagtgatgattatgatggtctaccaaatgacgaccagagatatttctatatatcgtttatttacaaaaagaagttggttgatgatctaccaaatgctcggtgtcgctcaagtctcactgtctaattaatagccattattgccttccgtgttaacagatccacctaagttcgaactttgggtgataatacttttagctgttgcgagtgtgtcatttgctgctttagtggctgctctactttggattatcatgcacagacattattcccgtgcctcatcgatgaagatagagttgcaagttgcaagggaattctcgtaccaggagctgtctgcagcgaccagcaacttcttcaaggacaggaagctcggcgcgggccagttcggggaggtgtacagaggtgagctgccggaccctctcatgccgccggtggcggtgaagaggctgacgaggcagatggaggcgcggacccggaaggactacgtgaccgagatcatgaccttgggccggctcagccaccggaacctagtgaagctcgtcggctggtgtcaaggcggcaatgagctgctgctcgtgtacgagctggtaacgaacaggagcctcgacgagcacctccacaggtcagagcgcctgctggcgtggcctgagaggtacaggatagtgctcggcataggctccgccatagagtacctccacaccggcgaccagaaccccatcctgcaccgcgacatcaagcccagcaacgtgatgctggacgatgacttcgaggccaagctcggcgacttcgggctcgtgaggcagatccatccaggacatggctcttccctcgagggcaccgtcatgatcgggactagggcgtacatggatcccgtatgcatgagcaccaacacggcgagcacagcgtccgacatatacagcttcggagtgctgctgttggagatcgccaccggcctgatgccgaccgaggtggcgggcccaggaggcctcctctccaacaccctcatcagcactgtccgggaatactacggcaggggatcggtcctcgagatggctgataggcggctgaacggcgacttcgacgagggcgagatggagcgggtgctgctcgtcggtctcttgtgtgtccagcaggatcgccgtcaccggccggaaatcagaatcgctgtcaacatgctctcgaatctcaagcttccgagtcctagaattcgttcctgaaaagattcactcgccaataatagggtgccttgcctctcgaatctcaggcttccgactcccagattcgttcctgtatgtacatagtgctttgtgagttagcatttggtctggctttgatcacgtattcctctataaactagcaagctggctcgcacaagaactaatgtgatgtttggttcacatatttgtaatgtaacgggtaacagataacgttaaatcatgtttatctaagtccaatcgtaatcgaataccatactaaaaattaatatcggtctattcaaacttat

SEQ ID NO: 208042 - DNA, 661 bp, Zea Mays
actagtcactaccgcagctgtcagcccgctgaccagtctcgctctctcgcggcttccgaatcctagcgcgagtggatcggcgggcgggtggcggcgatgatggtgagggcgcgcgacgcggcgcgggcgctgctccgcctcgccggcgccagagctggcgtccatagggactatttccctccgctagcgcgcgccacgtttgctcgcgccttcctggatttccgcaagacggggaacaaggaggccatcgagaaggataaggccaggctgtaagtctcctctccttcaacctcgtttactagccattactggttactgctgctgcgctgcagcattgtatggtgtgatgttttggttctgattggtctagtgcagtaccgatgaactgagtagaggctacttccaagactttgccgagatccgcgagaacgctggcaagattgcgacagcgagtaaggtcatcatcccagaggtagatgctgtgaagtttcctgatcttgatgtggattcccctgatggaggggcactgcatctgcctcttgttgcaccaactctgcaagctgatgatggtgaggctggagaccataagattcctggtgcttcattggtgtgcctttccttccgcgcaagctcgctgtgaagctaatatgctatattgatc

SEQ ID NO: 208043 - DNA, 2493 bp, Zea Mays
ctcattatccaccgtcctccgccctccactgcaactagcttcaccgccttcgttcccgccagcgacgagaatcctccggcctcccttaccaccagattcccccaacccgtggcaacgtcaggtcgccaccgcacgagccaatccgtcctcccgagtcccaatccaaacggcttcactccactcgattcgcttccaccgcccgcgtacagtccaaacgcaaccgtcccgtccaccccggtcctcggcaccgccatgccgccgctcgccgcgcgcctctatgccccgcttaacctcgcccccgccgtcccagccgcctcccttcgccccgccacgcggctctgcgctgcgagcgggccccgcaacgtcggcgggttcaggagaggcgcgctggcataggagaaggcggcggcggtggcggtcgcggagaaagcgggcggcgaaggtggaggaggagaggacgagggcccgtacgatgcgatcgtgatcgggtcagggatcgggggcctggtggcggcgacgcagctcgcggccaagggcgcgcgggtgctggtcctcgagaagtacctcatccccgggggaagctccgggtactaccgccgcgacgggttcaccttcgacgtcggctcctccgtcatgttcggcttctccgacaagggtaacttgaatttgatcacacaagcattggaagcagttgggcgtaagatgagagttctaccagacccttctacagttcatttccacctacccggtgatctctctgtccttgtgcataggaagtatgaagacttcatcaacgaactggtcagcaaattccctcacgagaaagaagggatccttaaattctacgatacatgctggacgatcttcaattcactaaattcgttggagctgaagtctctagaggaacccctttatctttttcggcaatttttccagaagcctcgggaatgcttaactctagcttattatttgccacagaatgctggggatatcgctcgcaagttcataaaagatcaggagctactctccttcatagatgccgaggtcttgtgcgataggcactttggagggattaattatccagttggtggcgttggtggtattgcaatatccctggcagatggccttgttgaaaagggcagcgaaatccgttacaaggcgaatgtaaccaacgttattcttgaaaatggaaaggctgttggggtgaggttatcaaatgggaaggagttctttgctaaaacagtgatatcaaatgccaccagatgggacacgtttggaaaactcgtgaaagaggaacttccagaagaggagaaaaactttcaaaagaattacgttaaggcaccatcattcctttcaattcatatgggtgtcaaagcgtcagttctgcctgctggcactgactgccaccattttatacttgaggataattggaataatttggaaaagccttatggaagcatatttttaagtatccctacagttcttgatccatcattagctcccgaaggacatcatatacttcatatatttactacagcaggcatagaagattgggagggtctttctaggaaggaatatgaagagaaaaaagaggtggtggccaatgagattataagaaggcttgaaaagaagttgtttcctggtcttcaagattcaatagtcctcaaagaggtaggctcaccaaaaacacaccgaagatttcttgctcgaaatgacggtacatatggaccaatgccacggggtaaaccgaagggattactggctatgcctttcaatactacctcaatagatggcctttactgtgtcggtgacagctgtttccccgggcaaggtgtcatagctgtagcattctcagggatcatgtgtgctcaccgagttgctgcagatattggactagagcagaagtctccagttctagatgctggtcttcttgggctactcagatggctgagaacacttgcataggacggtatattagacaaagtgggaaaatggacctcatcttctttcaaaaggctgatgtttaactagagttcggattctgcactatcatctgagtggccgggttctgtcatgggtgtgccgtgtacaatcgaggctgggctagcagcatgtggtcgcccatcatgagcacctgcagataattgtgctgggtttatatagtagtaatcctaattggcaacccaagtgtctgaagctgcgcgtgcttgacacggtacggtgcgctcccgcgcatatagaaaacaaattgtcaattgcgatgttgcatcacttaggtacaagttacatggtatgccaaacagtgtaattgttctccaactagattcttcaaagacactttctcaattgtaccaggatacaggttgcacggcatagtgaattgtgtcaaaaattttggatcacaatgatgtagcagctcatggtacagattaaatcagataatcagttagcaagattcccggtgagcgtcgtgccaattggatggatcatgat

SEQ ID NO: 208044 - DNA, 3023 bp, Zea Mays
gaaagatcttgctaggatcccgatccttgcctcggctcgggctcggcggatggaactacacagaaatagcactaatggttcctgcctcagtgcatgtgggccactgacagactactacattcctgattacatactgaagccggcctatgaaccggtcactgttgataatgtgccatgttgtcctgtggtagtcttcatcaactctagaagtggtggccaactgggaagcagtctgataaaaacataccgtgaacttctcaatgaagcgcagattatacagcaactttgaaaggctcaagtctagtggtgaccatgttgctactcaaattcagaagagcttaaggctaattgttgctggtggtgacggtacagcaagttggctgcttggagtagttagtgacctgaaactatcacatccacctcctgttgctaccgtacctcttgggactggaaacaacctccctttttcatttggatgggggaaaaagaatcccgctactgaccaggcagcagtgaaatcattcctggatcaagtaaaaggagcaagagaaatgaatatcgatagctggcatatcatcatgaggatgcgaattccacaggaaggcccatgtgatcctattgctcccttagatcttccacattcgttgcatgctttccaccgcgtatcagcttgtgactctctcaatttggagggataccacacattccgtggaggattctggaattattttagcttgggaatggatgcacaagtatcctatgaattccactctgaaaggaagagaaatccagagaagttcagacaccagctaagaaatcagggtacatatgctaagcttggatttaagcattccctaaaccatctttcatcgaggaacatttctcaacttgcaaaggtgaagatcatgaaaagacctggttcccagtgggaagagctaaagattcctcgcagcattcaatcagttatctgcctgaacctgccaagcttctctggaggattgaatccatggggaacacctggcacaaggaaagcacaagacagagacctgactgcaccttacgttgacgatgggcttatcgaggttgtcggcttccgtgatgcctggcatgggctcatcttgctggctcctaatggccatggaactcgtctagcgcaggcccaccgaatccgtttcgagttccacaagggagcagccgagcacacgttcatgaggatcgacggggagccatggaagcagcctctccccaaggaggacgacaccgtggtggtggagatctccaacctccgtcaggtggccatgctggccaacgacccgtgcaggtccaagagcgtgaacgagccgtcctccccgtcgtgccacggccatgaggacgacgacagcaacagcctggaggacgaggacgaggacgagtgggaggacgggaggaagaagttcggtgcggcggccaccttcaagatccccgacgaggtggacatcgctcatctcagttagaacctagaaaccccgccggctgcttctgcgtcggttggtggtgctgactgctgagtctgtgcatttcagagtgtttgctgcttgctacagcctacagtgctactgctccctttttttttgttgttttttttttggttgcctccacgagctcagatttcagaagctaaccactgctgttggtgaaactgctcgttatgatcccccattgttctgtaaattttcaagttttagcagccatgtgtatttcactggctgataatttttttgtgtgctacgtaatttgaaacgtggaaacgacttgtaccaaaggtctgataccgtgtactatggagtatgtaggagagtagaaagcaacagattttgaatcacgtaatctgtcagaggagaagtcgtcacgtaacaaatgacggctcggcttctggagttcgctgcgtccgtccgtccgcccgccgctgtttgataggagtactcccgcacccgcacccggttccaggccaaaccgcgttccccacgcgcccaccagaaagcagaggcggcagcataaaaggcccccgcgcgcctctccgcactccacgtcaatccaatccaggacacaaagttgcggtgagcaattgcaaggcgatgagcttgaggtacatgagccgtgtgggcgcgcgggtggtgcgggagagcacgggcaggtcggtcaaggcgcaggcgcaggcggcgtccatggcgaggagcggcggcagcagggcgccggccgccgggtcggtggagtcggggagagcgagcgccgtggcggcggcggcggcggccaggaggaaggcggaggaggagaagcggcggcgcgccgagcaggcgctgcgcaccgtcatgttcctctccgtctggggccccaacacctaggcctagtaggaatcaaggagtgttagcatcatcatgtgtagcgttctgtgcacgtttgtttgtttgtttgtttgtttgtttgaggttcagaaaacaaagtgtatattacttacagtggtataatctttgaagacatcacatccctacgttgattctttggcgaaacaaagttaccgagggggcttccactttccacgacggcgttgaacgccagcctgagctacaacttccaggaggcaggaggcaggaggcactcaggctcatcgatgctgtgactccagagctcacgaagtgccgaagttgagcgaaaccaaatggcggttggttgcggtggtgcctgcacacaacttgcgggaggcagacgtgctgaacagcaaaccgcgacaggtttcacgcacacagggtgtagcgaattgggctctggggatgtgtcgtgtggtgggtggggcgaccggagctgactagatcgaggtggattagaacaaagtggtacactgccgtcactgtatgggttgggtccatacagacgtacccttttttggcaggatatattataaccggaagaaactttttttttaaaaaaaatgtgatcatggagacttgcaaatgtaatagagaagctagcaaatcggtgctcggaac

SEQ ID NO: 208045 - DNA, 3054 bp, Zea Mays
acgatgtcagatttgcaaatctctcgaaataatcagatggaactacacagaaatagcactaatggttcctgcctcagtgcatgtgggccactgacagactactacattcctgattacatactgaagccggcctatgaaccggtcactgttgataatgtgccatgttgtcctgtggtagtcttcatcaactctagaagtggtggccaactgggaagcagtctgataaaaacataccgtgaacttctcaatgaagcgcaggtttttgatctctcagaagagtctcctgataaggttctacatagattatacagcaactttgaaaggctcaagtctagtggtgaccatgttgctactcaaattcagaagagcttaaggctaattgttgctggtggtgacggtacagcaagttggctgcttggagtagttagtgacctgaaactatcacatccacctcctgttgctaccgtacctcttgggactggaaacaacctccctttttcatttggatgggggaaaaagaatcccgctactgaccaggcagcagtgaaatcattcctggatcaagtaaaaggagcaagagaaatgaatatcgatagctggcatatcatcatgaggatgcgaattccacaggaaggcccatgtgatcctattgctcccttagatcttccacattcgttgcatgctttccaccgcgtatcagcttgtgactctctcaatttggagggataccacacattccgtggaggattctggaattattttagcttgggaatggatgcacaagtatcctatgaattccactctgaaaggaagagaaatccagagaagttcagacaccagctaagaaatcagggtacatatgctaagcttggatttaagcattccctaaaccatctttcatcgaggaacatttctcaacttgcaaaggtgaagatcatgaaaagacctggttcccagtgggaagagctaaagattcctcgcagcattcaatcagttatctgcctgaacctgccaagcttctctggaggattgaatccatggggaacacctggcacaaggaaagcacaagacagagacctgactgcaccttacgttgacgatgggcttatcgaggttgtcggcttccgtgatgcctggcatgggctcatcttgctggctcctaatggccatggaactcgtctagcgcaggcccaccgaatccgtttcgagttccacaagggagcagccgagcacacgttcatgaggatcgacggggagccatggaagcagcctctccccaaggaggacgacaccgtggtggtggagatctccaacctccgtcaggtggccatgctggccaacgacccgtgcaggtccaagagcgtgaacgagccgtcctccccgtcgtgccacggccatgaggacgacgacagcaacagcctggaggacgaggacgaggacgagtgggaggacgggaggaagaagttcggtgcggcggccaccttcaagatccccgacgaggtggacatcgctcatctcagttagaacctagaaaccccgccggctgcttctgcgtcggttggtggtgctgactgctgagtctgtgcatttcagagtgtttgctgcttgctacagcctacagtgctactgctccctttttttttgttgttttttttttggttgcctccacgagctcagatttcagaagctaaccactgctgttggtgaaactgctcgttatgatcccccattgttctgtaaattttcaagttttagcagccatgtgtatttcactggctgataatttttttgtgtgctacgtaatttgaaacgtggaaacgacttgtaccaaaggtctgataccgtgtactatggagtatgtaggagagtagaaagcaacagattttgaatcacgtaatctgtcagaggagaagtcgtcacgtaacaaatgacggctcggcttctggagttcgctgcgtccgtccgtccgcccgccgctgtttgataggagtactcccgcacccgcacccggttccaggccaaaccgcgttccccacgcgcccaccagaaagcagaggcggcagcataaaaggcccccgcgcgcctctccgcactccacgtcaatccaatccaggacacaaagttgcggtgagcaattgcaaggcgatgagcttgaggtacatgagccgtgtgggcgcgcgggtggtgcgggagagcacgggcaggtcggtcaaggcgcaggcgcaggcggcgtccatggcgaggagcggcggcagcagggcgccggccgccgggtcggtggagtcggggagagcgagcgccgtggcggcggcggcggcggccaggaggaaggcggaggaggagaagcggcggcgcgccgagcaggcgctgcgcaccgtcatgttcctctccgtctggggccccaacacctaggcctagtaggaatcaaggagtgttagcatcatcatgtgtagcgttctgtgcacgtttgtttgtttgtttgtttgtttgtttgaggttcagaaaacaaagtgtatattacttacagtggtataatctttgaagacatcacatccctacgttgattctttggcgaaacaaagttaccgagggggcttccactttccacgacggcgttgaacgccagcctgagctacaacttccaggaggcaggaggcaggaggcactcaggctcatcgatgctgtgactccagagctcacgaagtgccgaagttgagcgaaaccaaatggcggttggttgcggtggtgcctgcacacaacttgcgggaggcagacgtgctgaacagcaaaccgcgacaggtttcacgcacacagggtgtagcgaattgggctctggggatgtgtcgtgtggtgggtggggcgaccggagctgactagatcgaggtggattagaacaaagtggtacactgccgtcactgtatgggttgggtccatacagacgtacccttttttggcaggatatattataaccggaagaaactttttttttaaaaaaaatgtgatcatggagacttgcaaatgtaatagagaagctagcaaatcggtgctcggaac

SEQ ID NO: 208046 - DNA, 3662 bp, Zea Mays
cagcctgcaaagggatggtgccaaaactgaaagttggtagtgacacaggaggatggagtgagatatacagcttcatttcacgtgacagtgaagccagtgagaccaatgcttttctatttggtgacatgggaacttatgtgccttataacacctacattcgcacacaatctgagagcttgtccactgtaaagtggatccttcgtgatattgaagcccttggagataaacccgcctttatttcacacattggggacatcagctatgctagaggttattcttgggtctgggatcatttcttcagccagatcgagcctattgctgccaatactccataccatgtctgtataggaaatcatgagtatgattggccatcacaaccctggaaaccatggtgggctacatatggaacggacggtggaggcgaatgtggaataccttatagtgtcaagttcagaatgccgggcaattctattctacctacaggtaatggtggcccagacaccaggaatctttattactccttcgactcaggcgtggtgcatttcgtctacatgtcgaccgaaacaaattttgttcagggaagtgaccagcacaacttcttgaaaacggaccttgagaaggtgaaccgaagtagaacaccgtttgttgtttttcagggccaccgccccatgtacacctcgagcgatgaaaccagggacgcggctttgaaacagcagatgctccagaatctggaaccgctgctggtgacatacaatgtgaccctcgcgctatggggacatgtccacaggtacgagaggttctgcccgatgaagaattcccaatgtgtcaacacttcatcaagcttccagtactctggcgctcctgtgcatcttgtgatcgggatgggcggccaagactggcaacctgtatggcaaccgaggcctgatcacccagacgtccctatctttcctcagcctgagcgttccatgtaccgcggtggcgagtttggatacgccagacttgtggcaacaagggagaagctaacactgacttatgtggggaaccatgatgggcaggtccatgatatggtggagatattttctggcctggtatcccccagtaacagtagtgttgctgaggcggtggatggaaccaaacttggcacaggagtcagcaccgtgcggaaaatttctccgctgtacttggaaatcggaggcagtgtgatgtttgcgctgctcctgggattttcctttgggatacttgtcaggagaaagaaagaagctgcacagtggactcaagtaaagaatgaggaatcgtagtagtgttgccaataccgtgagcctggtgcagtggtggtgatccaaacttgtgtgggtgtaattactggagtagaacctaacaaagtgaaggcatttctgacttcttggggggctccgcgtcctcttggtacaactagtgtattgatagtcttgggaaatgaaggttctgatcgcatatctgttgttgtaatagttcaatgtataagcatgtaataagtgatataatgttcacattgctttggttgacacaagtgtgtaacatgtgctaccacaagtgattctgggcgtcctttgtagttgaaccatatttgttttatgatcctgcttttctgtatcatctgcctgcttttgttagcagatgtacggaatcttctgtacttggagtttatacctaacaacatacttatatatttatattacaaacctgtctgatacagcttcatgagctattggaagctgtggagctctctttttcaaaacagttttatagatgaagctcttcatttacgcttgtacaaaggaatgaagagagcttcatggatgaaactgatgagattttgcaaacgggtcctacacattcgaaatatctaaatgagcggtcaagcatggtttctttggacgatgttgaagacttggatcagaaacgccatccgggacaccgtgaccaggtccggcggcgaagcgagatggtgtcatccaagaaagtgtgcgtggtcggcgctggcgtgtcggggctggcgtgtgcccgcgagctgctccgcgagggccacgacgtgacggtcatggagcagagcggcggcgtcggcgggcagtggctgtacgacccgagggcggacggcggcgacccactcggcgctgccggcgcgcacagcagcatgtacgcctccgtccggctcatcagcccgagggagctcacgggcttctccgacttccccttcttccccagagacgacggcaccggcgactcccggcggtacccggggcacgctgagttcctgaggtacatcagggacttctgcgacgcgttcgggctcatggacgtcgtcaggctcaacaccaaggtcctgcgcgtcggcctggcggcgccgcgtgccgctgatgacggtgacggcatcaagcggtggacggtgagttggtctagacatcgtggctgcgatggcgaggtggtcaccacggaggaggaggtgtttgacgccgtcgtcgtcgccgtcggccagtacacccagccacggctcccaaccatcagaggcatggacaagtggagcaggaggcagctgcactcccactcgtatagggtccccgattccttccacggcgaggtggtggtgatcgtgggcttccgtcatagcggcgtggacatcgcgctggagctctccaagttggcgagggaggtgcacgtcagcgtcaagtccatggaggcgctcactcccgccgtgtccaaggccgtcgccaggcacagcgacctgcacctgcacctccagatcgagtgcttgcgcgaggatgggcaggtaacgttcgccgacggctcgcgtgtcgccgccgactccatcatctactgcaccgggtacgactgctcgttcccgttcctggacacgggaggcctggtgaccgtcgacgacagccgcgtcggcccgctgtacgagcacacgttcccgccggcgctggcgccgtcgctgtccttcgtggggttgccgaggatggtgctggtgccgcggttctacgaggcgcaggcgaggtgggtggcgcaggcgctgtcgggctggcggccgctgccgccgtcggaggagatggcgcgctccgccgaggagtaccaccgcgccagggaggcggccggcgtgcccaggcgcctctcgcacgccctcttcttcgacatggactactgcgacgagttcggggccaagcactgcggcttcccgccggtggaggggtggaagagggacctcctgtcgttgtctctcgcaagcgccagcgacggcgccgtggagagctaccgtgacagctaccatgacagcgacctggttcgggagggattgcgctccgagggctggtggccgtggctcccagatccacaatgaagacgacggcgcagagattcacaactaccgccacgcagcgctgctggctgctgcactactctaggtactttttgttacaagatagtgtactgtgatcgagctcatccacccatccattgtaacagttattatccaagggtcatacccttggtaatcctatgtacgtatgtatataaggactactctctgtaataaacaacagttactggcctctgtcattttgtttctctctcaattctcttttgccactgagtatatttcaacacgttatcagcgctgtctcaaagaa

SEQ ID NO: 208047 - DNA, 3146 bp, Zea Mays
catcagccgtccacgtgtccgaaccgaacggcgtggagcaggtggcccccgtcgcttgctacgcgcacaccgacctgacggacgtcgccgcgaccgcggctgggctccatcccatcgctatcgtctgcatcgtcaccccccggcccccccccccccccccctctccactctcctccaaccagatcgaaccccacacgccgcataaatcccccgctggcacccaatcaagcaaatcctcgcttccctcccccacgtcgcgtccgatcggcgacggtgcgccatgtcgatgctggacaccttcttcagcaagggcggcggcggcggcttccgcggcgccaagtgcaagacgctgctgaagctgtcgatcccgcggataaagctgctgcggaaccggcgggagctgcagctgcgccagatgcgccgggacatcgccaagctcctagaggccggccaggaggccactgcccggatcagggtggagcacatcatccgggaggagaacatgatggccgcgcaggagatcctcgagctcttctgcgagctcatcgcggttcgcctgcccatcatcgaggcccaaaagttcgcccctctgaccgaattcgattttacaactcgtaattgcggtcgctatttgtttgttaatatgcctacggatgttgcaatcgaaactagctgtagatttactgcccgtcttgatatggcaaactgtgctggacccgcagctcgcttgggatttccagtggcttgttggcatttacttctgttggacaagaactctcgagatgtttttttgttgttgttgttgtgctgtgcttgatgtgttgagacgaccactttagcactggatcattgtaatctcccgtaagtggtcagtcggttgctaattttttggctcaacatggtgtgccactggtacccccaccgtttttttgaactttacaacggtagatatctatagtgttttttttaacagtgggttagttttccacagcgagcagccacctagtagtctttacttcactgctatagtggattatgactgtttgttccattccattataggacaacctgcctgtttcaaccaatgtgttttcagcagagacttttgggccctaaagatgagcattactttgctatatgttcatttgtcaacagggacaagttatcttcgtttttataccctctgcattgttatattgcttatttgtttggagacacaaaccattgtaatcccaaatcttaggatgttactgataatattttctttgctcctgcaatttttattagggcgtgctatcttgaagtatgcctatcccaacttgcttgggactaaaaaggctttgttgttgttgttgtaatatcttgaagtataaagcagggatattgcttcctgctcttgaatacaaatgggctatagttgataaaattgattaatcgttttgtgactaaaaattctgtaagagatgcagatgagtctcactcatttgtgtttccttgttttgttggcttcagggagtgtcctattgatctcaaagaagcaatatcaagtgtctgttttgccgctccaagatgtgcagatctacctgaactgatgcaagttcaaatgatgtttgcaactaaatatgggaaggaatttgtcgctgcagcttcagagttgatgcctgattgtggggtcaatcgtcaggttatatgacacttctaaatcaaattagtttagccatgttatctggtggtttggttattcataacatattagaattaatgcttctgcagataattgaattgctttctattcgtcctcctcctgttgatgcaaagttgaaactgctgaaggagatagctgaggaacatgaagttgattgggatccatcagagacagagacagaatttctcaaacctcatgaagatctattgaatggaccgacctacttcaatgtatccacactacctcttcccaaggagaaacatgaggaaacagtagttgcaagtgctgccgagcagcctgatgaagactatgagtcagataccggtcttgactcactggatttgcctgaagtcccaaaagctgcaattcgtccaccttctgacgcaccattgaccccagatatttgcccacatgttcagggctctcagtcacttcctcatgagttctcagatcctggtaacttggaggagaatccaacagctggtggtgcttttaatgttattcagatgaaaagcttggagcatcttgtttatgcaccatctgatcagtcaaacataccggatttgccaaatgaaaagaagcagtttattccttttgcatctccaccgcccgttctttctccttcggtgggaaaagccgagacagttccctcaccttctctgtctcctccagtgaagccgacagagccagaaccagaaatcctcacaaagaaaattgatgaagtgaccacacctccagtacttccctcagattatattttcacaaaacagccagaacaagtgcggacaatctctccttctgagagtggggcaaatattgacttggacgacgttttatctgctgcgcagacagctgctgaatcagctgagcgagctgcatcagcagcccgtgctgctgcaaaccttgcacaactgcgcatttcagacctgaagaagaattccaaggtttatagcaattacggtgatagcgtccaaaaggaaagccatcatcagactgaggcgacacaggaaccggtatttgatcaccaggactccttcaccaatgatacacaggactatgtgtcatcccatgtgccgcagaggtcgtcatctttggaggacgatccatatttctcgtatcccaacttgttctcagcgccaaagccctgaaggcggaaactagtggtctgcaagtagttgttcagaatagtctgaaacatgagatatcactttttcagctctgtccggtcctcttatgtttggtcttttctgatgcctccgaaaattctgtgtatgttgagttggtacatagcggacaaaagggagactatgaaacctctgtctagttttgtctctgtaaattgtacatgtgcggtgtttgtatcagttgtctgaaacatttctgcagtctactggtaataacagaaattgaatctcagcatctagtctcttccttgtgattc

SEQ ID NO: 208048 - DNA, 2079 bp, Zea Mays
catcagccgtccacgtgtccgaaccgaacggcgtggagcaggtggcccccgtcgcttgctacgcgcacaccgacctgacggacgtcgccgcgaccgcggctgggctccatcccatcgctatcgtctgcatcgtcaccccccggcccccccccccccccccctctccactctcctccaaccagatcgaaccccacacgccgcataaatcccccgctggcacccaatcaagcaaatcctcgcttccctcccccacgtcgcgtccgatcggcgacggtgcgccatgtcgatgctggacaccttcttcagcaagggcggcggcggcggcttccgcggcgccaagtgcaagacgctgctgaagctgtcgatcccgcggataaagctgctgcggaaccggcgggagctgcagctgcgccagatgcgccgggacatcgccaagctcctagaggccggccaggaggccactgcccggatcagggtggagcacatcatccgggaggagaacatgatggccgcgcaggagatcctcgagctcttctgcgagctcatcgcggttcgcctgcccatcatcgaggcccaaaaggagtgtcctattgatctcaaagaagcaatatcaagtgtctgttttgccgctccaagatgtgcagatctacctgaactgatgcaagttcaaatgatgtttgcaactaaatatgggaaggaatttgtcgctgcagcttcagagttgatgcctgattgtggggtcaatcgtcagttgaaactgctgaaggagatagctgaggaacatgaagttgattgggatccatcagagacagagacagaatttctcaaacctcatgaagatctattgaatggaccgacctacttcaatgtatccacactacctcttcccaaggagaaacatgaggaaacagtagttgcaagtgctgccgagcagcctgatgaagactatgagtcagataccggtcttgactcactggatttgcctgaagtcccaaaagctgcaattcgtccaccttctgacgcaccattgaccccagatatttgcccacatgttcagggctctcagtcacttcctcatgagttctcagatcctggtaacttggaggagaatccaacagctggtggtgcttttaatgttattcagatgaaaagcttggagcatcttgtttatgcaccatctgatcagtcaaacataccggatttgccaaatgaaaagaagcagtttattccttttgcatctccaccgcccgttctttctccttcggtgggaaaagccgagacagttccctcaccttctctgtctcctccagtgaagccgacagagccagaaccagaaatcctcacaaagaaaattgatgaagtgaccacacctccagtacttccctcagattatattttcacaaaacagccagaacaagtgcggacaatctctccttctgagagtggggcaaatattgacttggacgacgttttatctgctgcgcagacagctgctgaatcagctgagcgagctgcatcagcagcccgtgctgctgcaaaccttgcacaactgcgcatttcagacctgaagaagaattccaaggtttatagcaattacggtgatagcgtccaaaaggaaagccatcatcagactgaggcgacacaggaaccggtatttgatcaccaggactccttcaccaatgatacacaggactatgtgtcatcccatgtgccgcagaggtcgtcatctttggaggacgatccatatttctcgtatcccaacttgttctcagcgccaaagccctgaaggcggaaactagtggtctgcaagtagttgttcagaatagtctgaaacatgagatatcactttttcagctctgtccggtcctcttatgtttggtcttttctgatgcctccgaaaattctgtgtatgttgagttggtacatagcggacaaaagggagactatgaaacctctgtctagttttgtctctgtaaattgtacatgtgcggtgtttgtatcagttgtctgaaacatttctgcagtctactggtaataacagaaattgaatctcagcatctagtctcttccttgtgattc

SEQ ID NO: 208049 - DNA, 399 bp, Zea Mays
caattttcggccccgtagacaaagagatacgcgacgcgtgatggatgcgcgtccagatccagcggcctcagtcaccatcaccacccgcaccacacacgagcatacgcgacgactgacaaggcgaggggagcactcggcggcgatgggcggcggcggcgcacatggcggcaccacctacaagggctacaccatcccgcacaacaagcgctggcacaccgtcgccggcaagggcctctgcgccgtgatgtggttctgggttttctacagggctaagcaggatggtgctacgctcttgggtttgcgtcatccttgggatggacatgatgaccactctcatggtcatggacacgggcatgagtcctttcactcaaatgcaagttcatggatttcttattgttt

SEQ ID NO: 208050 - DNA, 3562 bp, Zea Mays
gcagggtcaagtttttattcttactgttagggaattctttacagttcaacgatcgcgagtgagaaaatttgttcgtctgtctcaagaaaaagcgctgagaatagagacacccaaagagcaggacaattcatactccataaacactgagcagataccgccggacatagaagcacaagctgaagttattgaacctttgagaactttagaaccggtggtcctacagagctctttgcaaccaacgtgtgtccctcagatctcttcgcaatcaatggagctccaacaaagcgatttgcagcacatggaagtcttccaaaactctttgcaacaagcagaggcacaacataacattgcagctcctataatgccatctggagcaatggttatgcaaccaactgacgctaagattagttcagactctgttcaaaaggaagttaagcaagagggagttcattctggtgttgcgtcagaagataagaagttcttggaaagtatctttgctctaatgcagaaggaggaaacattctctgggcaggttaaattaatggaatggattctgcaaataaataatgttacagttcttagtaggttcgtaacaatgggtggtttgaccattatgtcaacatggttgagtcaagcagcaattgaagagcagacatcagttatccatgttattttcaaggtgctgctccaccttccgttgcataaggctttaccagtccacatgtcagttgttctgcaaacaattaataagttgcgcttttatagaacacaagacatatcgagcagggctaggaacctcctctccagattgagcaaagtgcttgtaaggattcaggcattgaagaaacctcagaaggacttaatatgtaaacaaaggataagtgaaattctccgtgacgagtcttggaaatctgaagttgatattaccgaggaggtacttgctttgactgatggtgctaatgagagcagaaagcctgaacccagaaaaacaccaatgcttctcactgcttctgctattgagacaaataaaaggagttctgtgcagacaaaatccaaacaaaaaagaaaagttctacttgtggagcaaccaaacaagaaagctacgtggaagaatgctaattctgtcaggaacacatctacaaacaatagccggccattatctgcagatgatattcaaaaagcaaagatgcgtgccatgttcatgcaggagaagcgtggcaagattgacataaataaattgagtgataaaccacaagcaatggacacgaaaaaagcagctggattagtaaattcaaatccatcagctatgcccataagtccccatacgtcagctgcacaacctgttgacccaagcccatctacttcaaaacaaagcacagatcctcagcctgataatacagaaatttcaggtggtttgaagttaaacataggttccaaaaacaatgtcatagagaagttggattgcaagagagttctttggcaaataccaccagctgtatggatagacccctcgtggagtgtaggagctggtgacaacagcaaggagcttgaggttcaaacacagaggaaccggcgtgaaaaggaaaccttttatacaagccagaaggacgtcccaatgaatccaaaggacccatgggatctggaaatggacttcgatgacagcctgaccccagaggttccaattgaccaggtgccagatgtggacgccatggaaacggaaagcgttggcgcggcgcctagcgctgtggctcctgttaaggacaagcagattgaatctgcctcatcgacatcaggcgcagttgctgatgatgaggaagctaataccgattacgaattgcttacggtgctactcaggaacccggagcttgtctttgcattaacctctaacaagggggagaacatgcctaacgagcagaccattgcgcttctggatacactgaagcagaccggccttagcctatcagagcttgttaaccgtctggggaacggcgctgggctcccaaaagagccagagccggagccagaacctattcccgcttcgcttccgtcaccaactccgccagaccgtacatcaagggctgtctggataccagaacacgcaatgcaggtgagggctgctccaaccttgcatctgccaagccgggggagtacacctcctgttgcaaatgccgtgcaacaaggcttctcaaacgttgtcagttcgttaccctcacaaccttacgcccctccagtctcggtcttgccggcacagattcaagctaacgcacccccatctcttcctctgctggcggtctctgtaaacccgccagtccaacatgtttcccctgtgaataaccttctgaacagagcttcagtgcatcagcatggacagcagcaatacgctttgttgtctgaccctgttgccacgcccttgcatcaacaagcagcggggagcaaaccagctgtagcagcacatccgtcgttgcctgagcctaatgcatcatctcacacagcattcccttggcaatctaatgctgctgacatgacccacgctggacggaatgcgacggctgatccatgggccgccgcccgcgcagctaactcgtatagtacagcatcagcaagcacagtgccgtctgctaaccagaatgcttacggcgatcaaggcaagcagggtgcgtacagctcttatggatcttcggcagcctcgtcccgtcctgttgtaccagggcacgggcatgacagaaatggctacagccggtctgccctggtggagtacccatgggacgggcaccaccagcggcactcgaggtcaccagatcctggcgtggtccgggactacgacaccgactatggcggtgcgcagggctacagtcagcagcccctgacgcagtggagtgcagggaaagtgcagcagcagggctacaatcctgagccgtcaaggcagtggagttcttcccaggcgcaccagggcggctacgcacccgccgagccgtcgaggcagtggagttcttcccaggcgcaccagagctacgctcccgagctaccgaggcagtggagctccgaacgccgtggctacgatgatgcggagccctcgaggacatggagctccggccagcagaacccggaggcgccgaggcagtggagccgcgggaagcaggatccttactacagcccgagccatagccgaagatcgtacgatcagcaccggaggagatagcaaaagcttgctgtattactgctaccacattagctagatcctggatggaggcggtcggttcttgggagggtttgtttcatttgatttgatgtgaggccgggtattcgttgcatttgggctttgtgattgccaccacaagggccattgagaaaagctataggttattatgtatcgatgtagtttttgtctcgaaattaaaaaaaaaatgtatctatctaggtagctggagaggggaaagaagaagaaaaaatgaatgaatgaatgatataactcagggagggtcaagaggccccccggctcgaattgattgcagtcttgaatgctgagtcgaacggttggccaaatttgtcgtctgtgctcgtg

SEQ ID NO: 208051 - DNA, 3664 bp, Zea Mays
caccatgatgtagtatagctaacatatgacaattgggtaagaggccaagggatctgttgaatccaaaagcagttaagtgcatgcagtcactttttgccttgaaggacattcttggcaaaaaagaaacccgagaaattagtttactctgtggggtcactgttacacaggttagggaattctttacagttcaacgatcgcgagtgagaaaatttgttcgtctgtctcaagaaaaagcgctgagaatagagacacccaaagagcaggacaattcatactccataaacactgagcagataccgccggacatagaagcacaagctgaagttattgaacctttgagaactttagaaccggtggtcctacagagctctttgcaaccaacgtgtgtccctcagatctcttcgcaatcaatggagctccaacaaagcgatttgcagcacatggaagtcttccaaaactctttgcaacaagcagaggcacaacataacattgcagctcctataatgccatctggagcaatggttatgcaaccaactgacgctaagattagttcagactctgttcaaaaggaagttaagcaagagggagttcattctggtgttgcgtcagaagataagaagttcttggaaagtatctttgctctaatgcagaaggaggaaacattctctgggcaggttaaattaatggaatggattctgcaaataaataatgttacagttcttagtaggttcgtaacaatgggtggtttgaccattatgtcaacatggttgagtcaagcagcaattgaagagcagacatcagttatccatgttattttcaaggctttaccagtccacatgtcagttgttctgcaaacaattaataagttgcgcttttatagaacacaagggctaggaacctcctctccagattgagcaaagtgcttgtaaggattcaggcattgaagaaacctcagaaggacttaatatgtaaacaaaggataagtgaaattctccgtgacgagtcttggaaatctgaagttgatattaccgaggaggtacttgctttgactgatggtgctaatgagagcagaaagcctgaacccagaaaaacaccaatgcttctcactgcttctgctattgagacaaataaaaggagttctgtgcagacaaaatccaaacaaaaaagaaaagttctacttgtggagcaaccaaacaagaaagctacgtggaagaatgctaattctgtcaggaacacatctacaaacaatagccggccattatctgcagatgatattcaaaaagcaaagatgcgtgccatgttcatgcaggagaagcgtggcaagattgacataaataaattgagtgataaaccacaagcaatggacacgaaaaaagcagctggattagtaaattcaaatccatcagctatgcccataagtccccatacgtcagctgcacaacctgttgacccaagcccatctacttcaaaacaaagcacagatcctcagcctgataatacagaaatttcaggtggtttgaagttaaacataggttccaaaaacaatgtcatagagaagttggattgcaagagagttctttggcaaataccaccagctgtatggatagacccctcgtggagtgtaggagctggtgacaacagcaaggagcttgaggttcaaacacagaggaaccggcgtgaaaaggaaaccttttatacaagccagaaggacgtcccaatgaatccaaaggacccatgggatctggaaatggacttcgatgacagcctgaccccagaggttccaattgaccaggtgccagatgtggacgccatggaaacggaaagcgttggcgcggcgcctagcgctgtggctcctgttaaggacaagcagattgaatctgcctcatcgacatcaggcgcagttgctgatgatgaggaagctaataccgattacgaattgcttacggtgctactcaggaacccggagcttgtctttgcattaacctctaacaagggggagaacatgcctaacgagcagaccattgcgcttctggatacactgaagcagaccggccttagcctatcagagcttgttaaccgtctggggaacggcgctgggctcccaaaagagccagagccggagccagaacctattcccgcttcgcttccgtcaccaactccgccagaccgtacatcaagggctgtctggataccagaacacgcaatgcaggtgagggctgctccaaccttgcatctgccaagccgggggagtacacctcctgttgcaaatgccgtgcaacaaggcttctcaaacgttgtcagttcgttaccctcacaaccttacgcccctccagtctcggtcttgccggcacagattcaagctaacgcacccccatctcttcctctgctggcggtctctgtaaacccgccagtccaacatgtttcccctgtgaataaccttctgaacagagcttcagtgcatcagcatggacagcagcaatacgctttgttgtctgaccctgttgccacgcccttgcatcaacaagcagcggggagcaaaccagctgtagcagcacatccgtcgttgcctgagcctaatgcatcatctcacacagcattcccttggcaatctaatgctgctgacatgacccacgctggacggaatgcgacggctgatccatgggccgccgcccgcgcagctaactcgtatagtacagcatcagcaagcacagtgccgtctgctaaccagaatgcttacggcgatcaaggcaagcagggtgcgtacagctcttatggatcttcggcagcctcgtcccgtcctgttgtaccagggcacgggcatgacagaaatggctacagccggtctgccctggtggagtacccatgggacgggcaccaccagcggcactcgaggtcaccagatcctggcgtggtccgggactacgacaccgactatggcggtgcgcagggctacagtcagcagcccctgacgcagtggagtgcagggaaagtgcagcagcagggctacaatcctgagccgtcaaggcagtggagttcttcccaggcgcaccagggcggctacgcacccgccgagccgtcgaggcagtggagttcttcccaggcgcaccagagctacgctcccgagctaccgaggcagtggagctccgaacgccgtggctacgatgatgcggagccctcgaggacatggagctccggccagcagaacccggaggcgccgaggcagtggagccgcgggaagcaggatccttactacagcccgagccatagccgaagatcgtacgatcagcaccggaggagatagcaaaagcttgctgtattactgctaccacattagctagatcctggatggaggcggtcggttcttgggagggtttgtttcatttgatttgatgtgaggccgggtattcgttgcatttgggctttgtgattgccaccacaagggccattgagaaaagctataggttattatgtatcgatgtagtttttgtctcgaaattaaaaaaaaaatgtatctatctaggtagctggagaggggaaagaagaagaaaaaatgaatgaatgaatgatataactcagggagggtcaagaggccccccggctcgaattgattgcagtcttgaatgctgagtcgaacggttggccaaatttgtcgtctgtgctcgtg

SEQ ID NO: 208052 - DNA, 4046 bp, Zea Mays
atctcgtctccctcgcctcctcatctcgttccgcctcctatcggcccagctccaaaccctagcccgccgccgtgctgactcccctagccaggcacgacgtcgaagagagcagcggcggaggcggcaacctgatgcccagccccccgtgggggccatggagctcgtcctcgtcaagcccgcggcaggagctctcgtcgaggtgggctccgggtccgttgccggcgcgggctcgatcccggcgatggtggcggcgcagcaggagattttgcacgaacaggtggaccagctccaacgcctcgtcgtcgctcagtgccgcctcaccggcgtcaaccccctcgcccaggagatggctgccggtgcattgtctatcaagatagttaaagttctgcaggtaagaggccaagggatctgttgaatccaaaagcagttaagtgcatgcagtcactttttgccttgaaggacattcttggcaaaaaagaaacccgagaaattagtttactctgtggggtcactgttacacaggttagggaattctttacagttcaacgatcgcgagtgagaaaatttgttcgtctgtctcaagaaaaagcgctgagaatagagacacccaaagagcaggacaattcatactccataaacactgagcagataccgccggacatagaagcacaagctgaagttattgaacctttgagaactttagaaccggtggtcctacagagctctttgcaaccaacgtgtgtccctcagatctcttcgcaatcaatggagctccaacaaagcgatttgcagcacatggaagtcttccaaaactctttgcaacaagcagaggcacaacataacattgcagctcctataatgccatctggagcaatggttatgcaaccaactgacgctaagattagttcagactctgttcaaaaggaagttaagcaagagggagttcattctggtgttgcgtcagaagataagaagttcttggaaagtatctttgctctaatgcagaaggaggaaacattctctgggcaggttaaattaatggaatggattctgcaaataaataatgttacagttcttagtaggttcgtaacaatgggtggtttgaccattatgtcaacatggttgagtcaagcagcaattgaagagcagacatcagttatccatgttattttcaaggtgctgctccaccttccgttgcataaggctttaccagtccacatgtcagttgttctgcaaacaattaataagttgcgcttttatagaacacaagggctaggaacctcctctccagattgagcaaagtgcttgtaaggattcaggcattgaagaaacctcagaaggacttaatatgtaaacaaaggataagtgaaattctccgtgacgagtcttggaaatctgaagttgatattaccgaggaggtacttgctttgactgatggtgctaatgagagcagaaagcctgaacccagaaaaacaccaatgcttctcactgcttctgctattgagacaaataaaaggagttctgtgcagacaaaatccaaacaaaaaagaaaagttctacttgtggagcaaccaaacaagaaagctacgtggaagaatgctaattctgtcaggaacacatctacaaacaatagccggccattatctgcagatgatattcaaaaagcaaagatgcgtgccatgttcatgcaggagaagcgtggcaagattgacataaataaattgagtgataaaccacaagcaatggacacgaaaaaagcagctggattagtaaattcaaatccatcagctatgcccataagtccccatacgtcagctgcacaacctgttgacccaagcccatctacttcaaaacaaagcacagatcctcagcctgataatacagaaatttcaggtggtttgaagttaaacataggttccaaaaacaatgtcatagagaagttggattgcaagagagttctttggcaaataccaccagctgtatggatagacccctcgtggagtgtaggagctggtgacaacagcaaggagcttgaggttcaaacacagaggaaccggcgtgaaaaggaaaccttttatacaagccagaaggacgtcccaatgaatccaaaggacccatgggatctggaaatggacttcgatgacagcctgaccccagaggttccaattgaccaggtgccagatgtggacgccatggaaacggaaagcgttggcgcggcgcctagcgctgtggctcctgttaaggacaagcagattgaatctgcctcatcgacatcaggcgcagttgctgatgatgaggaagctaataccgattacgaattgcttacggtgctactcaggaacccggagcttgtctttgcattaacctctaacaagggggagaacatgcctaacgagcagaccattgcgcttctggatacactgaagcagaccggccttagcctatcagagcttgttaaccgtctggggaacggcgctgggctcccaaaagagccagagccggagccagaacctattcccgcttcgcttccgtcaccaactccgccagaccgtacatcaagggctgtctggataccagaacacgcaatgcaggtgagggctgctccaaccttgcatctgccaagccgggggagtacacctcctgttgcaaatgccgtgcaacaaggcttctcaaacgttgtcagttcgttaccctcacaaccttacgcccctccagtctcggtcttgccggcacagattcaagctaacgcacccccatctcttcctctgctggcggtctctgtaaacccgccagtccaacatgtttcccctgtgaataaccttctgaacagagcttcagtgcatcagcatggacagcagcaatacgctttgttgtctgaccctgttgccacgcccttgcatcaacaagcagcggggagcaaaccagctgtagcagcacatccgtcgttgcctgagcctaatgcatcatctcacacagcattcccttggcaatctaatgctgctgacatgacccacgctggacggaatgcgacggctgatccatgggccgccgcccgcgcagctaactcgtatagtacagcatcagcaagcacagtgccgtctgctaaccagaatgcttacggcgatcaaggcaagcagggtgcgtacagctcttatggatcttcggcagcctcgtcccgtcctgttgtaccagggcacgggcatgacagaaatggctacagccggtctgccctggtggagtacccatgggacgggcaccaccagcggcactcgaggtcaccagatcctggcgtggtccgggactacgacaccgactatggcggtgcgcagggctacagtcagcagcccctgacgcagtggagtgcagggaaagtgcagcagcagggctacaatcctgagccgtcaaggcagtggagttcttcccaggcgcaccagggcggctacgcacccgccgagccgtcgaggcagtggagttcttcccaggcgcaccagagctacgctcccgagctaccgaggcagtggagctccgaacgccgtggctacgatgatgcggagccctcgaggacatggagctccggccagcagaacccggaggcgccgaggcagtggagccgcgggaagcaggatccttactacagcccgagccatagccgaagatcgtacgatcagcaccggaggagatagcaaaagcttgctgtattactgctaccacattagctagatcctggatggaggcggtcggttcttgggagggtttgtttcatttgatttgatgtgaggccgggtattcgttgcatttgggctttgtgattgccaccacaagggccattgagaaaagctataggttattatgtatcgatgtagtttttgtctcgaaattaaaaaaaaaatgtatctatctaggtagctggagaggggaaagaagaagaaaaaatgaatgaatgaatgatataactcagggagggtcaagaggccccccggctcgaattgattgcagtcttgaatgctgagtcgaacggttggccaaatttgtcgtctgtgctcgtg

SEQ ID NO: 208053 - DNA, 4043 bp, Zea Mays
aaaaaaccctgtccttgtctcccacctcgactctttccatctcgtctccctcgcctcctcatctcgttccgcctcctatcggcccagctccaaaccctagcccgccgccgtgctgactcccctagccaggcacgacgtcgaagagagcagcggcggaggcggcaacctgatgcccagccccccgtgggggccatggagctcgtcctcgtcaagcccgcggcaggagctctcgtcgaggtgggctccgggtccgttgccggcgcgggctcgatcccggcgatggtggcggcgcagcaggagattttgcacgaacaggtggaccagctccaacgcctcgtcgtcgctcagtgccgcctcaccggcgtcaaccccctcgcccaggagatggctgccggtgcattgtctatcaagataggtaagaggccaagggatctgttgaatccaaaagcagttaagtgcatgcagtcactttttgccttgaaggacattcttggcaaaaaagaaacccgagaaattagtttactctgtggggtcactgttacacaggttagggaattctttacagttcaacgatcgcgagtgagaaaatttgttcgtctgtctcaagaaaaagcgctgagaatagagacacccaaagagcaggacaattcatactccataaacactgagcagataccgccggacatagaagcacaagctgaagttattgaacctttgagaactttagaaccggtggtcctacagagctctttgcaaccaacgtgtgtccctcagatctcttcgcaatcaatggagctccaacaaagcgatttgcagcacatggaagtcttccaaaactctttgcaacaagcagaggcacaacataacattgcagctcctataatgccatctggagcaatggttatgcaaccaactgacgctaagattagttcagactctgttcaaaaggaagttaagcaagagggagttcattctggtgttgcgtcagaagataagaagttcttggaaagtatctttgctctaatgcagaaggaggaaacattctctgggcaggttaaattaatggaatggattctgcaaataaataatgttacagttcttagtaggttcgtaacaatgggtggtttgaccattatgtcaacatggttgagtcaagcagcaattgaagagcagacatcagttatccatgttattttcaaggctttaccagtccacatgtcagttgttctgcaaacaattaataagttgcgcttttatagaacacaagggctaggaacctcctctccagattgagcaaagtgcttgtaaggattcaggcattgaagaaacctcagaaggacttaatatgtaaacaaaggataagtgaaattctccgtgacgagtcttggaaatctgaagttgatattaccgaggaggtacttgctttgactgatggtgctaatgagagcagaaagcctgaacccagaaaaacaccaatgcttctcactgcttctgctattgagacaaataaaaggagttctgtgcagacaaaatccaaacaaaaaagaaaagttctacttgtggagcaaccaaacaagaaagctacgtggaagaatgctaattctgtcaggaacacatctacaaacaatagccggccattatctgcagatgatattcaaaaagcaaagatgcgtgccatgttcatgcaggagaagcgtggcaagattgacataaataaattgagtgataaaccacaagcaatggacacgaaaaaagcagctggattagtaaattcaaatccatcagctatgcccataagtccccatacgtcagctgcacaacctgttgacccaagcccatctacttcaaaacaaagcacagatcctcagcctgataatacagaaatttcaggtggtttgaagttaaacataggttccaaaaacaatgtcatagagaagttggattgcaagagagttctttggcaaataccaccagctgtatggatagacccctcgtggagtgtaggagctggtgacaacagcaaggagcttgaggttcaaacacagaggaaccggcgtgaaaaggaaaccttttatacaagccagaaggacgtcccaatgaatccaaaggacccatgggatctggaaatggacttcgatgacagcctgaccccagaggttccaattgaccaggtgccagatgtggacgccatggaaacggaaagcgttggcgcggcgcctagcgctgtggctcctgttaaggacaagcagattgaatctgcctcatcgacatcaggcgcagttgctgatgatgaggaagctaataccgattacgaattgcttacggtgctactcaggaacccggagcttgtctttgcattaacctctaacaagggggagaacatgcctaacgagcagaccattgcgcttctggatacactgaagcagaccggccttagcctatcagagcttgttaaccgtctggggaacggcgctgggctcccaaaagagccagagccggagccagaacctattcccgcttcgcttccgtcaccaactccgccagaccgtacatcaagggctgtctggataccagaacacgcaatgcaggtgagggctgctccaaccttgcatctgccaagccgggggagtacacctcctgttgcaaatgccgtgcaacaaggcttctcaaacgttgtcagttcgttaccctcacaaccttacgcccctccagtctcggtcttgccggcacagattcaagctaacgcacccccatctcttcctctgctggcggtctctgtaaacccgccagtccaacatgtttcccctgtgaataaccttctgaacagagcttcagtgcatcagcatggacagcagcaatacgctttgttgtctgaccctgttgccacgcccttgcatcaacaagcagcggggagcaaaccagctgtagcagcacatccgtcgttgcctgagcctaatgcatcatctcacacagcattcccttggcaatctaatgctgctgacatgacccacgctggacggaatgcgacggctgatccatgggccgccgcccgcgcagctaactcgtatagtacagcatcagcaagcacagtgccgtctgctaaccagaatgcttacggcgatcaaggcaagcagggtgcgtacagctcttatggatcttcggcagcctcgtcccgtcctgttgtaccagggcacgggcatgacagaaatggctacagccggtctgccctggtggagtacccatgggacgggcaccaccagcggcactcgaggtcaccagatcctggcgtggtccgggactacgacaccgactatggcggtgcgcagggctacagtcagcagcccctgacgcagtggagtgcagggaaagtgcagcagcagggctacaatcctgagccgtcaaggcagtggagttcttcccaggcgcaccagggcggctacgcacccgccgagccgtcgaggcagtggagttcttcccaggcgcaccagagctacgctcccgagctaccgaggcagtggagctccgaacgccgtggctacgatgatgcggagccctcgaggacatggagctccggccagcagaacccggaggcgccgaggcagtggagccgcgggaagcaggatccttactacagcccgagccatagccgaagatcgtacgatcagcaccggaggagatagcaaaagcttgctgtattactgctaccacattagctagatcctggatggaggcggtcggttcttgggagggtttgtttcatttgatttgatgtgaggccgggtattcgttgcatttgggctttgtgattgccaccacaagggccattgagaaaagctataggttattatgtatcgatgtagtttttgtctcgaaattaaaaaaaaaatgtatctatctaggtagctggagaggggaaagaagaagaaaaaatgaatgaatgaatgatataactcagggagggtcaagaggccccccggctcgaattgattgcagtcttgaatgctgagtcgaacggttggccaaatttgtcgtctgtgctcgtg

SEQ ID NO: 208054 - DNA, 4057 bp, Zea Mays
aaaaaaaccctgtccttgtctcccacctcgactctttccatctcgtctccctcgcctcctcatctcgttccgcctcctatcggcccagctccaaaccctagcccgccgccgtgctgactcccctagccaggcacgacgtcgaagagagcagcggcggaggcggcaacctgatgcccagccccccgtgggggccatggagctcgtcctcgtcaagcccgcggcaggagctctcgtcgaggtgggctccgggtccgttgccggcgcgggctcgatcccggcgatggtggcggcgcagcaggagattttgcacgaacaggtggaccagctccaacgcctcgtcgtcgctcagtgccgcctcaccggcgtcaaccccctcgcccaggagatggctgccggtgcattgtctatcaagataggtaagaggccaagggatctgttgaatccaaaagcagttaagtgcatgcagtcactttttgccttgaaggacattcttggcaaaaaagaaacccgagaaattagtttactctgtggggtcactgttacacaggttagggaattctttacagttcaacgatcgcgagtgagaaaatttgttcgtctgtctcaagaaaaagcgctgagaatagagacacccaaagagcaggacaattcatactccataaacactgagcagataccgccggacatagaagcacaagctgaagttattgaacctttgagaactttagaaccggtggtcctacagagctctttgcaaccaacgtgtgtccctcagatctcttcgcaatcaatggagctccaacaaagcgatttgcagcacatggaagtcttccaaaactctttgcaacaagcagaggcacaacataacattgcagctcctataatgccatctggagcaatggttatgcaaccaactgacgctaagattagttcagactctgttcaaaaggaagttaagcaagagggagttcattctggtgttgcgtcagaagataagaagttcttggaaagtatctttgctctaatgcagaaggaggaaacattctctgggcaggttaaattaatggaatggattctgcaaataaataatgttacagttcttagtaggttcgtaacaatgggtggtttgaccattatgtcaacatggttgagtcaagcagcaattgaagagcagacatcagttatccatgttattttcaaggctttaccagtccacatgtcagttgttctgcaaacaattaataagttgcgcttttatagaacacaagacatatcgagcagggctaggaacctcctctccagattgagcaaagtgcttgtaaggattcaggcattgaagaaacctcagaaggacttaatatgtaaacaaaggataagtgaaattctccgtgacgagtcttggaaatctgaagttgatattaccgaggaggtacttgctttgactgatggtgctaatgagagcagaaagcctgaacccagaaaaacaccaatgcttctcactgcttctgctattgagacaaataaaaggagttctgtgcagacaaaatccaaacaaaaaagaaaagttctacttgtggagcaaccaaacaagaaagctacgtggaagaatgctaattctgtcaggaacacatctacaaacaatagccggccattatctgcagatgatattcaaaaagcaaagatgcgtgccatgttcatgcaggagaagcgtggcaagattgacataaataaattgagtgataaaccacaagcaatggacacgaaaaaagcagctggattagtaaattcaaatccatcagctatgcccataagtccccatacgtcagctgcacaacctgttgacccaagcccatctacttcaaaacaaagcacagatcctcagcctgataatacagaaatttcaggtggtttgaagttaaacataggttccaaaaacaatgtcatagagaagttggattgcaagagagttctttggcaaataccaccagctgtatggatagacccctcgtggagtgtaggagctggtgacaacagcaaggagcttgaggttcaaacacagaggaaccggcgtgaaaaggaaaccttttatacaagccagaaggacgtcccaatgaatccaaaggacccatgggatctggaaatggacttcgatgacagcctgaccccagaggttccaattgaccaggtgccagatgtggacgccatggaaacggaaagcgttggcgcggcgcctagcgctgtggctcctgttaaggacaagcagattgaatctgcctcatcgacatcaggcgcagttgctgatgatgaggaagctaataccgattacgaattgcttacggtgctactcaggaacccggagcttgtctttgcattaacctctaacaagggggagaacatgcctaacgagcagaccattgcgcttctggatacactgaagcagaccggccttagcctatcagagcttgttaaccgtctggggaacggcgctgggctcccaaaagagccagagccggagccagaacctattcccgcttcgcttccgtcaccaactccgccagaccgtacatcaagggctgtctggataccagaacacgcaatgcaggtgagggctgctccaaccttgcatctgccaagccgggggagtacacctcctgttgcaaatgccgtgcaacaaggcttctcaaacgttgtcagttcgttaccctcacaaccttacgcccctccagtctcggtcttgccggcacagattcaagctaacgcacccccatctcttcctctgctggcggtctctgtaaacccgccagtccaacatgtttcccctgtgaataaccttctgaacagagcttcagtgcatcagcatggacagcagcaatacgctttgttgtctgaccctgttgccacgcccttgcatcaacaagcagcggggagcaaaccagctgtagcagcacatccgtcgttgcctgagcctaatgcatcatctcacacagcattcccttggcaatctaatgctgctgacatgacccacgctggacggaatgcgacggctgatccatgggccgccgcccgcgcagctaactcgtatagtacagcatcagcaagcacagtgccgtctgctaaccagaatgcttacggcgatcaaggcaagcagggtgcgtacagctcttatggatcttcggcagcctcgtcccgtcctgttgtaccagggcacgggcatgacagaaatggctacagccggtctgccctggtggagtacccatgggacgggcaccaccagcggcactcgaggtcaccagatcctggcgtggtccgggactacgacaccgactatggcggtgcgcagggctacagtcagcagcccctgacgcagtggagtgcagggaaagtgcagcagcagggctacaatcctgagccgtcaaggcagtggagttcttcccaggcgcaccagggcggctacgcacccgccgagccgtcgaggcagtggagttcttcccaggcgcaccagagctacgctcccgagctaccgaggcagtggagctccgaacgccgtggctacgatgatgcggagccctcgaggacatggagctccggccagcagaacccggaggcgccgaggcagtggagccgcgggaagcaggatccttactacagcccgagccatagccgaagatcgtacgatcagcaccggaggagatagcaaaagcttgctgtattactgctaccacattagctagatcctggatggaggcggtcggttcttgggagggtttgtttcatttgatttgatgtgaggccgggtattcgttgcatttgggctttgtgattgccaccacaagggccattgagaaaagctataggttattatgtatcgatgtagtttttgtctcgaaattaaaaaaaaaatgtatctatctaggtagctggagaggggaaagaagaagaaaaaatgaatgaatgaatgatataactcagggagggtcaagaggccccccggctcgaattgattgcagtcttgaatgctgagtcgaacggttggccaaatttgtcgtctgtgctcgtg

SEQ ID NO: 208055 - DNA, 4198 bp, Zea Mays
atttatagaaactaaaaaggatagtactaacatcgtggcgcccactgcctcagtaacaggcgatgacccctgagcactgttatgttaattaacaatccgctaactaattacggaagcgaaagaggaaaaaaaaaccctgtccttgtctcccacctcgactctttccatctcgtctccctcgcctcctcatctcgttccgcctcctatcggcccagctccaaaccctagcccgccgccgtgctgactcccctagccaggcacgacgtcgaagagagcagcggcggaggcggcaacctgatgcccagccccccgtgggggccatggagctcgtcctcgtcaagcccgcggcaggagctctcgtcgaggtgggctccgggtccgttgccggcgcgggctcgatcccggcgatggtggcggcgcagcaggagattttgcacgaacaggtggaccagctccaacgcctcgtcgtcgctcagtgccgcctcaccggcgtcaaccccctcgcccaggagatggctgccggtgcattgtctatcaagataggtaagaggccaagggatctgttgaatccaaaagcagttaagtgcatgcagtcactttttgccttgaaggacattcttggcaaaaaagaaacccgagaaattagtttactctgtggggtcactgttacacaggttagggaattctttacagttcaacgatcgcgagtgagaaaatttgttcgtctgtctcaagaaaaagcgctgagaatagagacacccaaagagcaggacaattcatactccataaacactgagcagataccgccggacatagaagcacaagctgaagttattgaacctttgagaactttagaaccggtggtcctacagagctctttgcaaccaacgtgtgtccctcagatctcttcgcaatcaatggagctccaacaaagcgatttgcagcacatggaagtcttccaaaactctttgcaacaagcagaggcacaacataacattgcagctcctataatgccatctggagcaatggttatgcaaccaactgacgctaagattagttcagactctgttcaaaaggaagttaagcaagagggagttcattctggtgttgcgtcagaagataagaagttcttggaaagtatctttgctctaatgcagaaggaggaaacattctctgggcaggttaaattaatggaatggattctgcaaataaataatgttacagttcttagtaggttcgtaacaatgggtggtttgaccattatgtcaacatggttgagtcaagcagcaattgaagagcagacatcagttatccatgttattttcaaggtgctgctccaccttccgttgcataaggctttaccagtccacatgtcagttgttctgcaaacaattaataagttgcgcttttatagaacacaagggctaggaacctcctctccagattgagcaaagtgcttgtaaggattcaggcattgaagaaacctcagaaggacttaatatgtaaacaaaggataagtgaaattctccgtgacgagtcttggaaatctgaagttgatattaccgaggaggtacttgctttgactgatggtgctaatgagagcagaaagcctgaacccagaaaaacaccaatgcttctcactgcttctgctattgagacaaataaaaggagttctgtgcagacaaaatccaaacaaaaaagaaaagttctacttgtggagcaaccaaacaagaaagctacgtggaagaatgctaattctgtcaggaacacatctacaaacaatagccggccattatctgcagatgatattcaaaaagcaaagatgcgtgccatgttcatgcaggagaagcgtggcaagattgacataaataaattgagtgataaaccacaagcaatggacacgaaaaaagcagctggattagtaaattcaaatccatcagctatgcccataagtccccatacgtcagctgcacaacctgttgacccaagcccatctacttcaaaacaaagcacagatcctcagcctgataatacagaaatttcaggtggtttgaagttaaacataggttccaaaaacaatgtcatagagaagttggattgcaagagagttctttggcaaataccaccagctgtatggatagacccctcgtggagtgtaggagctggtgacaacagcaaggagcttgaggttcaaacacagaggaaccggcgtgaaaaggaaaccttttatacaagccagaaggacgtcccaatgaatccaaaggacccatgggatctggaaatggacttcgatgacagcctgaccccagaggttccaattgaccaggtgccagatgtggacgccatggaaacggaaagcgttggcgcggcgcctagcgctgtggctcctgttaaggacaagcagattgaatctgcctcatcgacatcaggcgcagttgctgatgatgaggaagctaataccgattacgaattgcttacggtgctactcaggaacccggagcttgtctttgcattaacctctaacaagggggagaacatgcctaacgagcagaccattgcgcttctggatacactgaagcagaccggccttagcctatcagagcttgttaaccgtctggggaacggcgctgggctcccaaaagagccagagccggagccagaacctattcccgcttcgcttccgtcaccaactccgccagaccgtacatcaagggctgtctggataccagaacacgcaatgcaggtgagggctgctccaaccttgcatctgccaagccgggggagtacacctcctgttgcaaatgccgtgcaacaaggcttctcaaacgttgtcagttcgttaccctcacaaccttacgcccctccagtctcggtcttgccggcacagattcaagctaacgcacccccatctcttcctctgctggcggtctctgtaaacccgccagtccaacatgtttcccctgtgaataaccttctgaacagagcttcagtgcatcagcatggacagcagcaatacgctttgttgtctgaccctgttgccacgcccttgcatcaacaagcagcggggagcaaaccagctgtagcagcacatccgtcgttgcctgagcctaatgcatcatctcacacagcattcccttggcaatctaatgctgctgacatgacccacgctggacggaatgcgacggctgatccatgggccgccgcccgcgcagctaactcgtatagtacagcatcagcaagcacagtgccgtctgctaaccagaatgcttacggcgatcaaggcaagcagggtgcgtacagctcttatggatcttcggcagcctcgtcccgtcctgttgtaccagggcacgggcatgacagaaatggctacagccggtctgccctggtggagtacccatgggacgggcaccaccagcggcactcgaggtcaccagatcctggcgtggtccgggactacgacaccgactatggcggtgcgcagggctacagtcagcagcccctgacgcagtggagtgcagggaaagtgcagcagcagggctacaatcctgagccgtcaaggcagtggagttcttcccaggcgcaccagggcggctacgcacccgccgagccgtcgaggcagtggagttcttcccaggcgcaccagagctacgctcccgagctaccgaggcagtggagctccgaacgccgtggctacgatgatgcggagccctcgaggacatggagctccggccagcagaacccggaggcgccgaggcagtggagccgcgggaagcaggatccttactacagcccgagccatagccgaagatcgtacgatcagcaccggaggagatagcaaaagcttgctgtattactgctaccacattagctagatcctggatggaggcggtcggttcttgggagggtttgtttcatttgatttgatgtgaggccgggtattcgttgcatttgggctttgtgattgccaccacaagggccattgagaaaagctataggttattatgtatcgatgtagtttttgtctcgaaattaaaaaaaaaatgtatctatctaggtagctggagaggggaaagaagaagaaaaaatgaatgaatgaatgatataactcagggagggtcaagaggccccccggctcgaattgattgcagtcttgaatgctgagtcgaacggttggccaaatttgtcgtctgtgctcgtg

SEQ ID NO: 208056 - DNA, 3094 bp, Zea Mays
accgcgcctcgaaggttcttgctcccgaaggcaccggccgacgcgtcaccgcactgcaccgcaccggctataaaaactttcccttctcgccgcccgtcccgccaatcagccccatcactcttccgtcgtgtcttctcgcgctttccactcccaacgagatccatcacccccaacctctgtaagcttcccttgacgtcgtcgtcgtcatccatggagagcaaggacggtacccacgatcccgccacgacggccgcgccaccggccggcgcgccgcagcccgcgatgccttccgcggagacggcgcggtggggcacgcggcagatgggcccgccggcggcccccggggcgcacccggagaaccaagaggcggcgcggtggacggccgcgcgcggggaccaggagctgccgccgtacgtcatcatcggtgagcccgtggcggcgccgccgccgccacagcataggggcaagggggacagccccatggagcacatcctcgacttcttcaacacctggagccgcaaggccgaggagctggcctccaacatctgggtcaatcgtaagttcggatcctatgcttttgtttcggttggttggagcagaggatgctctgttttgctcgtcccctgatcagagacaagaggcactgaaatctttgctttgttgttctacgtggcactattagacgatgcatttcctaaatctaccaatatcagccgattctaagctagagttagctattatatagataacagaatatacatatagcaacttacgcaaatgtcagcagaaactcacggattaaccttgaaattgaaattcaacatttgagcatgtagtaatttaagctcttaagttggtcattattcattaggctcaatacaactcggatcgatatcgaccacaactgttagatcggtttgtccgatcgataggtaggtctacgaccatctattcagagccaaatagattggttgtctattcagagccagatagattggttacagacaaccgtattgaagaacctgttgataatgatcgactttagtggtgtcaactggctatttttttaaccattaaaaatgttaaacaatccgtaaaacaggttttttaaaaaaaactagaatataatctataaattagattttatttatggattatttattatttatttttatatttaagttatgcagttttatttatggattatgtattttttattatatttgagttatataattttaaattgttggtatataactaaatgtcggtaaaagaaatttgaaaacctggcgatgagctgaataaaaaccaatgtgtaaaagctatacacatacacttaagttttatgatagactaggaaagtgttgttacgatttttatttatgttttaagtatagaatacagaacaaatataagtattttgttggctagatgggtgtaaatttgaggtttaaagccaacaaccataatttgaatctctatttgtatatgattttagcattttttattatttaaacgtagaggagcacaacaacggtttaaaccgtagaacaagaaaactgactatttaatatagtagagatataaacggttcatttgacccttgtaactagattcatttaacaatgcagcactgtattttctatgatgatgcggaaatatgaatgctgccaagcctttttttactttcgaaaagaacacacttccatcttgtctctaaattctgcttgttgattttgaaatctaatctatgcctcctcatctagtccaccttgaaaagtagttctagggtacttgaatgctgggaagtggtaaggtcaggtcatgggctcatggcaaacctgcttactcttctactccaccttaaacagtactacagtagtagttctaaggtacttaaatgctgagaagtggtaaaacgaggtcattgctgacacactaattaaaccacatgctaataaggtcaaaagcgaatatctgtgcccatttggtgatttattttatgtgaaggccgcgccatccatgtcggacgccgcgatggggaagctaagcctcggcgcgaaggcgctgtcggagggcggcttcgagaagctgtacaagcagacgttctcgtccagccccgacgagcacctgaagaagacgttcgcttgctacctctccacggccacggggcccgtcgccggcacgctgtacctgaccaacctgaacgtcgccttctgcagcgaccgcccgctctccttcgccgcgccgtctggccagaccgcctggagctactacaaggttatgatcccccttggcaagatcgcgacggtggagccggtgacgatgaaggagagcccgccggagaagtacgtccacgtcgtcaccgtcgactcccacgacttctggttcatgggcttcgtcagctacgacaaggccgtgcactacctcgtcgaggccgtctcccagcgcggcgtcgccactgccggcggcaagtgatgaggcgacgccgctccggagactgggcgttcggcacccgtcgtcgtgtatatataatatagctgatggctctgcctgtgcattactcgtgttctgctactactagcactacgatggtgtcccggcgtgtgtttgaatgttctcagtgtgtgtgtgtgtggcacagatgcgccactgctattctatgcacttgtgagtattatgctagctttcacggactcgtcgagaaacgagagtgaagttcttcctgtctgcagcacctacatcgagctcggactgtggtagaattacgaattcactgggcagatacgaatcgatcctaaatccttgccggcgggtaatttgaatgaatcttaatttgtgtacatgcagaatggctcattttgagcactcatacttctttaaagctaaagaagcactagtttcgtttattctttacttaattgtgtccacgcacgacacgttctgttactcctcgtttctcgtcttcgtgagaaaccacgacaaataagctataaaaataaaaaataattagacttctttttaactcatattttttgtcttttagtttagataaagtgtattatttttcttatatatagactatatgtttatt

SEQ ID NO: 208057 - DNA, 2428 bp, Zea Mays
ccgagagctaaaggccgggccccacctccctcgggcccttgtgcagatgcgcagaggttgcgtcccctaattcgtttgtcaccaaactttgcacccgcctcgccgtacccgtccgaaaccctagtctacctcggcggcggcgggccctccggcgatggaggtggaggaaccgctcccaacgtccaagaacccccgccgtgctcggcgccgggacctcaacgcactggatcccacattggaggagtccgacggggaggatattggtgttccggaagttggtatggtgttcaataatcacacagaagtcaaccgattctaccgccggtatgcccgccgtgttggctttggtgtctcagtaaggaggtcttcgttctcacgagaagggacctgcttatatctggagcttatgtgctgcaaaggagggaggccacgttatgagccgaagtttcggaaaagggcttcatcgaccactaactgcccagccaaagtacgagtgaagttgtggggagataaattgttgcatatagagttggcgatccttgatcataatcacccagtgagccctgcaatggcaaggtttttgaactcttataagcagctctctggccctgcaaagaggcggttgcgtatgggtggccctgggactatgcctgttgaagagtcaagcaagatgcccatggataagctgggggagcttgagcagcttctgtttggtgagagcaagcacaacagctttgtggagaggggtcgtttgaagctccaacctggagattcggaggcccttcggcttttcttcactcggatgcaggccaaaaatgccaacttttttaatgtcattgacctggacgatgaaggctgtaccaggaatgttttctgggcagatgcacggtctagagccatgtgtgagtactatagtgatgtcatcacacttgatacatcatatgtggctagtaaatatgatatgcctcttgcaacatttattggggtgaatcatcatggacaatctgtcttgatggggtgtgccctgctttctgatgaaacagcagaaacctattcatggctacttaagtcttggatagcatgtatgtacggcaatcttccaaaggctattgtcactgactattgtaggggcatccaaagtgctgtagctgagattattccgggagtccgtcatagaatgtgtttgtttcagataatgaggaaggccgcagaacgtttaggtgggctgtcagagtacagagctatcaacaaggcgatgcataaggctgtatatgattctttaaccattgatgagtttgaagaagaatggaatactttaattacatatagtgggcttcagagcaatgactggttaagatcactttatgaatgtcgatcttcatgggttcctgtttttattaaagatacattttgggcaggaatgtctactacacaaagaaatgaaacaatcactcctttttttgatggatatgttgatttgaaaactaccttgaaacaatttcttgtcaagtatgagatggctttgcagagtaaatatgagaaggaggcccaagcagattttgagacgtttcataagcaacgcccaccggtatcaaaattctatatggaagagcagctctcaaaagtatacacacataatatgttcaagaagttccaagatgagattgaagccataatgtactgccatgtatctttaattagtgttgatgggcctgtctctacattcaatgtcaaggagtgcattttctttgaagatggtaaaaggactatgagtaaaatttttgcagtgacatacaaagtggacgaaaagaatattagctgtatatgtggaggtttccaattcagtggcatactatgtaggcatagtctctcaatgctcaagtttcaactggttcgtgaaatcccacaacattatattcttgataggtggaagaaggattttcgacagttgcatgtgatgagacgccctccaagcgatcttgttcctaacaatcgcatggatcgatatgactatttatcaataagatgtttgcaacttgttgactctgcagtcctatcagataagtatcgccttgctttgaggttggtaagggagacagagaaatttctgctaaatagcaacacacatgatgatacacaaccaaggatcaagtctcgtgttcctaaagtaaataaaccaaatattgtgactggccaaaccatggtgggtgcagctactggaaatggaaatgatggtctcaaaggaccagaggctacagcagtcacgcaagtaccacaatcccaaaagggaggagcagaaaaaggaatagttcctactggctacattggagtaccagctaatctccaacaatttgtaggcaatcaaacagcatttcggccaagcattgtgtacatggtaccggaatatgctactgactgttgctggtta

SEQ ID NO: 208058 - DNA, 1910 bp, Zea Mays
caaatattctagaattgaagtacataataatctgtcgtgacaatctactcagtgcctatgccgtgacattccctttctaccaagaagccaactcgtaaaagagacctcaccagataagctacgacagcattttaacatcgtttgaagtaggaacctcacccagattcattgaaccgccagctctgccatcttatccttgccacgtgaagtgacgttcttggcgaccccatcaatctcctcgatttggatgtccacgagcttattgagctgttgctcctgcgtcctgagatcctctggctgctgctcaacaacgcttcctgttagttccagaggcactgccaaggatctcccccttcatgaggtcatatatgcaggccctgaagttgtccatgctcttatgatcctgagagtcgaggcttaggaagatcagaatttcccagcaccggaggaactgtttcttctttatcttcagcttctaacgaacagtctccatcaggtcagccggtggaaccattctcaaactttgggccctttttgacaggttggtctccttcagagacgagacaatagcaccaagtgcaggtttgatcggatcaaacatgagcaaacggaggcagtcaacggatgatctcacatactgcagcaataacaatatacacaaagacgggagagagaagagagatggcggaagcgacgccgtacgaggagcagcggcggaggcaggtggaggcgaacaaacggaagctggaggagctgcagctccaccacctctctgctgccatcagagaggccgccgccgccgccaagccctcgctggtcaagaagcggaaggcgcgggtgcctctcgacgtcgccgacgccgtgatggagccagtacggcggtccggccggctcgccaacctcccggataagcccgtgtaccgcgagaaggttcccgattttgggatgaagattaggaggacgtacggatcggtgagaagagatctgaccaaccgggtgtacgcgaccgacgatgcgaggagctacgccatctctaaggcggaggatctggagcaagagctggactccagcttccccatcttcatcaagcccatgacccagtcccatgtcaccgggggcttctggctgggccttccgattcatttctgccggaagtatctgcccaagcgtgacgagatgatcaccctggtggatgaggatgatgacgagtccgacacgctgtacctcgcaatgaagcgggggctcagtgctggatggagagggtttgccgtccagcagaagctggtggatggagattgcctggtcttccagctgattgagcaaacaaagttcaaggtctacataactagagcaagttcctactacgaaagcgaggactgatgaaactagtagcttgtaatctggtgattggagctcagttatggaggtggctgcgttggacaagcttgcatctgggaatcgctggggtgtcttgaaactttttggtggcagaaagttagctgatagaattgcggaggtcgtggagggaagaggtgagacgacgagggactgggtgccaccgccgaaactgtagtcatcgctggagaggaactggccattgctgttgtagcctgcaggcgcaggaggatgcggcggcacagacaggaggggcagactctgttgtatggttttcgcttagatttttttggtagcagttgtatgttctatatacaaactaccccttcttcttgagaggagagagtgcacaccccttcatcaaattgaatagcacgtatgtgtaccgctatctccagcagcttattagctcctatttcttattttaaactccactgtatacagtacaaaacactatatacatggtcctattggccatagcttagtaaccaggttttcggatcaatgagatcgag

SEQ ID NO: 208059 - DNA, 1737 bp, Zea Mays
caaatattctagaattgaagtacataataatctgtcgtgacaatctactcagtgcctatgccgtgacattccctttctaccaagaagccaactcgtaaaagagacctcaccagataagctacgacagcattttaacatcgtttgaagtaggaacctcacccagattcattgaaccgccagctctgccatcttatccttgccacgtgaagtgacgttcttggcgaccccatcaatctcctcgatttggatgtccacgagcttattgagctgttgctcctgcgtcctgagatcctctggctgctgctcaacaacgcttcctgttagttccagaggcactgccaaggatctcccccttcatgaggtcatatatgcaggccctgaagttgtccatgctcttatgatcctgagagtcgaggcttaggaagatcagaatttcccagcaccggaggaactgtttcttctttatcttcagcttctaacgaacagtctccatcaggtcagccggtggaaccattctcaaactttgggccctttttgacaggttggtctccttcagagacgagacaatagcaccaagtgcaggtttgatcggatcaaacatgagcaaacggaggcagtcaacggatgatctcacatactgcaggtcaagaagcggaaggcgcgggtgcctctcgacgtcgccgacgccgtgatggagccagtacggcggtccggccggctcgccaacctcccggataagcccgtgtaccgcgagaaggttcccgattttgggatgaagattaggaggacgtacggatcggtgagaagagatctgaccaaccgggtgtacgcgaccgacgatgcgaggagctacgccatctctaaggcggaggatctggagcaagagctggactccagcttccccatcttcatcaagcccatgacccagtcccatgtcaccgggggcttctggctgggccttccgattcatttctgccggaagtatctgcccaagcgtgacgagatgatcaccctggtggatgaggatgatgacgagtccgacacgctgtacctcgcaatgaagcgggggctcagtgctggatggagagggtttgccgtccagcagaagctggtggatggagattgcctggtcttccagctgattgagcaaacaaagttcaaggtctacataactagagcaagttcctactacgaaagcgaggactgatgaaactagtagcttgtaatctggtgattggagctcagttatggaggtggctgcgttggacaagcttgcatctgggaatcgctggggtgtcttgaaactttttggtggcagaaagttagctgatagaattgcggaggtcgtggagggaagaggtgagacgacgagggactgggtgccaccgccgaaactgtagtcatcgctggagaggaactggccattgctgttgtagcctgcaggcgcaggaggatgcggcggcacagacaggaggggcagactctgttgtatggttttcgcttagatttttttggtagcagttgtatgttctatatacaaactaccccttcttcttgagaggagagagtgcacaccccttcatcaaattgaatagcacgtatgtgtaccgctatctccagcagcttattagctcctatttcttattttaaactccactgtatacagtacaaaacactatatacatggtcctattggccatagcttagtaaccaggttttcggatcaatgagatcgag

SEQ ID NO: 208060 - DNA, 2167 bp, Zea Mays
caaatattctagaattgaagtacataataatctgtcgtgacaatctactcagtgcctatgccgtgacattccctttctaccaagaagccaactcgtaaaagagacctcaccagataagctacgacagcattttaacatcgtttgaagtaggaacctcacccagattcattgaaccgccagctctgccatcttatccttgccacgtgaagtgacgttcttggcgaccccatcaatctcctcgatttggatgtccacgagcttattgagctgttgctcctgcgtcctgagatcctctggctgctgctcaacaacgcttcctgttagttccagaggcactgccaaggatctcccccttcatgaggtcatatatgcaggccctgaagttgtccatgctcttatgatcctgagagtcgaggcttaggaagatcagaatttcccagcaccggaggaactgtttcttctttatcttcagcttctaacgaacagtctccatcaggtcagccggtggaaccattctcaaactttgggccctttttgacaggttggtctccttcagagacgagacaatagcaccaagtgcaggtttgatcggatcaaacatgagcaaacggaggcagtcaacggatgatctcacatactgcagacgggagagagaagagagatggcggaagcgacgccgtacgaggagcagcggcggaggcaggtggaggcgaacaaacggaagctggaggagctgcagctccaccacctctctgctgccatcagagaggccgccgccgccgccaagccctcgctggtcaagaagcggaaggcgcgggtgcctctcgacgtcgccgacgccgtgatggagccagtacggcggtccggccggctcgccaacctcccggataagcccgtgtaccgcgagaaggttcccgattttgggatgaagattaggaggacgtacggatcggtgagaagagatctgaccaaccgggtgtacgcgaccgacgatgcgaggagctacgccatctctaaggcggaggatctggagcaagagctggactccagcttccccatcttcatcaagcccatgacccagtcccatgtcaccgggggcttctggctgggccttccgattcatttctgccggaagtatctgcccaagcgtgacgagatgatcaccctggtggatgaggatgatgacgagtccgacacgctgtacctcgcaatgaagcgggggctcagtgctggatggagagggtttgccgtccagcagaagctggtggatggagattgcctggtcttccagctgattgagcaaacaaagttcaaggtctacataactagagcaagttcctactacgaaagcgaggactgatgaaactagtagcttgtaatctggtgattggagctcagttatggaggtggctgcgttggacaagcttgcatctgggaatcgctggggtgtcttgaaactttttggtggcagaaagttagctgatgtatgaaacccagtatctcctaccaattgttgctgatttgtgtacttcttgggcttaccacttgcacggttcagaaacctgcactatgtaagggggttgttggtggcagctaacctcgttttgtaaatgattggtgcccgtccatgtttctcttagcgttcaatctggcctgttagttcaatttttaatagctacttccatcatgccaccagtattggctttgtcaactgggctaggctggccatttctcattgtgaggaacatggttgatgggcagagaattgcggaggtcgtggagggaagaggtgagacgacgagggactgggtgccaccgccgaaactgtagtcatcgctggagaggaactggccattgctgttgtagcctgcaggcgcaggaggatgcggcggcacagacaggaggggcagactctgttgtatggttttcgcttagatttttttggtagcagttgtatgttctatatacaaactaccccttcttcttgagaggagagagtgcacaccccttcatcaaattgaatagcacgtatgtgtaccgctatctccagcagcttattagctcctatttcttattttaaactccactgtatacagtacaaaacactatatacatggtcctattggccatagcttagtaaccaggttttcggatcaatgagatcgag

SEQ ID NO: 208061 - DNA, 1830 bp, Zea Mays
gtgattatgagaactcaaaaagacgacagtcacaataaagcaaatagacaaaagggacatcgattttactcgtggttcggctaatgactactccacattgtaatgacatcctttgggtcaagggttgcactcaatatgtgatccaaagattaaacctaagtgctatatttttttcctcatatcaaattccgtttgtgataaatctttataagttagagtctcccacatcttacataaataatcttaataaaaaacggagtaaaaaaacacaagaacataaccgcagcaataacaatatacacaaagacgggagagagaagagagatggcggaagcgacgccgtacgaggagcagcggcggaggcaggtggaggcgaacaaacggaagctggaggagctgcagctccaccacctctctgctgccatcagagaggccgccgccgccgccaagccctcgctggtcaagaagcggaaggcgcgggtgcctctcgacgtcgccgacgccgtgatggagccagtacggcggtccggccggctcgccaacctcccggataagcccgtgtaccgcgagaaggttcccgattttgggatgaagattaggaggacgtacggatcggtgagaagagatctgaccaaccgggtgtacgcgaccgacgatgcgaggagctacgccatctctaaggcggaggatctggagcaagagctggactccagcttccccatcttcatcaagcccatgacccagtcccatgtcaccgggggcttctggctgggccttccgattcatttctgccggaagtatctgcccaagcgtgacgagatgatcaccctggtggatgaggatgatgacgagtccgacacgctgtacctcgcaatgaagcgggggctcagtgctggatggagagggtttgccgtccagcagaagctggtggatggagattgcctggtcttccagctgattgagcaaacaaagttcaaggtctacataactagagcaagttcctactacgaaagcgaggactgatgaaactagtagcttgtaatctggtgattggagctcagttatggaggtggctgcgttggacaagcttgcatctgggaatcgctggggtgtcttgaaactttttggtggcagaaagttagctgatgtatgaaacccagtatctcctaccaattgttgctgatttgtgtacttcttgggcttaccacttgcacggttcagaaacctgcactatgtaagggggttgttggtggcagctaacctcgttttgtaaatgattggtgcccgtccatgtttctcttagcgttcaatctggcctgttagttcaatttttaatagctacttccatcatgccaccagtattggctttgtcaactgggctaggctggccatttctcattgtgaggaacatggttgatgggcagagaattgcggaggtcgtggagggaagaggtgagacgacgagggactgggtgccaccgccgaaactgtagtcatcgctggagaggaactggccattgctgttgtagcctgcaggcgcaggaggatgcggcggcacagacaggaggggcagactctgttgtatggttttcgcttagatttttttggtagcagttgtatgttctatatacaaactaccccttcttcttgagaggagagagtgcacaccccttcatcaaattgaatagcacgtatgtgtaccgctatctccagcagcttattagctcctatttcttattttaaactccactgtatacagtacaaaacactatatacatggtcctattggccatagcttagtaaccaggttttcggatcaatgagatcgag

SEQ ID NO: 208062 - DNA, 1182 bp, Zea Mays
aaacacacaccggcctcgcagtcgcagcctcgctccggaggcggagcgccggagccccgcccacctcccctaaacggccagggcctgaccacccccacctcagtccctctcctgtgggcggcgtcctcccgcgcccatggggatctcgcacctccagcccgtcctcctcctcctcatgctccgggctctcgcgtcgcttcccacgcaggccgccgcgagaggcggccacgatccgtcagatgatggagcccacgggccattttcacgtaaacttcttgaagataagcctcagatcacagaagaaatggtccgtggatatatgagcaacactgagcttgagactgctgtacatgcctttggaagtcgttgttccaatatctccagggtgtacagcattggaaagagtgtgaatcattttccattgtgggtgattgaaatatcagacaagcccaggcaaagggaatctgaaccagcattcaagttcattggaaatgttcatggtgatgagcctgttggaagagaggttcttatgcatcttgcaaattggctgtgtgataactatctgaaagattcactggcaactctcattgttgagaacatgcaccttcatatacttccgacgatgaaccctgatgggtttgctcttagatggcgtggtaatgcaaacaatattgatctcaacagggattttcctgaccaaacagcctgaaactagagccattatgaattgggtaaagcaagaacacttcacggcttctgctagcttgcatgggggggctcttgttgccaactatccatgggatggaactagagacacaagcaaacactactacggatgtcctgacgataagacattccagcacatggcatctgtgtatagtcggtctcactataacatgtctttgagcaaagaatttgaaggagggataacaaatggagcattctggtacccaatatatggtggtatgcaggactggaactatatacatggaggctgctttgagttaactctggagattagtgacacaaagtggccaaaagcagatgagcttcctatcatctgggaacacaataggatgagtatgctcaatcttctagcaagcctaataaagaccttctcgactgccatgggatgcatttcttcttatttggtaacaacggagtttatcaagttatagtgca

SEQ ID NO: 208063 - DNA, 1605 bp, Zea Mays
atcacaaatggtccgtggatatatgagcaacactgagcttgagactgctgtacatgcctttggaagtcgttgttccaatatctccagggtgtacagggataacacaaacctgctatcagcattggaaagagtgtgaatcattttccattgtgggtgattgaaatatcagacaagcccaggcaaagggaatctgaaccagcattcaagttcattggaaatgttcatggtgatgagcctgttggaagagaggttcttatgcatcttgcaaattggctgtgtgataactatctgaaagattcactggcaactctcattgttgagaacatgcaccttcatatacttccgacgatgaaccctgatgggtttgctcttagatggcgtggtaatgcaaacaatattgatctcaacagggattttcctgaccaattcttccccgttaacaacgatattgactacagacagcctgaaactagagccattatgaattgggtaaagcaagaacacttcacggcttctgctagcttgcatgggggggctcttgttgccaactatccatgggatggaactagagacacaagcaaacactactacggatgtcctgacgataagacattccagcacatggcatctgtgtatagtcggtctcactataacatgtctttgagcaaagaatttgaaggagggataacaaatggagcattctggtacccaatatatggtggtatgcaggactggaactatatacatggaggctgctttgagttaactctggagattagtgacacaaagtggccaaaagcagatgagcttcctatcatctgggaacacaataggatgagtatgctcaatcttctagcaagcctaataaagtcaggggttcatggaaggatatttgcagcagatacgggcaggcctgtacccggctcagtgatgataaagggcattgattccaaggtaagcgcgagcagcacttttggagattaccatcgaattgttgcgcctggtgagacatatgaagtggtggcatcgatgcgaggcttccggcaaaaatctacacgcatcaggctggagcaggaagccgtcagcctggatttcatcctggacccggatggagccgatgggcagacgaagctgctgccccgtagtaacgaccggggctgccgctgcgacaacgacaacgccgccaagccgttccatgtccacgaagctcacctctggttgtacctccttatcgtgtccgttctcctggccctctacgtagtcttcaagaggaaaacggtgccgaggctgctggcgtatagacactcatcgtcactcagacggcctgttgctgtataagaggaactaattttgtggtctaggcggatagttttgtactacctctgttctcgaatagttgttgtccgctagttaatttttatagctagttcatttttatactaaaatgtgacaaatagaaaagaacggagggaaggagcaactgaagttagtcttctctttgccaaaacggtcggttgctgtataagttgaaggatgggtaatgtaccatggaaatgacattttttttgaatcaatgaaatacatgttgcgttgatgacaaggaaa

SEQ ID NO: 208064 - DNA, 1548 bp, Zea Mays
tggagctaagagcatgtctctccttatggctccgactccagggttgtagggcccccttagtagcgatgtggtcaccattatttgtttagtcgtatgagcattggaaagagtgtgaatcattttccattgtgggtgattgaaatatcagacaagcccaggcaaagggaatctgaaccagcattcaagttcattggaaatgttcatggtgatgagcctgttggaagagaggttcttatgcatcttgcaaattggctgtgtgataactatctgaaagattcactggcaactctcattgttgagaacatgcaccttcatatacttccgacgatgaaccctgatgggtttgctcttagatggcgtggtaatgcaaacaatattgatctcaacagggattttcctgaccaaacagcctgaaactagagccattatgaattgggtaaagcaagaacacttcacggcttctgctagcttgcatgggggggctcttgttgccaactatccatgggatggaactagagacacaagcaaacactactacggatgtcctgacgataagacattccagcacatggcatctgtgtatagtcggtctcactataacatgtctttgagcaaagaatttgaaggagggataacaaatggagcattctggtacccaatatatggtggtatgcaggactggaactatatacatggaggctgctttgagttaactctggagattagtgacacaaagtggccaaaagcagatgagcttcctatcatctgggaacacaataggatgagtatgctcaatcttctagcaagcctaataaaggggttcatggaaggatatttgcagcagatacgggcaggcctgtacccggctcagtgatgataaagggcattgattccaaggtaagcgcgagcagcacttttggagattaccatcgaattgttgcgcctggtgagacatatgaagtggtggcatcgatgcgaggcttccggcaaaaatctacacgcatcaggctggagcaggaagccgtcagcctggatttcatcctggacccggatggagccgatgggcagacgaagctgctgccccgtagtaacgaccggggctgccgctgcgacaacgacaacgccgccaagccgttccatgtccacgaagctcacctctggttgtacctccttatcgtgtccgttctcctggccctctacgtagtcttcaagaggaaaacggtgccgaggctgctggcgtatagacactcatcgtcactcagacggcctgttgctgtataagaggaactaattttgtggtctaggcggatagttttgtactacctctgttctcgaatagttgttgtccgctagttaatttttatagctagttcatttttatactaaaatgtgacaaatagaaaagaacggagggaaggagcaactgaagttagtcttctctttgccaaaacggtcggttgctgtataagttgaaggatgggtaatgtaccatggaaatgacattttttttgaatcaatgaaatacatgttgcgttgatgacaaggaaa

SEQ ID NO: 208065 - DNA, 1035 bp, Zea Mays
ttcattagcaaacactactacggatgtcctgacgataagacattccagcacatggcatctgtgtatagtcggtctcactataacatgtctttgagcaaagaatttgaaggagggataacaaatggagcattctggtacccaatatatggtggtatgcaggactggaactatatacatggaggctgctttgagttaactctggagattagtgacacaaagtggccaaaagcagatgagcttcctatcatctgggaacacaataggatgagtatgctcaatcttctagcaagcctaataaagtcaggggttcatggaaggatatttgcagcagatacgggcaggcctgtacccggctcagtgatgataaagggcattgattccaaggtaagcgcgagcagcacttttggagattaccatcgaattgttgcgcctggtgagacatatgaagtggtggcatcgatgcgaggcttccggcaaaaatctacacgcatcaggctggagcaggaagccgtcagcctggatttcatcctggacccggatggagccgatgggcagacgaagctgctgccccgtagtaacgaccggggctgccgctgcgacaacgacaacgccgccaagccgttccatgtccacgaagctcacctctggttgtacctccttatcgtgtccgttctcctggccctctacgtagtcttcaagaggaaaacggtgccgaggctgctggcgtatagacactcatcgtcactcagacggcctgttgctgtataagaggaactaattttgtggtctaggcggatagttttgtactacctctgttctcgaatagttgttgtccgctagttaatttttatagctagttcatttttatactaaaatgtgacaaatagaaaagaacggagggaaggagcaactgaagttagtcttctctttgccaaaacggtcggttgctgtataagttgaaggatgggtaatgtaccatggaaatgacattttttttgaatcaatgaaatacatgttgcgttgatgacaaggaaa

SEQ ID NO: 208066 - DNA, 1167 bp, Zea Mays
gtctttcttgcccaaatcagcctcgctgtcgggagtacccgcactttcgcccatttcatttcaaaccaaaaccctctctccccttgccttccaccacaccccggatcaaatcgccacagaaaattcccagaaaaataacaagcacttgttcatcatcaaagtaaacgccgcagaaccctagcgaggcgttcctccaacgactcacctcccacccactcacccaccccatggcgaccaacccctccaacggcgccggcgccgacggcggtccctcggaggaggagctgcagaagaaacgggaggaggactacgacgccttcacctccaccaaggcgcaggacctcgcgcaaccgctggtcgacgcccagatccccttcaagatccacgtcgtcaaggaccacgacatgaaggagcgcctctgcctcgaggctgagcgccttggcctctccgccatgatcatggggagccgcggtttcggggcctcccggaaaggcagcaaggggcggcttgggagtgttagtgattactgcgtacaccactgtgtatgtcctgttgtggttgttcgctaccctgatgatgctgcagatgccggtggagatgcatcaggggtgacagatgagttgcacactgtaccagaggacgaacctgtttatcacgatgcacctgaggtgcagaaagaaaactgaggcaacggccacatgcggctgaagaacgaaggaaaacatgaggcttgtagtgaggcaatcctgtgtatctggaagatgggaccggctgtttatctttgcttctatatatcaactgcgtatcatgatcagctgtctgcttcccgttgagtttcatatcggagtcgtagatcatctgagttttttgttggtttgcttgtgagatgtagagtactcttcccgtgggtcgaaggtgtcttgcagatgcttgaactttatgttgtcgaacggtagttatctacacggtatcatcttctctgttaagcctgtttagtgtttactgtattggatactcgttaatagagaaccgctacttttcagtatttattatcacctgtatattggataaaattattgcttagcttatgcttgcatgctccatatttgtattctgtaagacttgtttgagaagaattcgtttgaaataaatttgtcaaaaataaat

SEQ ID NO: 208067 - DNA, 3010 bp, Zea Mays
acatgcaacagtgttgcagcgtggattgttctcatcaatcatcacatggcaaaaggcgccttgggctccttgtcaagtgtccagataagcagccactccacgccacgctccactgcgacattcaccaccagcctatccctgcaaaacccgtcaaaagcgccagcgtgcatgaaagacgccactcgcggtaccagcgcggtggaggaggcactggcggcccatcgtccgcgccgagcgatggcgtccccgctcctgtgcgtcctcctctacctactccgccaccttacggcctgccacgccgccagggacatcatcacgccggaccgcccgctggcgggcaacgagacgctggtctcgggcggcgagggcaacttcgcgctcggcttcttcaccccgccgggcgccaacagcacctacctcggcgtgtggtacaacaaggtctccctccgcaccgtggtgtgggtggccaaccgcgaggccccgatcgcgggcgccgtcggggacaaccccggcgccacgctctccgtctccgccggcggcacgctcgccattgccgcggggaacaggaccgtcgtgtggtccgtggagccggcgtccaggctggcgagcccggccgcccagatcctggacaacggcaacctggtgctcaaggacggtgccggcggcgtggcgtgggaggggttcgactacccgacggacacgctgctcccggagatgaagctggggatcgactacgtgaaagggaagaacaggacgctgacgtcgtggaaaagcccgtcggacccctccccgggccccgtggccatggtgatggacaccagcggcgacccgcaggtgttcatctggaacggcggcgagaaggtctggcggtccgggccctgggacggcgtccagttcaccggcgtgccggacacggccacctactccggcttcaccttcagcttcgtaaacagcgcgcgggaggtgacgtacagcttccaggtgcacaacgtgtccatcatctcgcacctgggcgtcgtgagcacggggaactacgggctgctgcagcgctcgacgtgggtggaggcggcgcgggcgtggaacctgtactggtacgcccccaaggaccagtgcgacgcggtgtcgccgtgcgggcccaacggcgtgtgcgacaccaacaacatgccggtctgctcctgcctccgcggcttcaccccgaggacccccgccgcgtgggcgctgcgggacggccgcgacgggtgcgtgcggtccacgccgctggactgccgcaacggcaccgacggcttcgtcacggtgcgccacgccaaggtgcccgacacggagcggagcgcggtggactggagcctgacgctggaccagtgccggcaggcgtgcctccgcaactgctcctgcaccgcgtacgccagcgccaacgtcagcggcggcgccggcggtgggcgccgcgccggcgccggctcgggctgcgtcatgtggaccacggggctcaccgacctgcgcgtgtaccccgacttcggccaggacctcttcgtccgcctcgccgccgtggatctcgatgtagaagctaaatcaagggaggcgcgcatcaaaatcgcagtcggcgccagcgtctcggcgctggcgcttcttctagcagtcgctggtctcctcatctggtcatggaggagaaggctaacaagaacagacggatcaagtaaatggagtagctcccgccccaccggccgccggtacgagggaagcagccacggtgacgacctggagctgccaatatttgatgtggggacgattgcagctgccacggatggttactcgatcgaaaacaagcttggcgagggtggatttggaccagtgtacaagggtaagctcgaggacggaatggaaatcgcagtgaagacactctcgaagacgtctgcacaagggcttgacgagttcaagaacgaggtcttgttgatagccaagctccagcatcgcaatcttgtccggcttcttgggtgcagcgtcagtgggcaagaaaggatgcttgtttacgagtacatggcaaacaagagcctggactatttcctgtttgagaaggacaacgttgtgctcgattggcaagtgcggtaccgtataatagaaggcattactcgaggtctactctacctccaccaggactcgagatacaggatcatccacagagatctgaaggcagctaatgtccttctggacaaggagatgacgcccaaaatctcagactttggcatggcgaggatatttggcaacgaagagacagaaatcaatacccgaaaagtggtcggcacgtacggttatatgtctccggagtatgcaatggatgggatcttctctgtcaagtcggacgtattcagctatggagtattgctgctggaaatcgtcagcggtaggaggaacagaggagtgtattcctattcaaacaaccaaagccttctaggccatgcatggagcttgtggaacgaggagaagagcatagagctagcagacgaaagaatgaatgggtcgttcaactcggacgaagtgcacaagtgcatcagagttgggctcttgtgcgtgcaggagaacccagacgaccgtccgctgatgtctcaggcggcggacaacaggagaggcggcggcgaccaacaataagtatgcagattagtctgataaggattagaagatttaggagataaggtttgttagaaagaaaagagaagatctcatacagattagttagatgatgtttaggagattaaagacataaagtttgttagagagaaaagagaggatcttagatttaatctctttagaaaaggactagaaggaagtataaatacttgtaaacaccactctatatgaattaagtagaaaattatttagcatatttcctctaaaggaagcacgtgtgttttcctctcctaaaaccgttgatcagtgtccaccgaagaatagcgcggtcacagtgcccttgtccgccgcgcccccgtcctgcgccagcccgcaatgccctatccctaca

SEQ ID NO: 208068 - DNA, 1384 bp, Zea Mays
ctctagaaagcgacaccaaagtcttctccctctccctcccgcggttccgcccgccacgcctcctctattccaggagtcttctagaggtgaagagggaccacaggtccacagccgcggcagcaccgccacctacgccggcagaatccttgatcgagacaggagcggacgtggcctagggtttctgagccaggccggcgccatggtgggctgctctaggggctccctccccacctggatgaccgccgccgccgcgcgggtcgacctctctggcggcgtaacgccttcgcaccagggctcgccctctccacctcactcctcctcgggtcccgctccggccgcgggggcggaccagcagcttgggttgttcgagcgcgcgctctccgccgccggcgccgccttcgtctcagctatcatcgtcaaccctctcgatgttgccaagacgaggctgcaggctcaggccgcaggggtgctgtaccaccagcctgcccagatggcggcgctcggccccgatatcctgtctgaattcagatgttctccttcatgcacacgtggtctcttactaggaagtgagccagtttgtcctcctgattgcttccagtacaagggaacacttgatgtattcttgaaagtggttagacaggagggtttcagtagactatggagaggaacaaatgcaggcttagcattagctgtacccactgttgggatatacttgccttgttatgatatattccgcaacggcattgaggatttcacaagaagtaatgctcctggcttgacaccatatgccccactagtagcaggatcagttgcacgttcgttagcatgcattgcttgttctccaattgagttggcaaggacgcgtatgcaggcatataaagagtttcgtcctggattaaagcctcctggaatgtggaaaaccttggttggtgttctcccaccacttgcaggttctagtcagaatgtacaaaattatcgtgttctgtggactggggtgggtgcacaactggctcgagatgttcctttctccgctatatgctggtcaactcttgagcctattcgaagacaactgcttggtcttcttggagaagacggcaatgcagccagtgtattgggtgcaaattttgctgctggttttgtagcaggcagtcttgctgctggtgctacatgcccgttggatgttgcaaaaacaaggagacagatagagaaggatactgaaaaggcaatgaggatgactacaaggcaaacgttaactgagatatggaggtctggaggcttgaaagggctgttcaccggcgtcggcccacgtgttgcacgtgctggtccatcagttggtatcgtcgtttccttctacgagggagcaggcgtagtgagcagtgtgttg

SEQ ID NO: 208069 - DNA, 5724 bp, Zea Mays
ggcgggaacatcgataatatgccgccgttttccttccccgaaccctccaccttcgccggcccgtcagccacgaccgccaccattcaatccttccacttccatccctactccgtctcctctaccgtccacccattccggcggagctccccgccagaatggaggcggcgctgaagggctatttcgggtactcaacgttccggccgtaccagagggagatcatacagaaggtcctggatgggcgggattgcctcgtcgtcatggccaccggaagcggcaagtccatctgctatcagattcccccactggttacgaagaaaacagctgtcgttgtaagccctcttctgtccctgatgcaagaccaggttatgagtttaaaacaaaaaggtgtgaaatctgagtaccttggcagcacccaaacgaatagctccgtcagtaatgaggcagaaaaaggcacgtttgatgtgctttacatgacaccggagaaagccatttcacttccttcaagattttggagtaacttgcaggcttctggaatctgcttgttagctgttgacgaagctcattgcatatcagaatggggccatgatttcaggacagagtacaagcagctgcattcattgcgcaaccttcttgtgggtgttccctttgttgctttaactgctacagccacagaaagggtacgccaagatatttctacttccttggttctttgcagtcctcacgtggtggttggttcatttgatcgtcataaccttttctatggtgtgaaaacatgcaaccgatctatgtcctttataagtgaacttgtgaaagatgtttcaaagaggagtgatgtgggtgagtcaacaataatatattgtacgaccatccgggacacagaacaggttcatgaggctttagttacttctggaatcaagactggaatctatcatggtcaaatgggcagcagagctagagaggaatcccatagatccttcattagggatgaagttcttgtaatggtggcaactatagcttttgggatgggtattgataagcctgatgttagatgtgtaatacactatggatgtccaaagagcctagagtcttactaccaggaaagtgggcgttgtggaagagatggactgccttcaatctgctggctatattaccaaagaagtgatattacaaaagctgatttctattgttctgaggcaaaaaatgaaacccagaggaaagcaatcatggattccttcatggcagcacaaaaatattgcttgcttgctacatgccgtaggaggttcttattgcaatattttggtgaagaatggaacattgactgtggtaattgtgataattgcacagcagtgaaaaatgagagggatttgtcaaaagaagtctttttgttgctgtcctgcatcaaatcttgtggaggacgctggggcctcaatttacctattgatgttctccgtggctcacgagccaagaagattgttgacaacaattatgataaactacaaatgcatgggcgtggtaaagattattcgtcaaactggtggaaagcacttggtggtcttcttatagcacatgattatttgaaggagactgttcgtgatacatttagatttgtcagaaatgcttaaggacaaccgcccctaacccgcgtctatatattcagtgtcagtccaaaaggggtcaagtttctctctactgctgataaaatagatggagcaccactggtatttcagctgactgcagagatgattgaactagaggagcacggtagttcacatcataaagaaggtggtttgaatcttgtgccaacattagaatctgaaaaattttctgaggatgaatcaaaactctatcaaaggctcctgaatgttaggatgaagattgctcaagatattggcactgctccgtatgctgtatgtggcgatcagacaataagaaactttgcaaagatgagaccttctactggagctagacttgctaatatcgatggtgtcaaccagcattttatttcacgtttcagtaacattttcatccaaaatattgcggaattgtcgaaggagttaaacctcccgttggataattcaccatttccaccaccaccaccaacaaatccagctgcagaaaatattgctggtataccaaaacctgtacaaaacaatcttcctgggatcttgggtgatgcaaagctgactgcatgggaattgtggcataagcaggagtactcattcctgaaaattgcttatttccgcagagcagtgccaataaaagagcaaacagttattgcgtacattcttgatgctgctcgagaaggatgtgagatggactggagtaggttttgcagggaagtagggctgacacctgatatagccaccgcaattcgtcttgcaatctcaaaggttggatcacgtgagaaaatgaagccaatcaaagaggagctcccagagaatgtaacttatgacatgatcaagacattcctgactattgaggggtgtggattgtcagagcaagtctttggtaacggtaccgctgacggtgtctctagtagaatagcagagtcaccaatatcttcctgccatgcaagtgaagcaggcggaaatggtgtcccagcagcggcagaggccagtgatgcaaacccttcagcaaagagaggtcaaactgtttgtgctgaggagccagcaacaaaactgcaaaggacatacgagcatggagctgagttaactggcacggcgactgctactgtagattctgtgctagatctggttgcgagctgcaatggggtatcgctggaggatgttgccaagcacttcaagggatccaagagagaatcggtcctggagatattggagggccttgaatctgaattcacaatttacaagaaaaacgggaactacatggtcctgtgacaaacttgcccgcgtagtctgggaaggggatatgcctcagctgtgtgtgtatatatatatatctatacgatggtgggtgacttactgactttggactatggtagcaaggttgttggctggtgtgcatgtgctcattttggggattgggcagaactagcagatgtacgaacgtgtgtgtttggagctgggatcctttctgtcatctcgcatatgagtatcttggactaattgaccccgcgtattttcgttgggttttgatgcgttcaccctactcgttcaacagcttaagatcaggtttgactcctattgcaattttcctacgtgtccatttggagcaaattatcaaaggttttagaaccacacagaattcctatagaatgccttaacaattcgtaagaatttcggaggaaacattccatggtaaaaacttccgccacagatatcaaccaccactcttaccatacattttctttgctccgatgatattttatgattattacggtctagcgaaatcacgtgatgccttgcaagtgggaaacacgagaaaccgtactcggccattggagagcaggtgaaccagttgtcttaacaaaaagggacacgtactcggctcgggcacgcccgcacggccgcaccgcaccaccaagcgaacccattggctgtctctctcacggctcacttcactgttcactcggcggcaccgcactgcgccagtgccccgtcgccgatcaaagcaaccgcctccaacgcggcaacggcaacggcaacggcaagcgccgtcagtcactcccgtagtagccgccccgcagtgagtgtgtgagcgagtgagatgatcagcggaggggccgcggccgccgggaacccgaggagtaggaggacgcgatgaaggcgcagccgctgctactgccggcgctcaagaggcggagaggccctcgcgtggcggtgctggcgctcgtcctctgctccctgctcgtgcccttggccttcctcttcgaccgcgccccctccggatacgtgacgacggaggagcggcaccgacaggaggtcgttctgcctttgttggatcacgtggcggagaagagacgtccgagtggtagtggcgctgacacgcgacaggatgcgctggagaagaaggtccccggtagtagtgcaggagtcattcatcaacaaacaccggataagaacatctccaaagtcattcgtcaacaaacaccggagaagaccatctccaaaggcagtgcaggtgtcgttcatcagtataagcaaattggtagccactccacaagtgatggtgctaaaccaaaagtttccccagcaccaaaagttgaaccatcagatgctgtttcagattcaactaaagtcgcaagagatactagccaagaaggtgaaaaggctgatgaagtggaaaagtcaaagtcttgtcaacttgaatttgggagttattgtctctggtccattgagcacaaagaagtaatgaaagattatacagtgaaaaggctaaaagatcaactcttcgtagcacgctcatactatccaagcattgcaaaacttcaaggacaggaagctctgactcaggaaatgaagcaaaacatacaagaccatgagaagattcttagtgtatcaacagttgatgctgatctaccatcctctatcaacagaaggatgaagcagatggagcaaacaatagtgagagccaaatcttgcacagtagattgtagaagtgttgacaggaagcttcgccagattctttatatgactgaggatgaagctcattttcatatgcagcagagtgcattcctctacaatctcggtgcccagacattgccgaaaagtcatcattgcctttctatgaggttcagtagtccagaatacaggcacttcgttatactatcaaggaacgttcttgcggcttctgtagcaatcaactcaactgtgagcagttgtaaggagccaggctactttgcttttcatatcctaactgacgctcagaacttctatgccatgaaacactgccactcacatttcgttattccagaaatattcaagtatctaaacaaggtggtcgtgttggatgacgatgtagttgttcaacgtgatctgtctttcttgtggaatattgatatgggagacaaggtaaatggcgctgtcgaactttgtggtctgaaactgggtgagatgaaaaatgtcttgggtaaaacagcatatgatccaaagtcgtgtgcgtggatgtcgggggtgaatttgattaatctggataaatggagggagcataatgtcacagagaactatctgcggctcatgaaaaagttcgaagtcaaggatgagctgtccctgcgagcagcagcatttcctctaagcttgctatccttccaacatctaatataccccctagatgaaaaattgacgctggctggacttggatatgattacggaatcgatgaagaggttgcgcggagatctgcatcattgcactacaatggcaacatgaaaccttggcttgaattaggtataccggagtacaagaagtactggaagaggtttcttgtccgaggagatcgatttatggacgagtgcaacgtaaatccgtgacgtagagttggacccgaaacgagaacgattgcgtgaatctgtgacgcagagttggatctgaaatcagaacaactggaatagacatcagctagcctcactgaagtttgtgtcggcaaattgtgaacgagaatgaattctggtggtggagctaggatttttttgagtggagattccaaacatgaaagtagtaaacactaatatatatacggtagtataaatttgagtaaatgatggggac

SEQ ID NO: 208070 - DNA, 2786 bp, Zea Mays
gccaggtgagctgccgctgcgcggttgcgcgtgggaaaggcgcgccatcatgtgacgtcgcgggcgcttgcacgaggccccctccccgcaccacagccccagtgctactccgtcaccgtcagcccgacgccccgccagaccaccctcttctgcctctccataataaaatctccctccctcctctcttctctctctctccttctctgcgctcgtgtaattctcttcagctgggatgcaagtactgcagtctgaagaattcagtggcaccacctctgcttcttattgatgataaactgtcagtgaacataagtcaccatctcctggatcacagtttttgtactggagcaagacagtaatggaccgggcagacacatctggctttgttagcggtggatcagatggtacttcactgctgctgatattctttcacttcgtctactcgactctgcacgtataagagatcagtaaaccaccttcactgtatttttcaagtacgtagcctagatgaataccatggatgattctgcagtgtcaattggtttctcggtgacgaactacacaacaggtagccatggtcagagtcaggtaacattaggcatagaccagctgggttcagcagtgaacaatagcagcggccatggccgcagaggttttcagaggtcgattcatgcgcctgctcaagatgatggatgcaggctagtcctcggactgggtccgacgcccgccccagacgttaactcttgtgattgtgatcagcagcctgccggagcagacaagtcgagaccacctgtaactttgtttggccagagcttctccttcgctgatccaggggcgctcagccttggaattcatcgggggcgtgataatgctggagcaactaaacacttgggcgtgcccgtgcctgccggaaccgtcatctccttttccactgttgacgagggctccacgtctgccaggagaagctccggcggctacatgccattgctgctcttggcgcctctgccaaactattcgacagctgaagaggagcagggtttgctagatgacacggacaacagtaataatggtggcactgatccccgcggttttcggttcagccctgaaccttcggcatccatgacggaagcttcctttggtggcgcgagctctgatgttgtgacggtggcaagcaatcctggacagcagactcaacgccggcatcccaagaagtgcaggttcaaagggtgctccaagggcgcgcgaggcgcgtcgggcctgtgcatcgctcacggtggcgggcagaggtgccagaagcccgggtgctacaagggcgccgagagccgcacggcctactgcaaggcccacggcgggggacgccggtgcctgcagctcggctgcaccaagagcgccgaagggaagacggatcactgcatcgcccatggcggcggccgacggtgcggctaccttgactgccctaaagccgcgcggggcaagtccgggcggtgcatcaagcacggcggcgggaagaggtgctcggtcgagggttgcatcaggagcgccgaggggagggtggggctgtgcatctcccacggcggcgggcggcggtgccagttcccggactgccgcaaaggagcccagggcagcaccctgtactgcaagtcgcacggcggcgggaagcggtgcgtcttcgaggggtgcggcaagggggccgaaggcagcacgccgctgtgcaaggcgcacggcggcgggaagcggtgcatgtacgagggcggcggcgtgtgccccaagagcgtccacggcggcacggacttctgcgtggcgcacggcggcgggaagcggtgcgcggtgcctgagtgcagcaagagcgcgcgcgggcgcacggactgttgcgtgaagcacggcggtggcaagcggtgcagggtggatgggtgcggcaagagcgcacaggggagcaccgagtactgcaaggcccacggcggcgggaagcgctgcaacttcggaggcgtctgcgagaagttcgcgcgcggccggagcgggctctgcgcggcgcacggcacgctggtggcctcgcggcagcgccgcagcggcggcggtggcatgattgggccaggcctcttccgcggcatcgttcggtccgccagcgcggcgaacatgtatagcgagtactcgtcgtcgggcgtgagcacggtgtcggactgcgacggctcgcctgaggcggcgacagggaggcatgagttgatccctccccaggtgctggtcccccactctatgaaatctttgacagcggcagccgtgcagccaccggcgaggagcagagagggaggggtggtcgctgtccccgaggggagggtgcacggcggtggtctgctgtcgttgcttggcgggagcttcaggaacgtcgacgtcgacaagctctgaaaatctgaagcaggctgcagcaggcagcgcttgaggctcgaattctacttctacgcctacgcctctttttcttaaaaaaggacggaagatcttccttttttccagtcatagctgtcagattattgtctgtgtataaaaatgtttcttgtctgcagatcgatcttatatggtaaaatttagattaatttcgtttcccttgtgtcaacataataagggtgaagacatgaatttgtcggggcttgtatatggttgaattattcgtagcagatccgaaaagcttcccacggcatcctgtacttgtcgtgaataagatcaatgtgtaacaatcgaacttattgctaaactgtggtatcagatgatcattctgagtaacacgtgttgctgtagat

SEQ ID NO: 208071 - DNA, 2028 bp, Zea Mays
gaactctctaaactgctatatttccgttacctgataatggaaatggggactcctcagttcgaggcaaatgggaattctgatttcaacttcttttgtcacttcaggaaccgtgatggatccagaaaaacaaaatgagatgagcctgatcgacaagagagaactagtatacgaagttgcaagatggcctcaaggtgccatggagattcttcggtgctggacccgcagggaacttcttgagcttatttgtgttgagttgggcaaagagaggaagtataccaatgtcccaaaagctaagatgattgcttacctattgaaattagtttcacggaatagtggaaagaatggacaactcaagaatgataatccgaatgttatgttattagggcaggataacaaagatgaaatacaaatgaaggaatctgatgaacaatcacgaccactcaaaactgcaaactctgactcatcaataagcagagaggcttgtgccggtagttcagtggtgtgcagcaatgttgcatgccaagccacaccaaatgcaggagataaatattgcaaacgttgctcttgctgcatttgcaataaatacgatgataacaaagaccctagtttgtggttggtttgcagctctgataatccatacagtggttgttcatgtggtgtctcttgtcacctaaactgtgctctaaagaataaaagggctggcattgtcaagaatgggtgcaacaagttagactgtagtttctactgtgttagttgtgggaaaatcaactggctaatgaggtgtttgcagaaacaacttgcaattgctagggaggcaagaagagttgatgtgctttgtgagcggttgtcattgagccataaaataatacaagggtctgaacgttacaaggaaatagcgagcataatcagctcagctgtgaaaacacttgaaatagaagttggtagtgcattggatcaggtctctgtgatcacggggcgtggcatcgtgaaccggcttacttgtggtgctgaagttcagaagctttgttcaagtacattagaaattgtagactctaaagtggataacatcttggagttcgagtccaataatagtccaaaactcctaggtcctcagccccaaatcctttttcatgagatcactccattttctgtggttattgtgttgaactatcagcatgacatcggtaaggagcagattgatggttccaaaatttggcaccgaagtgccagggtttgcaactattcatcagagcccacatgccacatactgaggccaaacactaggagcctggtttctggtctgagcccttcaactgaatacttcttcaaggttttgccttttagcagcacacatgggtttactgagtgggagacaaaatgcagcacacgcagcctggaccatggcagcagccagtgctcaactcagaactctgagagcatgtgcctcaaagacgattcaatgcagcatcacaaaaaggatttgaatgtgcagaatcaccagagaaccattcaatatgattcacctaagggttctacaaattcaagtgagaacaatttatcatgtgatcggtattccaagcgggctaaggttgcaaggctagatggtgcaagcgacaacgatgaaagccagttgccgccaacttctgaagttttaccatttgcaagctccaactcttctccttccgaagctccaagtaaacctgacttgcttattggcaccccagattcggcctccaagaactatgtggagcagcagtacgagtactgcgtgagggtggtcaggtggctggagcatgaagggcacatggacaatgacttccgtgtaaagttcctcacttggttcagcctgaaggcaacaacacaggacaggcgaatcgtgggcgcctttgtagatgttctcatcggtgatcctgcaagcttggttggccaactggttgatgcattcaaggatgccatctgtatcaaggagaagccctctcaagcacaacagaaagatgcatgctgcaagctggaagaccaggcaatctc

SEQ ID NO: 208072 - DNA, 1953 bp, Zea Mays
ctggtcgggccgcggaattaatgtcgcgcggaggaaatccggtgtttgcagaaacaacttgcaattgctagggaggcaagaagagttgatgtgctttgtgagcggttgtcattgagccataaaataatacaagggtctgaacgttacaaggaaatagcgagcataatcagctcagctgtgaaaacacttgaaatagaagttggtagtgcattggatcaggtctctgtgatcacggggcgtggcatcgtgaaccggcttacttgtggtgctgaagttcagaagctttgttcaagtacattagaaattgtagactctaaagtggataacatcttggagttcgagtccaataatagtccaaaactcctaggtcctcagccccaaatcctttttcatgagatcactccattttctgtggttattgtgttgaactatcagcatgacatcggtaaggagcagattgatggttccaaaatttggcaccgaagtgccagggtttgcaactattcatcagagcccacatgccacatactgaggccaaacactaggagcctggtttctggtctgagcccttcaactgaatacttcttcaaggttttgccttttagcagcacacatgggtttactgagtgggagacaaaatgcagcacacgcagcctggaccatggcagcagccagtgctcaactcagaactctgagagcatgtgcctcaaagacgattcaatgcagcatcacaaaaaggatttgaatgtgcagaatcaccagagaaccattcaatatgattcacctaagggttctacaaattcaagtgagaacaatttatcatgtgatcggtattccaagcgggctaaggttgcaaggctagatggtgcaagcgacaacgatgaaagccagttgccgccaacttctgaagttttaccatttgcaagctccaactcttctccttccgaagctccaagtaaacctgacttgcttattggcaccccagattcggcctccaagaactatgtggagcagcagtacgagtactgcgtgagggtggtcaggtggctggagcatgaagggcacatggacaatgacttccgtgtaaagttcctcacttggttcagcctgaaggcaacaacacaggacaggcgaatcgtgggcgcctttgtagatgttctcatcggtgatcctgcaagcttggttggccaactggttgatgcattcaaggatgccatctgtatcaaggagaagccctctcaagcacaacagaaagatgcatgctgcaaggtttggcactagaaaccttcataactgttctccatcgctgtgtgacgtaagtttttctggtgactgaaggatgaaatattgaagttatcacctagcaggttgcatctgaattgtgtcgagacagacattgggcacttgagataaacttttaaggttataaaagacgataaaatgctgtagatgcttcattcggcattcaggtccatctgatctctcatttatttattccaattcagtcgatacgcggactattgatccatgaaggcaatcgtggtggaaccatgtgctgatgagacatggttcatggaccggttgagtttaggtttcaactagtgaagtagttggagtttgttagcagacaagcaattgtatgcatgtggaatgctatcttggatctgcaagctaactaatcatatcatgactttggtagatgtttattgttattagttgatagttgactcattcttttcgtgtgacgtgtttgaagtgccggaagtagcagttcatgtacagtcttggagccttagaccgtgtccagcagtctattcgtagcttacctaaaatattgtttttgcattgcctaaaatattgtttttgcaatgttctgtactgtagacttgtagactgtattgttcacatagtagagtaggtatgaggatgtgtaagctgttagaaatagcctta

SEQ ID NO: 208073 - DNA, 2707 bp, Zea Mays
attgctacctggtcgggccgcggaattaatgtcgcgcggaggaaatccgagcaggtaaacaagtctagctgaagtgacgattgccagcattgttcgaccgtgcggcttctgtttggctggaaccgtgatggatccagaaaaacaaaatgagatgagcctgatcgacaagagagaactagtatacgaagttgcaagatggcctcaaggtgccatggagattcttcggtgctggacccgcagggaacttcttgagcttatttgtgttgagttgggcaaagagaggaagtataccaatgtcccaaaagctaagatgattgcttacctattgaaattagtttcacggaatagtggaaagaatggacaactcaagaatgataatccgaatgttatgttattagggcaggataacaaagatgaaatacaaatgaaggaatctgatgaacaatcacgaccactcaaaactgcaaactctgactcatcaataagcagagaggcttgtgccggtagttcagtggtgtgcagcaatgttgcatgccaagccacaccaaatgcaggagataaatattgcaaacgttgctcttgctgcatttgcaataaatacgatgataacaaagaccctagtttgtggttggtttgcagctctgataatccatacagtggttgttcatgtggtgtctcttgtcacctaaactgtgctctaaagaataaaagggctggcattgtcaagaatgggtgcaacaagttagactgtagtttctactgtgttagttgtgggaaaatcaactggctaatgaggtgtttgcagaaacaacttgcaattgctagggaggcaagaagagttgatgtgctttgtgagcggttgtcattgagccataaaataatacaagggtctgaacgttacaaggaaatagcgagcataatcagctcagctgtgaaaacacttgaaatagaagttggtagtgcattggatcaggtctctgtgatcacggggcgtggcatcgtgaaccggcttacttgtggtgctgaagttcagaagctttgttcaagtacattagaaattgtagactctaaagtggataacatcttggagttcgagtccaataatagtccaaaactcctaggtcctcagccccaaatcctttttcatgagatcactccattttctgtggttattgtgttgaactatcagcatgacatcggtaaggagcagattgatggttccaaaatttggcaccgaagtgccagggtttgcaactattcatcagagcccacatgccacatactgaggccaaacactaggagcctggtttctggtctgagcccttcaactgaatacttcttcaaggttttgccttttagcagcacacatgggtttactgagtgggagacaaaatgcagcacacgcagcctggaccatggcagcagccagtgctcaactcagaactctgagagcatgtgcctcaaagacgattcaatgcagcatcacaaaaaggatttgaatgtgcagaatcaccagagaaccattcaatatgattcacctaagggttctacaaattcaagtgagaacaatttatcatgtgatcggtattccaagcgggctaaggttgcaaggctagatggtgcaagcgacaacgatgaaagccagttgccgccaacttctgaagttttaccatttgcaagctccaactcttctccttccgaagctccaagtaaacctgacttgcttattggcaccccagattcggcctccaagaactatgtggagcagcagtacgagtactgcgtgagggtggtcaggtggctggagcatgaagggcacatggacaatgacttccgtgtaaagttcctcacttggttcagcctgaaggcaacaacacaggacaggcgaatcgtgggcgcctttgtagatgttctcatcggtgatcctgcaagcttggttggccaactggttgatgcattcaaggatgccatctgtatcaaggagaagccctctcaagcacaacagaaagatgcatgctgcaaggtttggcactagaaaccttcataactgttctccatcgctgtgtgacgtaagtttttctggtgactgaaggatgaaatattgaagttatcacctagcaggttgcatctgaattgtgtcgagacagacattgggcacttgagataaacttttaaggttataaaagacgataaaatgctgtagatgcttcattcggcattcaggtccatctgatctctcatttatttattccaattcagtcgatacgcggactattgatccatgaaggcaatcgtggtggaaccatgtgctgatgagacatggttcatggaccggttgagtttaggtttcaactagtgaagtagttggagtttgttagcagacaagcaattgtatgcatgtggaatgctatcttggatctgcaagctaactaatcatatcatgactttggtagatgtttattgttattagttgatagttgactcattcttttcgtgtgacgtgtttgaagtgccggaagtagcagttcatgtacagtcttggagccttagaccgtgtccagcagtctattcgtagcttacctaaaatattgtttttgcattgcctaaaatattgtttttgcaatgttctgtactgtagacttgtagactgtattgttcacatagtagagtaggtatgaggatgtgtaagctgttagaaatagcctta

SEQ ID NO: 208074 - DNA, 3322 bp, Zea Mays
ctcccacgcccccctcccctcgtgtctcaaaagcatagcgcaccaccacgggccacggcaatacggcatcatctccaaactcccgaggggggaccatcaccgctgctgagcacgcccgccgcctgcccttcctcctcccacccgtgccgcagctttcgattcctgcccgcctcattgctacctggtcgggccgcggaattaatgtcgcgcggaggaaatccggtaagctccggcccgattttcaactctcccctccctcatcctcgattggggttgagaaattgaatcaaaccccccacacccacccacccaaaaaagtcgcccttcctcggacgagatccccccaatcagttcttattgtggccgatagattgattgcctcacttgccttccgctcgcttttggggtgctaacctaatcggtgaccctccttgtgtgctcggattgggttctcgttctcatcagcattgacctcagcggctttcttttggacaatgctgctgttttactgcttgtttctaccatctacggccgtgtaggtgtgtccgacacgccacaaaaacttttcgttatgttcagcaggtaaacaagtctagctgaagtgacgattgccagcattgttcgaccgtgcggcttctgtttggctggaaccgtgatggatccagaaaaacaaaatgagatgagcctgatcgacaagagagaactagtatacgaagttgcaagatggcctcaaggtgccatggagattcttcggtgctggacccgcagggaacttcttgagcttatttgtgttgagttgggcaaagagaggaagtataccaatgtcccaaaagctaagatgattgcttacctattgaaattagtttcacggaatagtggaaagaatggacaactcaagaatgataatccgaatgttatgttattagggcaggataacaaagatgaaatacaaatgaaggaatctgatgaacaatcacgaccactcaaaactgcaaactctgactcatcaataagcagagaggcttgtgccggtagttcagtggtgtgcagcaatgttgcatgccaagccacaccaaatgcaggagataaatattgcaaacgttgctcttgctgcatttgcaataaatacgatgataacaaagaccctagtttgtggttggtttgcagctctgataatccatacagtggttgttcatgtggtgtctcttgtcacctaaactgtgctctaaagaataaaagggctggcattgtcaagaatgggtgcaacaagttagactgtagtttctactgtgttagttgtgggaaaatcaactggctaatgaggtatccttctgactgttttagttcattaattaacatgccatgggaaaattatcacctctgtttgttagcataattcttatttaggtctgaccatctagaactagtaccacgatctgtattatcggagcgatacttttgtcttttggtagttgttatcataacaaaaaaagtatgcttttttgttcctttaccaagcaccaacaaattttagtacagggaaaaggaacttgagattttttaaatgctataaatattatggtcagatatgcttcttgtgcgtattgaaacttcacatatatatatttacctgttagctactgcaggtgtttgcagaaacaacttgcaattgctagggaggcaagaagagttgatgtgctttgtgagcggttgtcattgagccataaaataatacaagggtctgaacgttacaaggaaatagcgagcataatcagctcagctgtgaaaacacttgaaatagaagttggtagtgcattggatcaggtctctgtgatcacggggcgtggcatcgtgaaccggcttacttgtggtgctgaagttcagaagctttgttcaagtacattagaaattgtagactctaaagtggataacatcttggagttcgagtccaataatagtccaaaactcctaggtcctcagccccaaatcctttttcatgagatcactccattttctgtggttattgtgttgaactatcagcatgacatcggtaaggagcagattgatggttccaaaatttggcaccgaagtgccagggtttgcaactattcatcagagcccacatgccacatactgaggccaaacactaggagcctggtttctggtctgagcccttcaactgaatacttcttcaaggttttgccttttagcagcacacatgggtttactgagtgggagacaaaatgcagcacacgcagcctggaccatggcagcagccagtgctcaactcagaactctgagagcatgtgcctcaaagacgattcaatgcagcatcacaaaaaggatttgaatgtgcagaatcaccagagaaccattcaatatgattcacctaagggttctacaaattcaagtgagaacaatttatcatgtgatcggtattccaagcgggctaaggttgcaaggctagatggtgcaagcgacaacgatgaaagccagttgccgccaacttctgaagttttaccatttgcaagctccaactcttctccttccgaagctccaagtaaacctgacttgcttattggcaccccagattcggcctccaagaactatgtggagcagcagtacgagtactgcgtgagggtggtcaggtggctggagcatgaagggcacatggacaatgacttccgtgtaaagttcctcacttggttcagcctgaaggcaacaacacaggacaggcgaatcgtgggcgcctttgtagatgttctcatcggtgatcctgcaagcttggttggccaactggttgatgcattcaaggatgccatctgtatcaaggagaagccctctcaagcacaacagaaagatgcatgctgcaagtcgatacgcggactattgatccatgaaggcaatcgtggtggaaccatgtgctgatgagacatggttcatggaccggttgagtttaggtttcaactagtgaagtagttggagtttgttagcagacaagcaattgtatgcatgtggaatgctatcttggatctgcaagctaactaatcatatcatgactttggtagatgtttattgttattagttgatagttgactcattcttttcgtgtgacgtgtttgaagtgccggaagtagcagttcatgtacagtcttggagccttagaccgtgtccagcagtctattcgtagcttacctaaaatattgtttttgcattgcctaaaatattgtttttgcaatgttctgtactgtagacttgtagactgtattgttcacatagtagagtaggtatgaggatgtgtaagctgttagaaatagcctta

SEQ ID NO: 208075 - DNA, 3475 bp, Zea Mays
ctcccacgcccccctcccctcgtgtctcaaaagcatagcgcaccaccacgggccacggcaatacggcatcatctccaaactcccgaggggggaccatcaccgctgctgagcacgcccgccgcctgcccttcctcctcccacccgtgccgcagctttcgattcctgcccgcctcattgctacctggtcgggccgcggaattaatgtcgcgcggaggaaatccggtaagctccggcccgattttcaactctcccctccctcatcctcgattggggttgagaaattgaatcaaaccccccacacccacccacccaaaaaagtcgcccttcctcggacgagatccccccaatcagttcttattgtggccgatagattgattgcctcacttgccttccgctcgcttttggggtgctaacctaatcggtgaccctccttgtgtgctcggattgggttctcgttctcatcagcattgacctcagcggctttcttttggacaatgctgctgttttactgcttgtttctaccatctacggccgtgtaggtgtgtccgacacgccacaaaaacttttcgttatgttcagcaggtaaacaagtctagctgaagtgacgattgccagcattgttcgaccgtgcggcttctgtttggctggaaccgtgatggatccagaaaaacaaaatgagatgagcctgatcgacaagagagaactagtatacgaagttgcaagatggcctcaaggtgccatggagattcttcggtgctggacccgcagggaacttcttgagcttatttgtgttgagttgggcaaagagaggaagtataccaatgtcccaaaagctaagatgattgcttacctattgaaattagtttcacggaatagtggaaagaatggacaactcaagaatgataatccgaatgttatgttattagggcaggataacaaagatgaaatacaaatgaaggaatctgatgaacaatcacgaccactcaaaactgcaaactctgactcatcaataagcagagaggcttgtgccggtagttcagtggtgtgcagcaatgttgcatgccaagccacaccaaatgcaggagataaatattgcaaacgttgctcttgctgcatttgcaataaatacgatgataacaaagaccctagtttgtggttggtttgcagctctgataatccatacagtggttgttcatgtggtgtctcttgtcacctaaactgtgctctaaagaataaaagggctggcattgtcaagaatgggtgcaacaagttagactgtagtttctactgtgttagttgtgggaaaatcaactggctaatgaggtatccttctgactgttttagttcattaattaacatgccatgggaaaattatcacctctgtttgttagcataattcttatttaggtctgaccatctagaactagtaccacgatctgtattatcggagcgatacttttgtcttttggtagttgttatcataacaaaaaaagtatgcttttttgttcctttaccaagcaccaacaaattttagtacagggaaaaggaacttgagattttttaaatgctataaatattatggtcagatatgcttcttgtgcgtattgaaacttcacatatatatatttacctgttagctactgcaggtgtttgcagaaacaacttgcaattgctagggaggcaagaagagttgatgtgctttgtgagcggttgtcattgagccataaaataatacaagggtctgaacgttacaaggaaatagcgagcataatcagctcagctgtgaaaacacttgaaatagaagttggtagtgcattggatcaggtctctgtgatcacggggcgtggcatcgtgaaccggcttacttgtggtgctgaagttcagaagctttgttcaagtacattagaaattgtagactctaaagtggataacatcttggagttcgagtccaataatagtccaaaactcctaggtcctcagccccaaatcctttttcatgagatcactccattttctgtggttattgtgttgaactatcagcatgacatcggtaaggagcagattgatggttccaaaatttggcaccgaagtgccagggtttgcaactattcatcagagcccacatgccacatactgaggccaaacactaggagcctggtttctggtctgagcccttcaactgaatacttcttcaaggttttgccttttagcagcacacatgggtttactgagtgggagacaaaatgcagcacacgcagcctggaccatggcagcagccagtgctcaactcagaactctgagagcatgtgcctcaaagacgattcaatgcagcatcacaaaaaggatttgaatgtgcagaatcaccagagaaccattcaatatgattcacctaagggttctacaaattcaagtgagaacaatttatcatgtgatcggtattccaagcgggctaaggttgcaaggctagatggtgcaagcgacaacgatgaaagccagttgccgccaacttctgaagttttaccatttgcaagctccaactcttctccttccgaagctccaagtaaacctgacttgcttattggcaccccagattcggcctccaagaactatgtggagcagcagtacgagtactgcgtgagggtggtcaggtggctggagcatgaagggcacatggacaatgacttccgtgtaaagttcctcacttggttcagcctgaaggcaacaacacaggacaggcgaatcgtgggcgcctttgtagatgttctcatcggtgatcctgcaagcttggttggccaactggttgatgcattcaaggatgccatctgtatcaaggagaagccctctcaagcacaacagaaagatgcatgctgcaaggtttggcactagaaaccttcataactgttctccatcgctgtgtgacgtaagtttttctggtgactgaaggatgaaatattgaagttatcacctagcaggttgcatctgaattgtgtcgagacagacattgggcacttgagataaacttttaagtcgatacgcggactattgatccatgaaggcaatcgtggtggaaccatgtgctgatgagacatggttcatggaccggttgagtttaggtttcaactagtgaagtagttggagtttgttagcagacaagcaattgtatgcatgtggaatgctatcttggatctgcaagctaactaatcatatcatgactttggtagatgtttattgttattagttgatagttgactcattcttttcgtgtgacgtgtttgaagtgccggaagtagcagttcatgtacagtcttggagccttagaccgtgtccagcagtctattcgtagcttacctaaaatattgtttttgcattgcctaaaatattgtttttgcaatgttctgtactgtagacttgtagactgtattgttcacatagtagagtaggtatgaggatgtgtaagctgttagaaatagcctta

SEQ ID NO: 208076 - DNA, 3054 bp, Zea Mays
ctcccacgcccccctcccctcgtgtctcaaaagcatagcgcaccaccacgggccacggcaatacggcatcatctccaaactcccgaggggggaccatcaccgctgctgagcacgcccgccgcctgcccttcctcctcccacccgtgccgcagctttcgattcctgcccgcctcattgctacctggtcgggccgcggaattaatgtcgcgcggaggaaatccggtaagctccggcccgattttcaactctcccctccctcatcctcgattggggttgagaaattgaatcaaaccccccacacccacccacccaaaaaagtcgcccttcctcggacgagatccccccaatcagttcttattgtggccgatagattgattgcctcacttgccttccgctcgcttttggggtgctaacctaatcggtgaccctccttgtgtgctcggattgggttctcgttctcatcagcattgacctcagcggctttcttttggacaatgctgctgttttactgcttgtttctaccatctacggccgtgtaggtgtgtccgacacgccacaaaaacttttcgttatgttcagcaggtaaacaagtctagctgaagtgacgattgccagcattgttcgaccgtgcggcttctgtttggctggaaccgtgatggatccagaaaaacaaaatgagatgagcctgatcgacaagagagaactagtatacgaagttgcaagatggcctcaaggtgccatggagattcttcggtgctggacccgcagggaacttcttgagcttatttgtgttgagttgggcaaagagaggaagtataccaatgtcccaaaagctaagatgattgcttacctattgaaattagtttcacggaatagtggaaagaatggacaactcaagaatgataatccgaatgttatgttattagggcaggataacaaagatgaaatacaaatgaaggaatctgatgaacaatcacgaccactcaaaactgcaaactctgactcatcaataagcagagaggcttgtgccggtagttcagtggtgtgcagcaatgttgcatgccaagccacaccaaatgcaggagataaatattgcaaacgttgctcttgctgcatttgcaataaatacgatgataacaaagaccctagtttgtggttggtttgcagctctgataatccatacagtggttgttcatgtggtgtctcttgtcacctaaactgtgctctaaagaataaaagggctggcattgtcaagaatgggtgcaacaagttagactgtagtttctactgtgttagttgtgggaaaatcaactggctaatgaggtgtttgcagaaacaacttgcaattgctagggaggcaagaagagttgatgtgctttgtgagcggttgtcattgagccataaaataatacaagggtctgaacgttacaaggaaatagcgagcataatcagctcagctgtgaaaacacttgaaatagaagttggtagtgcattggatcaggtctctgtgatcacggggcgtggcatcgtgaaccggcttacttgtggtgctgaagttcagaagctttgttcaagtacattagaaattgtagactctaaagtggataacatcttggagttcgagtccaataatagtccaaaactcctaggtcctcagccccaaatcctttttcatgagatcactccattttctgtggttattgtgttgaactatcagcatgacatcggtaaggagcagattgatggttccaaaatttggcaccgaagtgccagggtttgcaactattcatcagagcccacatgccacatactgaggccaaacactaggagcctggtttctggtctgagcccttcaactgaatacttcttcaaggttttgccttttagcagcacacatgggtttactgagtgggagacaaaatgcagcacacgcagcctggaccatggcagcagccagtgctcaactcagaactctgagagcatgtgcctcaaagacgattcaatgcagcatcacaaaaaggatttgaatgtgcagaatcaccagagaaccattcaatatgattcacctaagggttctacaaattcaagtgagaacaatttatcatgtgatcggtattccaagcgggctaaggttgcaaggctagatggtgcaagcgacaacgatgaaagccagttgccgccaacttctgaagttttaccatttgcaagctccaactcttctccttccgaagctccaagtaaacctgacttgcttattggcaccccagattcggcctccaagaactatgtggagcagcagtacgagtactgcgtgagggtggtcaggtggctggagcatgaagggcacatggacaatgacttccgtgtaaagttcctcacttggttcagcctgaaggcaacaacacaggacaggcgaatcgtgggcgcctttgtagatgttctcatcggtgatcctgcaagcttggttggccaactggttgatgcattcaaggatgccatctgtatcaaggagaagccctctcaagcacaacagaaagatgcatgctgcaaggttgcatctgaattgtgtcgagacagacattgggcacttgagataaacttttaagtcgatacgcggactattgatccatgaaggcaatcgtggtggaaccatgtgctgatgagacatggttcatggaccggttgagtttaggtttcaactagtgaagtagttggagtttgttagcagacaagcaattgtatgcatgtggaatgctatcttggatctgcaagctaactaatcatatcatgactttggtagatgtttattgttattagttgatagttgactcattcttttcgtgtgacgtgtttgaagtgccggaagtagcagttcatgtacagtcttggagccttagaccgtgtccagcagtctattcgtagcttacctaaaatattgtttttgcattgcctaaaatattgtttttgcaatgttctgtactgtagacttgtagactgtattgttcacatagtagagtaggtatgaggatgtgtaagctgttagaaatagcctta

SEQ ID NO: 208077 - DNA, 4319 bp, Zea Mays
gaggcgcccgcacgcaaaatccaaacccaaaccctcggcgaggacgccaccgtggcgaccgcggtggatgcagcgggtctggtgcccgccgacctggagcggcgggtgatggcggcggtgaaggcgtcggaggcgcgcggggacccgccgcttctgcaggtggtggagctatcccgcatcgtcgccgtggagggcgcggggaccctctccagcgccgaccttgccaggatcctcgtctccaacctatgcttcgcgcacaactcgccctcgctctggaagctcctgggccaggccgtcgtgtcccgcctcctctgcccgctccacgttctcgcactcctcacccctagggtgctgccgcagcggcgagcgcagcctgaggcgtaccgcctgtacctggaactcctcaagtgtcatgtcacgtcgtccttactgtcgatggaggctgggcctaatcgtgacaagatagggaagtccattgctgaagctttgcaactatcaaaggtttatggattttctggaacagagtttggacatgttgtcattatgtttgtgttggctgttgtcagtaaactgattgatagtatatttgaggattgtggctttccatctgcgatggtagaggggcaagagagtgtcaatgccatcgatgggccacagcctatggacttagacgttaaaatgggatctactgagaaccaaaatgagcatcgcgaacagttacgtcggaagaacactctcatcgctttggacgtgttgcatatgatgactgctgatagaaagattcaatcatttctgcgcttgatattcctgaacatgcctgaaaggttcagttctctacgccagaggttgagttctattgaagcacagaaggtgtccttggagactctactgccttctggacacaaaattaatgaattgttaataaatttctggagagtttgcaaaacagactatcaaccgaataacaaacacattcttggtgttcttggtaatatgggatctggtggatcccttctgggccaacttactggagctgggaggcctgcctgctggataatatttgatatatatgtggagaatgcaattgatgggaggcatctaagtgttatatcagctatccgaattataaaagaaatgaccaagacaatgcaagtgcttaacgaagcaagctggcaggaaacatttaaagctctttggatttctgcccttcgtcttgtacaacgggctagagaacctcttgaaggaccaattcctcatctagatgcaaggttatgcatgttgttagctcttataccattatcagttgctgcgattcttcaagaagaaagcgatatgcttggagctgaaggaaacaaaattcttccacaaagacaagggcttatatcgtctctccaggatctgatccagtattcaggacttcttgtgccaccttcatcagtggtgaatgcagctaatgctgcagcctcaaaagcggcaatatttaaggccaactatgaggctggggttggcaactctagcatgatggaccagactgactcttcaatgaaagctgctgggaacatgctccatcttattattgaagcctgtatctcgagaaagttgatcgatacatctgcttatttatggcctggttatgttgtaccatctgggactttaaaagatacagctttgccccaagaatccccttggttaaactttatgaaagggtctcgactttcaggaccccttattgatgctctggtcgcatctcctgcttcaagtgttgcggaattggacaaattatacagtatagcattaaatggttcagaagaagaaaaaacagctgctgcaaagattctttgtggtgcatcacttgttcgtggctggaacattcaggaacatgtggtcggtatggtggtcaagctattatcagcttctttaccctcagattctgcaacttcaactcctgggagcatgagcaactaccttgctcatatgtctacattaaacgaaatcttactcggtgtgtcttatggtgatgccatccacattctttcattgtatggaatggttccagatgttgctgtggcgttaatgccaatatgtgaggcttttgggtcaataccaccgccacctaatcacaagtctaccattcttggtgaaatatctgtttatacagtcttctcttgtgcattcctttgtcttcttcgtttgtggaagttttatagacctcctcaagagtattgtcttgctggtcgtggaggctcagtaaagctggaactgactctggactatctgttgttgatgcacaataatcacattgagttctcaaattcatctgcctctaatagggattcttgcaatgatatgggctcagtaaatgaggttcctgctcagctgatttatattgattcttttcccaagctaagggcttggtatttccagaatcaagcttgcattgcttctccactttctggtctttgcaacaaaaaccctgttcatcaagttgcgaacaaaattttgaatatgatttgccgaaaaatgaataaaggtgtggtatcgtcaagtactctttcatccacttctagtagtagtgtcagtggttcctctgtaagtgcatcagatgatccttgccaaaggcctgctgtttctggttgggaatttttagaagctgttccttttgttcttgaagctgttctgacagcatgtgctcatgggcagctttccagccgagacttgactacaagcttaagggatcttgtggactttttgcctgcttctcttgctgcaattgtgagctacttctcagcagaaattacacgaggaatctggaaacctgtcccaatgaatggaattgaatggcctagtcccggtgcttctcttcattccattgaagctgaagtaaaggaaattcttgcctctgctggtgttcagattaacagctgctatccaccttgacgattacatttaagctagataggagtttggagtacattcaaggggtcattggacaggcgctagagaactgtgcaggggggagttcctggccaagcatgcccattattggggcattgtggacacagaaagtgcgaagatggcatgacttcatcgtcctctcttgtatgcgttctccattcggcagagacaaagatgcagttgcgcagctcatccaaagttgcttctcgtcctttctgcagtcttcatccagtggttctgatataattgcaaaccgtggagttggggctttactaggggactcaatcacgaatcaaggtcttaggctcccaatggcacctggtttcatctacttgagaacatgtcgaactttccatgacacttactttgttagtgaagtgatccttaagcaagtgattgagtgggctcacaaacttgcaaacggatggtgtttcaatggtcctccgcagttgaaatcagggcggacaccactatcttgtgcagcatccatggtgcagcaggtcgcgttgcttggtggaggtctcctatgcatagcaggtggaccacttgtggtccaggtgttgtatgaggaaacactgccaacactgctgctatcagccagagatcagagtttgaaaggccctgggccagtttctagcacactccaaggttacgccatggccaacatgctcttctactgtggtagcctgctttggggagcggataggacttctcctgtcatgaaattgtccttcctctcgaggcggccacgggtggtgagaacccacatggatttcatagctggtgtgttggacggacacattcttctgggctgtgacccgggtacgtggaaagcgtatgtgtcgcaatttatgttcctggtggtgaaatttgttccgtcatggttgcgggacataaagctggacacgctaaagaagatagcagctggacttcggagctggcacgaacacgaccttgctctgtctcttcttgaacgaggaggaccacaagcaatctctgttgtagtcgagacctttctgtaatccttccgtttggacattttgcccccacctgacatagcagccgccgttaagggtttgtagttggtgatctgaggtctagctgaagtaatccggatgacccttttgatccagaattacacttgtgctacccgggtaactgatgtttatctcatgtatggcgagctcatcggggttttcgtgaatccaatacggaagaacatgcaacctactagggtgtacttcagccctaacatgtataacatgtgggaagttcatgcaacctactagagtgaactttctgtatattttgttgcaatgcatcgtgtttcctatctgcggtaaaaggagagaaaataattcccg

SEQ ID NO: 208078 - DNA, 4245 bp, Zea Mays
gaggcgcccgcacgcaaaatccaaacccaaaccctcggcgaggacgccaccgtggcgaccgcggtggatgcagcgggtctggtgcccgccgacctggagcggcgggtgatggcggcggtgaaggcgtcggaggcgcgcggggacccgccgcttctgcaggtggtggagctatcccgcatcgtcgccgtggagggcgcggggaccctctccagcgccgaccttgccaggatcctcgtctccaacctatgcttcgcgcacaactcgccctcgctctggaagctcctgggccaggccgtcgtgtcccgcctcctctgcccgctccacgttctcgcactcctcacccctagggtgctgccgcagcggcgagcgcagcctgaggcgtaccgcctgtacctggaactcctcaagtgtcatgtcacgtcgtccttactgtcgatggaggctgggcctaatcgtgacaatatatttgaggattgtggctttccatctgcgatggtagaggggcaagagagtgtcaatgccatcgatgggccacagcctatggacttagacgttaaaatgggatctactgagaaccaaaatgagcatcgcgaacagttacgtcggaagaacactctcatcgctttggacgtgttgcatatgatgactgctgatagaaagattcaatcatttctgcgcttgatattcctgaacatgcctgaaaggttcagttctctacgccagaggttgagttctattgaagcacagaaggtgtccttggagactctactgccttctggacacaaaattaatgaattgttaataaatttctggagagtttgcaaaacagactatcaaccgaataacaaacacattcttggtgttcttggtaatatgggatctggtggatcccttctgggccaacttactggagctgggaggcctgcctgctggataatatttgatatatatgtggagaatgcaattgatgggaggcatctaagtgttatatcagctatccgaattataaaagaaatgaccaagacaatgcaagtgcttaacgaagcaagctggcaggaaacatttaaagctctttggatttctgcccttcgtcttgtacaacgggctagagaacctcttgaaggaccaattcctcatctagatgcaaggttatgcatgttgttagctcttataccattatcagttgctgcgattcttcaagaagaaagcgatatgcttggagctgaaggaaacaaaattcttccacaaagacaagggcttatatcgtctctccaggatctgatccagtattcaggacttcttgtgccaccttcatcagtggtgaatgcagctaatgctgcagcctcaaaagcggcaatatttaaggccaactatgaggctggggttggcaactctagcatgatggaccagactgactcttcaatgaaagctgctgggaacatgctccatcttattattgaagcctgtatctcgagaaagttgatcgatacatctgcttatttatggcctggttatgttgtaccatctgggactttaaaagatacagctttgccccaagaatccccttggttaaactttatgaaagggtctcgactttcaggaccccttattgatgctctggtcgcatctcctgcttcaagtgttgcggaattggacaaattatacagtatagcattaaatggttcagaagaagaaaaaacagctgctgcaaagattctttgtggtgcatcacttgttcgtggctggaacattcaggaacatgtggtcggtatggtggtcaagctattatcagcttctttaccctcagattctgcaacttcaactcctgggagcatgagcaactaccttgctcatatgtctacattaaacgaaatcttactcggtgtgtcttatggtgatgccatccacattctttcattgtatggaatggttccagatgttgctgtggcgttaatgccaatatgtgaggcttttgggtcaataccaccgccacctaatcacaagtctaccattcttggtgaaatatctgtttatacagtcttctcttgtgcattcctttgtcttcttcgtttgtggaagttttatagacctcctcaagagtattgtcttgctggtcgtggaggctcagtaaagctggaactgactctggactatctgttgttgatgcacaataatcacattgagttctcaaattcatctgcctctaatagggattcttgcaatgatatgggctcagtaaatgaggttcctgctcagctgatttatattgattcttttcccaagctaagggcttggtatttccagaatcaagcttgcattgcttctccactttctggtctttgcaacaaaaaccctgttcatcaagttgcgaacaaaattttgaatatgatttgccgaaaaatgaataaaggtgtggtatcgtcaagtactctttcatccacttctagtagtagtgtcagtggttcctctgtaagtgcatcagatgatccttgccaaaggcctgctgtttctggttgggaatttttagaagctgttccttttgttcttgaagctgttctgacagcatgtgctcatgggcagctttccagccgagacttgactacaagcttaagggatcttgtggactttttgcctgcttctcttgctgcaattgtgagctacttctcagcagaaattacacgaggaatctggaaacctgtcccaatgaatggaattgaatggcctagtcccggtgcttctcttcattccattgaagctgaagtaaaggaaattcttgcctctgctggtgttcagattaacagctgctatccacgtggtgtgccaccaatgcttcctttacctatggctgcacttgtcagcttgacgattacatttaagctagataggagtttggagtacattcaaggggtcattggacaggcgctagagaactgtgcaggggggagttcctggccaagcatgcccattattggggcattgtggacacagaaagtgcgaagatggcatgacttcatcgtcctctcttgtatgcgttctccattcggcagagacaaagatgcagttgcgcagctcatccaaagttgcttctcgtcctttctgcagtcttcatccagtggttctgatataattgcaaaccgtggagttggggctttactaggggactcaatcacgaatcaaggtcttaggctcccaatggcacctggtttcatctacttgagaacatgtcgaactttccatgacacttactttgttagtgaagtgatccttaagcaagtgattgagtgggctcacaaacttgcaaacggatggtgtttcaatggtcctccgcagttgaaatcagggcggacaccactatcttgtgcagcatccatggtgcagcaggtcgcgttgcttggtggaggtctcctatgcatagcaggtggaccacttgtggtccaggtgttgtatgaggaaacactgccaacactgctgctatcagccagagatcagagtttgaaaggccctgggccagtttctagcacactccaaggttacgccatggccaacatgctcttctactgtggtagcctgctttggggagcggataggacttctcctgtcatgaaattgtccttcctctcgaggcggccacgggtggtgagaacccacatggatttcatagctggtgtgttggacggacacattcttctgggctgtgacccgggtacgtggaaagcgtatgtgtcgcaatttatgttcctggtggtgaaatttgttccgtcatggttgcgggacataaagctggacacgctaaagaagatagcagctggacttcggagctggcacgaacacgaccttgctctgtctcttcttgaacgaggaggaccacaagcaatctctgttgtagtcgagacctttctgtaatccttccgtttggacattttgcccccacctgacatagcagccgccgttaagggtttgtagttggtgatctgaggtctagctgaagtaatccggatgacccttttgatccagaattacacttgtgctacccgggtaactgatgtttatctcatgtatggcgagctcatcggggttttcgtgaatccaatacggaagaacatgcaacctactagggtgtacttcagccctaacatgtataacatgtgggaagttcatgcaacctactagagtgaactttctgtatattttgttgcaatgcatcgtgtttcctatctgcggtaaaaggagagaaaataattcccg

SEQ ID NO: 208079 - DNA, 4228 bp, Zea Mays
gaggcgcccgcacgcaaaatccaaacccaaaccctcggcgaggacgccaccgtggcgaccgcggtggatgcagcgggtctggtgcccgccgacctggagcggcgggtgatggcggcggtgaaggcgtcggaggcgcgcggggacccgccgcttctgcaggtggtggagctatcccgcatcgtcgccgtggagggcgcggggaccctctccagcgccgaccttgccaggatcctcgtctccaacctatgcttcgcgcacaactcgccctcgctctggaagctcctgggccaggccgtcgtgtcccgcctcctctgcccgctccacgttctcgcactcctcacccctagggtgctgccgcagcggcgagcgcagcctgaggcgtaccgcctgtacctggaactcctcaagtgtcatgtcacgtcgtccttactgtcgatggaggctgggcctaatcgtgacaagatagggaagtccattgctgaagctttgcaactatcaaaggattgtggctttccatctgcgatggtagaggggcaagagagtgtcaatgccatcgatgggccacagcctatggacttagacgttaaaatgggatctactgagaaccaaaatgagcatcgcgaacagttacgtcggaagaacactctcatcgctttggacgtgttgcatatgatgactgctgatagaaagattcaatcatttctgcgcttgatattcctgaacatgcctgaaaggttcagttctctacgccagaggttgagttctattgaagcacagaaggtgtccttggagactctactgccttctggacacaaaattaatgaattgttaataaatttctggagagtttgcaaaacagactatcaaccgaataacaaacacattcttggtgttcttggtaatatgggatctggtggatcccttctgggccaacttactggagctgggaggcctgcctgctggataatatttgatatatatgtggagaatgcaattgatgggaggcatctaagtgttatatcagctatccgaattataaaagaaatgaccaagacaatgcaagtgcttaacgaagcaagctggcaggaaacatttaaagctctttggatttctgcccttcgtcttgtacaacgggctagagaacctcttgaaggaccaattcctcatctagatgcaaggttatgcatgttgttagctcttataccattatcagttgctgcgattcttcaagaagaaagcgatatgcttggagctgaaggaaacaaaattcttccacaaagacaagggcttatatcgtctctccaggatctgatccagtattcaggacttcttgtgccaccttcatcagtggtgaatgcagctaatgctgcagcctcaaaagcggcaatatttaaggccaactatgaggctggggttggcaactctagcatgatggaccagactgactcttcaatgaaagctgctgggaacatgctccatcttattattgaagcctgtatctcgagaaagttgatcgatacatctgcttatttatggcctggttatgttgtaccatctgggactttaaaagatacagctttgccccaagaatccccttggttaaactttatgaaagggtctcgactttcaggaccccttattgatgctctggtcgcatctcctgcttcaagtgttgcggaattggacaaattatacagtatagcattaaatggttcagaagaagaaaaaacagctgctgcaaagattctttgtggtgcatcacttgttcgtggctggaacattcaggaacatgtggtcggtatggtggtcaagctattatcagcttctttaccctcagattctgcaacttcaactcctgggagcatgagcaactaccttgctcatatgtctacattaaacgaaatcttactcggttccagatgttgctgtggcgttaatgccaatatgtgaggcttttgggtcaataccaccgccacctaatcacaagtctaccattcttggtgaaatatctgtttatacagtcttctcttgtgcattcctttgtcttcttcgtttgtggaagttttatagacctcctcaagagtattgtcttgctggtcgtggaggctcagtaaagctggaactgactctggactatctgttgttgatgcacaataatcacattgagttctcaaattcatctgcctctaatagggattcttgcaatgatatgggctcagtaaatgaggttcctgctcagctgatttatattgattcttttcccaagctaagggcttggtatttccagaatcaagcttgcattgcttctccactttctggtctttgcaacaaaaaccctgttcatcaagttgcgaacaaaattttgaatatgatttgccgaaaaatgaataaaggtgtggtatcgtcaagtactctttcatccacttctagtagtagtgtcagtggttcctctgtaagtgcatcagatgatccttgccaaaggcctgctgtttctggttgggaatttttagaagctgttccttttgttcttgaagctgttctgacagcatgtgctcatgggcagctttccagccgagacttgactacaagcttaagggatcttgtggactttttgcctgcttctcttgctgcaattgtgagctacttctcagcagaaattacacgaggaatctggaaacctgtcccaatgaatggaattgaatggcctagtcccggtgcttctcttcattccattgaagctgaagtaaaggaaattcttgcctctgctggtgttcagattaacagctgctatccacgtggtgtgccaccaatgcttcctttacctatggctgcacttgtcagcttgacgattacatttaagctagataggagtttggagtacattcaaggggtcattggacaggcgctagagaactgtgcaggggggagttcctggccaagcatgcccattattggggcattgtggacacagaaagtgcgaagatggcatgacttcatcgtcctctcttgtatgcgttctccattcggcagagacaaagatgcagttgcgcagctcatccaaagttgcttctcgtcctttctgcagtcttcatccagtggttctgatataattgcaaaccgtggagttggggctttactaggggactcaatcacgaatcaaggtcttaggctcccaatggcacctggtttcatctacttgagaacatgtcgaactttccatgacacttactttgttagtgaagtgatccttaagcaagtgattgagtgggctcacaaacttgcaaacggatggtgtttcaatggtcctccgcagttgaaatcagggcggacaccactatcttgtgcagcatccatggtgcagcaggtcgcgttgcttggtggaggtctcctatgcatagcaggtggaccacttgtggtccaggtgttgtatgaggaaacactgccaacactgctgctatcagccagagatcagagtttgaaaggccctgggccagtttctagcacactccaaggttacgccatggccaacatgctcttctactgtggtagcctgctttggggagcggataggacttctcctgtcatgaaattgtccttcctctcgaggcggccacgggtggtgagaacccacatggatttcatagctggtgtgttggacggacacattcttctgggctgtgacccgggtacgtggaaagcgtatgtgtcgcaatttatgttcctggtggtgaaatttgttccgtcatggttgcgggacataaagctggacacgctaaagaagatagcagctggacttcggagctggcacgaacacgaccttgctctgtctcttcttgaacgaggaggaccacaagcaatctctgttgtagtcgagacctttctgtaatccttccgtttggacattttgcccccacctgacatagcagccgccgttaagggtttgtagttggtgatctgaggtctagctgaagtaatccggatgacccttttgatccagaattacacttgtgctacccgggtaactgatgtttatctcatgtatggcgagctcatcggggttttcgtgaatccaatacggaagaacatgcaacctactagggtgtacttcagccctaacatgtataacatgtgggaagttcatgcaacctactagagtgaactttctgtatattttgttgcaatgcatcgtgtttcctatctgcggtaaaaggagagaaaataattcccg

SEQ ID NO: 208080 - DNA, 4355 bp, Zea Mays
gaggcgcccgcacgcaaaatccaaacccaaaccctcggcgaggacgccaccgtggcgaccgcggtggatgcagcgggtctggtgcccgccgacctggagcggcgggtgatggcggcggtgaaggcgtcggaggcgcgcggggacccgccgcttctgcaggtggtggagctatcccgcatcgtcgccgtggagggcgcggggaccctctccagcgccgaccttgccaggatcctcgtctccaacctatgcttcgcgcacaactcgccctcgctctggaagctcctgggccaggccgtcgtgtcccgcctcctctgcccgctccacgttctcgcactcctcacccctagggtgctgccgcagcggcgagcgcagcctgaggcgtaccgcctgtacctggaactcctcaagtgtcatgtcacgtcgtccttactgtcgatggaggctgggcctaatcgtgacaagatagggaagtccattgctgaagctttgcaactatcaaaggtttatggattttctggaacagagtttggacatgttgtcattatgtttgtgttggctgttgtcagtaaactgattgatagtatatttgaggattgtggctttccatctgcgatggtagaggggcaagagagtgtcaatgccatcgatgggccacagcctatggacttagacgttaaaatgggatctactgagaaccaaaatgagcatcgcgaacagttacgtcggaagaacactctcatcgctttggacgtgttgcatatgatgactgctgatagaaagattcaatcatttctgcgcttgatattcctgaacatgcctgaaaggttcagttctctacgccagaggttgagttctattgaagcacagaaggtgtccttggagactctactgccttctggacacaaaattaatgaattgttaataaatttctggagagtttgcaaaacagactatcaaccgaataacaaacacattcttggtgttcttggtaatatgggatctggtggatcccttctgggccaacttactggagctgggaggcctgcctgctggataatatttgatatatatgtggagaatgcaattgatgggaggcatctaagtgttatatcagctatccgaattataaaagaaatgaccaagacaatgcaagtgcttaacgaagcaagctggcaggaaacatttaaagctctttggatttctgcccttcgtcttgtacaacgggctagagaacctcttgaaggaccaattcctcatctagatgcaaggttatgcatgttgttagctcttataccattatcagttgctgcgattcttcaagaagaaagcgatatgcttggagctgaaggaaacaaaattcttccacaaagacaagggcttatatcgtctctccaggatctgatccagtattcaggacttcttgtgccaccttcatcagtggtgaatgcagctaatgctgcagcctcaaaagcggcaatatttaaggccaactatgaggctggggttggcaactctagcatgatggaccagactgactcttcaatgaaagctgctgggaacatgctccatcttattattgaagcctgtatctcgagaaagttgatcgatacatctgcttatttatggcctggttatgttgtaccatctgggactttaaaagatacagctttgccccaagaatccccttggttaaactttatgaaagggtctcgactttcaggaccccttattgatgctctggtcgcatctcctgcttcaagtgttgcggaattggacaaattatacagtatagcattaaatggttcagaagaagaaaaaacagctgctgcaaagattctttgtggtgcatcacttgttcgtggctggaacattcaggaacatgtggtcggtatggtggtcaagctattatcagcttctttaccctcagattctgcaacttcaactcctgggagcatgagcaactaccttgctcatatgtctacattaaacgaaatcttactcggtgtgtcttatggtgatgccatccacattctttcattgttccagatgttgctgtggcgttaatgccaatatgtgaggcttttgggtcaataccaccgccacctaatcacaagtctaccattcttggtgaaatatctgtttatacagtcttctcttgtgcattcctttgtcttcttcgtttgtggaagttttatagacctcctcaagagtattgtcttgctggtcgtggaggctcagtaaagctggaactgactctggactatctgttgttgatgcacaataatcacattgagttctcaaattcatctgcctctaatagggattcttgcaatgatatgggctcagtaaatgaggttcctgctcagctgatttatattgattcttttcccaagctaagggcttggtatttccagaatcaagcttgcattgcttctccactttctggtctttgcaacaaaaaccctgttcatcaagttgcgaacaaaattttgaatatgatttgccgaaaaatgaataaaggtgtggtatcgtcaagtactctttcatccacttctagtagtagtgtcagtggttcctctgtaagtgcatcagatgatccttgccaaaggcctgctgtttctggttgggaatttttagaagctgttccttttgttcttgaagctgttctgacagcatgtgctcatgggcagctttccagccgagacttgactacaagcttaagggatcttgtggactttttgcctgcttctcttgctgcaattgtgagctacttctcagcagaaattacacgaggaatctggaaacctgtcccaatgaatggaattgaatggcctagtcccggtgcttctcttcattccattgaagctgaagtaaaggaaattcttgcctctgctggtgttcagattaacagctgctatccacgtggtgtgccaccaatgcttcctttacctatggctgcacttgtcagcttgacgattacatttaagctagataggagtttggagtacattcaaggggtcattggacaggcgctagagaactgtgcaggggggagttcctggccaagcatgcccattattggggcattgtggacacagaaagtgcgaagatggcatgacttcatcgtcctctcttgtatgcgttctccattcggcagagacaaagatgcagttgcgcagctcatccaaagttgcttctcgtcctttctgcagtcttcatccagtggttctgatataattgcaaaccgtggagttggggctttactaggggactcaatcacgaatcaaggtcttaggctcccaatggcacctggtttcatctacttgagaacatgtcgaactttccatgacacttactttgttagtgaagtgatccttaagcaagtgattgagtgggctcacaaacttgcaaacggatggtgtttcaatggtcctccgcagttgaaatcagggcggacaccactatcttgtgcagcatccatggtgcagcaggtcgcgttgcttggtggaggtctcctatgcatagcaggtggaccacttgtggtccaggtgttgtatgaggaaacactgccaacactgctgctatcagccagagatcagagtttgaaaggccctgggccagtttctagcacactccaaggttacgccatggccaacatgctcttctactgtggtagcctgctttggggagcggataggacttctcctgtcatgaaattgtccttcctctcgaggcggccacgggtggtgagaacccacatggatttcatagctggtgtgttggacggacacattcttctgggctgtgacccgggtacgtggaaagcgtatgtgtcgcaatttatgttcctggtggtgaaatttgttccgtcatggttgcgggacataaagctggacacgctaaagaagatagcagctggacttcggagctggcacgaacacgaccttgctctgtctcttcttgaacgaggaggaccacaagcaatctctgttgtagtcgagacctttctgtaatccttccgtttggacattttgcccccacctgacatagcagccgccgttaagggtttgtagttggtgatctgaggtctagctgaagtaatccggatgacccttttgatccagaattacacttgtgctacccgggtaactgatgtttatctcatgtatggcgagctcatcggggttttcgtgaatccaatacggaagaacatgcaacctactagggtgtacttcagccctaacatgtataacatgtgggaagttcatgcaacctactagagtgaactttctgtatattttgttgcaatgcatcgtgtttcctatctgcggtaaaaggagagaaaataattcccg

SEQ ID NO: 208081 - DNA, 1600 bp, Zea Mays
cttgattaacctttgaatctcaggtgacagcagcgttctattatgtgctagcagtacgcagccagtaaaaatgagtcttttgagtgccgcaaaaagcttctactttcctgtgtcaatgtatgtcgtaagagcaaaggctggtaaaaggcaatctggaaaagatgctactggaaaagttgcacactcagcaggttcttctctacggcgctataatgaagcagcactgaaaaaggaagttcaagaattaattgtttcatggaagtcatactttgagacatgtgtttgtgccttcatttatgctccatctaggaaccgccagatgctcttcgacggggagaagactcagtcagtaattcagtcttgtgatgttcgtccagttccattgactgttcatcgccccaccatgaaggaagcgaaacgggtatattgtaacctaacacaactctactatgagatggaatgttcaaccacagatgaaacactacctgatgctggaagtgtgaaaaatgttgaacaaggtcaaggaaaaaagaatgaagtgactgcagaccctggggaatctatttctgacttgtctgcccgtttggaattgttgaataagaatgaagcagcaaccataccatcatcaaagaacgaaacaacacctcttcatgaggcagcaaagtgtggcaatgctcagctgaccctggagttacttgagcagggtttggatccttgcgtaaaagatgcaagaggaaagacatcttattcgctggcttcagataaggaagttaggaatacattcagaagatttatggcgctcaatcttgacaaatgggactggcatgctgcagatgtgcctagtgcactaacaaaagaaatggaagaatcacaagctgcaaaacaaacaaggacgccaaaaggaaagcacgtgcaaaggaattgaagaaattaaaaaaagaaagagaaaaggaagaaaaggagaaggagaaggagaaggctaaggctcaagcatcacaatcacaatctgatgttaaaggcacttcgagcggccaaatggccaacagaactgcaactgcgccaggccttgtaccaaagcatcagacgccacagcaaatacttatagcaaaggaggaggaacgacagagaaaacaagctgaagaaagagagaagagagcagctgcagcagagagaagacttgcggctctcgctgtccaatctgccggaacgagcgcatcaggtgcagcagcaacaaactgctccgcgaagagggcggcaccagatgacaattcgtgttcgtgctgtttcggttccttggtcggcaaggtgccattccaccgatacaactacaaatactgcagcactacatgtatgcatcttcattcagaaatgctgcaggatgattaaggaaaccgcatgatgcgtgattttgatgcaattttacctcatatacaatcaataacaggctttcttccttcccttgtgcctgctttccgtaattttgtcgtgcacatcttcataactttaaaggttcgaaatcacattcgttctggttcgtgctaatgtttttgcttcattttggaacacattttattgagccaagcggaatcgccattcgcat

SEQ ID NO: 208082 - DNA, 1682 bp, Zea Mays
cttttatgcataagaacttgtgagtcatattgcattattacttgtaacttgattaacctttgaatctcaggtgacagcagcgttctattatgtgctagcagtacgcagccagtaaaaatgagtcttttgagtgccgcaaaaagcttctactttcctgtgtcaatgtatgtcgtaagagcaaaggctggtaaaaggcaatctggaaaagatgctactggaaaagttgcacactcagcaggttcttctctacggcgctataatgaagcagcactgaaaaaggtgtctttcgtttttgtttgccttattgcaggaagttcaagaattaattgtttcatggaagtcatactttgagacatgtgtttgtgccttcatttatgctccatctaggaaccgccagatgctcttcgacggggagaagactcagtcagtaattcagtcttgtgatgttcgtccagttccattgactgttcatcgccccaccatgaaggaagcgaaacgggtatattgtaacctaacacaactctactatgagatggaatgttcaaccacagatgaaacactacctgatgctggaagtgtgaaaaatgttgaacaaggtcaaggaaaaaagaatgaagtgactgcagaccctggggaatctatttctgacttgtctgcccgtttggaattgttgaataagaatgaagcagcaaccataccatcatcaaagaacgaaacaacacctcttcatgaggcagcaaagtgtggcaatgctcagctgaccctggagttacttgagcagggtttggatccttgcgtaaaagatgcaagaggaaagacatcttattcgctggcttcagataaggaagttaggaatacattcagaagatttatggcgctcaatcttgacaaatgggactggcatgctgcagatgtgcctagtgcactaacaaaagaaatggaagaatcacaagctgcaaaacaagcagacaaggacgccaaaaggaaagcacgtgcaaaggaattgaagaaattaaaaaaagaaagagaaaaggaagaaaaggagaaggagaaggagaaggctaaggctcaagcatcacaatcacaatctgatgttaaaggcacttcgagcggccaaatggccaacagaactgcaactgcgccaggccttgtaccaaagcatcagacgccacagcaaatacttatagcaaaggaggaggaacgacagagaaaacaagctgaagaaagagagaagagagcagctgcagcagagagaagacttgcggctctcgctgtccaatctgccggaacgagcgcatcaggtgcagcagcaacaaactgctccgcgaagagggcggcaccagatgacaattcgtgttcgtgctgtttcggttccttggtcggcaaggtgccattccaccgatacaactacaaatactgcagcactacatgtatgcatcttcattcagaaatgctgcaggatgattaaggaaaccgcatgatgcgtgattttgatgcaattttacctcatatacaatcaataacaggctttcttccttcccttgtgcctgctttccgtaattttgtcgtgcacatcttcataactttaaaggttcgaaatcacattcgttctggttcgtgctaatgtttttgcttcattttggaacacattttattgagccaagcggaatcgccattcgcat

SEQ ID NO: 208083 - DNA, 1916 bp, Zea Mays
cgagcacagtggaaaatggaaaagtgtgtgtgaatatcaatggagagagaagttaagttgagcatggctggtaaaactattataaaggaagaggacctagataaagcagattctgattctctgtttgatgatttggagatatctagtgtctctggttcagaggacgaacaagaaaatggacctgcatcagaacgtgtactctcggttaaaggcaaggaagaattcaggaagaaactttactttcgttgtgcatcgggtgaaatgatttctatctatagatgcatgctgttgaaagaacatgaagaaccattaattgattgtaagtctggtcagatggagaatgcatcttgtgtacaggaggaggagatgataaatagggtgaagtgtttggcttgtgaaccccgtgacacgtcacatttgagaattgttctactaacaagcggtgggcattttgctggatgtgtgtttgatggaaattctatcatagctcataaaacatttcataggtatgtcgtaagagcaaaggctggtaaaaggcaatctggaaaagatgctactggaaaagttgcacactcagcaggttcttctctacggcgctataatgaagcagcactgaaaaaggaaccgccagatgctcttcgacggggagaagactcagtcagtaattcagtcttgtgatgttcgtccagttccattgactgttcatcgccccaccatgaaggaagcgaaacgggtatattgtaacctaacacaactctactatgagatggaatgttcaaccacagatgaaacactacctgatgctggaagtgtgaaaaatgttgaacaaggtcaaggaaaaaagaatgaagtgactgcagaccctggggaatctatttctgacttgtctgcccgtttggaattgttgaataagaatgaagcagcaaccataccatcatcaaagaacgaaacaacacctcttcatgaggcagcaaagtgtggcaatgctcagctgaccctggagttacttgagcagggtttggatccttgcgtaaaagatgcaagaggaaagacatcttattcgctggcttcagataaggaagttaggaatacattcagaagatttatggcgctcaatcttgacaaatgggactggcatgctgcagatgtgcctagtgcactaacaaaagaaatggaagaatcacaagctgcaaaacaagcagacaaggacgccaaaaggaaagcacgtgcaaaggaattgaagaaattaaaaaaagaaagagaaaaggaagaaaaggagaaggagaaggagaaggctaaggctcaagcatcacaatcacaatctgatgttaaaggcacttcgagcggccaaatggccaacagaactgcaactgcgccaggccttgtaccaaagcatcagacgccacagcaaatacttatagcaaaggaggaggaacgacagagaaaacaagctgaagaaagagagaagagagcagctgcagcagagagaagacttgcggctctcgctgtccaatctgccggaacgagcgcatcaggtgcagcagcaacaaactgctccgcgaagagggcggcaccagatgacaattcgtgttcgtgctgtttcggttccttggtcggcaaggtgccattccaccgatacaactacaaatactgcagcactacatgtatgcatcttcattcagaaatgctgcaggatgattaaggaaaccgcatgatgcgtgattttgatgcaattttacctcatatacaatcaataacaggctttcttccttcccttgtgcctgctttccgtaattttgtcgtgcacatcttcataactttaaaggttcgaaatcacattcgttctggttcgtgctaatgtttttgcttcattttggaacacattttattgagccaagcggaatcgccattcgcat

SEQ ID NO: 208084 - DNA, 2028 bp, Zea Mays
acaaaactcacgaaccgcacgccacccggaaggccggaacatcggatccacgctcccctttcgccgccaggttcctcctcctcctagatggcgccgctgccgctgccgctgccgccaccgtcagagaagaggccccctcgctcgctctttgaactcccctctgacttcttcgattcatccgttcttctccgggctcacccctccacggccccctccgcggtggaaccgtccgaaccctcccggccgccgccgactcagcagcagcaccaacaactttcagaggctgcggggtccaggtggacgtgcaacacatgtgcctccgagttcgagtcgctacaggagcagcgcgagcactttaagtctgacctgcaccgcctcaacgttaagttgagcatggctggtaaaactattataaaggaagaggacctagataaagcagattctgattctctgtttgatgatttggagatatctagtgtctctggttcagaggacgaacaagaaaatggacctgcatcagaacgtgtactctcggttaaaggtatgtcgtaagagcaaaggctggtaaaaggcaatctggaaaagatgctactggaaaagttgcacactcagcaggttcttctctacggcgctataatgaagcagcactgaaaaaggaagttcaagaattaattgtttcatggaagtcatactttgagacatgtgtttgtgccttcatttatgctccatctaggaaccgccagatgctcttcgacggggagaagactcagtcagtaattcagtcttgtgatgttcgtccagttccattgactgttcatcgccccaccatgaaggaagcgaaacgggtatattgtaacctaacacaactctactatgagatggaatgttcaaccacagatgaaacactacctgatgctggaagtgtgaaaaatgttgaacaaggtcaaggaaaaaagaatgaagtgactgcagaccctggggaatctatttctgacttgtctgcccgtttggaattgttgaataagaatgaagcagcaaccataccatcatcaaagaacgaaacaacacctcttcatgaggcagcaaagtgtggcaatgctcagctgaccctggagttacttgagcagggtttggatccttgcgtaaaagatgcaagaggaaagacatcttattcgctggcttcagataaggaagttaggaatacattcagaagatttatggcgctcaatcttgacaaatgggactggcatgctgcagatgtgcctagtgcactaacaaaagaaatggaagaatcacaagctgcaaaacaagcagacaaggacgccaaaaggaaagcacgtgcaaaggaattgaagaaattaaaaaaagaaagagaaaaggaagaaaaggagaaggagaaggagaaggctaaggctcaagcatcacaatcacaatctgatgttaaaggcacttcgagcggccaaatggccaacagaactgcaactgcgccaggccttgtaccaaagcatcagacgccacagcaaatacttatagcaaaggaggaggaacgacagagaaaacaagctgaagaaagagagaagagagcagctgcagcagagagaagacttgcggctctcgctgtccaatctgccggaacgagcgcatcaggtgcagcagcaacaaactgctccgcgaagagggcggcaccagatgacaattcgtgttcgtgctgtttcggttccttggtcggcaaggtgccattccaccgatacaactacaaatactgcagcactacatgtatgcatcttcattcagaaatgctgcaggatgattaaggaaaccgcatgatgcgtgattttgatgcaattttacctcatatacaatcaataacaggctttcttccttcccttgtgcctgctttccgtaattttgtcgtgcacatcttcataactttaaaggttcgaaatcacattcgttctggttcgtgctaatgtttttgcttcattttggaacacattttattgagccaagcggaatcgccattcgcat

SEQ ID NO: 208085 - DNA, 2359 bp, Zea Mays
agctcacaaaactcacgaaccgcacgccacccggaaggccggaacatcggatccacgctcccctttcgccgccaggttcctcctcctcctagatggcgccgctgccgctgccgctgccgccaccgtcagagaagaggccccctcgctcgctctttgaactcccctctgacttcttcgattcatccgttcttctccgggctcacccctccacggccccctccgcggtggaaccgtccgaaccctcccggccgccgccgactcagcagcagcaccaacaactttcagaggctgcggggtccaggtggacgtgcaacacatgtgcctccgagttcgagtcgctacaggagcagcgcgagcactttaagtctgacctgcaccgcctcaacgttaagttgagcatggctggtaaaactattataaaggaagaggacctagataaagcagattctgattctctgtttgatgatttggagatatctagtgtctctggttcagaggacgaacaagaaaatggacctgcatcagaacgtgtactctcggttaaaggcaaggaagaattcaggaagaaactttactttcgttgtgcatcgggtgaaatgatttctatctatagatgcatgctgttgaaagaacatgaagaaccattaattgattgtaagtctggtcagatggagaatgcatcttgtgtacaggaggaggagatgataaatagggtgaagtgtttggcttgtgaaccccgtgacacgtcacatttgagaattgttctactaacaagcggtgggcattttgctggatgtgtgtttgatggaaattctatcatagctcataaaacatttcataggtatgtcgtaagagcaaaggctggtaaaaggcaatctggaaaagatgctactggaaaagttgcacactcagcaggttcttctctacggcgctataatgaagcagcactgaaaaaggtgtctttcgtttttgtttgccttattgcaggaagttcaagaattaattgtttcatggaagtcatactttgagacatgtgtttgtgccttcatttatgctccatctaggaaccgccagatgctcttcgacggggagaagactcagtcagtaattcagtcttgtgatgttcgtccagttccattgactgttcatcgccccaccatgaaggaagcgaaacgggtatattgtaacctaacacaactctactatgagatggaatgttcaaccacagatgaaacactacctgatgctggaagtgtgaaaaatgttgaacaaggtcaaggaaaaaagaatgaagtgactgcagaccctggggaatctatttctgacttgtctgcccgtttggaattgttgaataagaatgaagcagcaaccataccatcatcaaagaacgaaacaacacctcttcatgaggcagcaaagtgtggcaatgctcagctgaccctggagttacttgagcagggtttggatccttgcgtaaaagatgcaagaggaaagacatcttattcgctggcttcagataaggaagttaggaatacattcagaagatttatggcgctcaatcttgacaaatgggactggcatgctgcagatgtgcctagtgcactaacaaaagaaatggaagaatcacaagctgcaaaacaagcagacaaggacgccaaaaggaaagcacgtgcaaaggaattgaagaaattaaaaaaagaaagagaaaaggaagaaaaggagaaggagaaggagaaggctaaggctcaagcatcacaatcacaatctgatgttaaaggcacttcgagcggccaaatggccaacagaactgcaactgcgccaggccttgtaccaaagcatcagacgccacagcaaatacttatagcaaaggaggaggaacgacagagaaaacaagctgaagaaagagagaagagagcagctgcagcagagagaagacttgcggctctcgctgtccaatctgccggaacgagcgcatcaggtgcagcagcaacaaactgctccgcgaagagggcggcaccagatgacaattcgtgttcgtgctgtttcggttccttggtcggcaaggtgccattccaccgatacaactacaaatactgcagcactacatgtatgcatcttcattcagaaatgctgcaggatgattaaggaaaccgcatgatgcgtgattttgatgcaattttacctcatatacaatcaataacaggctttcttccttcccttgtgcctgctttccgtaattttgtcgtgcacatcttcataactttaaaggttcgaaatcacattcgttctggttcgtgctaatgtttttgcttcattttggaacacattttattgagccaagcggaatcgccattcgcat

SEQ ID NO: 208086 - DNA, 1873 bp, Zea Mays
agctcacaaaactcacgaaccgcacgccacccggaaggccggaacatcggatccacgctcccctttcgccgccaggttcctcctcctcctagatggcgccgctgccgctgccgctgccgccaccgtcagagaagaggccccctcgctcgctctttgaactcccctctgacttcttcgattcatccgttcttctccgggctcacccctccacggccccctccgcggtggaaccgtccgaaccctcccggccgccgccgactcagcagcagcaccaacaactttcagaggctgcggggtccaggtggacgtgcaacacatgtgcctccgagttcgagtcgctacaggagcagcgcgagcactttaagtctgacctgcaccgcctcaacgtatgtcgtaagagcaaaggctggtaaaaggcaatctggaaaagatgctactggaaaagttgcacactcagcaggttcttctctacggcgctataatgaagcagcactgaaaaaggaagttcaagaattaattgtttcatggaagtcatactttgagacatgtgtttgtgccttcatttatgctccatctaggaaccgccagatgctcttcgacggggagaagactcagtcagtaattcagtcttgtgatgttcgtccagttccattgactgttcatcgccccaccatgaaggaagcgaaacgggtatattgtaacctaacacaactctactatgagatggaatgttcaaccacagatgaaacactacctgatgctggaagtgtgaaaaatgttgaacaaggtcaaggaaaaaagaatgaagtgactgcagaccctggggaatctatttctgacttgtctgcccgtttggaattgttgaataagaatgaagcagcaaccataccatcatcaaagaacgaaacaacacctcttcatgaggcagcaaagtgtggcaatgctcagctgaccctggagttacttgagcagggtttggatccttgcgtaaaagatgcaagaggaaagacatcttattcgctggcttcagataaggaagttaggaatacattcagaagatttatggcgctcaatcttgacaaatgggactggcatgctgcagatgtgcctagtgcactaacaaaagaaatggaagaatcacaagctgcaaaacaagcagacaaggacgccaaaaggaaagcacgtgcaaaggaattgaagaaattaaaaaaagaaagagaaaaggaagaaaaggagaaggagaaggagaaggctaaggctcaagcatcacaatcacaatctgatgttaaaggcacttcgagcggccaaatggccaacagaactgcaactgcgccaggccttgtaccaaagcatcagacgccacagcaaatacttatagcaaaggaggaggaacgacagagaaaacaagctgaagaaagagagaagagagcagctgcagcagagagaagacttgcggctctcgctgtccaatctgccggaacgagcgcatcaggtgcagcagcaacaaactgctccgcgaagagggcggcaccagatgacaattcgtgttcgtgctgtttcggttccttggtcggcaaggtgccattccaccgatacaactacaaatactgcagcactacatgtatgcatcttcattcagaaatgctgcaggatgattaaggaaaccgcatgatgcgtgattttgatgcaattttacctcatatacaatcaataacaggctttcttccttcccttgtgcctgctttccgtaattttgtcgtgcacatcttcataactttaaaggttcgaaatcacattcgttctggttcgtgctaatgtttttgcttcattttggaacacattttattgagccaagcggaatcgccattcgcat

SEQ ID NO: 208087 - DNA, 2586 bp, Zea Mays
cagactcacagctcacaaaactcacgaaccgcacgccacccggaaggccggaacatcggatccacgctcccctttcgccgccaggttcctcctcctcctagatggcgccgctgccgctgccgctgccgccaccgtcagagaagaggccccctcgctcgctctttgaactcccctctgacttcttcgattcatccgttcttctccgggctcacccctccacggccccctccgcggtggaaccgtccgaaccctcccggccgccgccgactcagcagcagcaccaacaactttcagaggctgcggggtccaggtggacgtgcaacacatgtgcctccgagttcgagtcgctacaggagcagcgcgagcactttaagtctgacctgcaccgcctcaacgttaagttgagcatggctggtaaaactattataaaggaagaggacctagataaagcagattctgattctctgtttgatgatttggagatatctagtgtctctggttcagaggacgaacaagaaaatggacctgcatcagaacgtgtactctcggttaaaggaggaggagatgataaatagggtgaagtgtttggcttgtgaaccccgtgacacgtcacatttgagaattgttctactaacaagcggtgggcattttgctggatgtgtgtttgatggaaattctatcatagctcataaaacatttcataggtaacggcattaccagtttcaacttttatgcataagaacttgtgagtcatattgcattattacttgtaacttgattaacctttgaatctcaggtgacagcagcgttctattatgtgctagcagtacgcagccagtaaaaatgagtcttttgagtgccgcaaaaagcttctactttcctgtgtcaatgtaaatataattgtgaatcttgctatcaacaaaattgacttcctacttccacttttgtgtttagtaacatttttttttggcttatggacaatagttttagctttgtggctagctagattgactgctttgttgcccgtaccttttactgtagatactttgttttcgatgttagtggcaatttgttcttatttggccatacatttctttaggtatgtcgtaagagcaaaggctggtaaaaggcaatctggaaaagatgctactggaaaagttgcacactcagcaggttcttctctacggcgctataatgaagcagcactgaaaaaggaagttcaagaattaattgtttcatggaagtcatactttgagacatgtgtttgtgccttcatttatgctccatctaggaaccgccagatgctcttcgacggggagaagactcagtcagtaattcagtcttgtgatgttcgtccagttccattgactgttcatcgccccaccatgaaggaagcgaaacgggtatattgtaacctaacacaactctactatgagatggaatgttcaaccacagatgaaacactacctgatgctggaagtgtgaaaaatgttgaacaaggtcaaggaaaaaagaatgaagtgactgcagaccctggggaatctatttctgacttgtctgcccgtttggaattgttgaataagaatgaagcagcaaccataccatcatcaaagaacgaaacaacacctcttcatgaggcagcaaagtgtggcaatgctcagctgaccctggagttacttgagcagggtttggatccttgcgtaaaagatgcaagaggaaagacatcttattcgctggcttcagataaggaagttaggaatacattcagaagatttatggcgctcaatcttgacaaatgggactggcatgctgcagatgtgcctagtgcactaacaaaagaaatggaagaatcacaagctgcaaaacaagcagacaaggacgccaaaaggaaagcacgtgcaaaggaattgaagaaattaaaaaaagaaagagaaaaggaagaaaaggagaaggagaaggagaaggctaaggctcaagcatcacaatcacaatctgatgttaaaggcacttcgagcggccaaatggccaacagaactgcaactgcgccaggccttgtaccaaagcatcagacgccacagcaaatacttatagcaaaggaggaggaacgacagagaaaacaagctgaagaaagagagaagagagcagctgcagcagagagaagacttgcggctctcgctgtccaatctgccggaacgagcgcatcaggtgcagcagcaacaaactgctccgcgaagagggcggcaccagatgacaattcgtgttcgtgctgtttcggttccttggtcggcaaggtgccattccaccgatacaactacaaatactgcagcactacatgtatgcatcttcattcagaaatgctgcaggatgattaaggaaaccgcatgatgcgtgattttgatgcaattttacctcatatacaatcaataacaggctttcttccttcccttgtgcctgctttccgtaattttgtcgtgcacatcttcataactttaaaggttcgaaatcacattcgttctggttcgtgctaatgtttttgcttcattttggaacacattttattgagccaagcggaatcgccattcgcat

SEQ ID NO: 208088 - DNA, 1881 bp, Zea Mays
ctattcccactgatggagcaggtgaccctgttttggtcgtgcctgctgttgacgaacaagaaaatggacctgcatcagaacgtgtactctcggttaaaggcaaggaagaattcaggaagaaactttactttcgttgtgcatcgggtgaaatgatttctatctatagatgcatgctgttgaaagaacatgaagaaccattaattgattgtaagtctggtcagatggagaatgcatcttgtgtacaggaggaggagatgataaatagggtgaagtgtttggcttgtgaaccccgtgacacgtcacatttgagaattgttctactaacaagcggtgggcattttgctggatgtgtgtttgatggaaattctatcatagctcataaaacatttcataggtatgtcgtaagagcaaaggctggtaaaaggcaatctggaaaagatgctactggaaaagttgcacactcagcaggttcttctctacggcgctataatgaagcagcactgaaaaaggaagttcaagaattaattgtttcatggaagtcatactttgagacatgtgtttgtgccttcatttatgctccatctaggaaccgccagatgctcttcgacggggagaagactcagtcagtaattcagtcttgtgatgttcgtccagttccattgactgttcatcgccccaccatgaaggaagcgaaacgggtatattgtaacctaacacaactctactatgagatggaatgttcaaccacagatgaaacactacctgatgctggaagtgtgaaaaatgttgaacaaggtcaaggaaaaaagaatgaagtgactgcagaccctggggaatctatttctgacttgtctgcccgtttggaattgttgaataagaatgaagcagcaaccataccatcatcaaagaacgaaacaacacctcttcatgaggcagcaaagtgtggcaatgctcagctgaccctggagttacttgagcagggtttggatccttgcgtaaaagatgcaagaggaaagacatcttattcgctggcttcagataaggaagttaggaatacattcagaagatttatggcgctcaatcttgacaaatgggactggcatgctgcagatgtgcctagtgcactaacaaaagaaatggaagaatcacaagctgcaaaacaagcagacaaggacgccaaaaggaaagcacgtgcaaaggaattgaagaaattaaaaaaagaaagagaaaaggaagaaaaggagaaggagaaggagaaggctaaggctcaagcatcacaatcacaatctgatgttaaaggcacttcgagcggccaaatggccaacagaactgcaactgcgccaggccttgtaccaaagcatcagacgccacagcaaatacttatagcaaaggaggaggaacgacagagaaaacaagctgaagaaagagagaagagagcagctgcagcagagagaagacttgcggctctcgctgtccaatctgccggaacgagcgcatcaggtgcagcagcaacaaactgctccgcgaagagggcggcaccagatgacaattcgtgttcgtgctgtttcggttccttggtcggcaaggtgccattccaccgatacaactacaaatactgcagcactacatgtatgcatcttcattcagaaatgctgcaggatgattaaggaaaccgcatgatgcgtgattttgatgcaattttacctcatatacaatcaataacaggctttcttccttcccttgtgcctgctttccgtaattttgtcgtgcacatcttcataactttaaaggttcgaaatcacattcgttctggttcgtgctaatgtttttgcttcattttggaacacattttattgagccaagcggaatcgccattcgcat

SEQ ID NO: 208089 - DNA, 4411 bp, Zea Mays
aaaaaaattaaagagaaaaaccattctcggcttcctcatccgtcccatcgaaccgcaaaccctaacctttcgattgccgccgcccgccgctcgctgctgcccgccgctcgccgcggccaatgatggcgaggggccgccgcggcccgggtggacgggggaggttcggcggcggcccgctgggcgacgagcggccagtccgtcacggcgtccgcgtcgaggagaacccgtacttcccattaccgcgtcgggcgtcgggctggggagtggcaccgccgtcgcggcacctgtgggtgggtggcctggcgcccagcgtcacggcgtccgacctgtcggagctgttcctccggtgcggcgacgtcgagggtgttgcccgcgaacccggccggaacttcgcgttcgtgagcttcctgcgggagggggacgctgtggccgcggtgcgggagctccagggggctcgcctggctggggcgcctgttaggatcgagttttccaagggggataaggcttcaggtagctcaatggatgacagatatatgcaacgtgctgatgagcggcattctattgaacgtgggagaaaacggcaaccgagtcctgaaaacacaatagataagcataaaagaaataggtcgacagatcctagcgatgtgttatggataggctttcctcctggtttaaaggtagatgagactcttctgtgggaagccttttctccttttgggaaggttctcagggtaacaacattcccaggccgaacatatgcatttgtccagtacactagtattgcagcagcctgcagagcaaaagaagcacttcagggaaaacttttcaataatccacgagtaagcatatgcttttctcgaaatgaaggtgctgtgccagaacttgggaaacaatcatttgttgcccaatatcatccccaacctagtgcccgacctgtcgtcggagaccaagattatgaagactttcctagggctaggccttttgatagtcctccaagaaattttcgcatgtcaccaccacattttgttcctaatagtttgccaagagatgctgatgatgtgggcttcagcaagggtaattattttgaacaggaaactggaatagagcttggccgtgtgtctaatattgagccttttagaacgcgggagctgggtcaagaaagaaggcttcctgaggagcatgagccccatagacaaagccctactgctaggagtgatgcaccatggaagccatggaacaacattccttttgacagaccttggagacccttaccattcgaagattcttgggacgttgaagacaagtcatatcttatttcaaagaagctgaagggtgctcaagtgcatgatactgaacttcctgaatatcttttctccggatttgatcgaggaaaagtttaccctgagtaccaaaggaggccccatcatgatctttcagaagatggtttacagtctagaacctcttcgtctacggatttgcatggtagacatcatgtgcatcctttaaagaatataactccacttacaaataaacatgaaccatggcgtgctcaagagagttttgataggcgtttagggaaaatggatagatctactcctgactataatgaacctgctcttaaggatgaatggaaatggaatggtacaatagcaaagggaggcacaccgatctgccgagctcgatgcttccctgttggaaaggtccttaacttcatgctgcctgagtttctggattgcactgctaggacaagtctagatatgctttctaagcactactatcaagctactggcagctgggtcgtattttttgtcccagaaaatgatgcggacatgacagcttataatgatttcatgagttatctaggtgataagcagcgtgcagcagtctgtaagcttggagagagcagcaccttgtttcttgttccaccttcagatttctcagagcaagtactgagagtgcctggaaatgtcagcatatctggagtcattctgaggtttcagcagtcaaatccagattacagctcaccaaatcgcaaaccattggatagagctcacccatcttctgcaagtaattttaacactgatgtaagaaattgtgaagatctgcatgcactgagaaggctcaatccttcagatatcagcacattccctcagggtccagattatgtctgctcatcaggtggaagctataccccagcaaatgcagattttattccgccctataagccagagagtgctcctccatatgtcgtccctcaatcaccgcaagaaaggccgccagcggagctccctatgggtattgcacaaggccaacaccagcaactcccaaacaggctgccctcaggatggtccaataacctggataatccaaatccaaatccaggttctggtaacttcagtttggcacagggtgcaatctctaacaggacacaggatccgtacacatttgctcctggagtagtatcaactgggacagcttcagggtatgcatcaggtgaagcatccaacagcatgtcctgggcttccatgcaatacaactcacagcaggtagctagatctgatcaacctactattccagtatcactgccacctgatcaacttgcacagctagctgcccttcttgcacgacaaaaccaacctagaaaagttggtttgcctgtggacagctcaaacaatctgtctggattcatacagagtcccaatcctcatggacatgctacaatgatgccaggcaactctggctccatccctatccagaactcactgccacctgttccatctatgcaacaattacatgccaatgtgccagtgtcaccaataggctcgctacctgcaaatccattcaatgtgccgaccagtgctcctgtactttgtaacagcacttcgcctatgctgcccagtcatgctttggtcaacccagctcattcttccatgccaatgagaccgttcattcctccacttcctgaaggtcctccaccctttcagcagcaaacatcaagtgctgtcacagtgcagcctttaggtccttctagccagcagtctagccaacaactactggctcaggaccttgatggagatcctcaaaagcgccttcaagcaacactgcaactggcagcaaccctgcttaagcagatacaaaatcaatcaaatcctggtggccagaaataaatataaggtattggtaaatgtctagctgcaaggatcatcatatggtgccatcctgaggagctttaaacttactgttgtggttttataccatcacctcctgtgatttgaatgtttatgatgagttctaagacgctttggctttcttatgtacatggttttttgctatgcatccagatatacattggctagaaaacgttgaaaggtcttttaagttggaatggagggagttagctgttgcctgcatttgtttgtttgcctggcttgttccaagagggtatgatggtatggataacttatgatggctggcgtttattggtacgtgcaaggctagagaggcttatgagcgccccccctgacgtgccatctgtgtaccagacggtaaataaggcgtcttactcagatgtttgcttggactcgtccgacagttgtacaatttgttacatgcattgggggcgaagctgttgacattgttttagcattgctagcaaggggttaaagagcgtgactcgtgatgcgtaatctttggtcattcgaaactggctgccgcccgccatggagcatcttttagactgtcctgggatgctgagtgcatgattgcggcacttgtttcagtgcatcagctttatgctgctctctgccatggatgaccggcctgtctgctaaagagcatgcctgtgccatgccaaggcggctgttgttactccctagtcactgcttgctaaatgctactcctactactagaaagttggcattgcatggagatctgggtatgtatcatgatggcactgcactgcgttttaaaatgcagcagatttattcccctggtctacctcgcagtcgtggatgaagaatgatggcctttttcctgtgctacgtattacctggtgcttatttagttccttgtttaatacggaccaagatttgcatctctctttctctctcctccctctggaaaagggagattaagtgttggctttgttgggtgaaggcgaggcagtgatgtacggatgattcagatggtatgccctcatggtcgcctcctgctctattcttcgtgttctgcgttgtgacggagggagctttatttcaagtgctgtgttatgtgagctttatttcaatttggatgtgtcgtggtaaccgagtgtttggacgtgttctgagaatctgagatgttgcagcaaaatcaatcaactgctgttgaggcacggcgccttgtcgtgggtccttccggccataaatctaac

SEQ ID NO: 208090 - DNA, 745 bp, Zea Mays
cttgccccaatctatgaaccaaaaatcgaacctgccgaggcacatgttcggcaacttgcagagcaagatgttcccggcctacttcacgcttatatctgcatgcgcagccatctccgtcgccgccttcgcgtaccttcacccgtggaagacggcgtccactgtgcagcgctaccagcttggattcctcctctcagcgctcggctgcaacctctccaaccttctagtcttcactcccatgaccatcgagatgatgaagaagaggcacaagatcgagcgggacctgagtatcggcgaggaagtcggatggtcaaagaaccagcaggtggctaaatccaaccccaccctcgctgcaatgaacaagaagtttgggatgatccacgggctgtcatcactggccaacatcatgtcgtttggcagcttggccatgcactcctggtacctggccagcaagctagagctgtgaagaaggggagacaagacgacacctttctccgccttgttgtgaatcttgtcagttgtcacgatggtgttgcttgctgctctcaaaccagtttcaaaattggaataactagaaaatggccagacacatacagacagggttttgtaaaatcacactatctccgatctcgaatattttgcaaaactgcatgtcctcgtgcaaaaccatgtccacatgatgacaccgttctcgaatattctgtcgacaccaaaaccacatgtggatttatgccattatgaaagctag

SEQ ID NO: 208091 - DNA, 517 bp, Zea Mays
caacattttgtactatgagatgatgaagaagaggcacaagatcgagcgggacctgagtatcggcgaggaagtcggatggtcaaagaaccagcaggtggctaaatccaaccccaccctcgctgcaatgaacaagaagtttgggatgatccacgggctgtcatcactggccaacatcatgtcgtttggcagcttggccatgcactcctggtacctggccagcaagctagagctgtgaagaaggggagacaagacgacacctttctccgccttgttgtgaatcttgtcagttgtcacgatggtgttgcttgctgctctcaaaccagtttcaaaattggaataactagaaaatggccagacacatacagacagggttttgtaaaatcacactatctccgatctcgaatattttgcaaaactgcatgtcctcgtgcaaaaccatgtccacatgatgacaccgttctcgaatattctgtcgacaccaaaaccacatgtggatttatgccattatgaaagctag

SEQ ID NO: 208092 - DNA, 1006 bp, Zea Mays
ctttcttatccggccgtcttggttctagccactccccactcctcacggctcacgagggtacggcacctcgccgtggcccgcggctgtttccgaggcaagcggactcaccggcgtcctgcgcacgcgaggcgagcagcggctccgtcgacctgcgagccaatccgtctttatttctccaccccaatatccaaacataagataaaaatctatccaacactcatttcccacgccactcccccactccctctccaccctgcttccgttttcggccggcgatggcgacgaccgccgccgcatccacgtcgctccggccgctgtcaccgtccccacctcgcatcgcgagtttgccccgtcggtggtgttggggaatcccggtgcagtcctccgggcggagcgcattccatgctgaacggcggaggcggagcactttattatgcgctgctgataaagctcctgaagaatccctcaagaagaccattgaagtggataggcttattgatatgctgagggacgcaaatcctagagagcttgatcaaatagtggttgaaaatgttctggcattcgacgcaggtttctgggttcgactggcagctagaattgatctctgcaaatcagatgatgataaaaaagattatgaagagctggcggaaaatgtcatgaacattgttgaccggcttgttcacaagactaatcaaaagattgaacaatcaactgatgtgctgaaggcaattattagtcctgcaatgcatgaaggagatgtgaagtggccaccaagagatccagatacactcaaattgatggagaaagaaataacacgccgagaacaagaaggacaacttgatgagggatttctgtcagaagttagtgctcagttgaggcaagctaaacaagacggagataagccagggcttcaggctatgctgcaaaaggtgttgcagttatatgcttctaaatctctccaaaaacgtagttatgcatacaaagttcatgagcaccttcctttttt

SEQ ID NO: 208093 - DNA, 1154 bp, Zea Mays
tctagccactccccactcctcacggctcacgagggtacggcacctcgccgtggcccgcggctgtttccgaggcaagcggactcaccggcgtcctgcgcacgcgaggcgagcagcggctccgtcgacctgcgagccaatccgtctttatttctccaccccaatatccaaacataagataaaaatctatccaacactcatttcccacgccactcccccactccctctccaccctgcttccgttttcggccggcgatggcgacgaccgccgccgcatccacgtcgctccggccgctgtcaccgtccccacctcgcatcgcgagtttgccccgtcggtggtgttggggaatcccggtgcagtcctccgggcggagcgcattccatgctgaacggcggaggcggagcactttattatgcgctgctgataaagctcctgaagaatccctcaagaagaccattgaagtggataggcttattgatatgctgagggacgcaaatcctagagaggtaaatgtgaatcttgatcaaatagtggttgaaaatgttctggcattcgacgcaggtttctgggttcgactggcagctagaattgatctctgcaaatcagatgatgataaagcatgatttcacatatgtagaaaattttactttctatggatggtgttatcttttatctcaaattaatctaactttgcagttggtttctctcttttgccttctcagaaagattatgaagagctggcggaaaatgtcatgaacattgttgaccggcttgttcacaagactaatcaaaagattgaacaatcaactgatgtgctgaaggcaattattagtcctgcaatgcatgaaggagatgtgaagtggccaccaagagatccagatacactcaaattgatggagaaagaaataacacgccgagaacaagaaggacaacttgatgagggatttctgtcagaagttagtgctcagttgaggctaaacaagacggagataagccagggcttcaggctatgctgcaaaaggtgttgcagttatatgcttctaaatctctccaaaaacgtagttatgcatacaaaggggggcaagttgtagttcctgaaaagtttctcgaatgtgtaatacagggtctgtatttccacgtagagattttcttcgtt

SEQ ID NO: 208094 - DNA, 263 bp, Zea Mays
ggtagagaggaaataacacgccgagaacaagaaggacaacttgatgagggatttctgtcagaagttagtgctcagttgaggctaaacaagacggagataagccagggcttcaggctatgctgcaaaaggtgttgcagttatatgcttctaaatctctccaaaaacgtagttatgcatacaaaggggggcaagttgtagttcctgaaaagtttctcgaatgtgtaatacagggtctgtatttccacgtagagattttcttcgtt

SEQ ID NO: 208095 - DNA, 2310 bp, Zea Mays
cggtaacatctgcatgaaactcaactttctgaaaggtaggagcagatcacagccaatggattccacatctcgtgacttggccattggcttcttcctttggagcaaaaaggcatggccagcagcaatccatctcctccccatcgaccaaccacttggacagcaatggcctgcccttgccccggctttgtccacgtacgcactcggtggcgccggccggtgcacgtgaaagcaccggtcatgttgacatagtgccgccgccgagcatatattggcgccgccgcacgtaactcgaccggcacttctgctcgcgcctcgatcatcacttggctgcagaaatggcagccgatccttcgtcctcttccacggggcaacaaacggcggacatccgcgcggccccgcccgaggactcgaggcagatggcaatgagcgggccgctcaatgtccggggcgaccggaggccgccgccgatgcagagggccttcagccggcaggtctcgctcggcagcggcgtgacggtgctgggcatggacagagcggggaggagcggtggcgcaaggggccaacggaccctcccccgcagtggtaggagcctcggggtgctcaaccacagcggcggcttggtccaggccgccggcgacggcgccgcgcgcagggttggcgacttcagcatgttccggaccaagtcgacgctgagcaagcagaactcgatgctgccgacgaggatcagggagtccgacctcgaactgcccacgcacgtcgaagacccgcagtccgccagcagcaggccggcggaggacccgctcaacaagagcgtccccgccggccgctacttcgcggcgctccgtggccctgagctcgacgaagtccgcgtaagcagtagtctcttcgttcttggcattcctgtcacgatggatcagatcagaggacgaggtgtggccgttcctgctgcggttcccgatcggctgcttcggtgtgtgcctgggcctcggcagccaggccatcctgtggggcgcgctggcggcgagcccggcgatgcgcttcctccacgtcacgcccatgatcaacgtcgcgctgtggctgctggcggtcgccgtgctcgtcgcgacgtccgtcacctacgcgctcaagtgcatcttctacttcgaggccatccgacgcgagtacttccacccggtccgcgtcaatttcttcttcgcgccgtggatcgcggccatgttcgtgaccatcggcctaccccgctcctacgcgcccgagcggccgcacccggccgtgtggtgcgccttcgtcctgccgctcttcgcgctcgagctcaagatatacgggcagtggctgtccggcggcaagcggcggctgtgcaaggtggccaacccgtcgtcccacctctcggtggtgggcaacttcgtcggggccatactggcggcgagggtcgggtggacggaggccggcaagctcctgtgggccatcggggtcgcgcactacatcgtcgtgttcgtcacgctgtaccagcggctgcccaccaacgaggcgctgcccaaggagctgcacccggtgtactccatgttcatcgccacgccgtcggccgccagcctcgcctgggccgcgatctacggcagcttcgacgccgtggcgcgcaccttcttcttcatggccatcttcttgtacctgtccctcgtcgtgcgcatcaacttcttccgggggttccggttctccctcgcgtggtggtcgtacacgttccccatgaccacggcgtcgctggccaccgtcaagtatgccgaggctgtgccgtgcttcgcgagcagggccctcgcgctgagcctctccctcatgtcgtcgaccatggtgtcgatgctgctcgtgtcgacgctcctgcacgcgctcgtctggcgatcgctctttcccaacgacctggccatcgccatcaccaaggaccggcaaaacggcgcggtgaagccgaatgacagggggaagagggccagcaagagagtgcacgacatcaagcgatgggccaagcaggcgcccctctccctcgtgtcctcaatcaccaagagccactcggcggacaaggaggaagaagagagaactgaataagaatggctcatatagatggattaggatatattattattattatatacattagccagaagaaatgtatttttcccataagtataggaagaacataataataataagtgatgctatacatctcttactttattccctaatgatatagggcagttccgcatatgaaatggccacctagatctacaggaaactgtaagcaaaatcaggattagctgttttatttct

SEQ ID NO: 208096 - DNA, 788 bp, Zea Mays
gaagtataataaacgcgagcccaccttatcgccagtcagtcacccaccccatccaaggccctcccaaagtcccaaaggccgccgccgcccgccagcccaccatggccgcgcagtccttcctcctcgccgccactgccgccgccaggtcccccgcggtcttcgccgctccctattcctccgcacgccctttccactcggtccacttcgtcgccggcccgtggggcgccgccgccgccagggcgctcgtcgtcgcggacgccactaagaaggccgtagccgtcctcaagggcgcgtctgaggtcgagggcgtggtcacgctcacgcaggacgacgatggacctacaactgtgaatgtccgtatcactggacttacccctggacttcatggcttccacctccacgagtttggtgatactaccaatgggtgcatatcgacaggaccacattttaatccaaacaatctgacgcacggtgcaccagaagacgaagtccgtcatgcgggtgacctgggaaacattgttgcaaatgctgagggcatagccgaggcaaccattgttgatacccagattcctttgactggcccaaattcagttgttgggagagcatttgtggttcatgagcttgaagatgatttggggaaagggggccatgagctcagcctctctactggaaatgctggtggaagactggcatgtggtgttgttggcctgactccattgtaggttgctcgccgggtgcccgggttgcagttgcagctacgctgttacatccttgccttggtgagctcg

SEQ ID NO: 208097 - DNA, 509 bp, Zea Mays
ccgaggcaaccattgttgatacccaattcctttgactggcccaaattcagttgttgggagagcatttgtggttcatgagcttgaagatgatttggggaaagggggccatgagctcagcctctctactggaaatgctggtggaagactggcatgtggtgttgttggcctgactccattgtaggttgctcgccgggtgcccgggttgcagttgcagctacgctgttacatccttgccttggtggacttttgtcttcaatcgtgttattgggacagtgacctttttgtattacttggattcattccatgcatgtggtatggtgcgtaatagcctttgcaggtcgactgtataaaaagcaatatttagttgaggaaataagtgttgccacatatccaaatcgatctatgaagcactatgaacatcaaatgttattttgattttgttttaaccttttttaaagctatttctaaaaaataatattcgagagtttttttttcttctaaaactaaca

SEQ ID NO: 208098 - DNA, 3217 bp, Zea Mays
acccggctcgctcgcatgaagcaatcgccggcgtctactgcagtctccgactctgggatgctgggccgccgcctcgccttgctcccggcggcgaccgtcgggcgcgggggtaggacgacgcgggcgcggatgacgatggggtgcgtgctgctcgaccacgtggcgccgcggctcgcggtggcctcggccacgctcgtgggtgcccgggaggtgatcgcggcggctgccgccgcgggcgcggggggaagcggcgcggtgcacggcgccgtggcgtcgacgctcgcgcaggtagcggtcacggccgtggcgattgcatcgggggcgtgcctttcgaccaaggtcgacttcctctggcctcgcatcgaccagttgccagatactcttatatttgaaggagtggaggtgacaggataccagatatttgaggatcccaaggtgcagaaagcaatagaatttgctagtacagcccaccttgggcaatttaggagaacaggggatccatatattacacactgcatacacactggaaaaattttagctgccttggttccgtcaactggagaaagagctgttaacacaattgtggctggcattcttcacgatgttgtttgtgatacatcagagagcttgaagagcatagaagagcagtttggggctgatgttgctagcttggtatctggtgtatcaaaattaagctacataaaccagctacttcgcaggcatcgacaaaaaaatactggtgggagcactcttacttcagaggaagcaaataatctacgtgttatgttattggggatggttgatgatcctcgtgtggtgctcatcaagctggcagatcgcttgcacaatatgcggacaatttatgctcttcctgtacctaaagctgaagctgttgctcaagagacattggctgtctggtgctcacttgcttctcgattgggagtctgggctttgaaagctgagctggaagatttatgctttgctgtcctccagcctcaaatcttcaagaaaatacaatctgaacttactttaatgtggaatcgtaccggaaaatctaaaaatatgagaagatcatcaattcgaaacgaattacttgcttcaatgaaagatgggaatatggtgtccatcaatgatttgtttagttcatgtaaccaagaaagaccaaatatgaaggacttattgcaggcagttttgccatttgacatctttttggatcggaagaggcgttcatacttccttagcaatctcaatagtaattctggagaatctataccaaatcctaagatagttgacgatgctgctgttgcattagcatctttagcatcttgtgaggaagaacttgagcgagaattactcatatcaacatcgtacatacctgggatggaagtgactttgtcgagtagactcaagagcttgtacagtatctactgcaagatgaaaagaaaagaagtaggaattaggcaagtgtatgatgctcgtgcattgagggtgattgttggagacaaaaatggtgccatgcatggatctgctgtccggagttgttacagcatccttgatatagtacacaggctatggactccaattgatggggagtttgatgactacattatcaatcctaagggtagcggttaccaatcactacacacagcagttcaggcatctgatagctcaccgctggaggtccagattagaacccagcgaatgcatgagtatgcagaacatggacttgctgctcattggctgtataaggagagcaaagttgagtacagaagtagcatgagtaagagaataagacaaagtacatcatattcatctagttcttcagaagatgaaagttctgtacaggatgatatcccatcaaagtacagttcaatgaaagtggggcatccagtgctaagaattgaaggtagtcacttactagcagctgtcgtagtcagataaaggaggaaaggaattgattgttgctgtaagttttagtcttgaagcttctgaagctgtagctgagctaaggtcatcttttcagttgaagcgttgggaagcctatgctaggcttcataaaaaggtttctgagaagtggtggtgtgcacctggacatggtgactggtcaacaaatctggagaggtacacactatgccaggatgggatatttcataagcaagaccaatttgggagacttttacctacatttattcaaataattgatttggcggaagaggaagaggaagagtattggatggttgtatctgccatattcgagggaaaggaaacttgcagtctaccatctgaatcgagttatgctgataaatcatcatctgaacctccaagttctactccattaagcgaccccatcaacaataaggtgcatttgctcagaaccatgcttcaatgggaggagcaagttcgtcgtggcgcatctttggcagagaaaagtctcagtgcaagcatctgcacaaaggcaatcctgcgtgaggtggccataatattctggcctaatggcaagattatgagaatgagcactggtagcacagctgctgacgctgctagaagaatgggcgtcgaagggaagctgctctgggttaatggccaactagtgctgccccaaacagagctaaaggatggggatatagttgaagtgagggtatagatgcaagtaccagattccagtacaccttcctcagggttattgatcatattggttcctcagttcttgccctatcttggcaatgcatcgaacctcaattgtacagtccatttgtcgaaatgaatcgaagaaagaaggattaggtccagtaagtgttgtgtcatacaagagttcactgtgtacataagaaactgcaagtataaaagctgtctgtccagctgtgcttctccttgcccatagttacagtggtaatgtaaatttccgtaagtaaagatgtagtaatgtttagttagtggtccacatttcagcgtgaagttatgaagtgcagtagcgctgcaagtttttttttatatatgtccaaagtagatgtctcatgctgcctaaaaaagatgtccatgtcccgtaatttggcaagccaagattttcaacgttgtttggtttgtggagtcaacctatgcttgatgtatcatgaattcatcccttaaattttggtggaaatcctcatgaatatactactccgtccgtcctaggatataaggcgtaaccactttttgttcttgtcccacgatataagac

SEQ ID NO: 208099 - DNA, 3507 bp, Zea Mays
cgccactcgcgtgccgtgccgtgtgagtgaccctcgtcgcgactcgcgtcgctaggatgagatagaaacgaaaccggcccccacacccggctcgctcgcatgaagcaatcgccggcgtctactgcagtctccgactctgggatgctgggccgccgcctcgccttgctcccggcggcgaccgtcgggcgcgggggtaggacgacgcgggcgcggatgacgatggggtgcgtgctgctcgaccacgtggcgccgcggctcgcggtggcctcggccacgctcgtgggtgcccgggaggtgatcgcggcggctgccgccgcgggcgcggggggaagcggcgcggtgcacggcgccgtggcgtcgacgctcgcgcaggtagcggtcacggccgtggcgattgcatcgggggcgtgcctttcgaccaaggtcgacttcctctggcctcgcatcgaccagttgccagatactcttatatttgaaggagtggaggtgacaggataccagatatttgaggatcccaaggtgcagaaagcaatagaatttgctagtacagcccaccttgggcaatttaggagaacaggggatccatatattacacactgcatacacactggaaaaattttagctgccttggttccgtcaactggagaaagagctgttaacacaattgtggctggcattcttcacgatgttgtttgtgatacatcagagagcttgaagagcatagaagagcagtttggggctgatgttgctagcttggtatctggtgtatcaaaattaagctacataaaccagctacttcgcaggcatcgacaaaaaaatactggtgggagcactcttacttcagaggaagcaaataatctacgtgttatgttattggggatggttgatgatcctcgtgtggtgctcatcaagctggcagatcgcttgcacaatatgcggacaatttatgctcttcctgtacctaaagctgaagctgttgctcaagagacattggctgtctggtgctcacttgcttctcgattgggagtctgggctttgaaagctgagctggaagatttatgctttgctgtcctccagcctcaaatcttcaagaaaatacaatctgaacttactttaatgtggaatcgtaccggaaaatctaaaaatatgagaagatcatcaattcgaaacgaattacttgcttcaatgaaagatgggaatatggtgtccatcaatgatttgtttagttcatgtaaccaagaaagaccaaatatgaaggacttattgcaggcagttttgccatttgacatctttttggatcggaagaggcgttcatacttccttagcaatctcaatagtaattctggagaatctataccaaatcctaagatagttgacgatgctgctgttgcattagcatctttagcatcttgtgaggaagaacttgagcgagaattactcatatcaacatcgtacatacctgggatggaagtgactttgtcgagtagactcaagagcttgtacagtatctactgcaagatgaaaagaaaagaagtaggaattaggcaagtgtatgatgctcgtgcattgagggtgattgttggagacaaaaatggtgccatgcatggatctgctgtccggagttgttacagcatccttgatatagtacacaggctatggactccaattgatggggagtttgatgactacattatcaatcctaagggtagcggttaccaatcactacacacagcagttcaggcatctgatagctcaccgctggaggtccagattagaacccagcgaatgcatgagtatgcagaacatggacttgctgctcattggctgtataaggagagcaaagttgagtacagaagtagcatgagtaagagaataagacaaagtacatcatattcatctagttcttcagaagatgaaagttctgtacaggatgatatcccatcaaagtacagttcaatgaaagtggggcatccagtgctaagaattgaagtatagataaaggaggaaaggaattgattgttgctgtaagttttagtcttgaagcttctgaagctgtagctgagctaaggtcatcttttcagttgaagcgttgggaagcctatgctaggcttcataaaaaggtttctgagaagtggtggtgtgcacctggacatggtgactggtcaacaaatctggagaggtacacactatgccaggatgggatatttcataaggtctgtacagctgaaacattagctctttatcagtttttgtttcttcttctcagccttttgttctgttttagattatatgagaatgcaaaactgatattgcatgcacatttggaatcatcgcaccaactgaaaaatttagagatacaagttactgctggtgccctaaactcctattatgtgattatgtcgtgggtttgattatatcctgtgcgtctaagatgtcttgtttcagcaagaccaatttgggagacttttacctacatttattcaaataattgatttggcggaagaggaagaggaagagtattggatggttgtatctgccatattcgagggaaaggaaacttgcagtctaccatctgaatcgagttatgctgataaatcatcatctgaacctccaagttctactccattaagcgaccccatcaacaataaggtgcatttgctcagaaccatgcttcaatgggaggagcaagttcgtcgtggcgcatctttggcagagaaaagtctcagtgcaagcatctgcacaaaggcaatcctgcgtgaggtggccataatattctggcctaatggcaagattatgagaatgagcactggtagcacagctgctgacgctgctagaagaatgggcgtcgaagggaagctgctctgggttaatggccaactagtgctgccccaaacagagctaaaggatggggatatagttgaagtgagggtatagatgcaagtaccagattccagtacaccttcctcagggttattgatcatattggttcctcagttcttgccctatcttggcaatgcatcgaacctcaattgtacagtccatttgtcgaaatgaatcgaagaaagaaggattaggtccagtaagtgttgtgtcatacaagagttcactgtgtacataagaaactgcaagtataaaagctgtctgtccagctgtgcttctccttgcccatagttacagtggtaatgtaaatttccgtaagtaaagatgtagtaatgtttagttagtggtccacatttcagcgtgaagttatgaagtgcagtagcgctgcaagtttttttttatatatgtccaaagtagatgtctcatgctgcctaaaaaagatgtccatgtcccgtaatttggcaagccaagattttcaacgttgtttggtttgtggagtcaacctatgcttgatgtatcatgaattcatcccttaaattttggtggaaatcctcatgaatatactactccgtccgtcctaggatataaggcgtaaccactttttgttcttgtcccacgatataagac

SEQ ID NO: 208100 - DNA, 3336 bp, Zea Mays
cagaccgccccctctcgtgctctcaccctccgttcctcgtcgccactcgcgtgccgtgccgtgtgagtgaccctcgtcgcgactcgcgtcgctaggatgagatagaaacgaaaccggcccccacacccggctcgctcgcatgaagcaatcgccggcgtctactgcagtctccgactctgggatgctgggccgccgcctcgccttgctcccggcggcgaccgtcgggcgcgggggtaggacgacgcgggcgcggatgacgatggggtgcgtgctgctcgaccacgtggcgccgcggctcgcggtggcctcggccacgctcgtgggtgcccgggaggtgatcgcggcggctgccgccgcgggcgcggggggaagcggcgcggtgcacggcgccgtggcgtcgacgctcgcgcaggtagcggtcacggccgtggcgattgcatcgggggcgtgcctttcgaccaaggtcgacttcctctggcctcgcatcgaccagttgccagatactcttatatttgaaggagtggaggtgacaggataccagatatttgaggatcccaaggtgcagaaagcaatagaatttgctagtacagcccaccttgggcaatttaggagaacaggggatccatatattacacactgcatacacactggaaaaattttagctgccttggttccgtcaactggagaaagagctgttaacacaattgtggctggcattcttcacgatgttgtttgtgatacatcagagagcttgaagagcatagaagagcagtttggggctgatgttgctagcttggtatctggtgtatcaaaattaagctacataaaccagctacttcgcaggcatcgacaaaaaaatactggtgggagcactcttacttcagaggaatcaggcaaataatctacgtgttatgttattggggatggttgatgatcctcgtgtggtgctcatcaagctggcagatcgcttgcacaatatgcggacaatttatgctcttcctgtacctaaagctgaagctgttgctcaagagacattggctgtctggtgctcacttgcttctcgattgggagtctgggctttgaaagctgagctggaagatttatgctttgctgtcctccagcctcaaatcttcaagaaaatacaatctgaacttactttaatgtggaatcgtaccggaaaatctaaaaatatgagaagatcatcaattcgaaacgaattacttgcttcaatgaaagatgggaatatggtgtccatcaatgatttgtttagttcatgtaaccaagaaagaccaaatatgaaggacttattgcaggcagttttgccatttgacatctttttggatcggaagaggcgttcatacttccttagcaatctcaatagtaattctggagaatctataccaaatcctaagatagttgacgatgctgctgttgcattagcatctttagcatcttgtgaggaagaacttgagcgagaattactcatatcaacatcgtacatacctgggatggaagtgactttgtcgagtagactcaagagcttgtacagtatctactgcaagatgaaaagaaaagaagtaggaattaggcaagtgtatgatgctcgtgcattgagggtgattgttggagacaaaaatggtgccatgcatggatctgctgtccggagttgttacagcatccttgatatagtacacaggctatggactccaattgatggggagtttgatgactacattatcaatcctaagggtagcggttaccaatcactacacacagcagttcaggcatctgatagctcaccgctggaggtccagattagaacccagcgaatgcatgagtatgcagaacatggacttgctgctcattggctgtataaggagagcaaagttgagtacagaagtagcatgagtaagagaataagacaaagtacatcatattcatctagttcttcagaagatgaaagttctgtacaggatgatatcccatcaaagtacagttcaatgaaagtggggcatccagtgctaagaattgaaggtagtcacttactagcagctgtcgtagtcagtatagataaaggaggaaaggaattgattgttgctgtaagttttagtcttgaagcttctgaagctgtagctgagctaaggtcatcttttcagttgaagcgttgggaagcctatgctaggcttcataaaaaggtttctgagaagtggtggtgtgcacctggacatggtgactggtcaacaaatctggagaggtacacactatgccaggatgggatatttcataagcaagaccaatttgggagacttttacctacatttattcaaataattgatttggcggaagaggaagaggaagagtattggatggttgtatctgccatattcgagggaaaggaaacttgcagtctaccatctgaatcgagttatgctgataaatcatcatctgaacctccaagttctactccattaagcgaccccatcaacaataagaaccatgcttcaatgggaggagcaagttcgtcgtggcgcatctttggcagagaaaagtctcagtgcaagcatctgcacaaaggcaatcctgcgtgaggtggccataatattctggcctaatggcaagattatgagaatgagcactggtagcacagctgctgacgctgctagaagaatgggcgtcgaagggaagctgctctgggttaatggccaactagtgctgccccaaacagagctaaaggatggggatatagttgaagtgagggtatagatgcaagtaccagattccagtacaccttcctcagggttattgatcatattggttcctcagttcttgccctatcttggcaatgcatcgaacctcaattgtacagtccatttgtcgaaatgaatcgaagaaagaaggattaggtccagtaagtgttgtgtcatacaagagttcactgtgtacataagaaactgcaagtataaaagctgtctgtccagctgtgcttctccttgcccatagttacagtggtaatgtaaatttccgtaagtaaagatgtagtaatgtttagttagtggtccacatttcagcgtgaagttatgaagtgcagtagcgctgcaagtttttttttatatatgtccaaagtagatgtctcatgctgcctaaaaaagatgtccatgtcccgtaatttggcaagccaagattttcaacgttgtttggtttgtggagtcaacctatgcttgatgtatcatgaattcatcccttaaattttggtggaaatcctcatgaatatactactccgtccgtcctaggatataaggcgtaaccactttttgttcttgtcccacgatataagac

SEQ ID NO: 208101 - DNA, 3731 bp, Zea Mays
aatctggcgaaacttctatcatcgtcactcacaaggcttttacacgactagttctgcgaggctaagagcagaaaaaactccacctgcctggctgatttcatcaactccggcggcttggagaagacgaagctgctccagaatccgataggaagtttggtgctcgcgtgttgacgggttgatttcggtgcgccgatggggcaggcgttccgcaagctgttcgatgccttcctcggcaccagcgagatgagggttgtgatgcttggtctggatgccgccggtaaaaccaccatcttgtacaagctgcaaatcggggaggttttgtcgactgttcccacgattggtttcaatgtcgagaaagttcaatacaagaatgtgatgtttactgtttgggatgttggtggccaagaaaagttgaggcccttgtggaggcactacttcaacaatactgatggcttgatctatgtagttgattcattggatcgggagaggattggaaaagctaaagctgaatttcaggcaataatcaatgatcctttcatgcttaacagtgtcatattggtatttgccaataaacaagatatgaaaggggcaatgacaccaatggaggtgtgtgagggccttggcctctacgatttgaagaatcgcacctggcacatccaaggctcctgtgcgcttaaaggtgatggcctttatgagggcttggactggatggcaagcactctgaaggaattgcaagcttcaggtcgcctaccctctggagggacatcgttgttctaagaagcaaatctgcatatactcttatatttgaaggagtggaggtgacaggataccagatatttgaggatcccaaggtgcagaaagcaatagaatttgctagtacagcccaccttgggcaatttaggagaacaggggatccatatattacacactgcatacacactggaaaaattttagctgccttggttccgtcaactggagaaagagctgttaacacaattgtggctggcattcttcacgatgttgtttgtgatacatcagagagcttgaagagcatagaagagcagtttggggctgatgttgctagcttggtatctggtgtatcaaaattaagctacataaaccagctacttcgcaggcatcgacaaaaaaatactggtgggagcactcttacttcagaggaagcaaataatctacgtgttatgttattggggatggttgatgatcctcgtgtggtgctcatcaagctggcagatcgcttgcacaatatgcggacaatttatgctcttcctgtacctaaagctgaagctgttgctcaagagacattggctgtctggtgctcacttgcttctcgattgggagtctgggctttgaaagctgagctggaagatttatgctttgctgtcctccagcctcaaatcttcaagaaaatacaatctgaacttactttaatgtggaatcgtaccggaaaatctaaaaatatgagaagatcatcaattcgaaacgaattacttgcttcaatgaaagatgggaatatggtgtccatcaatgatttgtttagttcatgtaaccaagaaagaccaaatatgaaggacttattgcaggcagttttgccatttgacatctttttggatcggaagaggcgttcatacttccttagcaatctcaatagtaattctggagaatctataccaaatcctaagatagttgacgatgctgctgttgcattagcatctttagcatcttgtgaggaagaacttgagcgagaattactcatatcaacatcgtacatacctgggatggaagtgactttgtcgagtagactcaagagcttgtacagtatctactgcaagatgaaaagaaaagaagtaggaattaggcaagtgtatgatgctcgtgcattgagggtgattgttggagacaaaaatggtgccatgcatggatctgctgtccggagttgttacagcatccttgatatagtacacaggctatggactccaattgatggggagtttgatgactacattatcaatcctaagggtagcggttaccaatcactacacacagcagttcaggcatctgatagctcaccgctggaggtccagattagaacccagcgaatgcatgagtatgcagaacatggacttgctgctcattggctgtataaggagagcaaagttgagtacagaagtagcatgagtaagagaataagacaaagtacatcatattcatctagttcttcagaagatgaaagttctgtacaggatgatatcccatcaaagtacagttcaatgaaagtggggcatccagtgctaagaattgaaggtagtcacttactagcagctgtcgtagtcagtatagataaaggaggaaaggaattgattgttgctgtaagttttagtcttgaagcttctgaagctgtagctgagctaaggtcatcttttcagttgaagcgttgggaagcctatgctaggcttcataaaaaggtttctgagaagtggtggtgtgcacctggacatggtgactggtcaacaaatctggagaggtacacactatgccaggatgggatatttcataagagatacaagttactgctggtgccctaaactcctattatgtgattatgtcgtgggtttgattatatcctgtgcgtctaagatgtcttgtttcagcaagaccaatttgggagacttttacctacatttattcaaataattgatttggcggaagaggaagaggaagagtattggatggttgtatctgccatattcgagggaaaggaaacttgcagtctaccatctgaatcgagttatgctgataaatcatcatctgaacctccaagttctactccattaagcgaccccatcaacaataaggtgcatttgctcagaaccatgcttcaatgggaggagcaagttcgtcgtggcgcatctttggcagagaaaagtctcagtgcaagcatctgcacaaaggcaatcctgcgtgaggtggccataatattctggcctaatggcaagattatgagaatgagcactggtagcacagctgctgacgctgctagaagaatgggcgtcgaagggaagctgctctgggttaatggccaactagtgctgccccaaacagagctaaaggatggggatatagttgaagtgagggtatagatgcaagtaccagattccagtacaccttcctcagggttattgatcatattggttcctcagttcttgccctatcttggcaatgcatcgaacctcaattgtacagtccatttgtcgaaatgaatcgaagaaagaaggattaggtccagtaagtgttgtgtcatacaagagttcactgtgtacataagaaactgcaagtataaaagctgtctgtccagctgtgcttctccttgcccatagttacagtggtaatgtaaatttccgtaagtaaagatgtagtaatgtttagttagtggtccacatttcagcgtgaagttatgaagtgcagtagcgctgcaagtttttttttatatatgtccaaagtagatgtctcatgctgcctaaaaaagatgtccatgtcccgtaatttggcaagccaagattttcaacgttgtttggtttgtggagtcaacctatgcttgatgtatcatgaattcatcccttaaattttggtggaaatcctcatgaatatactactccgtccgtcctaggatataaggcgtaaccactttttgttcttgtcccacgatataagac

SEQ ID NO: 208102 - DNA, 2382 bp, Zea Mays
agttcttgtcgacggagagtaatgagatatagaataaggtaccctatagaataaagaatctttctctgaaaagtctgacgtacgtaaataagatataataaaaaaaatacaaagagaagcgctggactggagatgctcctatatgcggcaatgcctgtgcttataaatagccacctcggtcggcaaggacatgaacggcggacgcagtgtgcatgcatacaagagcaacaagatactggcgcagaggagcaatgcccggcatggatgccttcgctgctgtgtcactactcgccacactctttctggttcgtgcggcagctgcccatcctccggcggcggctgcggacgccatgacgccgacggactattggcgagcggtgcttcctgagaccccgatgccccgagccatactcgacctattgaccacatctacagttggtgagggctcaaggaaggtcaccacgtcaaatgggtaccaaggccatgacttaagaacggtcagcacatcatatgcatctcaagatggggacaactcatggaaggccaccatgtcatatgggttccaaagtggtgagggctcgaggaaggtcaccacatcatatccgtaccgagggcaggacttaaggatggtcagcacatcatatgtatctcaagatgaggacaactcatggaaggtctcaatgccatctaggttccaagttggtgagggctcaaggaaggtcaccacgtcaaatgggtaccaaggccatgacttaaggacggtcagcacatcatatgcatctcaagatggggacaactcatggaaggccaccatgtcatatgggttccaaagtggtgagggctcgaggaaggtcaccacatcatatccgtaccgaggccaggacttaaggatggtcagcacatcatatgtatctcaagatgaggacaactcatggaaggccaccatgtcatatgggttccaaagtggtgagggctcgaggaaggtcaccacatcatatccgtaccgaggccaggacttaaggatggtcagcacatcatatgtatctcaagatgaggacaactcatggaaggtctcgatgccatctaggttccaagttggtgagggctcaaggaagctcaccacaccattcgaatcacaaagggaggactcaaggaaggccaccgcatcatatggaatccaagatgatgaggacacaaggaaggccactacatcatatggaatccatggggaggacccaagaaaggccaccacgtcatatggttcccaggatgagaagggatcaaggaaggtcataatgtcatatgggtctaatggtgaggatgatccaagaaaggccaccacatcatatggaatacaagataaagagtatcccaggaaggccaccacatcttatggagttcaaggggacatccatcaccatgaccatgctgccgttcacatccacagcagcggcaacaagctagtagcagatgttttcttcttccacgacgtcctacgcccagggtccgtaatcacgccgatcatcccaccgaccatcaccctaccacctctgctgcctctccgcgaggccgacgcgctcccgttctccaccgggcgcttcgccgacatcctcgccatgttcgcgccgacgacatccgacgccatgggcgaagagatacggtcgacgctcgacacctgcgagaacacgcgcccgctccctggcgagaaggccgcctgcgccacctccctcgagtctctcgccaggatacccgccgtcctcctcgggacacgcaacgtccgcgctttctccggcgacatgcccaccgatcctgccggcacgtcggcgaagcgggggcggtataacgtaacggccgtgcagaagctctccgagtcactgacggcggcggcgtgccatgacctgacgtacccctacgttgtgttctactgccacacgaccaacccagcggccacgtacctggtgaagctggcagcccaggatggcgggacgccggacatggaggcgttggtcgtgtgccacctcgacacgtcgttgtggagtcccagacacccattcttggtggcgcacagtctcaagccaggggacgacgcagtcgtgtgccattttctctctaagctcagcatcgtctgggtccccgctggcgagcaggggtggcgtgcgtgaagtgaagcctaatagcgttaagtacccgtgctcagagctctatctgtaacctgtatggacctaatgtggctctgtaatgctaaataaaacctgcgtcaatcatgtatcgtgatattttatttgttttagcaaaatggtgtccaaaactatagtccaaagtgaaggaattcatgttgtgagcactatatttggcacctgaacatggttggacggttcgacc

SEQ ID NO: 208103 - DNA, 405 bp, Zea Mays
cgcctgcacacatactgaaatatgggcatatccaccatgcatggtaccatcttcatcatgtagcctgggatgagctggcaccatgaaataattcaagtggttaaatcatgcatctgcagaaatattgtactctcaaatggtgggttgctgcgtcacgggagtttgggtgaaggcctgaaggatgtgatgcaaaacgtctatgcaggtctgggatgtccgcctcattatggatcaaaattcatgatttctaaaggtgtcagatgagtacctatatactccctccatcccagaaaacaaggcgcctcattagactattggaagctggacgacatggatgactctggcaagatgcggtgggagcacgacgacatggatgactccgaccacgagttcgacaggaagcct

SEQ ID NO: 208104 - DNA, 1653 bp, Zea Mays
aagtgattatggcctgacacttacaggattatttgaatgtcaaattcaaggagacagggcacagcaacatgtacttccctcagttcattccatactcatttatagagaaggaagctagtcatgttgaagggtttagcccggagcttgcattggtcaccattggaggaggaaaagaactagaggaaaagcttgtggtaagaccaacaagtgagaccattgtaaaccacatgttcaccaaatggattcagagctatcgtgatcttcctctcatgataaaccagtgggctaacgtgacaagatgggaaatgcggactaaaccattcatccgaactcttgaatttttatggcaagaaggccatacagcccatgccacccttgaggaggcagagaaggaggcgatgcagatgattgatgtatataccaaatttgcctttgagcatgctgcaataccagttattccaggtagaaaatcaagagtagaaacatttgcgggtgccaatcggacctacactatagaagctatgatgggtgacaagaaggccttacaagctggaactagtcacaaccttggccaaaacttttcacgagcttttggaacacagtttatggatgaaaatggtcaaatcgaacacgtctggcagacctcttgggctattagtactcggtttgttggtgggattatcatgacccatggcgatgatgccggtctaatgcttcctccaaggattgcacccattcaggtcataatagtaccaatatggaaaaagggtgatgagaaggctgttgttgtggaagctgtagattcagttcaaaaaatactcaaagaagcaggaattagagttaaagtggacgactcagagctgcgaactcctggatggaaattcaatcactatgagatgaaaggggttcctgtaagaatagagataggtccacgtgatgtcacaaataagagtgttgtggtttctaggcgtgatgtccctggaaagcaaggaaaggagtttggagtgtctatggagccttcgatattggtgaaccatataaagggtcgtctagatgacatacaagcatcccttttacagaaggccataacattccgtgatagtaacattgtcgacgtaagctcatatggcgagctgaaggaagctatttctgaaggaaagtgggctagaggtccttggtcagctagcgatgctgatgagctgaaagtgaaagaagagaccagcgccaccatcagatgctacccattcgagcagcctgagggcaccaagaaatgcttcatgactggcaaccccgcagaggaagtcgcaattttcgcaaagtcatactaggcccactgtgtgtccactgtcagagataagaacagcatttccttttcaattttataggattgtaccctgtctacctaaggtccagattgatgacggttcatggaacagcattgtgtgctgctgatatttaaaatgtaaatttgataatcaataggtcaattttgttccactaacactggaggtaagttgtttgcctactcagtatcaaatgtttcaaacaagttccccaatatgctaaatcatgcaagttatcacatcgaattggataagtagaccgtgcatattgctgtgcaaaatattatttcacactgcaatggttacagag

SEQ ID NO: 208105 - DNA, 2027 bp, Zea Mays
taaggctagatggctatagcactagcgtttggaggcacagaaccccccaatccaggcgggcaatccccacaggccacaatggcgtcgctgctgcgcctcccctcgctgctgtccccgtccaagcccctgctccggcgccggctgccggcggcgaggctcgcggcatccgccgcatccaggggtcaagcctcggcgaccgcgggcgcggcggcgccggcggccgcggagacccgcggcggggacagggaggggcaggtcacgccgcggtccgcggacttcaacgcctggtacacggacgtcatcgccgctgccgagctcgcggactacgggcccgtgcgagggaccatggtcattcgcccctacggatacgccatctgggaggccatccaggattatttgaatgtcaaattcaaggagacagggcacagcaacatgtacttccctcagttcattccatactcatttatagagaaggaagctagtcatgttgaagggtttagcccggagcttgcattggtcaccattggaggaggaaaagaactagaggaaaagcttgtgggctttgtaggtaagaccaacaagtgagaccattgtaaaccacatgttcaccaaatggattcagagctatcgtgatcttcctctcatgataaaccagtgggctaacgtgacaagatgggaaatgcggactaaaccattcatccgaactcttgaatttttatggcaagaaggccatacagcccatgccacccttgaggaggcagagaaggaggcgatgcagatgattgatgtatataccaaatttgcctttgagcatgctgcaataccagttattccaggtagaaaatcaagagtagaaacatttgcgggtgccaatcggacctacactatagaagctatgatgggtgacaagaaggccttacaagctggaactagtcacaaccttggccaaaacttttcacgagcttttggaacacagtttatggatgaaaatggtcaaatcgaacacgtctggcagacctcttgggctattagtactcggtttgttggtgggattatcatgacccatggcgatgatgccggtctaatgcttcctccaaggattgcacccattcaggtcataatagtaccaatatggaaaaagggtgatgagaaggctgttgttgtggaagctgtagattcagttcaaaaaatactcaaagaagcaggaattagagttaaagtggacgactcagagctgcgaactcctggatggaaattcaatcactatgagatgaaaggggttcctgtaagaatagagataggtccacgtgatgtcacaaataagagtgttgtggtttctaggcgtgatgtccctggaaagcaaggaaaggagtttggagtgtctatggagccttcgatattggtgaaccatataaagggtcgtctagatgacatacaagcatcccttttacagaaggccataacattccgtgatagtaacattgtcgacgtaagctcatatggcgagctgaaggaagctatttctgaaggaaagtgggctagaggtccttggtcagctagcgatgctgatgagctgaaagtgaaagaagagaccagcgccaccatcagatgctacccattcgagcagcctgagggcaccaagaaatgcttcatgactggcaaccccgcagaggaagtcgcaattttcgcaaagtcatactaggcccactgtgtgtccactgtcagagataagaacagcatttccttttcaattttataggattgtaccctgtctacctaaggtccagattgatgacggttcatggaacagcattgtgtgctgctgatatttaaaatgtaaatttgataatcaataggtcaattttgttccactaacactggaggtaagttgtttgcctactcagtatcaaatgtttcaaacaagttccccaatatgctaaatcatgcaagttatcacatcgaattggataagtagaccgtgcatattgctgtgcaaaatattatttcacactgcaatggttacagag

SEQ ID NO: 208106 - DNA, 793 bp, Zea Mays
gtttctactcttatagtggaagactcagagctgcgaacttctggggttcctgtaagaatagagataggtccacgtgatgtcacaaataagagtgttgtggtttctaggcgtgatgtccctggaaagcaaggaaaggagtttggagtgtctatggagccttcgatattggtgaaccatataaagggtcgtctagatgacatacaagcatcccttttacagaaggccataacattccgtgatagtaacattgtcgacgtaagctcatatggcgagctgaaggaagctatttctgaaggaaagtgggctagaggtccttggtcagctagcgatgctgatgagctgaaagtgaaagaagagaccagcgccaccatcagatgctacccattcgagcagcctgagggcaccaagaaatgcttcatgactggcaaccccgcagaggaagtcgcaattttcgcaaagtcatactaggcccactgtgtgtccactgtcagagataagaacagcatttccttttcaattttataggattgtaccctgtctacctaaggtccagattgatgacggttcatggaacagcattgtgtgctgctgatatttaaaatgtaaatttgataatcaataggtcaattttgttccactaacactggaggtaagttgtttgcctactcagtatcaaatgtttcaaacaagttccccaatatgctaaatcatgcaagttatcacatcgaattggataagtagaccgtgcatattgctgtgcaaaatattatttcacactgcaatggttacagag

SEQ ID NO: 208107 - DNA, 797 bp, Zea Mays
tgctttcagcactatgaaaatcccttcgtatttgatgatttcattgggggttcctgtaagaatagagataggtccacgtgatgtcacaaataagagtgttgtggtttctaggcgtgatgtccctggaaagcaaggaaaggagtttggagtgtctatggagccttcgatattggtgaaccatataaagggtcgtctagatgacatacaagcatcccttttacagaaggccataacattccgtgatagtaacattgtcgacgtaagctcatatggcgagctgaaggaagctatttctgaaggaaagtgggctagaggtccttggtcagctagcgatgctgatgagctgaaagtgaaagaagagaccagcgccaccatcagatgctacccattcgagcagcctgagggcaccaagaaatgcttcatgactggcaaccccgcagaggaagtcgcaattttcgcaaagtcatactaggcccactgtgtgtccactgtcagagataagaacagcatttccttttcaattttataggattgtaccctgtctacctaaggtccagattgatgacggttcatggaacagcattgtgtgctgctgatatttaaaatgtaaatttgataatcaataggtcaattttgttccactaacactggaggtaagttgtttgcctactcagtatcaaatgtttcaaacaagttccccaatatgctaaatcatgcaagttatcacatcgaattggataagtagaccgtgcatattgctgtgcaaaatattatttcacactgcaatggttacagag

SEQ ID NO: 208108 - DNA, 679 bp, Zea Mays
agaaactgtatttttgtgttttttacaccgacactcacaaatgcatgcacataataaactctccgcgttgaggaagtcatcacagtcatcttgatatcgatgggaacgtcagccagcgattatgttaggttgagttaggtgtgacaggaagtggtccatgtgaagtgagaacaacgagcttcagcaataaggccgggtgtttgaagacgatcccactgttggtgtattttcgaaattttcttttctccaagcttagagctgagatcgtatgtcctatactcctatggggcttttattcatgaattgtcaagggttcagacagcctaaactctaaagcaagacgccaagaccctcgccgctggctcggtaaccatacgatggtttagcagtgagaaaaattgagaatcgacactcattgtccagtcatggatgtaccttgtactgcttgtaaatagtttctatacagtgattcatgtgctcgcaagtcgcaaggtgttgtcccacgaaaattcgttgggtgtgctgagatcattcaagtagggaaaaggttcagagcgcgacaaatgtgtagggtaacggcatgtggctatgcttcaataatctcttttagagttggtttggtgacaaaagaattaaaagggatccattggaaagaaatcttttattatttaaattaaat

SEQ ID NO: 208109 - DNA, 4331 bp, Zea Mays
tttttctcgcctctcctcgctcctcgccatttctctctcttcccctccgcttcgcccaccgcccgctccgaaatctgcgcgccgacgccgccggctgcccgtggagagcctcgaattagagcgcgttccgtcgagaggttttcaagcaactatgtttgagtttggttgatatgatactcattcacgttggggatgcagaccccccctctgtgggggttgattgaagaagttaactgtacacttaggagaacttgtgtcctactgaaagtttcttggtttcgaggcaagtatgtcagattcaaatgtgaatgtcttactaagagtagggctttggtggcatagatggatgaactgattgtcaacttcaacaagttgttgattacagagcctttctagtttcttgggcaggctcttgagctaccaagcatgtcagattcaaatgtgaagtggattgatgggctccagttcacatcattgtactggcctccacccctcgatgcggagcagaagcaggcacaaattttggcatatgtcgagtactttggccagtttacagctgacaccgatcaattccctgaagacatagctcagctcattcaaagttcctatccatcaaaagaaaatcgcttggtagatgaagtattggcaacttttgttcttcatcatccggagcatggtcatgcagttgcacatccaattctttcacgcatcatagatgggacgctgtgctatgatagacatggtcccccattcagttccttcatctctttattcagccataattctgagcaagagtactcagagcagtgggccttggcctgtggagaaattcttagggtcttaactcactacaataggccaatattcaaagttgagcgccaacatactgaagctgaatgtagcagcacatctgatcaggcaacatctagtgattccacagataagagatctaataattctccaggaaatgaatctgactggaagccattgaggccactaaccccgtggatcactgacatattgctagccgcacctttgggcattcgaagtgactattttcgatggtgtggcggtgtaatgggaaaatatgctgctggtggagagttgaagcctccaactactgcttgcagccgaggatctgggaagcacccacagcttatgccttccacccccagatgggctgttgccaatggagctggagttatattaagtgtctgtgatgaggaggtagctcgttatgagacagcaaatttaacagcagcagctgttcctgcgcttctgctacctccaccaacaacacccttggacgagcatttggtggctggcctgccccctcttgaaccatatgctcggttgttccatagatactatgcaattgctacaccaagtgctacacagaggttgctttttggtcttctggaagcaccaccatcatgggctccagatgcacttgatgcagcagtacaactagttgagctacttagagcagccgaagattatgcttctggcatgcggcttccaaaaaattggatgcatctgcatttcttgcgtgcgattggaactgcaatgtcaatgagagctggcattgctgctgatacagctgctgctttgcttttccgaatactttcccaaccaacgctgctttttccaccactgagacatgccgaaggagttgaagtacatcatgaaccactaggtggctatgtatcatcatataagaagcagttggaagttcctgcatctgaggccactatcgatgccactgcacaaggcattgcttctttgttgtgtgctcatggccctgatgttgagtggagaatatgtaccatctgggaagctgcctatggtttgctaccgctaagttcatcagcagttgatttgcctgaaattgttgtagctgccccgcttcagccacctacactgtcatggagcctgtacttaccattattaaaagtatttgagtatctacctcgtggcagtccatctgaagcatgccttatgaggatatttgtggcaacggttgaagctatacttaggagaacttttccttctgaaacatcagagcaatccagaaagccaagaagtcaatctaagaaccttgctgttgctgaacttcacacaatgatacattcactctttgttgaatcctgtgcctcaatggaccttgcctcccggttgctatttgtggtgttaactgtttgtgtcagtcatcaagctttgccagggggtagcaaaagaccaactggtagtgataaccattcccacgaggaagccactgagcattcaagattaacaaatggaagaagcagatgtaagaagagacaaggccctgttgctacgtttgattcatatgttctagctgcagtttgtgccttatcttgtgagctccagctgttccctttcattactaagaatggatcacattcaaatttaaaggattccatgaagattatcatatctggaaaaaacaatgggatgaataatgagctacacaacagcatcagctcagcaattcttcatactcgcagaattcttggcatcttggaagccgttttctccctgaagccatcatcagttggtacctcatggagctatagctcaaatgaaatagttgcagcagctatggttgctgctcatgtttctgagttatttcgtcggtccaggccatgccttaatgcactctctgcactaatgagatgcaagtgggatgctgagatttcgaccagggcatcatctctctaccatttgattgacttgcatggtaaaacagtttcctccattgtgaacaaagctgagcctcttgaagctcacctgacccttacaccagtaaagagggataatcaacatcaccgtgaggaaagcaataccagctcattggatagtgtcaagttggaaaacaagaatggttcaacatcacacaagaaaaacggtttctcaagaccactcttgaaatgtgcagaagaggtcctactgaatggcgatgttgcaagtacatctgggaaatccattgcaagcttacaggtggaagcatctgatttggcaaacttccttaccatggatcggaatgggggttaccgaggttcacaaactcttctaagatctgtattatcagagaaacaagagctgtgcttctctgttgtctcattgctctggcagaagctcatagcttctcctgaaatgcagatgtctgcagaaagtacatcagctcaccaaggatggaggaaggttgttgatgcactttgtgatgtcgtttcagcctcaccaaccaaggcatcagctgctatcgttctccaggccgagaaggacttgcagccttggattgctagagatgacgaacaaggtcagaagatgtggagagtcaaccagcgtatagtgaagcttatagctgagcttatgaggaaccatgacagccctgaagcgttggtgatactcgctagtgcctccgaccttctacttcgtgctaccgatggaatgctcgtcgatggtgaagcttgtactttgccacagcttgagcttctggaagtgaccgctcgggctgtccatcttatcatcgaatggggagattcaggtttatcagttgcagatggtctttcaaatctgctgaagtgccgtctatcaaccaccatccgctgcctttctcacccaagtgcacacgtgcgcgcactcagcatgtctgtcctccgcgacatcctgagcaacggatccgtgaaccccaacaagacaatccaaggggaacagcagcggaacggcatccagagcccgtcctaccggtgcctggccgcaggcatcatcaactggcaagcggacgtcgagaggtgcatagagtgggaagcccacagccgccgcgccactgggctgacgctcgccttcctcagtgccgcagcgaaggagctcggctgccctctcccgtcatgacaaggccattcctggatctgacatcggcttccaattgacggtcagtgctggcacagctgctgcagggtccgcgagtaggacggctctaatctctccatcacgtgttattatctggtgtttccataatgcgatttgatttcaatttggcgttagatgttgtacacgtgtatttaactgcttgagttgtacgtaatttgtatacttgtaactttgtttaataatatggctattactcaagaagcggaacatatcttatcctttttatatgctgctgctagatccgttcaacgtgagtgccatgcaaatgtccacgaaatgtttagtatttgttagggggaaaaggtctcggtggaaggtaaaataatttctaactgttattcaggataaatgatttaacgtggtttgaattattacaa

SEQ ID NO: 208110 - DNA, 4571 bp, Zea Mays
tttttctcgcctctcctcgctcctcgccatttctctctcttcccctccgcttcgcccaccgcccgctccgaaatctgcgcgccgacgccgccggctgcccgtggagagcctcgaattagagcgcgttccgtcgagaggttttcaagcaactatgtttgagtttggttgatatgatactcattcacgttggggatgcagaccccccctctgtgggggttgattgaagaagttaactgtacacttaggagaacttgtgtcctactgaaagtttcttggtttcgaggcaagtatgtcagattcaaatgtgaatgtcttactaagagtagggctttggtggcatagatggatgaactgattgtcaacttcaacaagttgttgattacaggtgctcttattggttattggatcgctgtgtgtaatttgtttctttccctttgagagcctttctagtttcttgggcaggctcttgagctaccaagcatgtcagattcaaatgtgaagtggattgatgggctccagttcacatcattgtactggcctccacccctcgatgcggagcagaagcaggcacaaattttggcatatgtcgagtactttggccagtttacagctgacaccgatcaattccctgaagacatagctcagctcattcaaagttcctatccatcaaaagaaaatcgcttggtagatgaagtattggcaacttttgttcttcatcatccggagcatggtcatgcagttgcacatccaattctttcacgcatcatagatgggacgctgtgctatgatagacatggtcccccattcagttccttcatctctttattcagccataattctgagcaagagtactcagagcagtgggccttggcctgtggagaaattcttagggtcttaactcactacaataggccaatattcaaagttgagcgccaacatactgaagctgaatgtagcagcacatctgatcaggcaacatctagtgattccacagataagagatctaataattctccaggaaatgaatctgactggaagccattgaggccactaaccccgtggatcactgacatattgctagccgcacctttgggcattcgaagtgactattttcgatggtgtggcggtgtaatgggaaaatatgctgctggtggagagttgaagcctccaactactgatgggctgttgccaatggagctggagttatattaagtgtctgtgatgaggaggtagctcgttatgagacagcaaatttaacagcagcagctgttcctgcgcttctgctacctccaccaacaacacccttggacgagcatttggtggctggcctgccccctcttgaaccatatgctcggttgttccatagatactatgcaattgctacaccaagtgctacacagaggttgctttttggtcttctggaagcaccaccatcatgggctccagatgcacttgatgcagcagtacaactagttgagctacttagagcagccgaagattatgcttctggcatgcggcttccaaaaaattggatgcatctgcatttcttgcgtgcgattggaactgcaatgtcaatgagagctggcattgctgctgatacagctgctgctttgcttttccgaatactttcccaaccaacgctgctttttccaccactgagacatgccgaaggagttgaagtacatcatgaaccactaggtggctatgtatcatcatataagaagcagttggaagttcctgcatctgaggccactatcgatgccactgcacaaggcattgcttctttgttgtgtgctcatggccctgatgttgagtggagaatatgtaccatctgggaagctgcctatggtttgctaccgctaagttcatcagcagttgatttgcctgaaattgttgtagctgccccgcttcagccacctacactgtcatggagcctgtacttaccattattaaaagtatttgagtatctacctcgtggcagtccatctgaagcatgccttatgaggatatttgtggcaacggttgaagctatacttaggagaacttttccttctgaaacatcagagcaatccagaaagccaagaagtcaatctaagaaccttgctgttgctgaacttcacacaatgatacattcactctttgttgaatcctgtgcctcaatggaccttgcctcccggttgctatttgtggtgttaactgtttgtgtcagtcatcaagctttgccagggggtagcaaaagaccaactggtagtgataaccattcccacgaggaagccactgagcattcaagattaacaaatggaagaagcagatgtaagaagagacaaggccctgttgctacgtttgattcatatgttctagctgcagtttgtgccttatcttgtgagctccagctgttccctttcattactaagaatggatcacattcaaatttaaaggattccatgaagattatcatatctggaaaaaacaatgggatgaataatgagctacacaacagcatcagctcagcaattcttcatactcgcagaattcttggcatcttggaagccgttttctccctgaagccatcatcagttggtacctcatggagctatagctcaaatgaaatagttgcagcagctatggttgctgctcatgtttctgagttatttcgtcggtccaggccatgccttaatgcactctctgcactaatgagatgcaagtgggatgctgagatttcgaccagggcatcatctctctaccatttgattgacttgcatggtaaaacagtttcctccattgtgaacaaagctgagcctcttgaagctcacctgacccttacaccagtaaagagggataatcaacatcaccgtgaggaaagcaataccagctcattggatagtgtcaagttggaaaacaagaatggttcaacatcacacaagaaaaacggtttctcaagaccactcttgaaatgtgcagaagaggtcctactgaatggcgatgttgcaagtacatctgggaaatccattgcaagcttacaggtggaagcatctgatttggcaaacttccttaccatggatcggaatgggggttaccgaggttcacaaactcttctaagatctgtattatcagagaaacaagagctgtgcttctctgttgtctcattgctctggcagaagctcatagcttctcctgaaatgcagatgtctgcagaaagtacatcagctcaccaaggatggaggaaggttgttgatgcactttgtgatgtcgtttcagcctcaccaaccaaggcatcagctgctatcgttctccaggtcaagatattgctatattgcacgtttggtcaaaactaaatttggtttaaagtttgttcgatttatttcaaaacaaattcaattttctttttctgattaatctatttcaaaacgaacattctctgtttttttttggtttctgacatctatttcaaaacacattttaactacaatgcctaggtggaatatggacctgtttcctagtcatatttcttgacgcttattttttttttcgcaggccgagaaggacttgcagccttggattgctagagatgacgaacaaggtcagaagatgtggagagtcaaccagcgtatagtgaagcttatagctgagcttatgaggaaccatgacagccctgaagcgttggtgatactcgctagtgcctccgaccttctacttcgtgctaccgatggaatgctcgtcgatggtgaagcttgtactttgccacagcttgagcttctggaagtgaccgctcgggctgtccatcttatcatcgaatggggagattcaggtttatcagttgcagatggtctttcaaatctgctgaagtgccgtctatcaaccaccatccgctgcctttctcacccaagtgcacacgtgcgcgcactcagcatgtctgtcctccgcgacatcctgagcaacggatccgtgaaccccaacaagacaatccaaggggaacagcagcggaacggcatccagagcccgtcctaccggtgcctggccgcaggcatcatcaactggcaagcggacgtcgagaggtgcatagagtgggaagcccacagccgccgcgccactgggctgacgctcgccttcctcagtgccgcagcgaaggagctcggctgccctctcccgtcatgacaaggccattcctggatctgacatcggcttccaattgacggtcagtgctggcacagctgctgcagggtccgcgagtaggacggctctaatctctccatcacgtgttattatctggtgtttccataatgcgatttgatttcaatttggcgttagatgttgtacacgtgtatttaactgcttgagttgtacgtaatttgtatacttgtaactttgtttaataatatggctattactcaagaagcggaacatatcttatcctttttatatgctgctgctagatccgttcaacgtgagtgccatgcaaatgtccacgaaatgtttagtatttgttagggggaaaaggtctcggtggaaggtaaaataatttctaactgttattcaggataaatgatttaacgtggtttgaattattacaa

SEQ ID NO: 208111 - DNA, 4523 bp, Zea Mays
gaaaaaatctttttctcgcctctcctcgctcctcgccatttctctctcttcccctccgcttcgcccaccgcccgctccgaaatctgcgcgccgacgccgccggctgcccgtggagagcctcgaattagagcgcgttccgtcgagaggttttcaagcaactatgtttgagtttggttgatatgatactcattcacgttggggatgcagaccccccctctgtgggggttgattgaagaagttaactgtacacttaggagaacttgtgtcctactgaaagtttcttggtttcgaggtgctcttattggttattggatcgctgtgtgtaatttgtttctttccctttgagagcctttctagtttcttgggcaggctcttgagctaccaagcatgtcagattcaaatgtgaagtggattgatgggctccagttcacatcattgtactggcctccacccctcgatgcggagcagaagcaggcacaaattttggcatatgtcgagtactttggccagtttacagctgacaccgatcaattccctgaagacatagctcagctcattcaaagttcctatccatcaaaagaaaatcgcttggtagatgaagtattggcaacttttgttcttcatcatccggagcatggtcatgcagttgcacatccaattctttcacgcatcatagatgggacgctgtgctatgatagacatggtcccccattcagttccttcatctctttattcagccataattctgagcaagagtactcagagcagtgggccttggcctgtggagaaattcttagggtcttaactcactacaataggccaatattcaaagttgagcgccaacatactgaagctgaatgtagcagcacatctgatcaggcaacatctagtgattccacagataagagatctaataattctccaggaaatgaatctgactggaagccattgaggccactaaccccgtggatcactgacatattgctagccgcacctttgggcattcgaagtgactattttcgatggtgtggcggtgtaatgggaaaatatgctgctggtggagagttgaagcctccaactactgccgaggatctgggaagcacccacagcttatgccttccacccccagatgggctgttgccaatggagctggagttatattaagtgtctgtgatgaggaggtagctcgttatgagacagcaaatttaacagcagcagctgttcctgcgcttctgctacctccaccaacaacacccttggacgagcatttggtggctggcctgccccctcttgaaccatatgctcggttgttccatagatactatgcaattgctacaccaagtgctacacagaggttgctttttggtcttctggaagcaccaccatcatgggctccagatgcacttgatgcagcagtacaactagttgagctacttagagcagccgaagattatgcttctggcatgcggcttccaaaaaattggatgcatctgcatttcttgcgtgcgattggaactgcaatgtcaatgagagctggcattgctgctgatacagctgctgctttgcttttccgaatactttcccaaccaacgctgctttttccaccactgagacatgccgaaggagttgaagtacatcatgaaccactaggtggctatgtatcatcatataagaagcagttggaagttcctgcatctgaggccactatcgatgccactgcacaaggcattgcttctttgttgtgtgctcatggccctgatgttgagtggagaatatgtaccatctgggaagctgcctatggtttgctaccgctaagttcatcagcagttgatttgcctgaaattgttgtagctgccccgcttcagccacctacactgtcatggagcctgtacttaccattattaaaagtatttgagtatctacctcgtggcagtccatctgaagcatgccttatgaggatatttgtggcaacggttgaagctatacttaggagaacttttccttctgaaacatcagagcaatccagaaagccaagaagtcaatctaagaaccttgctgttgctgaacttcacacaatgatacattcactctttgttgaatcctgtgcctcaatggaccttgcctcccggttgctatttgtggtgttaactgtttgtgtcagtcatcaagctttgccagggggtagcaaaagaccaactggtagtgataaccattcccacgaggaagccactgagcattcaagattaacaaatggaagaagcagatgtaagaagagacaaggccctgttgctacgtttgattcatatgttctagctgcagtttgtgccttatcttgtgagctccagctgttccctttcattactaagaatggatcacattcaaatttaaaggattccatgaagattatcatatctggaaaaaacaatgggatgaataatgagctacacaacagcatcagctcagcaattcttcatactcgcagaattcttggcatcttggaagccgttttctccctgaagccatcatcagttggtacctcatggagctatagctcaaatgaaatagttgcagcagctatggttgctgctcatgtttctgagttatttcgtcggtccaggccatgccttaatgcactctctgcactaatgagatgcaagtgggatgctgagatttcgaccagggcatcatctctctaccatttgattgacttgcatggtaaaacagtttcctccattgtgaacaaagctgagcctcttgaagctcacctgacccttacaccagtaaagagggataatcaacatcaccgtgaggaaagcaataccagctcattggatagtgtcaagttggaaaacaagaatggttcaacatcacacaagaaaaacggtttctcaagaccactcttgaaatgtgcagaagaggtcctactgaatggcgatgttgcaagtacatctgggaaatccattgcaagcttacaggtggaagcatctgatttggcaaacttccttaccatggatcggaatgggggttaccgaggttcacaaactcttctaagatctgtattatcagagaaacaagagctgtgcttctctgttgtctcattgctctggcagaagctcatagcttctcctgaaatgcagatgtctgcagaaagtacatcagctcaccaaggatggaggaaggttgttgatgcactttgtgatgtcgtttcagcctcaccaaccaaggcatcagctgctatcgttctccaggtcaagatattgctatattgcacgtttggtcaaaactaaatttggtttaaagtttgttcgatttatttcaaaacaaattcaattttctttttctgattaatctatttcaaaacgaacattctctgtttttttttggtttctgacatctatttcaaaacacattttaactacaatgcctaggtggaatatggacctgtttcctagtcatatttcttgacgcttattttttttttcgcaggccgagaaggacttgcagccttggattgctagagatgacgaacaaggtcagaagatgtggagagtcaaccagcgtatagtgaagcttatagctgagcttatgaggaaccatgacagccctgaagcgttggtgatactcgctagtgcctccgaccttctacttcgtgctaccgatggaatgctcgtcgatggtgaagcttgtactttgccacagcttgagcttctggaagtgaccgctcgggctgtccatcttatcatcgaatggggagattcaggtttatcagttgcagatggtctttcaaatctgctgaagtgccgtctatcaaccaccatccgctgcctttctcacccaagtgcacacgtgcgcgcactcagcatgtctgtcctccgcgacatcctgagcaacggatccgtgaaccccaacaagacaatccaaggggaacagcagcggaacggcatccagagcccgtcctaccggtgcctggccgcaggcatcatcaactggcaagcggacgtcgagaggtgcatagagtgggaagcccacagccgccgcgccactgggctgacgctcgccttcctcagtgccgcagcgaaggagctcggctgccctctcccgtcatgacaaggccattcctggatctgacatcggcttccaattgacggtcagtgctggcacagctgctgcagggtccgcgagtaggacggctctaatctctccatcacgtgttattatctggtgtttccataatgcgatttgatttcaatttggcgttagatgttgtacacgtgtatttaactgcttgagttgtacgtaatttgtatacttgtaactttgtttaataatatggctattactcaagaagcggaacatatcttatcctttttatatgctgctgctagatccgttcaacgtgagtgccatgcaaatgtccacgaaatgtttagtatttgttagggggaaaaggtctcggtggaaggtaaaataatttctaactgttattcaggataaatgatttaacgtggtttgaattattacaa

SEQ ID NO: 208112 - DNA, 4452 bp, Zea Mays
cccgcgtccacctgtcggtgactgcagccatccgcgtggggcctccacctgtagcgcgcgggtgaaataacgcggccgcaccaccaccacgccctgcatcgcggaaaaaatctttttctcgcctctcctcgctcctcgccatttctctctcttcccctccgcttcgcccaccgcccgctccgaaatctgcgcgccgacgccgccggctgcccgtggagagcctcgaattagagcgcgttccgtcgagaggttttcaagcaactatgtttgagtttggttgatatgatactcattcacgttggggatgcagaccccccctctgtgggggttgattgaagaagttaactgtacacttaggagaacttgtgtcctactgaaagtttcttggtttcgaggctcttgagctaccaagcatgtcagattcaaatgtgaagtggattgatgggctccagttcacatcattgtactggcctccacccctcgatgcggagcagaagcaggcacaaattttggcatatgtcgagtactttggccagtttacagctgacaccgatcaattccctgaagacatagctcagctcattcaaagttcctatccatcaaaagaaaatcgcttggtagatgaagtattggcaacttttgttcttcatcatccggagcatggtcatgcagttgcacatccaattctttcacgcatcatagatgggacgctgtgctatgatagacatggtcccccattcagttccttcatctctttattcagccataattctgagcaagagtactcagagcagtgggccttggcctgtggagaaattcttagggtcttaactcactacaataggccaatattcaaagttgagcgccaacatactgaagctgaatgtagcagcacatctgatcaggcaacatctagtgattccacagataagagatctaataattctccaggaaatgaatctgactggaagccattgaggccactaaccccgtggatcactgacatattgctagccgcacctttgggcattcgaagtgactattttcgatggtgtggcggtgtaatgggaaaatatgctgctggtggagagttgaagcctccaactactgcttgcagccgaggatctgggaagcacccacagcttatgccttccacccccagatgggctgttgccaatggagctggagttatattaagtgtctgtgatgaggaggtagctcgttatgagacagcaaatttaacagcagcagctgttcctgcgcttctgctacctccaccaacaacacccttggacgagcatttggtggctggcctgccccctcttgaaccatatgctcggttgttccatagatactatgcaattgctacaccaagtgctacacagaggttgctttttggtcttctggaagcaccaccatcatgggctccagatgcacttgatgcagcagtacaactagttgagctacttagagcagccgaagattatgcttctggcatgcggcttccaaaaaattggatgcatctgcatttcttgcgtgcgattggaactgcaatgtcaatgagagctggcattgctgctgatacagctgctgctttgcttttccgaatactttcccaaccaacgctgctttttccaccactgagacatgccgaaggagttgaagtacatcatgaaccactaggtggctatgtatcatcatataagaagcagttggaagttcctgcatctgaggccactatcgatgccactgcacaaggcattgcttctttgttgtgtgctcatggccctgatgttgagtggagaatatgtaccatctgggaagctgcctatggtttgctaccgctaagttcatcagcagttgatttgcctgaaattgttgtagctgccccgcttcagccacctacactgtcatggagcctgtacttaccattattaaaagtatttgagtatctacctcgtggcagtccatctgaagcatgccttatgaggatatttgtggcaacggttgaagctatacttaggagaacttttccttctgaaacatcagagcaatccagaaagccaagaagtcaatctaagaaccttgctgttgctgaacttcacacaatgatacattcactctttgttgaatcctgtgcctcaatggaccttgcctcccggttgctatttgtggtgttaactgtttgtgtcagtcatcaagctttgccagggggtagcaaaagaccaactggtagtgataaccattcccacgaggaagccactgagcattcaagattaacaaatggaagaagcagatgtaagaagagacaaggccctgttgctacgtttgattcatatgttctagctgcagtttgtgccttatcttgtgagctccagctgttccctttcattactaagaatggatcacattcaaatttaaaggattccatgaagattatcatatctggaaaaaacaatgggatgaataatgagctacacaacagcatcagctcagcaattcttcatactcgcagaattcttggcatcttggaagccgttttctccctgaagccatcatcagttggtacctcatggagctatagctcaaatgaaatagttgcagcagctatggttgctgctcatgtttctgagttatttcgtcggtccaggccatgccttaatgcactctctgcactaatgagatgcaagtgggatgctgagatttcgaccagggcatcatctctctaccatttgattgacttgcatggtaaaacagtttcctccattgtgaacaaagctgagcctcttgaagctcacctgacccttacaccagtaaagagggataatcaacatcaccgtgaggaaagcaataccagctcattggatagtgtcaagttggaaaacaagaatggttcaacatcacacaagaaaaacggtttctcaagaccactcttgaaatgtgcagaagaggtcctactgaatggcgatgttgcaagtacatctgggaaatccattgcaagcttacaggtggaagcatctgatttggcaaacttccttaccatggatcggaatgggggttaccgagatgtctgcagaaagtacatcagctcaccaaggatggaggaaggttgttgatgcactttgtgatgtcgtttcagcctcaccaaccaaggcatcagctgctatcgttctccaggtcaagatattgctatattgcacgtttggtcaaaactaaatttggtttaaagtttgttcgatttatttcaaaacaaattcaattttctttttctgattaatctatttcaaaacgaacattctctgtttttttttggtttctgacatctatttcaaaacacattttaactacaatgcctaggtggaatatggacctgtttcctagtcatatttcttgacgcttattttttttttcgcaggccgagaaggacttgcagccttggattgctagagatgacgaacaaggtcagaagatgtggagagtcaaccagcgtatagtgaagcttatagctgagcttatgaggaaccatgacagccctgaagcgttggtgatactcgctagtgcctccgaccttctacttcgtgctaccgatggaatgctcgtcgatggtgaagcttgtactttgccacagcttgagcttctggaagtgaccgctcgggctgtccatcttatcatcgaatggggagattcaggtttatcagttgcagatggtctttcaaatctgctgaagtgccgtctatcaaccaccatccgctgcctttctcacccaagtgcacacgtgcgcgcactcagcatgtctgtcctccgcgacatcctgagcaacggatccgtgaaccccaacaagacaatccaaggggaacagcagcggaacggcatccagagcccgtcctaccggtgcctggccgcaggcatcatcaactggcaagcggacgtcgagaggtgcatagagtgggaagcccacagccgccgcgccactgggctgacgctcgccttcctcagtgccgcagcgaaggagctcggctgccctctcccgtcatgacaaggccattcctggatctgacatcggcttccaattgacggtcagtgctggcacagctgctgcagggtccgcgagtaggacggctctaatctctccatcacgtgttattatctggtgtttccataatgcgatttgatttcaatttggcgttagatgttgtacacgtgtatttaactgcttgagttgtacgtaatttgtatacttgtaactttgtttaataatatggctattactcaagaagcggaacatatcttatcctttttatatgctgctgctagatccgttcaacgtgagtgccatgcaaatgtccacgaaatgtttagtatttgttagggggaaaaggtctcggtggaaggtaaaataatttctaactgttattcaggataaatgatttaacgtggtttgaattattacaa

SEQ ID NO: 208113 - DNA, 2031 bp, Zea Mays
ctgaggcaaatcaaaatgcgatgtcactgttgtgcacatctgagtttgaaggccaattcacaacaaaaccctagctactgcttcgtctgccgaattccccctccgctcgcttcgcacgccgcccgtcgccgcggcggcgtctgcgattgtccctcccgctgcaaggagcacatgcttctcgccgcgccgttagcccgccgccgccaccaccggttcaccttcagctatgtcttctcaggtcgacaggcgcagccagtccgccgggaagcgcgcccgcaccgacggcagccggcgtgaggacgactgggtttgccccagctgcaagaacgtcaacttcgccttccgcaccacttgcaacatgcgcagctgcaaccagtccaggccagcagatcacacgaaggccatgcaaaccccgcctcactatcccacgtcagggggttacatgggccctgggacgccaccatcgatgtaccttggtgggggcgctcccccatatggatcctcaatgtttaatgggcctgcggtgacacgctatggtattccgcaatttcctgggggttctgcgtattcatatggatatggtggtcccataccaatggggagcccctacgggccaatgcaaattgctgggccaactccatactctggtggaactatgatgacagcaggtggaatgtatggaattcccatggacaggtatgggccaatacctgctggtcctggtccaatgggcacaagggctggctcatattctgatgaaggttctcagaagaagcctgcaggagctggccgtgataatgattgggagtgtccaaattgccataacatcaactttggctttcgcacagtctgtaatatgagaaagtgcaacacacctagacctgcaaaccagggatctaagtctgatggtttaaggggctcaaaagcaaagatgccagagggcagttggaagtgtgagcagtgcaataacataaattatcctttccgaacaaaatgcaatcgtccccaatgtggagcagaaaagccatcacaaacaaacaatgtgaatggttcagcgacagatcaggacaatcagtttttgccatgtaacattacgaagcttttatcaaagctacgacttctgcatgaatttcaagacagcagtgagcagacggatcttccttgtcctactgctggatcaccgacattgcggatgtcagcgctcagtgaattgcagaacagtctttcaaactgatgcgctaccatttcgtattggaaaacaaggtgaggaattcgcaccaggtgggtatacttgtgtctcgactctcgacagccctgatttggaatcgtttcagtatgtgcctggagtgattcttgtcttattttcattcttctctttttttttctgttgattatgttttctgcttagctttgttcttacacatactatcataatgtaaatttgtcgttccatttcaaaattgtacgggagatgattcttcaaatgctatgcaattaacatgcccttcccttccatattgtgagggcttatatgtttcttgatctgttggctgcggtttgtggtgcccactgttacgattccaatttctcctgacttctcgacaatacaggacaagcggttcggcccagaagtgttttagtactcgagctgcatgcaggcccatttagcacgatctggctatgacttcctacatggcccagaagccgtcgtctactgatcgctccagcttcttcttccttcgtcgccgctgggctggtaacattcattcgcggaccatcctccctcgatcgaagttagcgaggccttgccactgcacctcatcgcttggccaccctctgttctccgttgcggggcggactataatttccgctacaaagtatttacatgacatttgtggcaccgtcaatgctctactcatattttcaattttttaaaattataacgatacatgacttttgtttttttccctatgtattaagagatacagctatgtctatatgcatacatagtaaaaatggtacgtagattct

SEQ ID NO: 208114 - DNA, 1014 bp, Zea Mays
ctctgtttatggcgaactttttatcaacgtctctcctgccaagtgctggagcatggtccgtgagaggctgaatatggaaatacggaggcaactcagtacgggaagagctaatcttcctgcactacagccaccgggatcagttgatggttttgaaatgttcgggttgctgtcaccggcaatagttcaggcaatcgaggcacgggatagagatcgcatctgcacagagtactggagatccaggcctcatgttgtcactgaagatcgtgcgacggcgccacctcaggctcagggtcctctgcatgcgctgaggggtctattccagcgagccaaccgcaatgagctgctagccctacggagtctactggtgagcaacatcagcccggacgacttctccaggcggcaggctacccaaatcctcgacgaggagatcgccaagcagtggcgctgacaggcgtaaatacaactctgtaatctcttgatggcatgacgggaccaagcagttttcgaccctgacgagagagcggctccttccgttgccccccgtgcccattctttgtattgttgtgtccatgctccatgccataagatcttgtccccatttggatgcgatcgaatgaccgacgacggctcatcaactgaccagcgtacataccgtctgtctggaaactcttgtggtgttgtaggtttagttatttttcttttaaacgaaatatttaaccttcttttttagtgaggctgaaacgcaggctcatgagacctgagttttttacatgaaaggttgtgtacatcagaaatgtgcagggcctgttgacactactagcagataggcgtgatttttgtgccgagttggtcagagtcgaacagtccatgtgcttcaggtactcatcctgcatggttgactgggagttggtacttgcaagctgctgttacagaccagtagtccaatgaaccccatctgactggtcgctgccaagtgggccaacttttcactctgaccagtctctgaatattctg

SEQ ID NO: 208115 - DNA, 6691 bp, Zea Mays
atgcaggtcggcgacgacagactaggccgaggtgggtcgcgccagggcgtcggtgtcagcggttggtgcttagtgcctggtggctgccggccaggccgatgcggggcgagacagggaagagatgggggaggaaagaggcacctaggtaaagaaaggaggcgccagggggccgcggcggcgggcgaccgaccatggctgacggcggccaggaattttattaaagcgaagagtgacattgcttctgaggatcttcaggctcttgtaaagcttggactggaggtatttcatgcgtcacataacaagtttgttgtccagattaagtggggaggtctgctcataaggcttttaagaaagcatgggaagaggctttcacttgttgtgcaatggagaccactttatgagacgttgataaggactcatttcaagagaaacatgggccctgagggctggaaagtaaggaagcaacactttgagactgtgacctctttagtgtgtgcatctaggaatttctttactgaaggtgtggctgctgaaatttggtcagagttcaggcccttgctggaaaatccatggcataactcagcatttgaaggtgttggatttctcaggctgtttcttccagcgaactcgaggaatcaggatcactttacaactgattggattagaaattgtctggacatatgggattctgtcacaaattgtaacttctgggacatccaatgggcttccatcatagcacgttgtataaaaaattcaagatctgtgaactgggatgcttttcttcccttgttattcacaagatacttgaacatgtttgaggttcctatatcaagtggcaatggttcatacccctttccagtggaggttcctgggaacacaagatttttattttccagtaagaccagaacactttccaaggcaattgcaaagtctgttgtataccttttgaagcctaaaagtttagcatttgagtattttgagaagctcattaattttttggaacagttctatcatccgtcaaatgggggtcgttggacctactcattggaacgcttcctgcgctatcttgttgtttactttgagaaacgccttcagcatgaacaatttgttatggcagttgaggaccatgatcaatcttatctgggaaaggaagaaaggtctgtttttgtcaaagctatcttgaaattattggatcgtggtcagtacagcaaggataattctcttgctgaaacagtttccgttgcaacttcgatcctgtcttatattgaaccaaccctcgtgcttcagtttgttgcaaaaaacttccaacgagccttagagacaactacagctacccatcagttaaagaacgctgtcacatctgttgcattttctggacgtgctcttcttctatgttctttatgttcatctcagaatgatgatagcagtgttgttgattcattcagtgatcttgttgtcgcttccctttcaaatgcgttacttggcatggatgccaatgatccacctaaaactattgctacaatgcagttaattgggtctatcttttcaaatctagctgcagttagtgatgatgtgcctatattgctccaatctactactctatcgaactggctagatgaattcttttcccgactgttttctgtgcttcataatctggaatcaagtagtcccattaatgagggttaccaaagctcattcatgtcagggacttttcttgttgacagtccatattacttttgtatgcttgaaattcttctagggaagttatcaaaacccttatttaatcagtccctgaagagaattgccaagttcgttaatgcaaatatcctccctggtgctacttcagaagttgggcttctttgttgtgcctgtgttcattcttatcctgaggaggcttcagtctaccttgtaaagccaatcttagagaccatcatgtcatcctttgaggggactccaaccactggttatgtaggaagagtagttgcagataaagcatctaccaaggctgcactttctcctgctctggaaacagcaatagattactatctgagggttttggccatatccatcagttatgccggtcctaccttactcaattataaggaggaactaaatcacataataacatctgcgttccagtccccttcttggaaggttaatggagctggggatcatctccttcgctctctgctaggaaatctggtttcttattacccaattgatcagtacaagccattcacttgtcagcctattggaaatattattgaaccatgggggtgttcgaaagctcatcaggatagggaggatgaaatgcttaatttccctccaaagtggcatgatccaagtcatgatgaactctcttttgcaaatgaattactacaacttcatttccagtcagctttagaagatcttttgactatttgtcagacaaaagttcattctgacacaggagatgagaaggagcacctaaaaataaccctgttacgcattcattctgcattgcatggtgtaatgtcttgtttaccagaaattcgcccgtcatataaagatgggaggtccctggaagtggagtcggctttcttcatagcaggatctgctggtagcactgttggaagctcagaaatgcgtgaaaaggctgcagaatttgtgcacatagcttgcaggtacttattaaaggaaagaactgatgacagtattcttctatcccttgttgtgcgtgtcattgatgctttggtaaactatggaagcttggaataccaagaatggtcaagccatgttcaagcttggaaactagaatctgcttccataattgagcctccatgcaacttcattgttccatttcatgctcaaggaaaaaagagacctagatgggcacttgttgacaaagcaaacttgcatagtacatggaggtgttcacaatcatcatatcacagatacagaatgaatgcagatgtttcgccatctgtccccatgattaatttgatgaatgatctcttagatctctcactacacaactatgaaactgttcgatcgtatgctggaagatcgcttacaaaattgttgaaacgttggccttctctaatttctaattgtgttctcacactcacgggaaatttgcgtgacccaaaagctcctgaacatgttgttcttggttcttgcagcattctgatctcacagactgttttaagacacttgaccactgattctgtttccctctcttcctttatcatgggaattctggaaagctctcatcatgaatcgttgaagtgtcagaaagctattactgagctctttgtaacatataatatacgtttctctggaatatcaaggagcttctttaaaactcctgaaaatcaagctgacaagccaggatttctcagtctaatttctcaaattaatgctttgggctttgagactaatggactacattggaggagaactgcgcatcattaaattaagaagaaagaaggtcccagagaccaaaacatcaagagttacaaggacccattaatgaggctgaaaacacagaaaaaattgtctaatatagatcgagctatctatcaacggagatcattgcctatttgagatcggtctatccatcctagccatataggcacgctatacagtgattctaacaatcacaacagagcaacacaccaccagaacagaggaagttgatctggtggcccttctccaagtctagatgcgcacatacctctactgaatcagttgcaggcgcatgaagatggacacccgcagcaaatgcgtccagctgtcttcctatattatagaagaacagtgtgatcctgatctgatatagtcgtagcctgatatacaagcacattctattctaattcttgcagctgtgtaatttcaggtacaatttgatggccaacagagtattactattactaattttggcatccagaagcgaatctggcatatattcacaaatgcttgcaaaaattgctggtcatttcttaagaaatttaaagagtcaactgccccactcaagaatgcttgctatatctgctttgaacacattattgcaaggatcacctcataagacatctgcacaaaattctaagcaaccaatagatcaccctgaagattgcaatatttcatcaacagaagagattttgaatgagataatccgggaggaaggattcatgaatgagacactgaacagtttatctcatgttcatattatttccgacaatgatggttcgtcaaaagcgagttatggggcatcatcttttcaaagcggatctgacaaagcaataacttacttctattttgatttctctgcctcatggccacgtactcctagttggatttctttactgcgtggtcacacattctattccagttttgctaggatattcaaaaggcttatacagcaatgtggaatgccagtaatctcttctcttcagagtacactagaagagtttttaatttcaaaagagagaccaaggcaatgtgtcgctgctgaagcgatggctgggatgctgcactctgatatcattgggaatctggaatgtgagaacaactggttgatggcccagttgcataagattatgttagcaccatctgtggagtcagctcctgaatgggcagcttgtattcgatatgctgttacaggaaaagaaagagctggaactcgtgctcctgttctcaggcaaaaagtattagaatgcttatgtactcctcttcctcattccatggcaactagcgtacttgcgaagagatattcttttctgtccgttgctctaatagaaatttctccacccaaaatgtccccagcagagaagcaataccatgttaaaattcttgatgaactacttgacagcatgaaccattcatctgctcaggtaagagaagcaattggtattgccatgtgtgttacaacctcaaatatgagactttctgggttatttggcactggatgttcaccgcaaggccttcatggggatgtaagcatgattgaacaaacaggaaataaatattggtctgaacgtttgacagatggagctaatgaattagccgtaagtatacaaaatagtactcaatctaagcaactagaatcaacatcagattcggctgaagatagcatggatgatagagagcaggctgatgctaaaaggatggaaacgatatttcattttatgatcgcatctttgaagtctgggcgatcttctgttctactggacactattattaggcttgtgtacccaattctctcactacaggaaacatcaaataaagatttatcattgcttgctaagtcagctttcgagttgctgaaatggaggattctacatcggccttttcttgaaactgctattacgtctattcttcctttagtcagtgatcctaactggcgtaccagatctgcactgttatcgtatctcaggacctttacctacaggcacacattcatactttctggctcagagaaatcacaaatctggcaaacaatagaaaaattacttgtggacaaccaagttgaggttagggagcatgctgctggtgttcttgcaagcttaatgaagggtatagatgaagatctatcaaaggatttccgtgaacggtcatatgcacaagcccagcatatttttgttgcacggagaagaaatttgaagttttctgttggtaccatccatggtgcagtccttgctttgacagcttcggtcctttctgttccatacgacatgcctagctggcttccttctaatgtctcgctacttgctcgcttcatccgggagcctccccctataagatcaacagtcacgaaagctgttgcagaatttaagcgcacccatgctgacacatggagcatccagaaggacgcattcactgaagacgaactggaggttctccgtgatacatcttcctcctcgtcgtacttcgcttagattaaaatttcaaaggccataggatattctctggtactggtgttgtgtatatgaatttataactgttgaagtgtcggtgtttttcataaagtatatccttgtacgtacctagttttatttcatcaacagatgccttcgtacaactgagatgaagttatgcagtctactgtataccgtctggacatagcggaagcattatggcatgtgggatccttgcgtgggctgagaaattgttaacatccaaatcttttgcccagtcaacgacgtgaataagatgctgcctagtttaaccgcataatgcatctctggcaactctaatagcagagtcaacgggctagatataaacttgcccatgttcattagaagcaagaaagaatcagccattgacattaagaagtacatgagcacccccgatgcaaacgtctatagccctaatcatacttgtttcttgcttcctccattttacaatacttgttcataatcttatcaaaatgtcacataatatctcttcatgaagatattagcacggtagttcatgtagtattttcattcttgacctaatcaaatgctttcgtagatggatggtttaaagtatctcctagaatttgtgcctagctttgtttcttccataatcagttgccacatcgtttaaacctaacaactccatctatcccaaaataaaccaacttgtagggttctactagggtcgttctatattaaattattttagatttcatcaaatttataaaaagataacgtaaataattatgacacca

SEQ ID NO: 208116 - DNA, 6524 bp, Zea Mays
ctctcgttcgatacaaattaatgaattataatggtatgtttataatatcaacatcaggaatagtaatgttatgatttgaattaaccttttggccaactttaccccgctactgtccccttccacacgaggccgtgcgtcaacgataacagcaccggatggtcgtgtggagcaccggccgccctagccccaggtctctctcccttgggtcgtcgtcgtcgtcgtcgtctccacggctacacccacatcttgtcttggaggcgaagaaagaaatcggccaaagggcatccacggcggcggcagtgcgagggtccgagggaagattggaggatgcacctctacaacgcgtggctaccgccaccggtgtcgaccgcggcgcgtggggaggcagctgcctttgcgggcgctgtgcggaccgccgcggacgcgtggctgcccggggactccgactccgcctacgccacactcaagtggatctccgtgttcgacctttttattaaagcgaagagtgacattgcttctgaggatcttcaggctcttgtaaagcttggactggaggtatttcatgcgtcacataacaagtttgttgtccagattaagtggggaggtctgctcataaggcttttaagaaagcatgggaagaggctttcacttgttgtgcaatggagaccactttatgagacgttgataaggactcatttcaagagaaacatgggccctgagggctggaaagtaaggaagcaacactttgagactgtgacctctttagtgtgtgcatctaggaatttctttactgaaggtgtggctgctgaaatttggtcagagttcaggcccttgctggaaaatccatggcataactcagcatttgaaggtgttggatttctcaggctgtttcttccagcgaactcgaggaatcaggatcactttacaactgattggattagaaattgtctggacatatgggattctgtcacaaattgtaacttctgggacatccaatgggcttccatcatagcacgttgtataaaaaattcaagatctgtgaactgggatgcttttcttcccttgttattcacaagatacttgaacatgtttgaggttcctatatcaagtggcaatggttcatacccctttccagtggaggttcctgggaacacaagatttttattttccagtaagaccagaacactttccaaggcaattgcaaagtctgttgtataccttttgaagcctaaaagtttagcatttgagtattttgagaagctcattaattttttggaacagttctatcatccgtcaaatgggggtcgttggacctactcattggaacgcttcctgcgctatcttgttgtttactttgagaaacgccttcagcatgaacaatttgttatggcagttgaggaccatgatcaatcttatctgggaaaggaagaaaggtctgtttttgtcaaagctatcttgaaattattggatcgtggtcagtacagcaaggataattctcttgctgaaacagtttccgttgcaacttcgatcctgtcttatattgaaccaaccctcgtgcttcagtttgttgcaaaaaacttccaacgagccttagagacaactacagctacccatcagttaaagaacgctgtcacatctgttgcattttctggacgtgctcttcttctatgttctttatgttcatctcagaatgatgatagcagtgttgttgattcattcagtgatcttgttgtcgcttccctttcaaatgcgttacttggcatggatgccaatgatccacctaaaactattgctacaatgcagttaattgggtctatcttttcaaatctagctgcagttagtgatgatgtgcctatattgctccaatctactactctatcgaactggctagatgaattcttttcccgactgttttctgtgcttcataatctggaatcaagtagtcccattaatgagggttaccaaagctcattcatgtcagggacttttcttgttgacagtccatattacttttgtatgcttgaaattcttctagggaagttatcaaaacccttatttaatcagtccctgaagagaattgccaagttcgttaatgcaaatatcctccctggtgctacttcagaagttgggcttctttgttgtgcctgtgttcattcttatcctgaggaggcttcagtctaccttgtaaagccaatcttagagaccatcatgtcatcctttgaggggactccaaccactggttatgtaggaagagtagttgcagataaagcatctaccaaggctgcactttctcctgctctggaaacagcaatagattactatctgagggttttggccatatccatcagttatgccggtcctaccttactcaattataaggaggaactaaatcacataataacatctgcgttccagtccccttcttggaaggttaatggagctggggatcatctccttcgctctctgctaggaaatctggtttcttattacccaattgatcagtacaagccattcacttgtcagcctattggaaatattattgaaccatgggggtgttcgaaagctcatcaggatagggaggatgaaatgcttaatttccctccaaagtggcatgatccaagtcatgatgaactctcttttgcaaatgaattactacaacttcatttccagtcagctttagaagatcttttgactatttgtcagacaaaagttcattctgacacaggagatgagaaggagcacctaaaaataaccctgttacgcattcattctgcattgcatggtgtaatgtcttgtttaccagaaattcgcccgtcatataaagatgggaggtccctggaagtggagtcggctttcttcatagcaggatctgctggtagcactgttggaagctcagaaatgcgtgaaaaggctgcagaatttgtgcacatagcttgcaggtacttattaaaggaaagaactgatgacagtattcttctatcccttgttgtgcgtgtcattgatgctttggtaaactatggaagcttggaataccaagaatggtcaagccatgttcaagcttggaaactagaatctgcttccataattgagcctccatgcaacttcattgttccatttcatgctcaaggaaaaaagagacctagatgggcacttgttgacaaagcaaacttgcatagtacatggaggtgttcacaatcatcatatcacagatacagaatgaatgcagatgtttcgccatctgtccccatgattaatttgatgaatgatctcttagatctctcactacacaactatgaaactgttcgatcgtatgctggaagatcgcttacaaaattgttgaaacgttggccttctctaatttctaattgtgttctcacactcacgggaaatttgcgtgacccaaaagctcctgaacatgttgttcttggttcttgcagcattctgatctcacagactgttttaagacacttgaccactgattctgtttccctctcttcctttatcatgggaattctggaaagctctcatcatgaatcgttgaagtgtcagaaagctattactgagctctttgtaacatataatatacgtttctctggaatatcaaggagcttctttaaaactcctgaaaatcaagctgacaagccaggatttctcagtctaatttctcaaattaatgctttgggctttgagactaatggactacattggaggtacaatttgatggccaacagagtattactattactaattttggcatccagaagcgaatctggcatatattcacaaatgcttgcaaaaattgctggtcatttcttaagaaatttaaagagtcaactgccccactcaagaatgcttgctatatctgctttgaacacattattgcaaggatcacctcataagacatctgcacaaaattctaagcaaccaatagatcaccctgaagattgcaatatttcatcaacagaagagattttgaatgagataatccgggaggaaggattcatgaatgagacactgaacagtttatctcatgttcatattatttccgacaatgatggttcgtcaaaagcgagttatggggcatcatcttttcaaagcggatctgacaaagcaataacttacttctattttgatttctctgcctcatggccacgtactcctagttggatttctttactgcgtggtcacacattctattccagttttgctaggatattcaaaaggcttatacagcaatgtggaatgccagtaatctcttctcttcagagtacactagaagagtttttaatttcaaaagagagaccaaggcaatgtgtcgctgctgaagcgatggctgggatgctgcactctgatatcattgggaatctggaatgtgagaacaactggttgatggcccagttgcataagattatgttagcaccatctgtggagtcagctcctgaatgggcagcttgtattcgatatgctgttacaggaaaagaaagagctggaactcgtgctcctgttctcaggcaaaaagtattagaatgcttatgtactcctcttcctcattccatggcaactagcgtacttgcgaagagatattcttttctgtccgttgctctaatagaaatttctccacccaaaatgtccccagcagagaagcaataccatgttaaaattcttgatgaactacttgacagcatgaaccattcatctgctcaggtaagagaagcaattggtattgccatgtgtgttacaacctcaaatatgagactttctgggttatttggcactggatgttcaccgcaaggccttcatggggatgtaagcatgattgaacaaacaggaaataaatattggtctgaacgtttgacagatggagctaatgaattagccgtaagtatacaaaatagtactcaatctaagcaactagaatcaacatcagattcggctgaagatagcatggatgatagagagcaggctgatgctaaaaggatggaaacgatatttcattttatgatcgcatctttgaagtctgggcgatcttctgttctactggacactattattaggcttgtgtacccaattctctcactacaggaaacatcaaataaagatttatcattgcttgctaagtcagctttcgagttgctgaaatggaggattctacatcggccttttcttgaaactgctattacgtctattcttcctttagtcagtgatcctaactggcgtaccagatctgcactgttatcgtatctcaggacctttacctacaggcacacattcatactttctggctcagagaaatcacaaatctggcaaacaatagaaaaattacttgtggacaaccaagttgaggttagggagcatgctgctggtgttcttgcaagcttaatgaagggtatagatgaagatctatcaaaggatttccgtgaacggtcatatgcacaagcccagcatatttttgttgcacggagaagaaatttgaagttttctgttggtaccatccatggtgcagtccttgctttgacagcttcggtcctttctgttccatacgacatgcctagctggcttccttctaatgtctcgctacttgctcgcttcatccgggagcctccccctataagatcaacagtcacgaaagctgttgcagaatttaagcgcacccatgctgacacatggagcatccagaaggacgcattcactgaagacgaactggaggttctccgtgatacatcttcctcctcgtcgtacttcgcttagattaaaatttcaaaggccataggatattctctggtactggtgttgtgtatatgaatttataactgttgaagtgtcggtgtttttcataaagtatatccttgtacgtacctagttttatttcatcaacagatgccttcgtacaactgagatgaagttatgcagtctactgtataccgtctggacatagcggaagcattatggcatgtgggatccttgcgtgggctgagaaattgttaacatccaaatcttttgcccagtcaacgacgtgaataagatgctgcctagtttaaccgcataatgcatctctggcaactctaatagcagagtcaacgggctagatataaacttgcccatgttcattagaagcaagaaagaatcagccattgacattaagaagtacatgagcacccccgatgcaaacgtctatagccctaatcatacttgtttcttgcttcctccattttacaatacttgttcataatcttatcaaaatgtcacataatatctcttcatgaagatattagcacggtagttcatgtagtattttcattcttgacctaatcaaatgctttcgtagatggatggtttaaagtatctcctagaatttgtgcctagctttgtttcttccataatcagttgccacatcgtttaaacctaacaactccatctatcccaaaataaaccaacttgtagggttctactagggtcgttctatattaaattattttagatttcatcaaatttataaaaagataacgtaaataattatgacacca

SEQ ID NO: 208117 - DNA, 3095 bp, Zea Mays
atggagggggtgcagctacgattcaagcagagggccgctgaaacacaacatggcggcaggagaggagggtggcggcaatggagaaggggcgatgacactagagaagggggtggggcgctagagaatggtgcacgtgcgactgtgcgctacgtaatgcgtgtaccgtattggtacagagaccggattagaggcccaaaacaggtataactagtctaccataacccctagccggacgactaatcatgagtagtcgacgactaggatgactaatcgtttgctagtcgctctagtcgagtcaaagaccctaattgagcttgcactagcgattagtcggacgacttaaaaaccttgctctagagtctagccattgttctttgcaaggatgccagccccaaagagtgttgtttcaacctccagcacaaccattcctcctgagatgttaaagctcaagtctctggccatttctagtctatgaaggatcccttttgccattgacaattgtcttgagatgtgcccaacttttttctggctccaggattgcaactgctgtgatagtctactcaacttatctgcaaaacgttggagagggcatgtagcttcatccgactgagaccatgaacttgccacctcatctatgaagccatcgagcaccaaaggacagtgatccgagatcaaagaagcagtgctttgcaataaacagtccagaaagatgtcctcccattcactggtatacaagaccctgtccagccgaaccaaggtcggggaagaccgtttattcgaccatgtaaagcgcctccctaacatcagtaattccataagctgaagctcattaataagcctccgaaaccgacacttcatagctctatccagattaccattatttttatcttctgcccggcttataagattgaagtcaccccctatcacccaaggtccctggcacatagaacgcaccaaacggagttcttgtaaaaacaaaagcttcttatcatccagatgtggaccatacactcccagtaagccaccagggtgaggcattgtgttgatcaaactgtcataaacctcattatggtttgcagtgtgctcactcagaattttgccctgtggcttttgcatcctatacaatcagcaaattcatgttgcagattgtcctgtttctgttaaccaagacttgtgcgcctgggattattagcgccacttctttgtgatgcgctagtaacatctgggcagagggaactcacagtagggtcaaatatgagaaatgctcgccaatgaattatttctttatctatatccatcaggaacaggtatgcgaccatgtaattgtcaggctatttcatggcaggtatgctgtactatcgtttcttttttttggtgaaggtgctgctttatgtcaaaattgatagttgtcaaataaagaaactttctgattgagtgctgacggactgatgccattctctctctgaaagcttgtgggttacattgttgctttgccgaataatggtcaacctaataggggggcactcagtgctgttgttgatctgggatcagattctaaatgcggggaaaagctctagcaatgtaccaaagtggctgtccacaacgcgcaaggaatgcctcggtgggagatgcatcaccctgatgttctcgagactcaactgcaacgctaaacggagctttcagtgggatctgttggaataataaccagatgggcatattctgagtaaagatcaaccgacaagattatgaatggtgtggacacattgaggtgaaatcatgctagctggctgccgctcggtttatagcccatgaaagcgaggagcatatacggggtgtgcagcgatcgggaccaggttgtgcagacaccacaagagggcacctatagtagtggtcatgagcctggtcagatgcaataaaaagctagattttgatgggagttagtggctgatagtttaggcaagcctatcctgaagtcatccgaacgaagaaaaggatggagactaggcgcccttttagtatcctgcttttttccttctggcctccagtgctgcaagtgggttgcttctagcatgagcttccgtgccgtactcctagttgcgagtttgcttctggagctttcttggggtgtttctttctctgtcctgtatgtttgcagcaattagagagacgctgatggtgggtgggatggaagggccgccgcatagatccagggaaagagagacgcgtttgtggtccatccatatgactggagagcctgaccctgacgccaacggcaagcagcagtggcggcatccagatcctggcgcaccgactgcacccgcccgtccggcaccttctttcggcggcagcggcactccgcgcgacacggggccgtgtccgtgtgggatgggatgggatggaatggaacacttctgggcggcttctggccgccagaagctgaaaccaaacgcccaacttctggcgcggcttctgggcgaagcgattgggtacggatccctcctccctatgccgtccgcaccgtcttctcctcgcattgccgcgtttccttcacccttttcctctgtccgtatggttgccgcagtgacgccgacgcccttgctccgtcctcaaggttccgcgtcgtcccaaccatcgcgtctgcatcttcgtaagattgtcgtatcacttcgagttcaaggtgttcggttccaagatcatctgggattcgaggacttcggttgcaacctccagttaagcaaaggtaccgtgccactcaatttgttgatgaattatttgtcaccatacatgctgtgtatttgttccaataacgtggatccatggcttgttttagttcattctttgtcagtacacctgaacaatgagtcgacggttaggataagacaacacagacattgtttatggggggatgttatttttcaatagagaacagattaccaattattgttcctggttaactacaatccattgatatgttgtatccctcatattaagggttcagggataccctccatgattgccaacctcattatctttatgattgtatattgaacccaaatttggtagagtatctgaatggatgtaagttaattgtcgta

SEQ ID NO: 208118 - DNA, 2534 bp, Zea Mays
cccagtccctgcactcgtgttcctgtagccgccaccccagcccctggacgctcggctcgatcccccccccccccctcaccacccgttctcctctagtcatcctcctcgccagtcgccaggtgtcggccgccggttgtgctccccgtcaggcgtcagcgtgatcccatcggtcgtcgcagaaacacagtcgctgctcgccgtcaccactcgccaggcgccggttcttctccaatccacgactcatcggctctccagtcctccgtccgttaccgaatttaaagtgcaacgtgccgattctttatatgtacttctgaatgcttggacctggtgtgactacatagcctggtattcatttcataaatgatggaaagaagattgggacggcgtgtatatttgattcccagaacccttccctttatgcaactcaatgctatgtcctcattctcagctggccatggacgccgacccaagaagaaggtatatcaccgtgaacctggtcttgacagggccatggatcttcaaaagaagcctgcccttctccttcgtctgcgtgacctcattttggcacaaaagacaggatcactacttgtgcgtgaccttgaaaaggaggttggttttgtccaaaaatggaactttctttcacttatcgagcgtcaccccaatatcttccatgtctctggtggaagtgcttcccgagagcccatttctgtcacacttacggagaaggccagaaagatatccagtgaagaggctgaagcgcgagagctaatggagccaatcttggtgagaaaccttaggaagttactgatgatgtcgatggactgccagattcctctggataagattgaactaatccagtctgaactgggcttacctaacaacttcaagagcaacatgattccaaggtaccctgattttttttcaatccgtgatgtgaagggactggaccatttgtgtctggagaattgggactcttcactagcagtcacaatacgagaagaaaaaatgaactttgagggtttccagataggctgtagagggattcctaaagatggaaatgtcttgggtccttttgctttcaagttgaagtatccaacaggatttaggccaaaccggaagtaccttgaggaggttgtcaggtggcagaagatggcatttccttcgccttatttgaatgctagacgagtcgagtctgcaacaccacagtctcgaaagcgtgccattgctgttctgcatgagattttgagccttacaatggagagacgattgacatctgataagctagacatatttcacaacgagtacaggcttccatgcaagttacttctttgtttagtgaaaaatcatggcatcttttacatcactaacaagggagcaagaagcacagtcttcctcaaggaggcttatgaaaactgtaacctaattgataagtgtcctttactgaaattctatgatcagtttgcatcattgattggccgaccgtgctccaactcagacaacatgctggcagtataattggagtgtggatttactgatcaggagacaagctaaagtcggtgcatctattttgttgaaactcagatcagctcattgcacatgcaactacaatttaaattcagtggaaagttgctgtttgtttcagctcagtagctaaagagaactaaagaattgaaaaagtcagtgtctcatcttcaaatgtgaagccatctgagaagtgaagtagcagccctgcaaactagacaaaataatgcttataccagaagtcaaagatcaggactggtttagtggtgagagttgtctcactgagtcactaggtcacatgtttgaagcagcctctccgcattcgaggggggaaggcttgctttgctttatccctttcccaaaccttacttatatatgggagcctccgctattggtgtaggtcatgccctccaataatttctacccgatgtcgctccacattattctgatatggagcatgattaacagctttgtgattaagcattgccatgcttcgagccatcacgttcatcaaatcaacttgcaagttacagattgtgctactacatcattccatgatcctattccatgcctcttcatcactgcttaaagaatcaaacaagaaccactacgcatcatagactctacaagccaaaaaggccaccaagaatgatgcatgcgaccacaagaaaaccacattttcagcacttatctgcagtgtcccatcttttgctatcaatcttaaacatatgtacataacccctcaaccaagctagtcaactatacaggcaactgaagcactacaactttgtttattttggataaggccccgcttaaatatggcataaaacaacggatgtcatcattttgtaacttgatataatatcttctacctaaaaagtgaatgatggatgcaatattttgcatgataaacagttcgaaatagttttaggatttatacaagtgttttattaccgtaacaaagaattattaatattgcaccctacaaactcctttgtttaaatttatacaaa

SEQ ID NO: 208119 - DNA, 1095 bp, Zea Mays
cccagtccctgcactcgtgttcctgtagccgccaccccagcccctggacgctcggctcgatcccccccccccccctcaccacccgttctcctctagtcatcctcctcgccagtcgccaggtgtcggccgccggttgtgctccccgtcaggcgtcagcgtgatcccatcggtcgtcgcagaaacacagtcgctgctcgccgtcaccactcgccaggcgccggttcttctccaatccacgactcatcggctctccagtcctccgtccgttaccgaatttaaagtgcaacgtgccgattctttatatgtacttctgaatgcttggacctggtgtgactacatagcctggtattcatttcataaatgatggaaagaagattgggacggcgtgtatatttgattcccagaacccttccctttatgcaactcaatgctatgtcctcattctcagctggccatggacgccgacccaagaagaagtgtaggtcatgccctccaataatttctacccgatgtcgctccacattattctgatatggagcatgattaacagctttgtgattaagcattgccatgcttcgagccatcacgttcatcaaatcaacttgcaagttacagattgtgctactacatcattccatgatcctattccatgcctcttcatcactgcttaaagaatcaaacaagaaccactacgcatcatagactctacaagccaaaaaggccaccaagaatgatgcatgcgaccacaagaaaaccacattttcagcacttatctgcagtgtcccatcttttgctatcaatcttaaacatatgtacataacccctcaaccaagctagtcaactatacaggcaactgaagcactacaactttgtttattttggataaggccccgcttaaatatggcataaaacaacggatgtcatcattttgtaacttgatataatatcttctacctaaaaagtgaatgatggatgcaatattttgcatgataaacagttcgaaatagttttaggatttatacaagtgttttattaccgtaacaaagaattattaatattgcaccctacaaactcctttgtttaaatttatacaaa

SEQ ID NO: 208120 - DNA, 884 bp, Zea Mays
cccagtccctgcactcgtgttcctgtagccgccaccccagcccctggacgctcggctcgatcccccccccccccctcaccacccgttctcctctagtcatcctcctcgccagtcgccaggtgtcggccgccggttgtgctccccgtcaggcgtcagcgtgatcccatcggtcgtcgcagaaacacagtcgctgctcgccgtcaccactcgccaggcgccggttcttctccaatccacgactcatcggctctccagtcctccgtccgttaccggtcatgccctccaataatttctacccgatgtcgctccacattattctgatatggagcatgattaacagctttgtgattaagcattgccatgcttcggccatcacgttcatcaaatcaacttgcaagttacagattgtgctactacatcattccatgatcctattccatgcctcttcatcactgcttaaagaatcaaacaagaaccactacgcatcatagactctacaagccaaaaaggccaccaagaatgatgcatgcgaccacaagaaaaccacattttcagcacttatctgcagtgtcccatcttttgctatcaatcttaaacatatgtacataacccctcaaccaagctagtcaactatacaggcaactgaagcactacaactttgtttattttggataaggccccgcttaaatatggcataaaacaacggatgtcatcattttgtaacttgatataatatcttctacctaaaaagtgaatgatggatgcaatattttgcatgataaacagttcgaaatagttttaggatttatacaagtgttttattaccgtaacaaagaattattaatattgcaccctacaaactcctttgtttaaatttatacaaa

SEQ ID NO: 208121 - DNA, 2529 bp, Zea Mays
cccagtccctgcactcgtgttcctgtagccgccaccccagcccctggacgctcggctcgatcccccccccccccctcaccacccgttctcctctagtcatcctcctcgccagtcgccaggtgtcggccgccggttgtgctccccgtcaggcgtcagcgtgatcccatcggtcgtcgcagaaacacagtcgctgctcgccgtcaccactcgccaggcgccggttcttctccaatccacgactcatcggctctccagtcctccgtccgttaccgaatttaaagtgcaacgtgccgattctttatatgtacttctgaatgcttggacctggtgtgactacatagcctggtattcatttcataaatgatggaaagaagattgggacggcgtgtatatttgattcccagaacccttccctttatgcaactcaatgctatgtcctcattctcagctggccatggacgccgacccaagaagaaggtatatcaccgtgaacctggtcttgacagggccatggatcttcaaaagaagcctgcccttctccttcgtctgcgtgacctcattttggcacaaaagacaggatcactacttgtgcgtgaccttgaaaaggaggttggttttgtccaaaaatggaactttctttcacttatcgagcgtcaccccaatatcttccatgtctctggtggaagtgcttcccgagagcccatttctgtcacacttacggagaaggccagaaagatatccagtgaagaggctgaagcgcgagagctaatggagccaatcttggtgagaaaccttaggaagttactgatgatgtcgatggactgccagattcctctggataagattgaactaatccagtctgaactgggcttacctaacaacttcaagagcaacatgattccaaggtaccctgattttttttcaatccgtgatgtgaagggactggaccatttgtgtctggagaattgggactcttcactagcagtcacaatacgagaagaaaaaatgaactttgagggtttccagataggctgtagagggattcctaaagatggaaatgtcttgggtccttttgctttcaagttgaagtatccaacaggatttaggccaaaccggaagtaccttgaggaggttgtcaggtggcagaagatggcatttccttcgccttatttgaatgctagacgagtcgagtctgcaacaccacagtctcgaaagcgtgccattgctgttctgcatgagattttgagccttacaatggagagacgattgacatctgataagctagacatatttcacaacgagtacaggcttccatgcaagttacttctttgtttagtgaaaaatcatggcatcttttacatcactaacaagggagcaagaagcacagtcttcctcaaggaggcttatgaaaactgtaacctaattgataagtgtcctttactgaaattctatgatcagtttgcatcattgattggccgaccgtgctccaactcagacaacatgctggcagtataattggagtgtggatttactgatcaggagacaagctaaagtcggtgcatctattttgttgaaactcagatcagctcattgcacatgcaactacaatttaaattcagtggaaagttgctgtttgtttcagctcagtagctaaagagaactaaagaattgaaaaagtcagtgtctcatcttcaaatgtgaagccatctgagaagtgaagtagcagccctgcaaactagacaaaataatgcttataccagaagtcaaagatcaggactggtttagtggtgagagttgtctcactgagtcactaggtcacatgtttgaagcagcctctccgcattcgaggggggaaggcttgctttgctttatccctttcccaaaccttacttatatatgggagcctccgctattgggtcatgccctccaataatttctacccgatgtcgctccacattattctgatatggagcatgattaacagctttgtgattaagcattgccatgcttcgagccatcacgttcatcaaatcaacttgcaagttacagattgtgctactacatcattccatgatcctattccatgcctcttcatcactgcttaaagaatcaaacaagaaccactacgcatcatagactctacaagccaaaaaggccaccaagaatgatgcatgcgaccacaagaaaaccacattttcagcacttatctgcagtgtcccatcttttgctatcaatcttaaacatatgtacataacccctcaaccaagctagtcaactatacaggcaactgaagcactacaactttgtttattttggataaggccccgcttaaatatggcataaaacaacggatgtcatcattttgtaacttgatataatatcttctacctaaaaagtgaatgatggatgcaatattttgcatgataaacagttcgaaatagttttaggatttatacaagtgttttattaccgtaacaaagaattattaatattgcaccctacaaactcctttgtttaaatttatacaaa

SEQ ID NO: 208122 - DNA, 890 bp, Zea Mays
cccagtccctgcactcgtgttcctgtagccgccaccccagcccctggacgctcggctcgatcccccccccccccctcaccacccgttctcctctagtcatcctcctcgccagtcgccaggtgtcggccgccggttgtgctccccgtcaggcgtcagcgtgatcccatcggtcgtcgcagaaacacagtcgctgctcgccgtcaccactcgccaggcgccggttcttctccaatccacgactcatcggctctccagtcctccgtccgttaccgtgtaggtcatgccctccaataatttctacccgatgtcgctccacattattctgatatggagcatgattaacagctttgtgattaagcattgccatgcttcgagccatcacgttcatcaaatcaacttgcaagttacagattgtgctactacatcattccatgatcctattccatgcctcttcatcactgcttaaagaatcaaacaagaaccactacgcatcatagactctacaagccaaaaaggccaccaagaatgatgcatgcgaccacaagaaaaccacattttcagcacttatctgcagtgtcccatcttttgctatcaatcttaaacatatgtacataacccctcaaccaagctagtcaactatacaggcaactgaagcactacaactttgtttattttggataaggccccgcttaaatatggcataaaacaacggatgtcatcattttgtaacttgatataatatcttctacctaaaaagtgaatgatggatgcaatattttgcatgataaacagttcgaaatagttttaggatttatacaagtgttttattaccgtaacaaagaattattaatattgcaccctacaaactcctttgtttaaatttatacaaa

SEQ ID NO: 208123 - DNA, 885 bp, Zea Mays
cccagtccctgcactcgtgttcctgtagccgccaccccagcccctggacgctcggctcgatcccccccccccccctcaccacccgttctcctctagtcatcctcctcgccagtcgccaggtgtcggccgccggttgtgctccccgtcaggcgtcagcgtgatcccatcggtcgtcgcagaaacacagtcgctgctcgccgtcaccactcgccaggcgccggttcttctccaatccacgactcatcggctctccagtcctccgtccgttaccggtcatgccctccaataatttctacccgatgtcgctccacattattctgatatggagcatgattaacagctttgtgattaagcattgccatgcttcgagccatcacgttcatcaaatcaacttgcaagttacagattgtgctactacatcattccatgatcctattccatgcctcttcatcactgcttaaagaatcaaacaagaaccactacgcatcatagactctacaagccaaaaaggccaccaagaatgatgcatgcgaccacaagaaaaccacattttcagcacttatctgcagtgtcccatcttttgctatcaatcttaaacatatgtacataacccctcaaccaagctagtcaactatacaggcaactgaagcactacaactttgtttattttggataaggccccgcttaaatatggcataaaacaacggatgtcatcattttgtaacttgatataatatcttctacctaaaaagtgaatgatggatgcaatattttgcatgataaacagttcgaaatagttttaggatttatacaagtgttttattaccgtaacaaagaattattaatattgcaccctacaaactcctttgtttaaatttatacaaa

SEQ ID NO: 208124 - DNA, 1550 bp, Zea Mays
caccccttcttctttccctccacttgccgctccagttgcagttggtcgaaaaaaaaagtggaaaggaaaggggcaaaatatcctagggttctgcctccatggacatcgagacccacgccgccgccctggcccgcgacgagctgcggcggctcctggccgccaccctcagccccgacaaggcgtcggttgacgctgccgcggcggggctcgacgcgctctcttccgacccacgcttccccctcgccatcctcgccgtcgctgcaggggacggtgatcaggggatgagagtcgctgcagcgacatactttgaaaaattttacccgccgcaatttggaaacccgtctgtgttcatctgaggtttacaaggagttccgtgaccaacttgcccaggctttgcttcgagtggagcctgcaattcttcgagtgctgattgaagttttccgccaagttgttgaaaaagattttgtcaaggataacttgtggcctgagcttatccctcagttgaaactagtgatccagagcagcaatctaattagtccaggccagcatcctgagtgcaatactattaatgcactcacagtacttcaatctgttgtaaggcccttccagtatttcttgaatccaaaagttgtgaaagagcctgttccacaacagttggagcaaattgcagcagagattcttgtaccattgcaagtgacattccatcacttctctgacaaggttcttttgtcacctgatgggactaacttggaatatgagcagctcctactcatcacatgcaaatgcatgtatttcactgtgaggtcatacatgccatctagggtgaaacaaattttgccttccttttgcaaagacatgttccgtatactagattctttgaactttaatagtcttattgaagatggatctaccatgaagctcaagattgcaaagagatgtctcattatattttgtgcacttgttacacgtcaccggaaacatacagataaccagatgccacatattgtcaactgtgcaatcaaaatatcaaaacaaagcatccatttaagtaaactcgactctctccccaatcggattgtttcattggcatttgatgtgatttctcgagttttggaaacaggaccgggatggcgactagtttcaccacatttttcttcacttcttgattcagcaatttttccagcattagcattgaatgagaaggatatagaagaatgggaggaggatactgatgagtatatgcaaaagaatcttccttctgaacttgatgacatttctggatggactgaggatttgttcactgccagaaaaagtgcaatcaatttacttggtgttatagcgctatcaaagttgcatctgcagcatcgaagcgtaagaaaggtgataaaaataaagggaaatctgaaatgagctcaattggggagttattggtcaccccattcctttcaaagtttcctataccttcccatggtgaagatgcatcatcagtagcagtgcggaattatttcggtgttttgatggcatatggaggcctccaagattatccatct

SEQ ID NO: 208125 - DNA, 1127 bp, Zea Mays
gagcaccacatggttgccactaaagaacctctctcctctttagcagctgagtttcagtctggcagccccattttacaagagaaaattaagttgcttggcgagcaatatggtgctttaagacgtacacgtggagatggaaactgcttttatcgaagctttatgttttcctacctggaacacatcctagagacacaagacaaagctgaggctgatcgcatcatggtaaaaattgaggaatgcaagaaaacactcctctctcttggatatattgagttcacttttgaggacttcttttcgatattcattgaactgctggaaagtgttctgcagggacatgaaactcctatagggcctgaagagcttctagaaagaaccagagatccacaagtttctgattatgttgtcatgttctttaggtttgtcacttctggtgaaattcaaaggaggtctgacttctttgaaccgttcatatctggcttgacaaattcaaccgtggttcagttctgcaaggcttctgtggaacctatgggtgaggaaagtgaccatgtgcacataattgccctatcagatgcactaggcgtaccaatccgtgttatgtacctagaccgaagctcgtgtgacactggcaacctgagcgtgaatcaccacgatttcatcccgtcggccaatgattcggagggtgatgcggccacgacacctgctcctgccacagagaaaccgtacatcactttgctctaccgtcctggccactacgatattctctacccaaagtgaattttgcgcatggttagtttcacgacttcggttgagaaagcacactgcccagaaaactcgtcatgtttcgcctgtgtgctgccaaaggtggcaaacttgcttttgagtgcttaatgccaatgccctcgttcaatctagatgttctctacctgctgtaagtcttactctggtacaaggatttaacattgtgttgactgcagagaagttcccgtggatatttgctactcatcagttattcgttcatgttttttttttcttttaccttgatctgtcgttgcaaaccaagttcataaagtttaaacctcgttgaggaatgctagtctttcatcgatgcatgaatacctgtcaaaaca

SEQ ID NO: 208126 - DNA, 1663 bp, Zea Mays
catacacgagtataaaaacacggcctaacagaagacagccaccaagtgaaggaacaccgaaagatacacggtcgatcaagctcgactactcgatccatcacacaaacccttgttacacacggcagcagccaacccggcccggtccagaaccagcaggcggcagcagggagaagagagggagatcgagtccgtttgctgacgacatatcatgccgtggttcccagccgtgccgccggcgctggcggccgccgacgaggcgcggatcgtcaagaagcgcgcggggctgccgaggctgctgcacaagctcttcatcaaggtgctccgcctgaggccggcgttggcggcggaggagtactacggcgcctaccggatgggcatgggcgtgggcgccgcggacgaggactgctgctactactacagctacggcggcgcggggtcgtcgtcgtgggccggcgtgctctcctccatcccggaggaggactacgacgacagctccgacgagggcacgcccgacgtcgccatgcccggccccgccgtgctccgcaaggccaagtccgagcggttcgtcgtcggcccacccgacggcgccgccgtcctgcacgtcgaggtcctcctctagcgccagagcacacgcacgcaaaaggcgccgctccttgtccttggccgccttgccttcattctctccaccgaatgcagctgctcccagggttctgcctgtgcagctcctgctcccacggcaattggctgcacgccattattgcttggcctctacaagactacaacactacagaaagatatgatggccgggatgccgaaaagttgcaaacacaatgttgatatatgctcttgtgatgagtgattatcaacaagggtaatatcttggatcgagttgtgtgggctaaccggaacatgagtgtgtccgtgcaacatgtttcttagcttgtgaagcgcaggtgtggagtccggagacgatggttgatggcaaaagtgaagatcatgcgagttcatatcaatagaccaagagcagcgaaagatgaatgttgggtcacaagggactagagaagccgcccatagtggctaatacccggggacactgagaggcgcaaggatacggaggcggatcgcgttgccagtgcagttacagactgacgagatgcgcgtgtcaaggatgtgggggacacgtatggcgtacgctaccgcgaggtgtttcatcggtcgagcttcaaaaccaccctgcgaaaatgtgctggtttcatcgtgtttgcacctcaaaacctgataacatggttctagagggaatcagagaagcaaagtggcgtcaacgcggagggtgcatcaaggcgaaacaattttgtgaaaagtgcatgtaacacccaaaaaccaattttgggaatatagggaaaaagtctccaaaataattaaattaaatcatcttttagtaggagcttcttgcttttgaaatgattctcctagaataattaaatggtaacgttaaaattctgagtacccaagttcagatttgaacttctaaccaataaaaaaactcagaaaagaataactagaagattgcgatttgtttaattcagtaaatcatttctttcgtggattattcattctgaagtgttcatgaataaataattaatattaaaataataaaaatata

SEQ ID NO: 208127 - DNA, 2136 bp, Zea Mays
cgcgcgcgcccgccgctacctgccagtcgcgcgcctgccgccagcgccccgccgccaccccacgcgcgccccaccgcccccgcgcgccggctcgtgtactccgctgtccgctcccattccactatggcctagctgcgtgctgctctggcatcggtcggtggataagcccagcaggcaagcaggcaggagactaggagagctcagcactgcacgcacgctcccctccccttactggccaaatcgatcgtccccttcaggttccaggctccggagcttgctttacttcagggacaacaatgacctcagggacaacaatgacctccaagacgagcggcagcataaccaccaacctgagcaccacggggaagctctcctccgtgggcagcagcttcatggcgtctgccggcagccgcagcaccagcggcggggtttgacaagggggccaagtactccgacgaccagatcctcgaggcgcccaacctccgcaccttcacattcatagagctcaagacggccaccaagaacttccgtccagacagcgtcctcggcgaaggagggttcgggagagtctacaaagggtgggtggatgagaagaccatggcgccgaccaagaacgacaccggcatggttgttgcggtcaagaagctcaactcggagagcatgcatgggtttgaggaatggcagagatcgtgagtcagagcgcaaggatcctgattatgacagaagctatgacagggtttccaggccagttatacatggtcatataccaccccgcgtgccccgcgccgccagcccgcgcctccaccccgtgcgatctctgtttagatcaatcgagttgagtttgttcattccaagtcattattgcatagagatatcaagcctgataattttctcatgggtctcgggaaaagagaaaaccaggtttatgttatcgattttggacttgcaaagaagtacagagatacatcaacacaccagcacattccatacagaacaaagccggagggatgacatggaataaaaaacaaaagtattcgggaaggttggtttaatacactgtcagccttccatggtagggcctgaaagctgggaacaaaaaacaaaagtatgaaaagatcagcgaaaggaaaattgctacttcaactgaggctctctgccgtggatatcctaccaaatttgcttcttacttccattactgtcgctcacagcgtttcgaagatgcaccggactatcagtacctgaagaatttgttcagagacctttttattcgggaaggttttcagtttgattatgtttttgactggaccattctaaagtaccaacaggcatagatgaccactgcaccacctcgtgcaattgtctgtacaaggaataaacttaccctcctaccttaagtagtagtagagattgtattgggtatagaaatgtacttcttttgttatgttatatttcattgccccctctctattttggttcctggccttggtttttgtttcttgtattttttttccatgtcgtctagctactgtagttgcccatcgtcaaagttttgtagagtggttagtgtttttggttgacagacattggtgctagatttgggatcagccttcctaaacagtaccatttactttagctcaatgatatgaataatgcttgtttgcaggacatattgctaagaatctgccacattatgtttgcttgaggtattaatttatccaggtgtttaatgctggagtacagttagaagatccctaatcaattgcttctcatttcagtcgtgtaactttattcatgctacaacaacgactttgagcgaacatgagaccactgagctctagagtgaatgaaggacgtcgtctttggaagtcagacatcacctagagctagggtgtccattcttgacatgtttctcttagtgataggtggatactgtctagttaggaacagagtcttgagggattgatggacgcatgcatcttcaattcctgtgtgttgtattactactggtacaatctccaattcttgtgaacttatgtatttggacttgtgtgaatttgtgatatgaacatatatccatgtgtttgaaatctatattgtatgtgatattttgtgttgcatgtgatattatgtttgtct

SEQ ID NO: 208128 - DNA, 1889 bp, Zea Mays
cgcgcgcgcccgccgctacctgccagtcgcgcgcctgccgccagcgccccgccgccaccccacgcgcgccccaccgcccccgcgcgccggctcgtgtactccgctgtccgctcccattccactatggcctagctgcgtgctgctctggcatcggtcggtggataagcccagcaggcaagcaggcaggagactaggagagctcagcactgcacgcacgctcccctccccttactggccaaatcgatcgtccccttcaggttccaggctccggagcttgctttacttcagggacaacaatgacctcagggacaacaatgacctccaagacgagcggcagcataaccaccaacctgagcaccacggggaagctctcctccgtgggcagcagcttcatggcgtctgccggcagccgcagcaccagcggcggggtttgacaagggggccaagtactccgacgaccagatcctcgaggcgcccaacctccgcaccttcacattcatagagctcaagacggccaccaagaacttccgtccagacagcgtcctcggcgaaggagggttcgggagagtctacaaagggtgggtggatgagaagaccatggcgccgaccaagaacgacaccggcatggttgttgcggtcaagaagctcaactcggagagcatgcatgggtttgaggaatggcagagatcgtgagtcagagcgcaaggatcctgattatgacagaagctatgacagggtttccaggccagttatacatggtcatataccaccccgcgtgccccgcgccgccagcccgcgcctccaccccgtgcgatctctgtttagatcaatcgagttgagtttgttcattccaagtcattattgcatagagatatcaagcctgataattttctcatgggtctcgggaaaagagaaaaccaggtttatgttatcgattttggacttgcaaagaagtacagagatacatcaacacaccagcacattccatacagaacaaagccggagggatgacatggaataaaaaacaaaagtattcgggaaggttggtttaatacactgtcagccttccatggtagggcctgaaagctgggaacaaaaaacaaaagtatgaaaagatcagcgaaaggaaaattgctacttcaactgaggctctctgccgtggatatcctaccaaatttgcttcttacttccattactgtcgctcacagcgtttcgaagatgcaccggactatcagtacctgaagaatttgttcagagacctttttattcgggaaggttttcagtttgattatgtttttgactggaccattctaaagtaccaacaggcatagatgaccactgcaccacctcgtgcaattgtctgtacaaggaataaacttaccctcctaccttaagtagtagtagagattgtattgggacatattgctaagaatctgccacattatgtttgcttgaggtattaatttatccaggtgtttaatgctggagtacagttagaagatccctaatcaattgcttctcatttcagtcgtgtaactttattcatgctacaacaacgactttgagcgaacatgagaccactgagctctagagtgaatgaaggacgtcgtctttggaagtcagacatcacctagagctagggtgtccattcttgacatgtttctcttagtgataggtggatactgtctagttaggaacagagtcttgagggattgatggacgcatgcatcttcaattcctgtgtgttgtattactactggtacaatctccaattcttgtgaacttatgtatttggacttgtgtgaatttgtgatatgaacatatatccatgtgtttgaaatctatattgtatgtgatattttgtgttgcatgtgatattatgtttgtct

SEQ ID NO: 208129 - DNA, 1829 bp, Zea Mays
cgcgcgcgcccgccgctacctgccagtcgcgcgcctgccgccagcgccccgccgccaccccacgcgcgccccaccgcccccgcgcgccggctcgtgtactccgctgtccgctcccattccactatggcctagctgcgtgctgctctggcatcggtcggtggataagcccagcaggcaagcaggcaggagactaggagagctcagcactgcacgcacgctcccctccccttactggccaaatcgatcgtccccttcaggttccaggctccggagcttgctttacttcagggacaacaatgacctcagggacaacaatgacctccaagacgagcggcagcataaccaccaacctgagcaccacggggaagctctcctccgtgggcagcagcttcatggcgtctgccggcagccgcagcaccagcggcggggtttgacaagggggccaagtactccgacgaccagatcctcgaggcgcccaacctccgcaccttcacattcatagagctcaagacggccaccaagaacttccgtccagacagcgtcctcggcgaaggagggttcgggagagtctacaaagggtgggtggatgagaagaccatggcgccgaccaagaacgacaccggcatggttgttgcggtcaagaagctcaactcggagagcatgcatgggtttgaggaatggcagggttgcaattttcagagatcgtgagtcagagcgcaaggatcctgattatgacagaagctatgacagggtttccaggccagttatacatggtcatataccaccccgcgtgccccgcgccgccagcccgcgcctccaccccatcaatcgagttgagtttgttcattccaagtcattattgcatagagatatcaagcctgataattttctcatgggtctcgggaaaagagaaaaccaggtttatgttatcgattttggacttgcaaagaagtacagagatacatcaacacaccagcacattccatacagaacaaagccggagggatgacatggaataaaaaacaaaagtattcgggaaggttggtttaatacactgtcagccttccatggtagggcctgaaagctgggaacaaaaaacaaaagtatgaaaagatcagcgaaaggaaaattgctacttcaactgaggctctctgccgtggatatcctaccaaatttgcttcttacttccattactgtcgctcacagcgtttcgaagatgcaccggactatcagtacctgaagaatttgttcagagacctttttattcgggaaggttttcagtttgattatgtttttgactggaccattctaaagtaccaacaggcatagatgaccactgcaccacctcgtgcaattgacatattgctaagaatctgccacattatgtttgcttgaggtattaatttatccaggtgtttaatgctggagtacagttagaagatccctaatcaattgcttctcatttcagtcgtgtaactttattcatgctacaacaacgactttgagcgaacatgagaccactgagctctagagtgaatgaaggacgtcgtctttggaagtcagacatcacctagagctagggtgtccattcttgacatgtttctcttagtgataggtggatactgtctagttaggaacagagtcttgagggattgatggacgcatgcatcttcaattcctgtgtgttgtattactactggtacaatctccaattcttgtgaacttatgtatttggacttgtgtgaatttgtgatatgaacatatatccatgtgtttgaaatctatattgtatgtgatattttgtgttgcatgtgatattatgtttgtct

SEQ ID NO: 208130 - DNA, 2139 bp, Zea Mays
cgcgcgcgcccgccgctacctgccagtcgcgcgcctgccgccagcgccccgccgccaccccacgcgcgccccaccgcccccgcgcgccggctcgtgtactccgctgtccgctcccattccactatggcctagctgcgtgctgctctggcatcggtcggtggataagcccagcaggcaagcaggcaggagactaggagagctcagcactgcacgcacgctcccctccccttactggccaaatcgatcgtccccttcaggttccaggctccggagcttgctttacttcaggttgtctagctgcatgttgaagtataattccggatgtatccttgaagtgtaaacatttaaggattgtgtaattctttgggtaccaaggcccatttttaaattttaaacaatccagtttttgcttgaatgtatcatcagagattcgcagtagggaacatcagagattaatatttcttgtcccttgaatgtatcatggcttgtttagaggcgggggcagcactttctgatctcaaattttgttcttcacttatatttatttcatcagagattcacagtttttatccgctaggaagggtggtaaaaggctaagtttttttttatgaattctctgcgttcttcactaatccccaccctaatcagtaaacacgcttacgaatcgtttcctaatcgtgtgacagggacaacaatgacctcagggacaacaatgacctccaagacgagcggcagcataaccaccaacctgagcaccacggggaagctctcctccgtgggcagcagcttcatggcgtctgccggcagccgcagcaccagcggcggggtttgacaagggggccaagtactccgacgaccagatcctcgaggcgcccaacctccgcaccttcacattcatagagctcaagacggccaccaagaacttccgtccagacagcgtcctcggcgaaggagggttcgggagagtctacaaagggtgggtggatgagaagaccatggcgccgaccaagaacgacaccggcatggttgttgcggtcaagaagctcaactcggagagcatgcatgggtttgaggaatggcagagatcgtgagtcagagcgcaaggatcctgattatgacagaagctatgacagatcaatcgagttgagtttgttcattccaagtcattattgcatagagatatcaagcctgataattttctcatgggtctcgggaaaagagaaaaccaggtttatgttatcgattttggacttgcaaagaagtacagagatacatcaacacaccagcacattccatacagaacaaagccggagggatgacatggaataaaaaacaaaagtattcgggaaggttggtttaatacactgtcagccttccatggtagggcctgaaagctgggaacaaaaaacaaaagtatgaaaagatcagcgaaaggaaaattgctacttcaactgaggctctctgccgtggatatcctaccaaatttgcttcttacttccattactgtcgctcacagcgtttcgaagatgcaccggactatcagtacctgaagaatttgttcagagacctttttattcgggaaggttttcagtttgattatgtttttgactggaccattctaaagtaccaacaggcatagatgaccactgcaccacctcgtgcaattgacatattgctaagaatctgccacattatgtttgcttgaggtattaatttatccaggtgtttaatgctggagtacagttagaagatccctaatcaattgcttctcatttcagtcgtgtaactttattcatgctacaacaacgactttgagcgaacatgagaccactgagctctagagtgaatgaaggacgtcgtctttggaagtcagacatcacctagagctagggtgtccattcttgacatgtttctcttagtgataggtggatactgtctagttaggaacagagtcttgagggattgatggacgcatgcatcttcaattcctgtgtgttgtattactactggtacaatctccaattcttgtgaacttatgtatttggacttgtgtgaatttgtgatatgaacatatatccatgtgtttgaaatctatattgtatgtgatattttgtgttgcatgtgatattatgtttgtct

SEQ ID NO: 208131 - DNA, 1968 bp, Zea Mays
cgcgcgcgcccgccgctacctgccagtcgcgcgcctgccgccagcgccccgccgccaccccacgcgcgccccaccgcccccgcgcgccggctcgtgtactccgctgtccgctcccattccactatggcctagctgcgtgctgctctggcatcggtcggtggataagcccagcaggcaagcaggcaggagactaggagagctcagcactgcacgcacgctcccctccccttactggccaaatcgatcgtccccttcaggttccaggctccggagcttgctttacttcaggttgtctagctgcatgttgaagtataattccggatagattcgcagtagggaacatcagagattaatatttcttgtcccttgaatgtatcatggcttgtttagaggcgggggcagcactttctgatctcaaattttgttcttcacttatatttatttcatcagagattcacagtttttatccgctaggaagggtggtaaaaggctaagtttttttttatgaattctctgcgttcttcactaatccccaccctaatcagtaaacacgcttacgaatcgtttcctaatcgtgtgacagggacaacaatgacctcagggacaacaatgacctccaagacgagcggcagcataaccaccaacctgagcaccacggggaagctctcctccgtgggcagcagcttcatggcgtctgccggcagccgcagcaccagcggcggggtttgacaagggggccaagtactccgacgaccagatcctcgaggcgcccaacctccgcaccttcacattcatagagctcaagacggccaccaagaacttccgtccagacagcgtcctcggcgaaggagggttcgggagagtctacaaagggtgggtggatgagaagaccatggcgccgaccaagaacgacaccggcatggttgttgcggtcaagaagctcaactcggagagcatgcatgggtttgaggaatggcagggttgcaattttcagagatcgtgagtcagagcgcaaggatcctgattatgacagaagctatgacagatcaatcgagttgagtttgttcattccaagtcattattgcatagagatatcaagcctgataattttctcatgggtctcgggaaaagagaaaaccaggtttatgttatcgattttggacttgcaaagaagtacagagatacatcaacacaccagcacattccatacagaacaaagccggagggatgacatggaataaaaaacaaaagtattcgggaaggttggtttaatacactgtcagccttccatggtagggcctgaaagctgggaacaaaaaacaaaagtatgaaaagatcagcgaaaggaaaattgctacttcaactgaggctctctgccgtggatatcctaccaaatttgcttcttacttccattactgtcgctcacagcgtttcgaagatgcaccggactatcagtacctgaagaatttgttcagagacctttttattcgggaaggacatattgctaagaatctgccacattatgtttgcttgaggtattaatttatccaggtgtttaatgctggagtacagttagaagatccctaatcaattgcttctcatttcagtcgtgtaactttattcatgctacaacaacgactttgagcgaacatgagaccactgagctctagagtgaatgaaggacgtcgtctttggaagtcagacatcacctagagctagggtgtccattcttgacatgtttctcttagtgataggtggatactgtctagttaggaacagagtcttgagggattgatggacgcatgcatcttcaattcctgtgtgttgtattactactggtacaatctccaattcttgtgaacttatgtatttggacttgtgtgaatttgtgatatgaacatatatccatgtgtttgaaatctatattgtatgtgatattttgtgttgcatgtgatattatgtttgtct

SEQ ID NO: 208132 - DNA, 2061 bp, Zea Mays
cgcgcgcgcccgccgctacctgccagtcgcgcgcctgccgccagcgccccgccgccaccccacgcgcgccccaccgcccccgcgcgccggctcgtgtactccgctgtccgctcccattccactatggcctagctgcgtgctgctctggcatcggtcggtggataagcccagcaggcaagcaggcaggagactaggagagctcagcactgcacgcacgctcccctccccttactggccaaatcgatcgtccccttcaggttccaggctccggagcttgctttacttcagggacaacaatgacctcagggacaacaatgacctccaagacgagcggcagcataaccaccaacctgagcaccacggggaagctctcctccgtgggcagcagcttcatggcgtctgccggcagccgcagcaccagcggcggggtttgacaagggggccaagtactccgacgaccagatcctcgaggcgcccaacctccgcaccttcacattcatagagctcaagacggccaccaagaacttccgtccagacagcgtcctcggcgaaggagggttcgggagagtctacaaagggtgggtggatgagaagaccatggcgccgaccaagaacgacaccggcatggttgttgcggtcaagaagctcaactcggagagcatgcatgggtttgaggaatggcagggttgcaattttcagagatcgtgagtcagagcgcaaggatcctgattatgacagaagctatgacagatcaatcgagttgagtttgttcattccaagtcattattgcatagagatatcaagcctgataattttctcatgggtctcgggaaaagagaaaaccaggtttatgttatcgattttggacttgcaaagaagtacagagatacatcaacacaccagcacattccatacagaacaaagccggagggatgacatggaataaaaaacaaaagtattcgggaaggttggtttaatacactgtcagccttccatggtagggcctgaaagctgggaacaaaaaacaaaagtatgaaaagatcagcgaaaggaaaattgctacttcaactgaggctctctgccgtggatatcctaccaaatttgcttcttacttccattactgtcgctcacagcgtttcgaagatgcaccggactatcagtacctgaagaatttgttcagagacctttttattcgggaaggttttcagtttgattatgtttttgactggaccattctaaagtaccaacaggcatagatgaccactgcaccacctcgtgcaattgtctgtacaaggaataaacttaccctcctaccttaagtagtagtagagattgtattgggtatagaaatgtacttcttttgttatgttatatttcattgccccctctctattttggttcctggccttggtttttgtttcttgtattttttttccatgtcgtctagctactgtagttgcccatcgtcaaagttttgtagagtggttagtgtttttggttgacagacattggtgctagatttgggatcagccttcctaaacagtaccatttactttagctcaatgatatgaataatgcttgtttgcaggacatattgctaagaatctgccacattatgtttgcttgaggtattaatttatccaggtgtttaatgctggagtacagttagaagatccctaatcaattgcttctcatttcagtcgtgtaactttattcatgctacaacaacgactttgagcgaacatgagaccactgagctctagagtgaatgaaggacgtcgtctttggaagtcagacatcacctagagctagggtgtccattcttgacatgtttctcttagtgataggtggatactgtctagttaggaacagagtcttgagggattgatggacgcatgcatcttcaattcctgtgtgttgtattactactggtacaatctccaattcttgtgaacttatgtatttggacttgtgtgaatttgtgatatgaacatatatccatgtgtttgaaatctatattgtatgtgatattttgtgttgcatgtgatattatgtttgtct

SEQ ID NO: 208133 - DNA, 2525 bp, Zea Mays
cgcgcgcgcccgccgctacctgccagtcgcgcgcctgccgccagcgccccgccgccaccccacgcgcgccccaccgcccccgcgcgccggctcgtgtactccgctgtccgctcccattccactatggcctagctgcgtgctgctctggcatcggtcggtggataagcccagcaggcaagcaggcaggagactaggagagctcagcactgcacgcacgctcccctccccttactggccaaatcgatcgtccccttcaggttccaggctccggagcttgctttacttcaggttgtctagctgcatgttgaagtataattccggatgtatccttgaagtgtaaacatttaaggattgtgtaattctttgggtaccaaggcccatttttaaattttaaacaatccagtttttgcttgaatgtatcatcagagattcgcagtagggaacatcagagattaatatttcttgtcccttgaatgtatcatggcttgtttagaggcgggggcagcactttctgatctcaaattttgttcttcacttatatttatttcatcagagattcacagtttttatccgctaggaagggtggtaaaaggctaagtttttttttatgaattctctgcgttcttcactaatccccaccctaatcagtaaacacgcttacgaatcgtttcctaatcgtgtgacagggacaacaatgacctcagggacaacaatgacctccaagacgagcggcagcataaccaccaacctgagcaccacggggaagctctcctccgtgggcagcagcttcatggcgtctgccggcagccgcagcaccagcggcggggtttgacaagggggccaagtactccgacgaccagatcctcgaggcgcccaacctccgcaccttcacattcatagagctcaagacggccaccaagaacttccgtccagacagcgtcctcggcgaaggagggttcgggagagtctacaaagggtgggtggatgagaagaccatggcgccgaccaagaacgacaccggcatggttgttgcggtcaagaagctcaactcggagagcatgcatgggtttgaggaatggcagagatcgtgagtcagagcgcaaggatcctgattatgacagaagctatgacaggccagttatacatggtcatataccaccccgcgtgccccgcgccgccagcccgcgcctccaccccgtgcgatctctgtttagatcaatcgagttgagtttgttcattccaagtcattattgcatagagatatcaagcctgataattttctcatgggtctcgggaaaagagaaaaccaggtttatgttatcgattttggacttgcaaagaagtacagagatacatcaacacaccagcacattccatacagaacaaagccggagggatgacatggaataaaaaacaaaagtattcgggaaggttggtttaatacactgtcagccttccatggtagggcctgaaagctgggaacaaaaaacaaaagtatgaaaagatcagcgaaaggaaaattgctacttcaactgaggctctctgccgtggatatcctaccaaatttgcttcttacttccattactgtcgctcacagcgtttcgaagatgcaccggactatcagtacctgaagaatttgttcagagacctttttattcgggaaggttttcagtttgattatgtttttgactggaccattctaaagtaccaacaggcatagatgaccactgcaccacctcgtgcaattgtctgtacaaggaataaacttaccctcctaccttaagtagtagtagagattgtattgggtatagaaatgtacttcttttgttatgttatatttcattgccccctctctattttggttcctggccttggtttttgtttcttgtattttttttccatgtcgtctagctactgtagttgcccatcgtcaaagttttgtagagtggttagtgtttttggttgacagacattggtgctagatttgggatcagccttcctaaacagtaccatttactttagctcaatgatatgaataatgcttgtttgcaggacatattgctaagaatctgccacattatgtttgcttgaggtattaatttatccaggtgtttaatgctggagtacagttagaagatccctaatcaattgcttctcatttcagtcgtgtaactttattcatgctacaacaacgactttgagcgaacatgagaccactgagctctagagtgaatgaaggacgtcgtctttggaagtcagacatcacctagagctagggtgtccattcttgacatgtttctcttagtgataggtggatactgtctagttaggaacagagtcttgagggattgatggacgcatgcatcttcaattcctgtgtgttgtattactactggtacaatctccaattcttgtgaacttatgtatttggacttgtgtgaatttgtgatatgaacatatatccatgtgtttgaaatctatattgtatgtgatattttgtgttgcatgtgatattatgtttgtct

SEQ ID NO: 208134 - DNA, 1841 bp, Zea Mays
cgcgcgcgcccgccgctacctgccagtcgcgcgcctgccgccagcgccccgccgccaccccacgcgcgccccaccgcccccgcgcgccggctcgtgtactccgctgtccgctcccattccactatggcctagctgcgtgctgctctggcatcggtcggtggataagcccagcaggcaagcaggcaggagactaggagagctcagcactgcacgcacgctcccctccccttactggccaaatcgatcgtccccttcaggttccaggctccggagcttgctttacttcaggttgtctagctgcatgttgaagtataattccggatagattcacagtttttatccgctaggaagggtggtaaaaggctaagtttttttttatgaattctctgcgttcttcactaatccccaccctaatcagtaaacacgcttacgaatcgtttcctaatcgtgtgacagggacaacaatgacctcagggacaacaatgacctccaagacgagcggcagcataaccaccaacctgagcaccacggggaagctctcctccgtgggcagcagcttcatggcgtctgccggcagccgcagcaccagcggcggggtttgacaagggggccaagtactccgacgaccagatcctcgaggcgcccaacctccgcaccttcacattcatagagctcaagacggccaccaagaacttccgtccagacagcgtcctcggcgaaggagggttcgggagagtctacaaagggtgggtggatgagaagaccatggcgccgaccaagaacgacaccggcatggttgttgcggtcaagaagctcaactcggagagcatgcatgggtttgaggaatggcagggttgcaattttcagagatcgtgagtcagagcgcaaggatcctgattatgacagaagctatgacagatcaatcgagttgagtttgttcattccaagtcattattgcatagagatatcaagcctgataattttctcatgggtctcgggaaaagagaaaaccaggtttatgttatcgattttggacttgcaaagaagtacagagatacatcaacacaccagcacattccatacagaacaaagccggagggatgacatggaataaaaaacaaaagtattcgggaaggttggtttaatacactgtcagccttccatggtagggcctgaaagctgggaacaaaaaacaaaagtatgaaaagatcagcgaaaggaaaattgctacttcaactgaggctctctgccgtggatatcctaccaaatttgcttcttacttccattactgtcgctcacagcgtttcgaagatgcaccggactatcagtacctgaagaatttgttcagagacctttttattcgggaaggacatattgctaagaatctgccacattatgtttgcttgaggtattaatttatccaggtgtttaatgctggagtacagttagaagatccctaatcaattgcttctcatttcagtcgtgtaactttattcatgctacaacaacgactttgagcgaacatgagaccactgagctctagagtgaatgaaggacgtcgtctttggaagtcagacatcacctagagctagggtgtccattcttgacatgtttctcttagtgataggtggatactgtctagttaggaacagagtcttgagggattgatggacgcatgcatcttcaattcctgtgtgttgtattactactggtacaatctccaattcttgtgaacttatgtatttggacttgtgtgaatttgtgatatgaacatatatccatgtgtttgaaatctatattgtatgtgatattttgtgttgcatgtgatattatgtttgtct

SEQ ID NO: 208135 - DNA, 2046 bp, Zea Mays
cgcgcgcgcccgccgctacctgccagtcgcgcgcctgccgccagcgccccgccgccaccccacgcgcgccccaccgcccccgcgcgccggctcgtgtactccgctgtccgctcccattccactatggcctagctgcgtgctgctctggcatcggtcggtggataagcccagcaggcaagcaggcaggagactaggagagctcagcactgcacgcacgctcccctccccttactggccaaatcgatcgtccccttcaggttccaggctccggagcttgctttacttcagggacaacaatgacctcagggacaacaatgacctccaagacgagcggcagcataaccaccaacctgagcaccacggggaagctctcctccgtgggcagcagcttcatggcgtctgccggcagccgcagcaccagcggcggggtttgacaagggggccaagtactccgacgaccagatcctcgaggcgcccaacctccgcaccttcacattcatagagctcaagacggccaccaagaacttccgtccagacagcgtcctcggcgaaggagggttcgggagagtctacaaagggtgggtggatgagaagaccatggcgccgaccaagaacgacaccggcatggttgttgcggtcaagaagctcaactcggagagcatgcatgggtttgaggaatggcagagatcgtgagtcagagcgcaaggatcctgattatgacagaagctatgacagatcaatcgagttgagtttgttcattccaagtcattattgcatagagatatcaagcctgataattttctcatgggtctcgggaaaagagaaaaccaggtttatgttatcgattttggacttgcaaagaagtacagagatacatcaacacaccagcacattccatacagaacaaagccggagggatgacatggaataaaaaacaaaagtattcgggaaggttggtttaatacactgtcagccttccatggtagggcctgaaagctgggaacaaaaaacaaaagtatgaaaagatcagcgaaaggaaaattgctacttcaactgaggctctctgccgtggatatcctaccaaatttgcttcttacttccattactgtcgctcacagcgtttcgaagatgcaccggactatcagtacctgaagaatttgttcagagacctttttattcgggaaggttttcagtttgattatgtttttgactggaccattctaaagtaccaacaggcatagatgaccactgcaccacctcgtgcaattgtctgtacaaggaataaacttaccctcctaccttaagtagtagtagagattgtattgggtatagaaatgtacttcttttgttatgttatatttcattgccccctctctattttggttcctggccttggtttttgtttcttgtattttttttccatgtcgtctagctactgtagttgcccatcgtcaaagttttgtagagtggttagtgtttttggttgacagacattggtgctagatttgggatcagccttcctaaacagtaccatttactttagctcaatgatatgaataatgcttgtttgcaggacatattgctaagaatctgccacattatgtttgcttgaggtattaatttatccaggtgtttaatgctggagtacagttagaagatccctaatcaattgcttctcatttcagtcgtgtaactttattcatgctacaacaacgactttgagcgaacatgagaccactgagctctagagtgaatgaaggacgtcgtctttggaagtcagacatcacctagagctagggtgtccattcttgacatgtttctcttagtgataggtggatactgtctagttaggaacagagtcttgagggattgatggacgcatgcatcttcaattcctgtgtgttgtattactactggtacaatctccaattcttgtgaacttatgtatttggacttgtgtgaatttgtgatatgaacatatatccatgtgtttgaaatctatattgtatgtgatattttgtgttgcatgtgatattatgtttgtct

SEQ ID NO: 208136 - DNA, 2151 bp, Zea Mays
cgcgcgcgcccgccgctacctgccagtcgcgcgcctgccgccagcgccccgccgccaccccacgcgcgccccaccgcccccgcgcgccggctcgtgtactccgctgtccgctcccattccactatggcctagctgcgtgctgctctggcatcggtcggtggataagcccagcaggcaagcaggcaggagactaggagagctcagcactgcacgcacgctcccctccccttactggccaaatcgatcgtccccttcaggttccaggctccggagcttgctttacttcagggacaacaatgacctcagggacaacaatgacctccaagacgagcggcagcataaccaccaacctgagcaccacggggaagctctcctccgtgggcagcagcttcatggcgtctgccggcagccgcagcaccagcggcggggtttgacaagggggccaagtactccgacgaccagatcctcgaggcgcccaacctccgcaccttcacattcatagagctcaagacggccaccaagaacttccgtccagacagcgtcctcggcgaaggagggttcgggagagtctacaaagggtgggtggatgagaagaccatggcgccgaccaagaacgacaccggcatggttgttgcggtcaagaagctcaactcggagagcatgcatgggtttgaggaatggcagggttgcaattttcagagatcgtgagtcagagcgcaaggatcctgattatgacagaagctatgacagggtttccaggccagttatacatggtcatataccaccccgcgtgccccgcgccgccagcccgcgcctccaccccgtgcgatctctgtttagatcaatcgagttgagtttgttcattccaagtcattattgcatagagatatcaagcctgataattttctcatgggtctcgggaaaagagaaaaccaggtttatgttatcgattttggacttgcaaagaagtacagagatacatcaacacaccagcacattccatacagaacaaagccggagggatgacatggaataaaaaacaaaagtattcgggaaggttggtttaatacactgtcagccttccatggtagggcctgaaagctgggaacaaaaaacaaaagtatgaaaagatcagcgaaaggaaaattgctacttcaactgaggctctctgccgtggatatcctaccaaatttgcttcttacttccattactgtcgctcacagcgtttcgaagatgcaccggactatcagtacctgaagaatttgttcagagacctttttattcgggaaggttttcagtttgattatgtttttgactggaccattctaaagtaccaacaggcatagatgaccactgcaccacctcgtgcaattgtctgtacaaggaataaacttaccctcctaccttaagtagtagtagagattgtattgggtatagaaatgtacttcttttgttatgttatatttcattgccccctctctattttggttcctggccttggtttttgtttcttgtattttttttccatgtcgtctagctactgtagttgcccatcgtcaaagttttgtagagtggttagtgtttttggttgacagacattggtgctagatttgggatcagccttcctaaacagtaccatttactttagctcaatgatatgaataatgcttgtttgcaggacatattgctaagaatctgccacattatgtttgcttgaggtattaatttatccaggtgtttaatgctggagtacagttagaagatccctaatcaattgcttctcatttcagtcgtgtaactttattcatgctacaacaacgactttgagcgaacatgagaccactgagctctagagtgaatgaaggacgtcgtctttggaagtcagacatcacctagagctagggtgtccattcttgacatgtttctcttagtgataggtggatactgtctagttaggaacagagtcttgagggattgatggacgcatgcatcttcaattcctgtgtgttgtattactactggtacaatctccaattcttgtgaacttatgtatttggacttgtgtgaatttgtgatatgaacatatatccatgtgtttgaaatctatattgtatgtgatattttgtgttgcatgtgatattatgtttgtct

SEQ ID NO: 208137 - DNA, 2549 bp, Zea Mays
cgcgcgcgcccgccgctacctgccagtcgcgcgcctgccgccagcgccccgccgccaccccacgcgcgccccaccgcccccgcgcgccggctcgtgtactccgctgtccgctcccattccactatggcctagctgcgtgctgctctggcatcggtcggtggataagcccagcaggcaagcaggcaggagactaggagagctcagcactgcacgcacgctcccctccccttactggccaaatcgatcgtccccttcaggttccaggctccggagcttgctttacttcaggttgtctagctgcatgttgaagtataattccggatgtatccttgaagtgtaaacatttaaggattgtgtaattctttgggtaccaaggcccatttttaaattttaaacaatccagtttttgcttgaatgtatcatcagagattcgcagtagggaacatcagagattaatatttcttgtcccttgaatgtatcatggcttgtttagaggcgggggcagcactttctgatctcaaattttgttcttcacttatatttatttcatcagagattcacagtttttatccgctaggaagggtggtaaaaggctaagtttttttttatgaattctctgcgttcttcactaatccccaccctaatcagtaaacacgcttacgaatcgtttcctaatcgtgtgacagggacaacaatgacctcagggacaacaatgacctccaagacgagcggcagcataaccaccaacctgagcaccacggggaagctctcctccgtgggcagcagcttcatggcgtctgccggcagccgcagcaccagcggcggggtttgacaagggggccaagtactccgacgaccagatcctcgaggcgcccaacctccgcaccttcacattcatagagctcaagacggccaccaagaacttccgtccagacagcgtcctcggcgaaggagggttcgggagagtctacaaagggtgggtggatgagaagaccatggcgccgaccaagaacgacaccggcatggttgttgcggtcaagaagctcaactcggagagcatgcatgggtttgaggaatggcagggttgcaattttcagagatcgtgagtcagagcgcaaggatcctgattatgacagaagctatgacagggtttccaggccagttatacatggtcatataccaccccgcgtgccccgcgccgccagcccgcgcctccaccccgtgcgatctctgtttagatcaatcgagttgagtttgttcattccaagtcattattgcatagagatatcaagcctgataattttctcatgggtctcgggaaaagagaaaaccaggtttatgttatcgattttggacttgcaaagaagtacagagatacatcaacacaccagcacattccatacagaacaaagccggagggatgacatggaataaaaaacaaaagtattcgggaaggttggtttaatacactgtcagccttccatggtagggcctgaaagctgggaacaaaaaacaaaagtatgaaaagatcagcgaaaggaaaattgctacttcaactgaggctctctgccgtggatatcctaccaaatttgcttcttacttccattactgtcgctcacagcgtttcgaagatgcaccggactatcagtacctgaagaatttgttcagagacctttttattcgggaaggttttcagtttgattatgtttttgactggaccattctaaagtaccaacaggcatagatgaccactgcaccacctcgtgcaattgtctgtacaaggaataaacttaccctcctaccttaagtagtagtagagattgtattgggtatagaaatgtacttcttttgttatgttatatttcattgccccctctctattttggttcctggccttggtttttgtttcttgtattttttttccatgtcgtctagctactgtagttgcccatcgtcaaagttttgtagagtggttagtgtttttggttgacagacattggtgctagatttgggatcagccttcctaaacagtaccatttactttagctcaatgatatgaataatgcttgtttgcaggacatattgctaagaatctgccacattatgtttgcttgaggtattaatttatccaggtgtttaatgctggagtacagttagaagatccctaatcaattgcttctcatttcagtcgtgtaactttattcatgctacaacaacgactttgagcgaacatgagaccactgagctctagagtgaatgaaggacgtcgtctttggaagtcagacatcacctagagctagggtgtccattcttgacatgtttctcttagtgataggtggatactgtctagttaggaacagagtcttgagggattgatggacgcatgcatcttcaattcctgtgtgttgtattactactggtacaatctccaattcttgtgaacttatgtatttggacttgtgtgaatttgtgatatgaacatatatccatgtgtttgaaatctatattgtatgtgatattttgtgttgcatgtgatattatgtttgtct

SEQ ID NO: 208138 - DNA, 957 bp, Zea Mays
tttggatcgtatcagagatgcagtgtttaagaaaatcaatcgagttgagtttgttcattccaagtcattattgcatagagatatcaagcctgataattttctcatgggtctcgggaaaagagaaaaccaggtttatgttatcgattttggacttgcaaagaagtacagagatacatcaacacaccagcacattccatacagaacaaagccggagggatgacatggaataaaaaacaaaagtattcgggaaggttggtttaatacactgtcagccttccatggtagggcctgaaagctgggaacaaaaaacaaaagtatgaaaagatcagcgaaaggaaaattgctacttcaactgaggctctctgccgtggatatcctaccaaatttgcttcttacttccattactgtcgctcacagcgtttcgaagatgcaccggactatcagtacctgaagaatttgttcagagacctttttattcgggaaggacatattgctaagaatctgccacattatgtttgcttgaggtattaatttatccaggtgtttaatgctggagtacagttagaagatccctaatcaattgcttctcatttcagtcgtgtaactttattcatgctacaacaacgactttgagcgaacatgagaccactgagctctagagtgaatgaaggacgtcgtctttggaagtcagacatcacctagagctagggtgtccattcttgacatgtttctcttagtgataggtggatactgtctagttaggaacagagtcttgagggattgatggacgcatgcatcttcaattcctgtgtgttgtattactactggtacaatctccaattcttgtgaacttatgtatttggacttgtgtgaatttgtgatatgaacatatatccatgtgtttgaaatctatattgtatgtgatattttgtgttgcatgtgatattatgtttgtct

SEQ ID NO: 208139 - DNA, 1332 bp, Zea Mays
agagatgcagtgtttaagaaaatcaatcgagttgagtttgttcattccaagtcattattgcatagagatatcaagcctgataattttctcatgggtctcgggaaaagagaaaaccaggtttatgttatcgattttggacttgcaaagaagtacagagatacatcaacacaccagcacattccatacagaacaaagccggagggatgacatggaataaaaaacaaaagtattcgggaaggttggtttaatacactgtcagccttccatggtagggcctgaaagctgggaacaaaaaacaaaagtatgaaaagatcagcgaaaggaaaattgctacttcaactgaggctctctgccgtggatatcctaccaaatttgcttcttacttccattactgtcgctcacagcgtttcgaagatgcaccggactatcagtacctgaagaatttgttcagagacctttttattcgggaaggttttcagtttgattatgtttttgactggaccattctaaagtaccaacaggcatagatgaccactgcaccacctcgtgcaattgtctgtacaaggaataaacttaccctcctaccttaagtagtagtagagattgtattgggtatagaaatgtacttcttttgttatgttatatttcattgccccctctctattttggttcctggccttggtttttgtttcttgtattttttttccatgtcgtctagctactgtagttgcccatcgtcaaagttttgtagagtggttagtgtttttggttgacagacattggtgctagatttgggatcagccttcctaaacagtaccatttactttagctcaatgatatgaataatgcttgtttgcaggacatattgctaagaatctgccacattatgtttgcttgaggtattaatttatccaggtgtttaatgctggagtacagttagaagatccctaatcaattgcttctcatttcagtcgtgtaactttattcatgctacaacaacgactttgagcgaacatgagaccactgagctctagagtgaatgaaggacgtcgtctttggaagtcagacatcacctagagctagggtgtccattcttgacatgtttctcttagtgataggtggatactgtctagttaggaacagagtcttgagggattgatggacgcatgcatcttcaattcctgtgtgttgtattactactggtacaatctccaattcttgtgaacttatgtatttggacttgtgtgaatttgtgatatgaacatatatccatgtgtttgaaatctatattgtatgtgatattttgtgttgcatgtgatattatgtttgtct

SEQ ID NO: 208140 - DNA, 1169 bp, Zea Mays
tcaattggtggtagctagtttccagaacaaagccggagggatgacatggaataaaaaacaaaagtattcgggaaggttggtttaatacactgtcagccttccatggtagggcctgaaagctgggaacaaaaaacaaaagtatgaaaagatcagcgaaaggaaaattgctacttcaactgaggctctctgccgtggatatcctaccaaatttgcttcttacttccattactgtcgctcacagcgtttcgaagatgcaccggactatcagtacctgaagaatttgttcagagacctttttattcgggaaggttttcagtttgattatgtttttgactggaccattctaaagtaccaacaggcatagatgaccactgcaccacctcgtgcaattgtctgtacaaggaataaacttaccctcctaccttaagtagtagtagagattgtattgggtatagaaatgtacttcttttgttatgttatatttcattgccccctctctattttggttcctggccttggtttttgtttcttgtattttttttccatgtcgtctagctactgtagttgcccatcgtcaaagttttgtagagtggttagtgtttttggttgacagacattggtgctagatttgggatcagccttcctaaacagtaccatttactttagctcaatgatatgaataatgcttgtttgcaggacatattgctaagaatctgccacattatgtttgcttgaggtattaatttatccaggtgtttaatgctggagtacagttagaagatccctaatcaattgcttctcatttcagtcgtgtaactttattcatgctacaacaacgactttgagcgaacatgagaccactgagctctagagtgaatgaaggacgtcgtctttggaagtcagacatcacctagagctagggtgtccattcttgacatgtttctcttagtgataggtggatactgtctagttaggaacagagtcttgagggattgatggacgcatgcatcttcaattcctgtgtgttgtattactactggtacaatctccaattcttgtgaacttatgtatttggacttgtgtgaatttgtgatatgaacatatatccatgtgtttgaaatctatattgtatgtgatattttgtgttgcatgtgatattatgtttgtct

SEQ ID NO: 208141 - DNA, 1617 bp, Zea Mays
aacccttcgtcttctagatcctgcaccgggagagggcgaataaggtttttgggaagcgtcttcacgcgactgctcgtgatctgctgacctcgtcgaccctgctgatttcgctacttcgacatcgtcgaccctgctgattccggcgcgtgccatcgatcagtaagtctaatcagtacgcatcatctgatttggcttgttatctcagttattctgatttggtcatgatttatagtcggaatttagattggaatttgtctaattattcaacagcggctccccgcgaagaccttcggcggaggctacggcgctaggcgcaccagtagcgcgaagcgaagggcgccgaggagagctgcggtggtgcggtgcgggctgctgtccgtggacccgtgggtgccgacgatggactcccagagtgtggcatcacaactctttgccgtctcgctcttcccctacctgggcttacgctctcccaaagcgagacagagaaggtccaagaccgcgcccgggctcacgctcttcggtttctacttcctcctcgtcttcgtcagcgccaccacaaaagttcattatggtaccttgctgtccaacgttgactggctgcacgggggcgctgaatcgctgctgactctcaccaacctgtttatcgttttggggctgaggagagccctgaggaagctggaggaagagggcacagacgagagcgtttctgaagcttctcaagacagtgcagaaaaaagttatgtctagatgggttcatcatcagtacccctgatggtgcactcagtattctaggagtgcgtggttttttttcttctgaagctcaactagcttgtagtgatgctttgggtgtaaggaaatctggcagatctactctgtgcatattatgctgataagaaaacaatgtacaagcatctcctgcaattctgatgagacaccgtccctctcgccatgcgcccccacgcccaccactctcgctcatcaccgctcgatctgaggaaggcggagcgcgtgatagatgcgggttctggcagattcgcgaggaggctgtagtggttaggttctggtgtcccctggcccggccgatcgtgggagatgagctcctcgtccgtggccagcatcgggcagcgtcgtctgcgccgtcgtcggaggaagattatgaagaagacctgtcctaatgacttgtggatctatgtcgagggccaagatgttgttgacatggagaatgtgtcaagtgagaagctcaggtcaggtggcagttcgtgtacacaagcaagctccctccggttgacttcatcttcatttattttgattacaacataaaatgactgtgatgcctcctctccgaagaccttcagccagtgttgggtgcctagctccagttaatctaatgcctccgtgttctccattttcatgttttactcaagctttataaacttatttagcgaccacatgaattatgtccatcttttattaggtgaacacccaagctgctgcagattgattgcatcaatccaaagaatttaaaatactatgtcgttattgtttagtatatggcatggcttaatgccgaaaacatcaagaatttacgaggtggtcagtgggatgacacaaagaaaa

SEQ ID NO: 208142 - DNA, 1016 bp, Zea Mays
tttctccgcctcctcgcttccctttccgtgtcgccctaaaagaccagactaccccgctgccccgaagtcagagcctcagaggggggagaggaggctagtagggatagcgcatcgtcatcgcacctccacgcgccggcgagccagaccaccagaggcagcgatggcggtggcggagctcccgaggcggagccgctcccgccccccgtgcagatgggggaggtctcagaggaggagctcagccagtacgacggctccgaccctaagaagccgctcctcatggccatcaagggccagatctacgacgtcacccagagcagaatgttctatggacctggtggaccatacgccctattcgccggcaaagacgccagcagagccctagcgaagatgtccttcgagccacaggatctgaccggcgacatcactggcctaggcccgtttgagctcgatgccctgcaggactgggaatacaagttcatgagcaagtacgtgaaggtgggtactgtcacgaagaacgtcaccgttgaagaccgcagcagcgccgcaagcacagcccctggaaccagtgaggccgccaccgaggccgagaaggcgccgactacgacgacgaccgaagagaagccgagggaagtgccagcggaggctgtgaaggagaaggaagccgccgctgccgccgccgcggctggtgaaggtgcccaggaaaactagagcatttttcagtatgcagcaataattcgacatggtcccattcggttcgtgtcggggccctctcgtatatcgtatcagcagcgtggcctgtgtaattggatatacgtcatctgtacgagcgccatggcccttgaggagctggtgctttgtgttgttattagtcgtccgttgcagattttaaagacatcgggttcaggttgggcgcccctggccctgtttggtcggaaaacaggcgctctttcaaaatgagttatttctttgtaccgtatgatcagtccacgtcggaaattactcagtttatcatctca

SEQ ID NO: 208143 - DNA, 2175 bp, Zea Mays
gttcaatacaaacatagctttacattgcataatcaatggggaacttgtaatctgttttgtttggccagttcattggttgattttacattgtattctttgcgttaagacttactccctctattctagttgttttagttttttgttctaagtcaaacttttactttgaccaagtttgtagaaaaagatattaatatctccagtacctaataaatgtattatcaagagatttcatggtggatctaatgaaactaatttgacgatgtagatattgatacacttttctataaactttgttaaagttagataagtctgacttaagacaaaactaaaacgacctataatggagggatttactactaggattttatggtcatgcactctagttgcttataatgtttccattgggttggatcttggtattacttttcatacattatatgcactgttagtataaacattgctcaaagtgtgccttgttctattttgcacaaattgagcaatatttatgcccaaagaagccttaggcccctgtgaatcaaacaaatgtatctggaatcggaatcatcttaggtgtgataattgacaagtatattgagaccaaaaagattagtctcaacttttcttctaactgaatctactggtagtgttattttcttcattgtaaacactggggttggcattaatggcatgcaagtcaaagactgctacgccacaatttttcttcgtttttgtgactactagatgtcttcctataatcctacacaattgtagaagcaactgagacattcatgtgtttctcgtattcctttgatatcttcctgttgtattgtattaaccgttgctttactcattgaaccaggatcaagaccagaaacttctgattatcctcagtcaagtgagaggccactgactgccacaagcagtttcagttctgcatccccattttcggaatcaagccaactagcttcgtctagtaaacaagcggccccatatctacctcgcaaccatatgggcaggcggtctttcatgtctaaaccagtgtacccacttgtcttccggaaccctgtgtccgaatcagaagcgtgcaggatgcttgaggttagtaatgccgggcgagcgacaccaagtgatgacagccaggcttctcctctgtggcgtcgcagcttggcgagcccagagctcaagttccataacgcactgaacgaacttgggaagatggaggtttcacctgaacggaacacgagctcaagaagggaagggttcagatggagcaatgccagcagttatgattttggatacgatggagatgccattgacatgtcagatcatatcagtatcgagtcccagagatcacccacaagctcagtgaggttcctgaaatgtgggctctgcgagagattcctgtgccagaaatcaccctggacctcgaaccggattgttcgaaacgccgatatgccagtagcagcggttcttcattgccgacatgtcttccatgcggattgcttggaggagggcactcccaagacagaagtccatgaaccaccctgtccgctgtgcacggcacccactgacgacgaagcacatgtgtcattctcggaacctctgcatgttgccctccgatctgctcgcaggaacctttcgctgggcagtggcgctggagggagtaacagcagtggcgcgaggcctccttgcagtgaccgtggcctgaagaggaaccattctgctatcgtgccgagacgcggcggcggcggctcgttgttccgcaaccgcttcaagaggcagttccccttcaaggctaggatcgggaaggagctctttggcggcagggttttcagcaaggtcgggtcgtcttcaggtcaacaggatgaccatcgacagcaagcgccgaagcgtgatcggctcatgaagtagctagagaacttagtggcacggagtatatgttgtgtgccctcctgatattctatccgtgccatcagttatcatgtctagtgtaacctataacagcatgcgaaacttggcatccatgcgcagtagtcgtccaagacgggggctctgtatatggaggctgcctgcattgcatgtagcacccaccgttggctaactatgaggtgtattttggatccttgcagtaagaatctcagaatctatgccctatgattactatgttctgcttga

SEQ ID NO: 208144 - DNA, 2121 bp, Zea Mays
ccataaatagtctacgtctaattccgctgctttcactctgctctccttttcccctttctccgttcacctttctctcttcctttttctttcccctccctctccctttctttcctcctggcgacgactgggcgagtgccgccgaacttcgccaggtcttcaccggcgacgagcacctacaaggtgacactattccttttcttcacttggtgtataatctctctttgctccgatcaagcttttcaaacataataagcaaatagtctctgcacgtgattgccaaaattagtcaagacgggtgctctttgctgcgtggccgctaggccacatgggacaaagtctgaccctgctagcagagatcgttctatggatcctactgagcctcgttggcgcataaattcgagcttttctcctccaacgtcaaggaggtgggattgccgctattcatcagatggattgccccacagagttcatgatgctcctcatgatcacccgccatatgtttcatcactatcatcccatagcaaaggaagcagaagtgcatttggcagtgatcagtacctcaatcatcatcattctgcatctgatggagcactttcttactttgggagtccagctgacagccttcaggccccacgctggacaccctctcttcaaagatttgatctcggtgaattctctacccctgcaggagacatgccttcccattgcattatcagtgggggattgtaaagttagaatttggttcttgattaacaacttgtatagctgctattaattaccagctttttcctactgaactttcatggatcaagaccagaaacttctgattatcctcagtcaagtgagaggccactgactgccacaagcagtttcagttctgcatccccattttcggaatcaagccaactagcttcgtctagtaaacaagcggccccatatctacctcgcaaccatatgggcaggcggtctttcatgtctaaaccagtgtacccacttgtcttccggaaccctgtgtccgaatcagaagcgtgcaggatgcttgaggttagtaatgccgggcgagcgacaccaagtgatgacagccaggcttctcctctgtggcgtcgcagcttggcgagcccagagctcaagttccataacgcactgaacgaacttgggaagatggaggtttcacctgaacggaacacgagctcaagaagggaagggttcagatggagcaatgccagcagttatgattttggatacgatggagatgccattgacatgtcagatcatatcagtatcgagtcccagagatcacccacaagctcagtgaggttcctgaaatgtgggctctgcgagagattcctgtgccagaaatcaccctggacctcgaaccggattgttcgaaacgccgatatgccagtagcagcggttcttcattgccgacatgtcttccatgcggattgcttggaggagggcactcccaagacagaagtccatgaaccaccctgtccgctgtgcacggcacccactgacgacgaagcacatgtgtcattctcggaacctctgcatgttgccctccgatctgctcgcaggaacctttcgctgggcagtggcgctggagggagtaacagcagtggcgcgaggcctccttgcagtgaccgtggcctgaagaggaaccattctgctatcgtgccgagacgcggcggcggcggctcgttgttccgcaaccgcttcaagaggcagttccccttcaaggctaggatcgggaaggagctctttggcggcagggttttcagcaaggtcgggtcgtcttcaggtcaacaggatgaccatcgacagcaagcgccgaagcgtgatcggctcatgaagtagctagagaacttagtggcacggagtatatgttgtgtgccctcctgatattctatccgtgccatcagttatcatgtctagtgtaacctataacagcatgcgaaacttggcatccatgcgcagtagtcgtccaagacgggggctctgtatatggaggctgcctgcattgcatgtagcacccaccgttggctaactatgaggtgtattttggatccttgcagtaagaatctcagaatctatgccctatgattactatgttctgcttga

SEQ ID NO: 208145 - DNA, 771 bp, Zea Mays
actctgctctccttttcccctttctccgttcacctttctctcttcctttttctttcccctccctctccctttctttcctcctggcgacgactgggcgagtgccgccgaacttcgccaggtcttcaccggcgacgagcacctacaaggtgacactattccttttcttcacttggtgtataatctctctttgctccgatcaagcttttcaaacataataagcaaatagtctctgcacgtgattgccaaaattagtcaagacgggtgctctttgctgcgtggccgctaggccacatgggacaaagtctgaccctgctagcagagatcgttctatggatcctactgagcctcgttggcgcataaattcgagcttttctcctccaacgtcaaggaggtgggattgccgctattcatcagatggattgccccacagagttcatgatgctcctcatgatcacccgccatatgtttcatcactatcatcccatagcaaaggaagcagaagtgcatttggcagtgatcagtacctcaatcatcatcattctgcatctgatggagcactttcttactttgggagtccagctgacagccttcaggccccacgctggacaccctctcttcaaagatttgatctcggtgaattctctacccctgcaggagaattccgacttgtgagttagactgaatttgggcttctattggaaataatgacacagtgtgccaacttatttcgattggaaaaatataatatcttcctcgtttagtcaatcttct

SEQ ID NO: 208146 - DNA, 1382 bp, Zea Mays
gagagctctagaagagcaggcgcatcgcaacgcaacgcgcgagtgagtgcacgtagcaaaccgcctcgtcgaaaggaggagagagaaacaagtatatacgaggggcagggccccccctcctctcccttcgtccattccgatcactcgctgctcccctctctcgccggagcgagccccgggccggatggcggcggcagcagcagctcctcccgcctccgcgatcgcgtgatggacgccgacgccgacgccgccgcgatccgccgatggacgacgccggaagggcaccaccacccgcgccagcggcggtgaccgtctccgccaccgccgcacccgcgcctaccccgccctccgccacggccgccgccgacaagtcctccctcgaccccgacgcgctttatgaagaggggatgtggcaacagatggccatgaacagcggtgccacaatgcaacctgggtcatatcctgagcgaccaggtgaaccggactgcacttactacctcaggactggattgtgtcgatttggcatgagctgcaggttcaatcatcctccggataggaatctggctattgcctctgccagaatgaagggagaatatcctgagagagtgggacagccagagtgtcagtattatctgaagaccggaacatgcaagtttggtcctacatgcaaatttcaccatcccagggaaaaggccggaattgcagggagggtgcagctaaacacattaggatatccacttctcccgaatgaaaaggagtgtgcgtattatttaaaaacaggacaatgtaaatatgcaaatacttgtaaattccaccacccagaacttttcaatgtggtgccttcgtcacgtggttcacctatttatacttctgtacattcctctgcaagcgctggtccacagtcatatactggaactatgtcaagctggacttttccacgagcttcttttataccaagccctaggtggcaaagtccttcaaattatgcaccaatggttgtacctcatggccttgtccaagtgccgagctggaattcatatcctggtcagctgcagtcacctggggctcaacaaacttatggaagttcacaacaaggcgaagctagtgcaggaaatcagggaatgctatcaccctatagatccagttcatttcctgtgcctcaatatgcgttgcagagagataatgtatttcctgagagacccgatgaaccagaatgccaatattacatgaagacaggagattgtaaatttggtgcagtgtgcaagttccatcatccccgtgtgagatcacagccccctccggattgtgtcttaagtccaatgggtcttccaatacgtccattctttggggtgggacacatgaggggattttttaaacctcgg

SEQ ID NO: 208147 - DNA, 1249 bp, Zea Mays
caggcgcatcgcaacgcaacgcgcgagtgagtgcacgtagcaaaccgcctcgtcgaaaggaggagagagaaacaagtatatacgaggggcagggccccccctcctctcccttcgtccattccgatcactcgctgctcccctctctcgccggagcgagccccgggccggatggcggcggcagcagcagctcctcccgcctccgcgatcgcgtgatggacgccgacgccgacgccgccgcgatccgccgatggacgacgccggaagggcaccaccacccgcgccagcggcggtgaccgtctccgccaccgccgcacccgcgcctaccccgccctccgccacggccgccgccgacaagtcctccctcgaccccgacgcgctttatgaagaggggatgtggcaacagatggccatgaacagcggtgccacaatgcaacctgggtcatatcctgagcgaccaggtgaaccggactgcacttactacctcaggactggattgtgtcgatttggcatgagctgcaggttcaatcatcctccggataggaatctggctattgcctctgccagaatgaagggagaatatcctgagagagtgggacagccagagtgtcagtattatctgaagaccggaacatgcaagtttggtcctacatgcaaatttcaccatcccagggaaaaggccggaattgcagggagggtgcagctaaacacattaggatatccacttctcccgaatgaaaaggagtgtgcgtattatttaaaaacaggacaatgtaaatatgcaaatacttgtaaattccaccacccagaacttttcaatgtggtgccttcgtcacgtggttcacctatttatacttctgtacattcctctgcaagcgctggtccacagtcatatactggaactatgtcaagctggacttttccacgagcttcttttataccaagccctaggtggcaaagtccttcaaattatgcaccaatggttgtacctcatggccttgtccaagtgccgagctggaattcatatcctggtcagctgcagtcacctggggctcaacaaacttatggaagttcacaacaaggcgaagctagtgcaggaaatcagggaatgctatcaccctatagatccagttcatttcctgtgcctcaatatgcgttgcagagagataatgtatttcctgagagacccgatgaaccagaatgccaatattacatgaagacaggagattgtaaatttggtgcacactgtgcc

SEQ ID NO: 208148 - DNA, 2291 bp, Zea Mays
atatacgaggggcagggccccccctcctctcccttcgtccattccgatcactcgctgctcccctctctcgccggagcgagccccgggccggatggcggcggcagcagcagctcctcccgcctccgcgatcgcgtgatggacgccgacgccgacgccgccgcgatccgccgatggacgacgccggaagggcaccaccacccgcgccagcggcggtgaccgtctccgccaccgccgcacccgcgcctaccccgccctccgccacggccgccgccgacaagtcctccctcgaccccgacgcgctttatgaagatggccatgaacagcggtgccacaatgcaacctgggtcatatcctgagcgaccaggtgaaccggactgcacttactacctcaggactggattgtgtcgatttggcatgagctgcaggttcaatcatcctccggataggaatctgaatgaagggagaatatcctgagagagtgggacagccagagtgtcagtattatctgaagaccggaacatgcaagtttggtcctacatgcaaatttcaccatcccagggaaaaggccggaattgcagggagggtgcagctaaacacattaggatatccacttctcccggtttgttttttcttgccagttacatgtcctcttctacatatgtctgtttgttttgctgaaaaggagtctactttacttttgtagaatgaaaaggagtgtgcgtattatttaaaaacaggacaatgtaaatatgcaaatacttgtaaattccaccacccagaacttttcaatgtggtgccttcgtcacgtggttcacctatttatacttctgtacattcctctgcaagcgctggtccacagtcatatactggaactatgtcaagctggacttttccacgagcttcttttataccaagccctaggtggcaaagtccttcaaattatgcaccaatggttgtacctcatggccttgtccaagtgccgagctggaattcatatcctggtcagctgcagtcacctggggctcaacaaacttatggaagttcacaacaaggcgaagctagtgcaggaaatcagggaatgctatcaccctatagatccagttcatttcctgtgcctcaatatgcgttgcagagagataatgtatttcctgagagacccgatgaaccagaatgccaatattacatgaagacaggagattgtaaatttggtgcagtgtgcaagttccatcatccccgtgtgagatcacagccccctccggattgtgtcttaagtccaatgggtcttccaatacgtccaggtgaagaactttgcaaattctattctcgttatggcatctgcaagttcggcgccaactgtaaatttgatcatcctacaatggctgctccaatgggagtttatgcatatggtttctctgggtctgcttctgtcgcacccgcttcaactaatgcacctatgacgcgacatcttcttggatctccatcaggttctggatatatgtcttaggtgtcttttttttcagttgacctactttgatgtataaaatccacggcatcgcctcaggcgctgtgaatgtttctcctaacttcccgccgggatgaagttctgtaaattgagttgctgctggagatgtacagcccccccccccccccccccctccccaattaatccagaactttgggaataactgttggaacctaataaacttcagatacagaaacgctggttttcaggtgtttgcactattttgacactgctgcacctatggtccctaacagttgaggtaggaattcttctgaaggagctgaaacctgtagctgcaggtgtgcagtcgaaattatattattgcgtcaatttatttggaacctgtattcagctggtgttggggcagatattggcattcctcttatctgtgaatgctggttttctgatttgaacagtgtatcccagcctacggcttctgccaagacagtaaactcaggacctgtttgggactgttccactattcaaaaaatgaatttgaatctgggattcattattaaagtttcgccgacgaatctgagatcctttttagatagcagcttattcacgtaaggatattctgtctgaaatagactaatttatttttatgatagacctcatttgtcagtgtgtattcttttatctattatataaagcatccgtcaccgttccgctttatataaaaatgaattaaaattatacacaagtgggcttttatatttatactcatctaaccaataaaatatatattttgtgttttattaaaataaag

SEQ ID NO: 208149 - DNA, 2329 bp, Zea Mays
atatacgaggggcagggccccccctcctctcccttcgtccattccgatcactcgctgctcccctctctcgccggagcgagccccgggccggatggcggcggcagcagcagctcctcccgcctccgcgatcgcgtgatggacgccgacgccgacgccgccgcgatccgccgatggacgacgccggaagggcaccaccacccgcgccagcggcggtgaccgtctccgccaccgccgcacccgcgcctaccccgccctccgccacggccgccgccgacaagtcctccctcgaccccgacgcgctttatgaagatggccatgaacagcggtgccacaatgcaacctgggtcatatcctgagcgaccaggtgaaccggactgcacttactacctcaggactggattgtgtcgatttggcatgagctgcaggttcaatcatcctccggataggaatctggttgaatctgtttaattttaggctattgcctctgccagaatgaagggagaatatcctgagagagtgggacagccagagtgtcagtattatctgaagaccggaacatgcaagtttggtcctacatgcaaatttcaccatcccagggaaaaggccggaattgcagggagggtgcagctaaacacattaggatatccacttctcccggtttgttttttcttgccagttacatgtcctcttctacatatgtctgtttgttttgctgaaaaggagtctactttacttttgtagaatgaaaaggagtgtgcgtattatttaaaaacaggacaatgtaaatatgcaaatacttgtaaattccaccacccagaacttttcaatgtggtgccttcgtcacgtggttcacctatttatacttctgtacattcctctgcaagcgctggtccacagtcatatactggaactatgtcaagctggacttttccacgagcttcttttataccaagccctaggtggcaaagtccttcaaattatgcaccaatggttgtacctcatggccttgtccaagtgccgagctggaattcatatcctggtcagctgcagtcacctggggctcaacaaacttatggaagttcacaacaaggcgaagctagtgcaggaaatcagggaatgctatcaccctatagatccagttcatttcctgtgcctcaatatgcgttgcagagagataatgtatttcctgagagacccgatgaaccagaatgccaatattacatgaagacaggagattgtaaatttggtgcagtgtgcaagttccatcatccccgtgtgagatcacagccccctccggattgtgtcttaagtccaatgggtcttccaatacgtccaggtgaagaactttgcaaattctattctcgttatggcatctgcaagttcggcgccaactgtaaatttgatcatcctacaatggctgctccaatgggagtttatgcatatggtttctctgggtctgcttctgtcgcacccgcttcaactaatgcacctatgacgcgacatcttcttggatctccatcaggttctggatatatgtcttaggtgtcttttttttcagttgacctactttgatgtataaaatccacggcatcgcctcaggcgctgtgaatgtttctcctaacttcccgccgggatgaagttctgtaaattgagttgctgctggagatgtacagcccccccccccccccccccctccccaattaatccagaactttgggaataactgttggaacctaataaacttcagatacagaaacgctggttttcaggtgtttgcactattttgacactgctgcacctatggtccctaacagttgaggtaggaattcttctgaaggagctgaaacctgtagctgcaggtgtgcagtcgaaattatattattgcgtcaatttatttggaacctgtattcagctggtgttggggcagatattggcattcctcttatctgtgaatgctggttttctgatttgaacagtgtatcccagcctacggcttctgccaagacagtaaactcaggacctgtttgggactgttccactattcaaaaaatgaatttgaatctgggattcattattaaagtttcgccgacgaatctgagatcctttttagatagcagcttattcacgtaaggatattctgtctgaaatagactaatttatttttatgatagacctcatttgtcagtgtgtattcttttatctattatataaagcatccgtcaccgttccgctttatataaaaatgaattaaaattatacacaagtgggcttttatatttatactcatctaaccaataaaatatatattttgtgttttattaaaataaag

SEQ ID NO: 208150 - DNA, 2011 bp, Zea Mays
gcttccgctgctctctccgttcgcgctccggcgcgtgtcgcggttgggggaattggggtttcggtgctcaattccccgtaggggatgtggcaacagatggccatgaacagcggtgccacaatgcaacctgggtcatatcctgagcgaccaggtgaaccggactgcacttactacctcaggactggattgtgtcgatttggcatgagctgcaggttcaatcatcctccggataggaatctggctattgcctctgccagaatgaagggagaatatcctgagagagtgggacagccagagtgtcagtattatctgaagaccggaacatgcaagtttggtcctacatgcaaatttcaccatcccagggaaaaggccggaattgcagggagggtgcagctaaacacattaggatatccacttctcccgaatgaaaaggagtgtgcgtattatttaaaaacaggacaatgtaaatatgcaaatacttgtaaattccaccacccagaacttttcaatgtggtgccttcgtcacgtggttcacctatttatacttctgtacattcctctgcaagcgctggtccacagtcatatactggaactatgtcaagctggacttttccacgagcttcttttataccaagccctaggtggcaaagtccttcaaattatgcaccaatggttgtacctcatggccttgtccaagtgccgagctggaattcatatcctggtcagctgcagtcacctggggctcaacaaacttatggaagttcacaacaaggcgaagctagtgcaggaaatcagggaatgctatcaccctatagatccagttcatttcctgtgcctcaatatgcgttgcagagagataatgtatttcctgagagacccgatgaaccagaatgccaatattacatgaagacaggagattgtaaatttggtgcagtgtgcaagttccatcatccccgtgtgagatcacagccccctccggattgtgtcttaagtccaatgggtcttccaatacgtccaggtgaagaactttgcaaattctattctcgttatggcatctgcaagttcggcgccaactgtaaatttgatcatcctacaatggctgctccaatgggagtttatgcatatggtttctctgggtctgcttctgtcgcacccgcttcaactaatgcacctatgacgcgacatcttcttggatctccatcaggttctggatatatgtcttaggtgtcttttttttcagttgacctactttgatgtataaaatccacggcatcgcctcaggcgctgtgaatgtttctcctaacttcccgccgggatgaagttctgtaaattgagttgctgctggagatgtacagcccccccccccccccccccctccccaattaatccagaactttgggaataactgttggaacctaataaacttcagatacagaaacgctggttttcaggtgtttgcactattttgacactgctgcacctatggtccctaacagttgaggtaggaattcttctgaaggagctgaaacctgtagctgcaggtgtgcagtcgaaattatattattgcgtcaatttatttggaacctgtattcagctggtgttggggcagatattggcattcctcttatctgtgaatgctggttttctgatttgaacagtgtatcccagcctacggcttctgccaagacagtaaactcaggacctgtttgggactgttccactattcaaaaaatgaatttgaatctgggattcattattaaagtttcgccgacgaatctgagatcctttttagatagcagcttattcacgtaaggatattctgtctgaaatagactaatttatttttatgatagacctcatttgtcagtgtgtattcttttatctattatataaagcatccgtcaccgttccgctttatataaaaatgaattaaaattatacacaagtgggcttttatatttatactcatctaaccaataaaatatatattttgtgttttattaaaataaag

SEQ ID NO: 208151 - DNA, 1879 bp, Zea Mays
aaagacccttggagtttttccctttctgttgtgtttcagttgcatcacggaacaaaatgcactccaagaagcaatgtctgaaaagcaaagctgtggtgatgtgtctatgctattgcctctgccagaatgaagggagaatatcctgagagagtgggacagccagagtgtcagtattatctgaagaccggaacatgcaagtttggtcctacatgcaaatttcaccatcccagggaaaaggccggaattgcagggagggtgcagctaaacacattaggatatccacttctcccgaatgaaaaggagtgtgcgtattatttaaaaacaggacaatgtaaatatgcaaatacttgtaaattccaccacccagaacttttcaatgtggtgccttcgtcacgtggttcacctatttatacttctgtacattcctctgcaagcgctggtccacagtcatatactggaactatgtcaagctggacttttccacgagcttcttttataccaagccctaggtggcaaagtccttcaaattatgcaccaatggttgtacctcatggccttgtccaagtgccgagctggaattcatatcctggtcagctgcagtcacctggggctcaacaaacttatggaagttcacaacaaggcgaagctagtgcaggaaatcagggaatgctatcaccctatagatccagttcatttcctgtgcctcaatatgcgttgcagagagataatgtatttcctgagagacccgatgaaccagaatgccaatattacatgaagacaggagattgtaaatttggtgcagtgtgcaagttccatcatccccgtgtgagatcacagccccctccggattgtgtcttaagtccaatgggtcttccaatacgtccaggtgaagaactttgcaaattctattctcgttatggcatctgcaagttcggcgccaactgtaaatttgatcatcctacaatggctgctccaatgggagtttatgcatatggtttctctgggtctgcttctgtcgcacccgcttcaactaatgcacctatgacgcgacatcttcttggatctccatcaggttctggatatatgtcttaggtgtcttttttttcagttgacctactttgatgtataaaatccacggcatcgcctcaggcgctgtgaatgtttctcctaacttcccgccgggatgaagttctgtaaattgagttgctgctggagatgtacagcccccccccccccccccccctccccaattaatccagaactttgggaataactgttggaacctaataaacttcagatacagaaacgctggttttcaggtgtttgcactattttgacactgctgcacctatggtccctaacagttgaggtaggaattcttctgaaggagctgaaacctgtagctgcaggtgtgcagtcgaaattatattattgcgtcaatttatttggaacctgtattcagctggtgttggggcagatattggcattcctcttatctgtgaatgctggttttctgatttgaacagtgtatcccagcctacggcttctgccaagacagtaaactcaggacctgtttgggactgttccactattcaaaaaatgaatttgaatctgggattcattattaaagtttcgccgacgaatctgagatcctttttagatagcagcttattcacgtaaggatattctgtctgaaatagactaatttatttttatgatagacctcatttgtcagtgtgtattcttttatctattatataaagcatccgtcaccgttccgctttatataaaaatgaattaaaattatacacaagtgggcttttatatttatactcatctaaccaataaaatatatattttgtgttttattaaaataaag

SEQ ID NO: 208152 - DNA, 1817 bp, Zea Mays
aagcaaagctgtggtgatgtgtctatgttgaatctgtttaattttaggctattgcctctgccagaatgaagggagaatatcctgagagagtgggacagccagagtgtcagtattatctgaagaccggaacatgcaagtttggtcctacatgcaaatttcaccatcccagggaaaaggccggaattgcagggagggtgcagctaaacacattaggatatccacttctcccggtttgttttttcttgccagttacatgtcctcttctacatatgtctgtttgttttgctgaaaaggagtctactttacttttgtagaatgaaaaggagtgtgcgtattatttaaaaacaggacaatgtaaatatgcaaatacttcgctggtccacagtcatatactggaactatgtcaagctggacttttccacgagcttcttttataccaagccctaggtggcaaagtccttcaaattatgcaccaatggttgtacctcatggccttgtccaagtgccgagctggaattcatatcctggtcagctgcagtcacctggggctcaacaaacttatggaagttcacaacaaggcgaagctagtgcaggaaatcagggaatgctatcaccctatagatccagttcatttcctgtgcctcaatatgcgttgcagagagataatgtatttcctgagagacccgatgaaccagaatgccaatattacatgaagacaggagattgtaaatttggtgcagtgtgcaagttccatcatccccgtgtgagatcacagccccctccggattgtgtcttaagtccaatgggtcttccaatacgtccaggtgaagaactttgcaaattctattctcgttatggcatctgcaagttcggcgccaactgtaaatttgatcatcctacaatggctgctccaatgggagtttatgcatatggtttctctgggtctgcttctgtcgcacccgcttcaactaatgcacctatgacgcgacatcttcttggatctccatcaggttctggatatatgtcttaggtgtcttttttttcagttgacctactttgatgtataaaatccacggcatcgcctcaggcgctgtgaatgtttctcctaacttcccgccgggatgaagttctgtaaattgagttgctgctggagatgtacagcccccccccccccccccccctccccaattaatccagaactttgggaataactgttggaacctaataaacttcagatacagaaacgctggttttcaggtgtttgcactattttgacactgctgcacctatggtccctaacagttgaggtaggaattcttctgaaggagctgaaacctgtagctgcaggtgtgcagtcgaaattatattattgcgtcaatttatttggaacctgtattcagctggtgttggggcagatattggcattcctcttatctgtgaatgctggttttctgatttgaacagtgtatcccagcctacggcttctgccaagacagtaaactcaggacctgtttgggactgttccactattcaaaaaatgaatttgaatctgggattcattattaaagtttcgccgacgaatctgagatcctttttagatagcagcttattcacgtaaggatattctgtctgaaatagactaatttatttttatgatagacctcatttgtcagtgtgtattcttttatctattatataaagcatccgtcaccgttccgctttatataaaaatgaattaaaattatacacaagtgggcttttatatttatactcatctaaccaataaaatatatattttgtgttttattaaaataaag

SEQ ID NO: 208153 - DNA, 487 bp, Zea Mays
gtaatcgatcaccacttgctgctaaacagcagaagaagaagagccggaagtgatctgatgtgtctgggccatcatcagacagtctggccagagtctggagctcgggaagagaacggacgaatagcttgtcaacatatacgcatcgctttgccaggagttcattatgttttttttttactttatacagagagttacgagttcacatgatctaaacactgtaaccttttgagttcacatcatctgaaatctgtgctgtatctattcggacttggagaaggaaaacgaaaacagtactatgacagtcgacaaggttataaagttatgatcttctcactcaccgtacaagacgcaacatcaagtttttgtaacctggctctgctactacaaatttcggtctcttaaagcttgcctgaaaatctgtaccatcagcaaataggtcactgtgcaccggtaatggtgacataagctgtctccacatcaatttaac

SEQ ID NO: 208154 - DNA, 890 bp, Zea Mays
caagggttgaagcaacatgaatccgccgcacccagagccgggccttccccgccgccaccaccacatggtccacctccacctcgacccgcgccaccaccaccacgtccacatccacctccgctgctgccatcatcaccaccacggcacccacctgctcgctcctgcgccgccggcccgcctcaacgacaaccagcagcggcacccggctcccgtactcttccccaacacctacccgaacccaagcgcggcgcctgggcagccagagccgccccgcgccgccgtaagggaggacgtggaggatttggatcccgagccggggctgctgcacgcggaggaggaggaggaggaagacgaggagccggtgttcgtacttacggacgagtgggcggagttcttcgccaaatccgaggccaagagaagactgctaaacagcagaagaagaagagccggaagtgatctgatgtgtctgggccatcatcagacagtctggccagagtctggagctcgggaagagaacggacgaatagcttgtcaacatatacgcatcgctttgccaggagttcattatgttttttttttactttatacagagagttacgagttcacatgatctaaacactgtaaccttttgagttcacatcatctgaaatctgtgctgtatctattcggacttggagaaggaaaacgaaaacagtactatgacagtcgacaaggttataaagttatgatcttctcactcaccgtacaagacgcaacatcaagtttttgtaacctggctctgctactacaaatttcggtctcttaaagcttgcctgaaaatctgtaccatcagcaaataggtcactgtgcaccggtaatggtgacataagctgtctccacatcaatttaac

SEQ ID NO: 208155 - DNA, 1980 bp, Zea Mays
gtgtgtttgatttgaggaatgaagtaattcatcttcttctcactcctcacctttttagttggtttgtggaatagaatgggttgatccatcaccaccccattcctcataagctaataattagtatatacatgatgagtgagttgattccaccaaaattgatggaatgaacttatgatgcatcacctcataaaacatagagtgactccacaaaccaaacacaccattagagagtcatttataaaatttgttttctatgttttttcactcttcaataacttttatattttatttgcactctagagagtcgtttttattttctatttttggctaaccagaaatttaaaataaaaggttagttttatttgtataatcattttaaaacctgttagaggatttctatttatcaaaatctctattcctagcaattagaaaagatatagaaaatcatttatagttgttgttaatatagatatacattaagataaaaaatagagataccgatatagatattatatatcaatatatttagagagatattagcagaacaaagtagatatataggtagggttaattaaagatacattcggttcctgataaaattcaattgaataattcaaatgtggccgcgtatgtgaactccgtcataaacgagaacccagccgctgagtagacttgtgttttcgcttccccttccccatcccctctcctcccctcgccggcttgtcggtctcgccgcgccactggccatacatccaagacgctaatccgtgtgggggaaaagcccccctctctctgaaactattcaaatggcgtggggcgtatccccgcggcggcagccgtcgttcccggtgcaggccctctacgagctctgcaagcgctccttcccctccccttccgccgcctcatcgtctcccccgcccgctgatgtcgtccgcagcatctcctcgctcatggatacaatcactcctgcggatgttgggctcagagattataatcttgaggacgacagggggcatggattttttgactccaacctcctcaagggttcaggaaggcttcctcggtgggcgcggcccatcaagtaccttcatatctacagctgtgatgcattctctattggaatattctgcttgccaacttcatcagtcattcctcttcatgatcatccaggaatgactgtactgagcaaaatcctttatggttccatgcatgtgaaatcatatgattggatagagcctactgtcctagcaagtagccagccagcaaggttggccaaattacatacagatgatgttcgtactgctccatgtccaacctccattttgtatccccaaagtggtgggaacctgcactgcttcacttcagtatcttcttgtgctgttcttgatgtccttgccccaccatataacgatgacgctggtcggatttgcacttattttcatgactatccattttcaagtctctcagctggacgcacgaaggtagctggtaacccagataattatgcatggctggaggccataaacactccagtgaatatcaacatgcacactggcatgtataccggtccaactgtacagacatgatgtaaagatgaaccggagcatcaagcagcagctgggtgcctcttcactgatagtagagctctaatatagtgatgtatgttctatactttgaggttagcttttcccctctggccccctttgttggagaaactgttgtacttcagttaagagataagttttcagagtaatttctcctaatcagtttagtagaggtttcaggttcactaacctgagcagtgatcaggcttttagcttatttatttatgttgtgcaacgctggaatggttttgaatgcaaaattgtcactgatgttgccgcattgccgtcttaactcgcgggggctggctgcatgccgatatcggtgtttgaacggaaagaggactcacaacaagaaatgaatgaacgatgttccatt

SEQ ID NO: 208156 - DNA, 2066 bp, Zea Mays
ctaatgcaaaaatgctcgaacactgacatgccagaagctacttgctacagtcgttcgccggaaacacacatgcacttatcttgttcaactgaggtctctagcagaaacacttgcctctgcagcttcctgcatcaaagatcctgaagcatctgcacagtacctgagggatctcatgggaccagtggcagggtgcctggtagaaaatgctagcaggagtgatctaaaatctgtggcacagcaagcagatgttatttacatggtaagtatgtataatgtttgctttgtgctcttttagagaagaataaaggacataggtcaatggttgtaggtctgttgcctattggaacgactaagaggcgctgctagagctactcaaccccgaactcaaaaagttctatttgagatggctcatactgtgatgaacccacttttgactcttctggaggtctacaaaaatcattccacagtcgtatacatgatactcaagtttgtggtggactttgttgatggtcaagctgtattcctggatgctaaagagacatcagctttggtgagcttttgcttgcaactactccagatatactcctctcataacattgggaaggtaatgctctctctttcttcaagtctgcgtaatgagtcacaagcagaaaaatataaggatctgcgagctttgcttcgtcttctgacaaatatatgttcgaaggatttggttggctttctgtctgattgtggcggtgaaggttcacctgatatcgcagaggttatctacattggtcttgatattgtgacccccttgatatctttggatcttctgaaataccctaaacttagtcgtgattattttgtgcttatatcgcacttgttggaactgtacccggaaaaggttgctcacttaaatagtgatgcttttacaaggattattggaagtcttgacttcgggctccgtaatcaggatagcgatgttgttgagaggtgcctggcagcagtaaatgctcttgcttcatacaatttcaaagaaagattaggagggagaggaagactgaactcgcagctcatggaatctgaaggatctaatggcaaactgcaggaaagcatatcaagtcacttcttgagacttctgttgcaaatacttctttttgaagatttcagatcggagttagcaggttatgctgccgatgctttgcttcctttattgttctgtgaacaggagctatatcagaggttggtccatgagttgttggataaacagcagaatccgaccgtaaaatcaaggctggcaactgcgttccataaccttacaagttcaaacaatctctcaagctcactcgaccggccaaacaggcagagattcaggaaaaacctccttagcttcatggcggatgtatcgggcttcatgcagatcaagtagatgcgatggcagggaacaggtgatgtttgaccggtcaattaaaccccgaggaagcactgcaccactgtggtaggggtgcatgtgggcaccacatgtctgtggattgatgagagcgaagactgccacgacaagtctagtagatcttgaagagctagtgtcaccagaaaagacagggagatgagctagtcttagggttggcattcatagcgcatttgctggacaagatggaggcgtccctggccacgagatcgtcgtgtaaatgcgtttgttagacgcacagaaacggtggggattttgtggtggcgactcgttttgttcaattcccacaggcagaaggtagagatgttaagttgatgtaaataccgtttgatttaaacatgccttattcgtaggagaaagcgacacggcttgctgtaacttagggtttattactctttctcgtggcataggatccccaaagaagtctttgctggggtatttgcagccaaacgatgaccagtatgattgcgagaggttttcaatcttttgtaccaaatttggcctgcagttatgatgacactgagtgccgatacaggcatgaggcattccaaaattggcgggcaccacatgtgtctgtctgctgtctcagtgggggtcactgtagagtgtaggcggt

SEQ ID NO: 208157 - DNA, 4410 bp, Zea Mays
aactatccagccaccattcacccctccgcactccgcctccgccgcctccctgccctcaactccacgcccggcagggtggccgctcgccggcagccaaaccctaggcgatcgcggaggccaaccacgcttcgggcgcgatcagccgccgccatgcagggcttccccggcggcgcccccgatccgcagcagctacaggccaccatgctcgccatcgagcaggcctgctccctcatccagctgcacatgaatccatctgaagcggaaaaagtgataacttcgctgcattcgtctctcatgccttatcaaagacatcccaaaaaccaaatgcaagattccaagctgctggtgcaattggtgatgctgcggtaagggagtggggagttcttacagatgacaataaaaggagcctaataatatattgtttaaactatgttatggagcatgcaagttctcctgatggctatgtgcaatcgaaagtttccgctgtggcagctagattactgaaaagaggctgggttgagttttcggaccaagaaaaagcagctatcttctttgaggttgagcaatctatccggggcatccatgggcctaatcgacagtttgctgcaatcaatttcttggaaaccttggtttcagaattctccccttcaactgcttctgctatgagcctgcctaaggaatttcacgaacaatgtgaatactcactcgaagtgcagtttttgaagatactaagttggaatttcaaacatactgtggagcacgagagttcagatgctaagataaatttcggcttaaggattgatacgataaatctgaagaagtttgaacgttcgttggtgaagccagggtctatgtggagagagattctaatatcaagtggacaccctacctgggttttaaacttctataccaccttgcgccaaaagtactcatatgatacactgtggggtgattctccaattgctgtctcttgcagacagcttatagtgcagttatgctccttggcaggctctgtgtttcctaatgataatggggatgcacagattaaacaccttatgctgatattatctgctgttgttctatggattgaacctcctgatgtaatcacagcatcaatccgaaatgggggaagtgaaagtgagttcatagatggttgccatgccttgctttcaatcgcatctttaactactggctcactttttgacaacctcctaaaatctataaggccctatggtacagttaatctgctttctgctttgacgtcagaagctgtcaagtcggttctgaataaccagagtgaagaggaaacctggggcatagattcccttgatattttgttagaaacatggaatgttcttttgggggacgtagatgccgataaaaatccaatctcaaccgatggagcacttgcatcttcaagtttgtttaagatgattgtggagtcacacttgaaggctgctgctgattctgcgttcgaggatactgatgatactgaatattttcatgtttctgtttcaaaacgtgatgaacagttagccttgtatgctctaatagcacgggcttctgcaaatactactattccatttcttgcacagttgttttcagaacgatttgcccggctaaatcaggtcttcttgttatcttgtaatttacctgagttattaagaaaggagaagctactaagctatactgcttcagtagccttgtacattctactgttttgtggtggtgtatttttacagttaacatttaatagatttttctaagcagagaaatggtgaaagtgatcctactcaaacactggaagagctctattggctgttgttggttactagtcatgtcctaactgactctggcgaaggagaaacactacttatccctgaagcattacaggctggattccctaatgtgattgaagcagcacatcatcctgttgttacactctcctggtctataataaatttttccaggcagtgtttagatccaggaattagggcaaaatacttcagtccacgactaatggaggctgtgatctggttcttggccagatgggttgcaacctatttagtgccacttgacgtgagtagaggaaaagtaagcagagaaattgataatgtgggtacaaatggatcccaacattccagaaaactgctaaacagttttgcttgggaaaataaccaaggagagcttgttcttgattttgttgttctcatttcaatgttagctcttactacctatcagggagaaaatgagttgcaggtaagcttcatttttactttttaatcatgatggaattgtgcagagtgcccagacatgtttgccccagttcaatttgcagtgcctaatgcaaaaatgctcgaacactgacatgccagaagctacttgctacagtcgttcgccggaaacacacatgcacttatcttgttcaactggattcatggcgtgatcttacaagagcttttgcaagtggacggtctttgctttcattgagtggacgtttacaaaggtctctagcagaaacacttgcctctgcagcttcctgcatcaaagatcctgaagcatctgcacagtacctgagggatctcatgggaccagtggcagggtgcctggtagaaaatgctagcaggagtgatctaaaatctgtggcacagcaagcagatgttatttacatggtctgttgcctattggaacgactaagaggcgctgctagagctactcaaccccgaactcaaaaagttctatttgagatggctcatactgtgatgaacccacttttgactcttctggaggtctacaaaaatcattccacagtcgtatacatgatactcaagtttgtggtggactttgttgatggtcaagctgtattcctggatgctaaagagacatcagctttggtgagcttttgcttgcaactactccagatatactcctctcataacattgggaaggtaatgctctctctttcttcaagtctgcgtaatgagtcacaagcagaaaaatataaggatctgcgagctttgcttcgtcttctgacaaatatatgttcgaaggatttggttggctttctgtctgattgtggcggtgaaggttcacctgatatcgcagaggttatctacattggtcttgatattgtgacccccttgatatctttggatcttctgaaataccctaaacttagtcgtgattattttgtgcttatatcgcacttgttggaactgtacccggaaaaggttgctcacttaaatagtgatgcttttacaaggattattggaagtcttgacttcgggctccgtaatcaggatagcgatgttgttgagaggtgcctggcagcagtaaatgctcttgcttcatacaatttcaaagaaagattaggagggagaggaagactgaactcgcagctcatggaatctgaaggatctaatggcaaactgcaggaaagcatatcaagtcacttcttgagacttctgttgcaaatacttctttttgaagatttcagatcggagttagcaggttatgctgccgatgctttgcttcctttattgttctgtgaacaggagctatatcagaggttggtccatgagttgttggataaacagcagaatccgaccgtaaaatcaaggctggcaactgcgttccataaccttacaagttcaaacaatctctcaagctcactcgaccggccaaacaggcagagattcaggaaaaacctccttagcttcatggcggatgtatcgggcttcatgcagatcaagtagatgcgatggcagggaacaggtgatgtttgaccggtcaattaaaccccgaggaagcactgcaccactgtggtaggggtgcatgtgggcaccacatgtctgtggattgatgagagcgaagactgccacgacaagtctagtagatcttgaagagctagtgtcaccagaaaagacagggagatgagctagtcttagggttggcattcatagcgcatttgctggacaagatggaggcgtccctggccacgagatcgtcgtgtaaatgcgtttgttagacgcacagaaacggtggggattttgtggtggcgactcgttttgttcaattcccacaggcagaaggtagagatgttaagttgatgtaaataccgtttgatttaaacatgccttattcgtaggagaaagcgacacggcttgctgtaacttagggtttattactctttctcgtggcataggatccccaaagaagtctttgctggggtatttgcagccaaacgatgaccagtatgattgcgagaggttttcaatcttttgtaccaaatttggcctgcagttatgatgacactgagtgccgatacaggcatgaggcattccaaaattggcgggcaccacatgtgtctgtctgctgtctcagtgggggtcactgtagagtgtaggcggt

SEQ ID NO: 208158 - DNA, 4203 bp, Zea Mays
caagacccaagctgcaaaactatccagccaccattcacccctccgcactccgcctccgccgcctccctgccctcaactccacgcccggcagggtggccgctcgccggcagccaaaccctaggcgatcgcggaggccaaccacgcttcgggcgcgatcagccgccgccatgcagggcttccccggcggcgcccccgatccgcagcagctacaggccaccatgctcgccatcgagcaggcctgctccctcatccagctgcacatgaatccatctgaagcggaaaaagtgataacttcgctgcattcgtctctcatgccttatcaagtatgcagattcattcttgagacatcccaaaaaccaaatgcaagattccaagctgctggtgcaattggtgatgctgcggtaagggagtggggagttcttacagatgacaataaaaggagcctaataatatattgtttaaactatgttatggagcatgcaagttctcctgatggctatgtgcaatcgaaagtttccgctgtggcagctagattactgaaaagaggctgggttgagttttcggaccaagaaaaagcagctatcttctttgaggttgagcaatctatccggggcatccatgggcctaatcgacagtttgctgcaatcaatttcttggaaaccttggtttcagaattctccccttcaactgcttctgctatgagcctgcctaaggaatttcacgaacaatgtgaatactcactcgaagtgcagtttttgaagatactaagttggaatttcaaacatactgtggagcacgagagttcagatgctaagataaatttcggcttaaggattgatacgataaatctgaagaagtttgaacgttcgttggtgaagccagggtctatgtggagagagattctaatatcaagtggacaccctacctgggttttaaacttctataccaccttgcgccaaaagtactcatatgatacactgtggggtgattctccaattgctgtctcttgcagacagcttatagtgcagttatgctccttggcaggctctgtgtttcctaatgataatggggatgcacagattaaacaccttatgctgatattatctgctgttgttctatggattgaacctcctgatgtaatcacagcatcaatccgaaatgggggaagtgaaagtgagttcatagatggttgccatgccttgctttcaatcgcatctttaactactggctcactttttgacaacctcctaaaatctataaggccctatggtacagttaatctgctttctgctttgacgtcagaagctgtcaagtcggttctgaataaccagagtgaagaggaaacctggggcatagattcccttgatattttgttagaaacatggaatgttcttttgggggacgtagatgccgataaaaatccaatctcaaccgatggagcacttgcatcttcaagtttgtttaagatgattgtggagtcacacttgaaggctgctgctgattctgcgttcgaggatactgatgatactgaatattttcatgtttctgtttcaaaacgtgatgaacagttagccttgtatgctctaatagcacgggcttctgcaaatactactattccatttcttgcacagttgttttcagaacgatttgcccggctaaatcagagaaatggtgaaagtgatcctactcaaacactggaagagctctattggctgttgttggttactagtcatgtcctaactgactctggcgaaggagaaacactacttatccctgaagcattacaggctggattccctaatgtgattgaagcagcacatcatcctgttgttacactctcctggtctataataaatttttccaggcagtgtttagatccaggaattagggcaaaatacttcagtccacgactaatggaggctgtgatctggttcttggccagatgggttgcaacctatttagtgccacttgacgtgagtagaggaaaagtaagcagagaaattgataatgtgggtacaaatggatcccaacattccagaaaactgctaaacagttttgcttgggaaaataaccaaggagagcttgttcttgattttgttgttctcatttcaatgttagctcttactacctatcagggagaaaatgagttgcagacactgacatgccagaagctacttgctacagtcgttcgccggaaacacacatgcacttatcttgttcaactggattcatggcgtgatcttacaagagcttttgcaagtggacggtctttgctttcattgagtggacgtttacaaaggtctctagcagaaacacttgcctctgcagcttcctgcatcaaagatcctgaagcatctgcacagtacctgagggatctcatgggaccagtggcagggtgcctggtagaaaatgctagcaggagtgatctaaaatctgtggcacagcaagcagatgttatttacatggtctgttgcctattggaacgactaagaggcgctgctagagctactcaaccccgaactcaaaaagttctatttgagatggctcatactgtgatgaacccacttttgactcttctggaggtctacaaaaatcattccacagtcgtatacatgatactcaagtttgtggtggactttgttgatggtcaagctgtattcctggatgctaaagagacatcagctttggtgagcttttgcttgcaactactccagatatactcctctcataacattgggaaggtaatgctctctctttcttcaagtctgcgtaatgagtcacaagcagaaaaatataaggatctgcgagctttgcttcgtcttctgacaaatatatgttcgaaggatttggttggctttctgtctgattgtggcggtgaaggttcacctgatatcgcagaggttatctacattggtcttgatattgtgacccccttgatatctttggatcttctgaaataccctaaacttagtcgtgattattttgtgcttatatcgcacttgttggaactgtacccggaaaaggttgctcacttaaatagtgatgcttttacaaggattattggaagtcttgacttcgggctccgtaatcaggatagcgatgttgttgagaggtgcctggcagcagtaaatgctcttgcttcatacaatttcaaagaaagattaggagggagaggaagactgaactcgcagctcatggaatctgaaggatctaatggcaaactgcaggaaagcatatcaagtcacttcttgagacttctgttgcaaatacttctttttgaagatttcagatcggagttagcaggttatgctgccgatgctttgcttcctttattgttctgtgaacaggagctatatcagaggttggtccatgagttgttggataaacagcagaatccgaccgtaaaatcaaggctggcaactgcgttccataaccttacaagttcaaacaatctctcaagctcactcgaccggccaaacaggcagagattcaggaaaaacctccttagcttcatggcggatgtatcgggcttcatgcagatcaagtagatgcgatggcagggaacaggtgatgtttgaccggtcaattaaaccccgaggaagcactgcaccactgtggtaggggtgcatgtgggcaccacatgtctgtggattgatgagagcgaagactgccacgacaagtctagtagatcttgaagagctagtgtcaccagaaaagacagggagatgagctagtcttagggttggcattcatagcgcatttgctggacaagatggaggcgtccctggccacgagatcgtcgtgtaaatgcgtttgttagacgcacagaaacggtggggattttgtggtggcgactcgttttgttcaattcccacaggcagaaggtagagatgttaagttgatgtaaataccgtttgatttaaacatgccttattcgtaggagaaagcgacacggcttgctgtaacttagggtttattactctttctcgtggcataggatccccaaagaagtctttgctggggtatttgcagccaaacgatgaccagtatgattgcgagaggttttcaatcttttgtaccaaatttggcctgcagttatgatgacactgagtgccgatacaggcatgaggcattccaaaattggcgggcaccacatgtgtctgtctgctgtctcagtgggggtcactgtagagtgtaggcggt

SEQ ID NO: 208159 - DNA, 4233 bp, Zea Mays
caagacccaagctgcaaaactatccagccaccattcacccctccgcactccgcctccgccgcctccctgccctcaactccacgcccggcagggtggccgctcgccggcagccaaaccctaggcgatcgcggaggccaaccacgcttcgggcgcgatcagccgccgccatgcagggcttccccggcggcgcccccgatccgcagcagctacaggccaccatgctcgccatcgagcaggcctgctccctcatccagctgcacatgaatccatctgaagcggaaaaagtgataacttcgctgcattcgtctctcatgccttatcaagtatgcagattcattcttgagacatcccaaaaaccaaatgcaagattccaagctgctggtgcaattggtgatgctgcggtaagggagtggggagttcttacagatgacaataaaaggagcctaataatatattgtttaaactatgttatggagcatgcaagttctcctgatggctatgtgcaatcgaaagtttccgctgtggcagctagattactgaaaagaggctgggttgagttttcggaccaagaaaaagcagctatcttctttgaggttgagcaatctatccggggcatccatgggcctaatcgacagtttgctgcaatcaatttcttggaaaccttggtttcagaattctccccttcaactgcttctgctatgagcctgcctaaggaatttcacgaacaatgtgaatactcactcgaagtgcagtttttgaaggatttttactgctgggcacaagctgctgtgttcaatactgctgacaaaatcttgaattcaactgtaacaataccggacgaaagagcatgttcagcagcattgcgcctgatgtttcagatactaagttggaatttcaaacatactgtggagcacgagagttcagatgctaagataaatttcggcttaaggattgatacgataaatctgaagaagtttgaacgttcgttggtgaagccagggtctatgtggagagagattctaatatcaagtggacaccctacctgggttttaaacttctataccaccttgcgccaaaagtactcatatgatacactgtggggtgattctccaattgctgtctcttgcagacagcttatagtgcagttatgctccttggcaggctctgtgtttcctaatgataatggggatgcacagattaaacaccttatgctgatattatctgctgttgttctatggattgaacctcctgatgtaatcacagcatcaatccgaaatgggggaagtgaaaggccctatggtacagttaatctgctttctgctttgacgtcagaagctgtcaagtcggttctgaataaccagagtgaagaggaaacctggggcatagattcccttgatattttgttagaaacatggaatgttcttttgggggacgtagatgccgataaaaatccaatctcaaccgatggagcacttgcatcttcaagtttgtttaagatgattgtggagtcacacttgaaggctgctgctgattctgcgttcgaggatactgatgatactgaatattttcatgtttctgtttcaaaacgtgatgaacagttagccttgtatgctctaatagcacgggcttctgcaaatactactattccatttcttgcacagttgttttcagaacgatttgcccggctaaatcagagaaatggtgaaagtgatcctactcaaacactggaagagctctattggctgttgttggttactagtcatgtcctaactgactctggcgaaggagaaacactacttatccctgaagcattacaggctggattccctaatgtgattgaagcagcacatcatcctgttgttacactctcctggtctataataaatttttccaggcagtgtttagatccaggaattagggcaaaatacttcagtccacgactaatggaggctgtgatctggttcttggccagatgggttgcaacctatttagtgccacttgacgtgagtagaggaaaagtaagcagagaaattgataatgtgggtacaaatggatcccaacattccagaaaactgctaaacagttttgcttgggaaaataaccaaggagagcttgttcttgattttgttgttctcatttcaatgttagctcttactacctatcagggagaaaatgagttgcagacactgacatgccagaagctacttgctacagtcgttcgccggaaacacacatgcacttatcttgttcaactggattcatggcgtgatcttacaagagcttttgcaagtggacggtctttgctttcattgagtggacgtttacaaaggtctctagcagaaacacttgcctctgcagcttcctgcatcaaagatcctgaagcatctgcacagtacctgagggatctcatgggaccagtggcagggtgcctggtagaaaatgctagcaggagtgatctaaaatctgtggcacagcaagcagatgttatttacatggtctgttgcctattggaacgactaagaggcgctgctagagctactcaaccccgaactcaaaaagttctatttgagatggctcatactgtgatgaacccacttttgactcttctggaggtctacaaaaatcattccacagtcgtatacatgatactcaagtttgtggtggactttgttgatggtcaagctgtattcctggatgctaaagagacatcagctttggtgagcttttgcttgcaactactccagatatactcctctcataacattgggaaggtaatgctctctctttcttcaagtctgcgtaatgagtcacaagcagaaaaatataaggatctgcgagctttgcttcgtcttctgacaaatatatgttcgaaggatttggttggctttctgtctgattgtggcggtgaaggttcacctgatatcgcagaggttatctacattggtcttgatattgtgacccccttgatatctttggatcttctgaaataccctaaacttagtcgtgattattttgtgcttatatcgcacttgttggaactgtacccggaaaaggttgctcacttaaatagtgatgcttttacaaggattattggaagtcttgacttcgggctccgtaatcaggatagcgatgttgttgagaggtgcctggcagcagtaaatgctcttgcttcatacaatttcaaagaaagattaggagggagaggaagactgaactcgcagctcatggaatctgaaggatctaatggcaaactgcaggaaagcatatcaagtcacttcttgagacttctgttgcaaatacttctttttgaagatttcagatcggagttagcaggttatgctgccgatgctttgcttcctttattgttctgtgaacaggagctatatcagaggttggtccatgagttgttggataaacagcagaatccgaccgtaaaatcaaggctggcaactgcgttccataaccttacaagttcaaacaatctctcaagctcactcgaccggccaaacaggcagagattcaggaaaaacctccttagcttcatggcggatgtatcgggcttcatgcagatcaagtagatgcgatggcagggaacaggtgatgtttgaccggtcaattaaaccccgaggaagcactgcaccactgtggtaggggtgcatgtgggcaccacatgtctgtggattgatgagagcgaagactgccacgacaagtctagtagatcttgaagagctagtgtcaccagaaaagacagggagatgagctagtcttagggttggcattcatagcgcatttgctggacaagatggaggcgtccctggccacgagatcgtcgtgtaaatgcgtttgttagacgcacagaaacggtggggattttgtggtggcgactcgttttgttcaattcccacaggcagaaggtagagatgttaagttgatgtaaataccgtttgatttaaacatgccttattcgtaggagaaagcgacacggcttgctgtaacttagggtttattactctttctcgtggcataggatccccaaagaagtctttgctggggtatttgcagccaaacgatgaccagtatgattgcgagaggttttcaatcttttgtaccaaatttggcctgcagttatgatgacactgagtgccgatacaggcatgaggcattccaaaattggcgggcaccacatgtgtctgtctgctgtctcagtgggggtcactgtagagtgtaggcggt

SEQ ID NO: 208160 - DNA, 4644 bp, Zea Mays
acaagacccaagctgcaaaactatccagccaccattcacccctccgcactccgcctccgccgcctccctgccctcaactccacgcccggcagggtggccgctcgccggcagccaaaccctaggcgatcgcggaggccaaccacgcttcgggcgcgatcagccgccgccatgcagggcttccccggcggcgcccccgatccgcagcagctacaggccaccatgctcgccatcgagcaggcctgctccctcatccagctgcacatgaatccatctgaagcggaaaaagtgataacttcgctgcattcgtctctcatgccttatcaagtatgcagattcattcttgagacatcccaaaaaccaaatgcaagattccaagctgctggtgcaattggtgatgctgcggtaagggagtggggagttcttacagatgacaataaaaggagcctaataatatattgtttaaactatgttatggagcatgcaagttctcctgatggctatgtgcaatcgaaagtttccgctgtggcagctagattactgaaaagaggctgggttgagttttcggaccaagaaaaagcagctatcttctttgaggttgagcaatctatccggggcatccatgggcctaatcgacagtttgctgcaatcaatttcttggaaaccttggtttcagaattctccccttcaactgcttctgctatgagcctgcctaaggaatttcacgaacaatgtgaatactcactcgaagtgcagtttttgaaggatttttactgctgggcacaagctgctgtgttcaatactgctgacaaaatcttgaattcaactgtaacaataccggacgaaagagcatgttcagcagcattgcgcctgatgtttcagatactaagttggaatttcaaacatactgtggagcacgagagttcagatgctaagataaatttcggcttaaggattgatacgataaatctgaagaagtttgaacgttcgttggtgaagggtctatgtggagagagattctaatatcaagtggacaccctacctgggttttaaacttctataccaccttgcgccaaaagtactcatatgatacactgtggggtgattctccaattgctgtctcttgcagacagcttatagtgcagttatgctccttggcaggctctgtgtttcctaatgataatggggatgcacagattaaacaccttatgctgatattatctgctgttgttctatggattgaacctcctgatgtaatcacagcatcaatccgaaatgggggaagtgaaagtgagttcatagatggttgccatgccttgctttcaatcgcatctttaactactggctcactttttgacaacctcctaaaatctataaggccctatggtacagttaatctgctttctgctttgacgtcagaagctgtcaagtcggttctgaataaccagagtgaagaggaaacctggggcatagattcccttgatattttgttagaaacatggaatgttcttttgggggacgtagatgccgataaaaatccaatctcaaccgatggagcacttgcatcttcaagtttgtttaagatgattgtggagtcacacttgaaggctgctgctgattctgcgttcgaggatactgatgatactgaatattttcatgtttctgtttcaaaacgtgatgaacagttagccttgtatgctctaatagcacgggcttctgcaaatactactattccatttcttgcacagttgttttcagaacgatttgcccggctaaatcagagaaatggtgaaagtgatcctactcaaacactggaagagctctattggctgttgttggttactagtcatgtcctaactgactctggcgaaggagaaacactacttatccctgaagcattacaggctggattccctaatgtgattgaagcagcacatcatcctgttgttacactctcctggtctataataaatttttccaggcagtgtttagatccaggaattagggcaaaatacttcagtccacgactaatggaggctgtgatctggttcttggccagatgggttgcaacctatttagtgccacttgacgtgagtagaggaaaagtaagcagagaaattgataatgtgggtacaaatggatcccaacattccagaaaactgctaaacagttttgcttgggaaaataaccaaggagagcttgttcttgattttgttgttctcatttcaatgttagctcttactacctatcagggagaaaatgagttgcaggtaagcttcatttttactttttaatcatgatggaattgtgcagagtgcccagacatgtttgccccagttcaatttgcagtgcctaatgcaaaaatgctcgagtaaaacatcttgatcttttgatttcattatctctttgatgtgactttagccttatcattccatcacactgtgcgattgatccaaaataccaaatactgcataacttgaccaaacattaacaatgccatcaactttcaagatttctcattagagtgttttcactagcgttagacaagataaaagtttccaatgtcccttatatgttgttttgattcctgttcacagacactgacatgccagaagctacttgctacagtcgttcgccggaaacacacatgcacttatcttgttcaactggattcatggcgtgatcttacaagagcttttgcaagtggacggtctttgctttcattgagtggacgtttacaaaggtctctagcagaaacacttgcctctgcagcttcctgcatcaaagatcctgaagcatctgcacagtacctgagggatctcatgggaccagtggcagggtgcctggtagaaaatgctagcaggagtgatctaaaatctgtggcacagcaagcagatgttatttacatggtctgttgcctattggaacgactaagaggcgctgctagagctactcaaccccgaactcaaaaagttctatttgagatggctcatactgtgatgaacccacttttgactcttctggaggtctacaaaaatcattccacagtcgtatacatgatactcaagtttgtggtggactttgttgatggtcaagctgtattcctggatgctaaagagacatcagctttggtgagcttttgcttgcaactactccagatatactcctctcataacattgggaaggtaatgctctctctttcttcaagtctgcgtaatgagtcacaagcagaaaaatataaggatctgcgagctttgcttcgtcttctgacaaatatatgttcgaaggatttggttggctttctgtctgattgtggcggtgaaggttcacctgatatcgcagaggttatctacattggtcttgatattgtgacccccttgatatctttggatcttctgaaataccctaaacttagtcgtgattattttgtgcttatatcgcacttgttggaactgtacccggaaaaggttgctcacttaaatagtgatgcttttacaaggattattggaagtcttgacttcgggctccgtaatcaggatagcgatgttgttgagaggtgcctggcagcagtaaatgctcttgcttcatacaatttcaaagaaagattaggagggagaggaagactgaactcgcagctcatggaatctgaaggatctaatggcaaactgcaggaaagcatatcaagtcacttcttgagacttctgttgcaaatacttctttttgaagatttcagatcggagttagcaggttatgctgccgatgctttgcttcctttattgttctgtgaacaggagctatatcagaggttggtccatgagttgttggataaacagcagaatccgaccgtaaaatcaaggctggcaactgcgttccataaccttacaagttcaaacaatctctcaagctcactcgaccggccaaacaggcagagattcaggaaaaacctccttagcttcatggcggatgtatcgggcttcatgcagatcaagtagatgcgatggcagggaacaggtgatgtttgaccggtcaattaaaccccgaggaagcactgcaccactgtggtaggggtgcatgtgggcaccacatgtctgtggattgatgagagcgaagactgccacgacaagtctagtagatcttgaagagctagtgtcaccagaaaagacagggagatgagctagtcttagggttggcattcatagcgcatttgctggacaagatggaggcgtccctggccacgagatcgtcgtgtaaatgcgtttgttagacgcacagaaacggtggggattttgtggtggcgactcgttttgttcaattcccacaggcagaaggtagagatgttaagttgatgtaaataccgtttgatttaaacatgccttattcgtaggagaaagcgacacggcttgctgtaacttagggtttattactctttctcgtggcataggatccccaaagaagtctttgctggggtatttgcagccaaacgatgaccagtatgattgcgagaggttttcaatcttttgtaccaaatttggcctgcagttatgatgacactgagtgccgatacaggcatgaggcattccaaaattggcgggcaccacatgtgtctgtctgctgtctcagtgggggtcactgtagagtgtaggcggt

SEQ ID NO: 208161 - DNA, 4302 bp, Zea Mays
acaagacccaagctgcaaaactatccagccaccattcacccctccgcactccgcctccgccgcctccctgccctcaactccacgcccggcagggtggccgctcgccggcagccaaaccctaggcgatcgcggaggccaaccacgcttcgggcgcgatcagccgccgccatgcagggcttccccggcggcgcccccgatccgcagcagctacaggccaccatgctcgccatcgagcaggcctgctccctcatccagctgcacatgaatccatctgaagcggaaaaagtgataacttcgctgcattcgtctctcatgccttatcaaagacatcccaaaaaccaaatgcaagattccaagctgctggtgcaattggtgatgctgcggtaagggagtggggagttcttacagatgacaataaaaggagcctaataatatattgtttaaactatgttatggagcatgcaagttctcctgatggctatgtgcaatcgaaagtttccgctgtggcagctagattactgaaaagaggctgggttgagttttcggaccaagaaaaagcagctatcttctttgaggttgagcaatctatccggggcatccatgggcctaatcgacagtttgctgcaatcaatttcttggaaaccttggtttcagaattctccccttcaactgcttctgctatgagcctgcctaaggaatttcacgaacaatgtgaatactcactcgaagtgcagtttttgaaggatttttactgctgggcacaagctgctgtgttcaatactgctgacaaaatcttgaattcaactgtaacaataccggacgaaagagcatgttcagcagcattgcgcctgatgtttcagatactaagttggaatttcaaacatactgtggagcacgagagttcagatgctaagataaatttcggcttaaggattgatacgataaatctgaagaagtttgaacgttcgttggtgaagccagggtctatgtggagagagattctaatatcaagtggacaccctacctgggttttaaacttctataccaccttgcgccaaaagtactcatatgatacactgtggggtgattctccaattgctgtctcttgcagacagcttatagtgcagttatgctccttggcaggctctgtgtttcctaatgataatggggatgcacagattaaacaccttatgctgatattatctgctgttgttctatggattgaacctcctgatgtaatcacagcatcaatccgaaatgggggaagtgaaagtgagttcatagatggttgccatgccttgctttcaatcgcatctttaactactggctcactttttgacaacctcctaaaatctataaggccctatggtacagttaatctgctttctgctttgacgtcagaagctgtcaagtcggttctgaataaccagagtgaagaggaaacctggggcatagattcccttgatattttgttagaaacatggaatgttcttttgggggacgtagatgccgataaaaatccaatctcaaccgatggagcacttgcatcttcaagtttgtttaagatgattgtggagtcacacttgaaggctgctgctgattctgcgttcgaggatactgatgatactgaatattttcatgtttctgtttcaaaacgtgatgaacagttagccttgtatgctctaatagcacgggcttctgcaaatactactattccatttcttgcacagttgttttcagaacgatttgcccggctaaatcagagaaatggtgaaagtgatcctactcaaacactggaagagctctattggctgttgttggttactagtcatgtcctaactgactctggcgaaggagaaacactacttatccctgaagcattacaggctggattccctaatgtgattgaagcagcacatcatcctgttgttacactctcctggtctataataaatttttccaggcagtgtttagatccaggaattagggcaaaatacttcagtccacgactaatggaggctgtgatctggttcttggccagatgggttgcaacctatttagtgccacttgacgtgagtagaggaaaagtaagcagagaaattgataatgtgggtacaaatggatcccaacattccagaaaactgctaaacagttttgcttgggaaaataaccaaggagagcttgttcttgattttgttgttctcatttcaatgttagctcttactacctatcagggagaaaatgagttgcagacactgacatgccagaagctacttgctacagtcgttcgccggaaacacacatgcacttatcttgttcaactggattcatggcgtgatcttacaagagcttttgcaagtggacggtctttgctttcattgagtggacgtttacaaaggtctctagcagaaacacttgcctctgcagcttcctgcatcaaagatcctgaagcatctgcacagtacctgagggatctcatgggaccagtggcagggtgcctggtagaaaatgctagcaggagtgatctaaaatctgtggcacagcaagcagatgttatttacatggtctgttgcctattggaacgactaagaggcgctgctagagctactcaaccccgaactcaaaaagttctatttgagatggctcatactgtgatgaacccacttttgactcttctggaggtctacaaaaatcattccacagtcgtatacatgatactcaagtttgtggtggactttgttgatggtcaagctgtattcctggatgctaaagagacatcagctttggtgagcttttgcttgcaactactccagatatactcctctcataacattgggaaggtaatgctctctctttcttcaagtctgcgtaatgagtcacaagcagaaaaatataaggatctgcgagctttgcttcgtcttctgacaaatatatgttcgaaggatttggttggctttctgtctgattgtggcggtgaaggttcacctgatatcgcagaggttatctacattggtcttgatattgtgacccccttgatatctttggatcttctgaaataccctaaacttagtcgtgattattttgtgcttatatcgcacttgttggaactgtacccggaaaaggttgctcacttaaatagtgatgcttttacaaggattattggaagtcttgacttcgggctccgtaatcaggatagcgatgttgttgagaggtgcctggcagcagtaaatgctcttgcttcatacaatttcaaagaaagattaggagggagaggaagactgaactcgcagctcatggaatctgaaggatctaatggcaaactgcaggaaagcatatcaagtcacttcttgagacttctgttgcaaatacttctttttgaagatttcagatcggagttagcaggttatgctgccgatgctttgcttcctttattgttctgtgaacaggagctatatcagaggttggtccatgagttgttggataaacagcagaatccgaccgtaaaatcaaggctggcaactgcgttccataaccttacaagttcaaacaatctctcaagctcactcgaccggccaaacaggcagagattcaggaaaaacctccttagcttcatggcggatgtatcgggcttcatgcagatcaagtagatgcgatggcagggaacaggtgatgtttgaccggtcaattaaaccccgaggaagcactgcaccactgtggtaggggtgcatgtgggcaccacatgtctgtggattgatgagagcgaagactgccacgacaagtctagtagatcttgaagagctagtgtcaccagaaaagacagggagatgagctagtcttagggttggcattcatagcgcatttgctggacaagatggaggcgtccctggccacgagatcgtcgtgtaaatgcgtttgttagacgcacagaaacggtggggattttgtggtggcgactcgttttgttcaattcccacaggcagaaggtagagatgttaagttgatgtaaataccgtttgatttaaacatgccttattcgtaggagaaagcgacacggcttgctgtaacttagggtttattactctttctcgtggcataggatccccaaagaagtctttgctggggtatttgcagccaaacgatgaccagtatgattgcgagaggttttcaatcttttgtaccaaatttggcctgcagttatgatgacactgagtgccgatacaggcatgaggcattccaaaattggcgggcaccacatgtgtctgtctgctgtctcagtgggggtcactgtagagtgtaggcggt

SEQ ID NO: 208162 - DNA, 4260 bp, Zea Mays
ttataaattactgcagcagccagccagccagcaaatcacgccggccccacaagacccaagctgcaaaactatccagccaccattcacccctccgcactccgcctccgccgcctccctgccctcaactccacgcccggcagggtggccgctcgccggcagccaaaccctaggcgatcgcggaggccaaccacgcttcgggcgcgatcagccgccgccatgcagggcttccccggcggcgcccccgatccgcagcagctacaggccaccatgctcgccatcgagcaggcctgctccctcatccagctgcacatgaatccatctgaagcggaaaaagtgataacttcgctgcattcgtctctcatgccttatcaagtatgcagattcattcttgagacatcccaaaaaccaaatgcaagattccaagctgctggtgcaattggtgatgctgcggtaagggagtggggagttcttacagatgacaataaaaggagcctaataatatattgtttaaactatgttatggagcatgcaagttctcctgatggctatgtgcaatcgaaagtttccgctgtggcagctagattactgaaaagaggctgggttgagttttcggaccaagaaaaagcagctatcttctttgaggttgagcaatctatccggggcatccatgggcctaatcgacagtttgctgcaatcaatttcttggaaaccttggtttcagaattctccccttcaactgcttctgctatgagcctgcctaaggaatttcacgaacaatgtgaatactcactcgaagtgcagtttttgaaggatttttactgctgggcacaagctgctgtgttcaatactgctgacaaaatcttgaattcaactgtaacaataccggacgaaagagcatgttcagcagcattgcgcctgatgtttcagatactaagttggaatttcaaacatactgtggagcacgagagttcagatgctaagataaatttcggcttaaggattgatacgataaatctgaagaagtttgaacgttcgttggtgaagccagggtctatgtggagagagattctaatatcaagtggacaccctacctgggttttaaacttctataccaccttgcgccaaaagtactcatatgatacactgtggggtgattctccaattgctgtctcttgcagacagcttatagtgcagttatgctccttggcaggctctgtgtttcctaatgataatggggatgcacagattaaacaccttatgctgatattatctgctgttgttctatggattgaacctcctgatgtaatcacagcatcaatccgaaatgggggaagtgaaagtgagttcatagatggttgccatgccttgctttcaatcgcatctttaactactggctcactttttgacaacctcctaaaatctataaggccctatggtacagttaatctgctttctgctttgacgtcagaagctgtcaagtcggttctgaataaccagagtgaagaggaaacctggggcatagattcccttgatattttgttagaaacatggaatgttcttttgggggacgtagatgccgataaaaatccaatctcaaccgatggagcacttgcatcttcaagtttgtttaagatgattgtggagtcacacttgaaggctgctgctgattctgcgttcgaggatactgatgatactgaatattttcatgtttctgtttcaaaacgtgatgaacagttagccttgtatgctctaatagcacgggcttctgcaaatactactattccatttcttgcacagttgttttcagaacgatttgcccggctaaatcagagaaatggtgaaagtgatcctactcaaacactggaagagctctattggctgttgttggttactagtcatgtcctaactgactctggcgaaggagaaacactacttatccctgaagcattacaggctggattccctaatgtgattgaagcagcacatcatcctgttgttacactctcctggtctataataaatttttccaggcagtgtttagatccaggaattagggcaaaatacttcagtccacgactaatggaggctgtgatctggttcttggccagatgggttgcaacctatttagtgccacttgacgtgagtagaggaaaagtaagcagagaaattgataatctcttactacctatcagggagaaaatgagttgcagacactgacatgccagaagctacttgctacagtcgttcgccggaaacacacatgcacttatcttgttcaactggattcatggcgtgatcttacaagagcttttgcaagtggacggtctttgctttcattgagtggacgtttacaaaggtctctagcagaaacacttgcctctgcagcttcctgcatcaaagatcctgaagcatctgcacagtacctgagggatctcatgggaccagtggcagggtgcctggtagaaaatgctagcaggagtgatctaaaatctgtggcacagcaagcagatgttatttacatggtctgttgcctattggaacgactaagaggcgctgctagagctactcaaccccgaactcaaaaagttctatttgagatggctcatactgtgatgaacccacttttgactcttctggaggtctacaaaaatcattccacagtcgtatacatgatactcaagtttgtggtggactttgttgatggtcaagctgtattcctggatgctaaagagacatcagctttggtgagcttttgcttgcaactactccagatatactcctctcataacattgggaaggtaatgctctctctttcttcaagtctgcgtaatgagtcacaagcagaaaaatataaggatctgcgagctttgcttcgtcttctgacaaatatatgttcgaaggatttggttggctttctgtctgattgtggcggtgaaggttcacctgatatcgcagaggttatctacattggtcttgatattgtgacccccttgatatctttggatcttctgaaataccctaaacttagtcgtgattattttgtgcttatatcgcacttgttggaactgtacccggaaaaggttgctcacttaaatagtgatgcttttacaaggattattggaagtcttgacttcgggctccgtaatcaggatagcgatgttgttgagaggtgcctggcagcagtaaatgctcttgcttcatacaatttcaaagaaagattaggagggagaggaagactgaactcgcagctcatggaatctgaaggatctaatggcaaactgcaggaaagcatatcaagtcacttcttgagacttctgttgcaaatacttctttttgaagatttcagatcggagttagcaggttatgctgccgatgctttgcttcctttattgttctgtgaacaggagctatatcagaggttggtccatgagttgttggataaacagcagaatccgaccgtaaaatcaaggctggcaactgcgttccataaccttacaagttcaaacaatctctcaagctcactcgaccggccaaacaggcagagattcaggaaaaacctccttagcttcatggcggatgtatcgggcttcatgcagatcaagtagatgcgatggcagggaacaggtgatgtttgaccggtcaattaaaccccgaggaagcactgcaccactgtggtaggggtgcatgtgggcaccacatgtctgtggattgatgagagcgaagactgccacgacaagtctagtagatcttgaagagctagtgtcaccagaaaagacagggagatgagctagtcttagggttggcattcatagcgcatttgctggacaagatggaggcgtccctggccacgagatcgtcgtgtaaatgcgtttgttagacgcacagaaacggtggggattttgtggtggcgactcgttttgttcaattcccacaggcagaaggtagagatgttaagttgatgtaaataccgtttgatttaaacatgccttattcgtaggagaaagcgacacggcttgctgtaacttagggtttattactctttctcgtggcataggatccccaaagaagtctttgctggggtatttgcagccaaacgatgaccagtatgattgcgagaggttttcaatcttttgtaccaaatttggcctgcagttatgatgacactgagtgccgatacaggcatgaggcattccaaaattggcgggcaccacatgtgtctgtctgctgtctcagtgggggtcactgtagagtgtaggcggt

SEQ ID NO: 208163 - DNA, 1296 bp, Zea Mays
gtagaagaagcgtctaaggggacgcgcacatgcgcccgcgtggcagaggctgacccgaccccaaggccgaacgggggaagggcggcagccccagcctccgggtagcgcagcggggccaggagctcagctccccgcctcgtctgggtcggttcggccccgctccgacgcgtggtgggcgcgagcgcgaccagtctgcgacccccggcttcagtcagcgttagtgaggttgaggctctattcgagctgttcaagagcataagtggttcggtgattgatgatggcctgatcaacaaggaagaattccagctagcactatttaagaatcagaggaaagaaaatcttttcgccaatcggatatttgaccttttcgatgtcaagaaaaggggtgtcattgattttggtgactttgtccgagctctaaatgtgtttcatccaaatatcccaatggaagaaaaagtcgatttctcgttcaagctatacgatatggatggcacagggtttattgaacgaaaggaggttaagcagatgttaattgctctcctaggagaatcagaaatgaggctatctgatgagatcattgagacaatcctggataagacattttcagatgctgatgcaaatcaggatggaaaaatagatagaacagagtgggagaattttgtcacaagaaatccttccttgatgaagataatgactctgccatacctcaaggacataacaacaacattccctagctttgtgtttaactcggaagtcgacgatctcgtcacgtgaccaccactctctccgatgtatagttaataaggagttttttctcccctcaaccgcaaaaaggagaacctgtcgagggttacgagtggagatttccagctttctctggcaatgaatggagggtgcgtcaaattggctgccacaaatgtacgagacgacctgtagttttcactcagggcttgtttgggagcaagtggaatgaagggtattgataggactataatcccttgctatctaaaattgaatagtggaggattatatgccctccaattcactccattacctttactcccaaacaagccctcaatggtaatgatgatgcttttgtgttggtgatgattgagactgagttagtatgcagatgtgaacagtttccatttttaccagtgggaaggctgttttgtttgtgaaactgcgatgtgcttgtttgcacactgtactgatcaaacctgattcttgtcaaagtagtactgcattcttcttcaagtcccaaaacttgcatcgcatgtcatataggtctctgag

SEQ ID NO: 208164 - DNA, 628 bp, Zea Mays
cgaaggtgtcaactggtcatagtgccttgtgtttcgagagctacagacagaggatattcaagctgttgacttctgcatattccacaattagagttgctgatgtggctcatttcatggggatgagtgaggaggatgcgacaaactatgctgtgcaaaacggttggagtttggatgcagcggccaagatgcttactgtcaaaaagccaaagtctcagaccaaccagaagcttgatgctagcaaactgcagcgtttgactgagtgtgttttccaccttgagaactgatgttcactgtcaatcgtgttgtgtccctgtttcttctctgctccacattgtaagaagcatgtttaccatgtgacagctatatgcctgagcgacttggcccctttcggccgaaaaggggtgatctctgaatttgcatcttatgtgatttctgacagcgtgctatgggttaatgtgcctattggtgacccctcctgccagtggctcattgaaatgagtcacactttgtcattagggcaagtataataacagcctataagccggctaaatgctgggttgtatgagagagaagagagaaaaaacgggctgtaaacttatagttaccttagacagaagaacaaaaaaaa

SEQ ID NO: 208165 - DNA, 1866 bp, Zea Mays
aatgaagaagggatacaccagcctaaagacacggagcaatcaggccctccactaacgcattgttccttttgcttttctggagacctggagcctggagggactagcattttagcaccgcactagcaactgactgcacacagactcagaaaccacggaggcaaagtgtgcacagcattatctccacctcaccttttgctttccgttattatatatggacaatccgggcggaccaataaccctatgattcgacagtggagcacacccgagctatatatacatctggatatgcacacacagtgttctgatgcagtgttcaagggaccggaaggattagagggggcagaaggagcgagatgggttccaggaaagcacacggggttttggaggaagggagttggcggatgaaaaggatcacaaggagcattccactgcctcttctgaaaagggagcggcgacggctgcaggggtggcgacaaatgattatgggcgctacgatccggctccggcgttttccaagcctcgcttcaagtttatacccaactgactcactgtgctgcttggcttctttgtgccacacgaaggtctctaaaaagtatggttttgtcgatgtttaagaagggttttctcagtctacctgatgagaaggttgatgacttatgtgaattgaggagtgatgttgcatctgcatgctagctatatggatggtgaggtctaagaaagattttatcaacttgcgtgggaggttctagctagccgcaggttaagtttgtttaaaaaacatattaatagtatgtatattatgtacatagatgacatatgagaattgagacgtgatccttcatatatgcttactatatatatgcacatgtggcatgtagaaatagccgtgtactgcagagaatgtgtgtaacttgtgtagtatctggtgttgctgcccctacgtacaccctactgaacgtagtcggcttcggttcttcagttctggcgttggatctttgatccggatgccataaagttggttctttcttaacaacaacaagtctacttattttcaatatttatgaaccgtattgatcacaaaagtcaacatgtgaattgcatgcgctagcctcgaaactcttcggtttcaccgtcagcaccagcttcaagtgtcatgttttgtgtcgactcgtggaaaacattagcgcaaatgacgaggtagactaggtcgaccgaggcaccaaagagccgcgaactgtccatactccatagtagcagttgtacactcgtaccaggtcgcagaaatccaacgcgctcctccatcctttgttcggatgtgtctacagaagaattaaatcatattctattcaattttgatttaatccttctccagtctcatttaaattcagacgcaatcaaacaagtcctaacaggtgaccacgtccgcgttcacgagcttgacgatcaacggctcaacgccacctcggaagaaaaaagagcagcgccagcacgaaactgcgcgcccatggacttggggagcactgcatagtataactcgatcggcgcgatggcgccgaacgcgcccgagagccccatgatcctttcaattcaccaaagccaccttgagaacgtactggggcgccagccacagcgcagacatgcagtgtgtcaggacatcagctaggaaaatacaagacaaggacagtgaggggctgagtcaagaagcagacggcgttcggaggctaggccggcgtgatagaaggcccaatcagtatgtgtctggagctgagtgggtccagtaagaaatagcagtgggctgtggccatgggccgtattgtaatagagacataaatactggtgttgttgacagagaaggggagaagaaat

SEQ ID NO: 208166 - DNA, 1365 bp, Zea Mays
gtaacgatacgatgcttgcagagcccacctaattgctgcgagatggatagagggcagaacgggagggatgacgtcttcggacgcagggatccattttctgggtttggcttcggcccccacaggagcttgttttctggtctccttggggggagggatccatttgacgatccgttctttacccatccgttcgggggtcggatgatgggtgaccatgacatgtttgtacctagtccttttgggccgatgggagggccttttggggacatgaggaacggtgggtttatcgagcaagctcctcctaggggtaacagaagaaggcctgtgatcacagaggtcgaggaggatggtggagagaacgcagagcatggtaaccagcagcctaaccaagatccttatgttcaggagccagacgatgggattgatgagacagaaggtggccaagtcgagctgcacagggatctcagtagggctaatagtggagggcagccgcaggctcgtactttcacatatcagagctcttccgtgacgtttggtggtattaatggagcttactacaccacttcaaagtctcggcggactggtagtgacgggatcactgtggaagaaagcaaggaagctgatacaacaactaaagaggctactcatagaatctcccgtggaatccatgacaagggacattccctgacaaggaaactgaattcggatgggaaggttgacaccacacagacactgcacaacctgaatgaagatgaactagctggatttgagcaatcatggaaggggaatgctggacattacttgcctgactggaaccacaatgctggtgcacctaatagcgataattctggtgaccgtagctccaatggacgtgaccggcgatcggcctcaggctgggcgcttcctgggaccgagcaaggccgtgatccgaggcgcaacgggaagccaaaatcacgggtcatccctatctcctgaagagcatggacggagtagatatatagagtagataaataaacagctggtttgtactactatgcaaggtttaggttcaagatcgtttcaaggaaacgacctgaggtccaggtaaccggagtccgcccagcacctcgcgtgctattgtctgattctgtagctgtacagtgctctgctaccttattatccgtgatgtgaaacaatttgtgtcgtccagtcttgctgtaaaatcatcatcgcgtatattgtaaacctgagtcggtatgtctgagttggctttgctgtgttgttgctagttgtttgggtcgctgaaggatgtgaagcgatctgcttctgtgtttgcgtaaaaaaaatagatgctctgctgctggctgtccaaaccgaaccagagccaga

SEQ ID NO: 208167 - DNA, 1357 bp, Zea Mays
aacgatacgatgcttgcagagcccacctaattgctgcgagatggatagagggcagaacgggagggatgacgtcttcggacgcagggatccattttctgggtttggcttcggcccccacaggagcttgttttctggtctccttggggggagggatccatttgacgatccgttctttacccatccgttcgggggtcggatgatgggtgaccatgacatgtttgtacctagtccttttgggccgatgggagggccttttggggacatgaggaacggtgggtttatcgagcaagctcctcctaggggtaacagaagaaggcctgtgatcacagaggtcgaggaggatggtggagagaacgcagagcatggtaaccagcagcctaaccaagatccttatgttcaggagccagacgatgggattgatgaaggtggccaagtcgagctgcacagggatctcagtagggctaatagtggagggcagccgcaggctcgtactttcacatatcagagctcttccgtgacgtttggtggtattaatggagcttactacaccacttcaaagtctcggcggactggtagtgacgggatcactgtggaagaaagcaaggaagctgatacaacaactaaagaggctactcatagaatctcccgtggaatccatgacaagggacattccctgacaaggaaactgaattcggatgggaaggttgacaccacacagacactgcacaacctgaatgaagatgaactagctggatttgagcaatcatggaaggggaatgctggacattacttgcctgactggaaccacaatgctggtgcacctaatagcgataattctggtgaccgtagctccaatggacgtgaccggcgatcggcctcaggctgggcgcttcctgggaccgagcaaggccgtgatccgaggcgcaacgggaagccaaaatcacgggtcatccctatctcctgaagagcatggacggagtagatatatagagtagataaataaacagctggtttgtactactatgcaaggtttaggttcaagatcgtttcaaggaaacgacctgaggtccaggtaaccggagtccgcccagcacctcgcgtgctattgtctgattctgtagctgtacagtgctctgctaccttattatccgtgatgtgaaacaatttgtgtcgtccagtcttgctgtaaaatcatcatcgcgtatattgtaaacctgagtcggtatgtctgagttggctttgctgtgttgttgctagttgtttgggtcgctgaaggatgtgaagcgatctgcttctgtgtttgcgtaaaaaaaatagatgctctgctgctggctgtccaaaccgaaccagagccaga

SEQ ID NO: 208168 - DNA, 1500 bp, Zea Mays
gtggagcgttcgctgtgaagtctgtagcgcctgtgtgcgcatttctgcttgattccttgctggtcggattggcggcggtgttctattcattcgatagagccaggaatgtgcatgcatgtcgatgggcgtatgacctcttctggaacaatcgatggcttgcagagcccacctaattgctgcgagatggatagagggcagaacgggagggatgacgtcttcggacgcagggatccattttctgggtttggcttcggcccccacaggagcttgttttctggtctccttggggggagggatccatttgacgatccgttctttacccatccgttcgggggtcggatgatgggtgaccatgacatgtttgtacctagtccttttgggccgatgggagggccttttggggacatgaggaacggtgggtttatcgagcaagctcctcctaggggtaacagaagaaggcctgtgatcacagaggtcgaggaggatggtggagagaacgcagagcatggtaaccagcagcctaaccaagatccttatgttcaggagccagacgatgggattgatgaaggtggccaagtcgagctgcacagggatctcagtagggctaatagtggagggcagccgcaggctcgtactttcacatatcagagctcttccgtgacgtttggtggtattaatggagcttactacaccacttcaaagtctcggcggactggtagtgacgggatcactgtggaagaaagcaaggaagctgatacaacaactaaagaggctactcatagaatctcccgtggaatccatgacaagggacattccctgacaaggaaactgaattcggatgggaaggttgacaccacacagacactgcacaacctgaatgaagatgaactagctggatttgagcaatcatggaaggggaatgctggacattacttgcctgactggaaccacaatgctggtgcacctaatagcgataattctggtgaccgtagctccaatggacgtgaccggcgatcggcctcaggctgggcgcttcctgggaccgagcaaggccgtgatccgaggcgcaacgggaagccaaaatcacgggtcatccctatctcctgaagagcatggacggagtagatatatagagtagataaataaacagctggtttgtactactatgcaaggtttaggttcaagatcgtttcaaggaaacgacctgaggtccaggtaaccggagtccgcccagcacctcgcgtgctattgtctgattctgtagctgtacagtgctctgctaccttattatccgtgatgtgaaacaatttgtgtcgtccagtcttgctgtaaaatcatcatcgcgtatattgtaaacctgagtcggtatgtctgagttggctttgctgtgttgttgctagttgtttgggtcgctgaaggatgtgaagcgatctgcttctgtgtttgcgtaaaaaaaatagatgctctgctgctggctgtccaaaccgaaccagagccaga

SEQ ID NO: 208169 - DNA, 553 bp, Zea Mays
tgacaacgagcagggccattcatggttatgaacaggtgaccgtagctccaatggacgtgaccggcgatcggcctcaggctgggcgcttcctgggaccgagcaaggccgtgatccgaggcgcaacgggaagccaaaatcacgggtcatccctatctcctgaagagcatggacggagtagatatatagagtagataaataaacagctggtttgtactactatgcaaggtttaggttcaagatcgtttcaaggaaacgacctgaggtccaggtaaccggagtccgcccagcacctcgcgtgctattgtctgattctgtagctgtacagtgctctgctaccttattatccgtgatgtgaaacaatttgtgtcgtccagtcttgctgtaaaatcatcatcgcgtatattgtaaacctgagtcggtatgtctgagttggctttgctgtgttgttgctagttgtttgggtcgctgaaggatgtgaagcgatctgcttctgtgtttgcgtaaaaaaaatagatgctctgctgctggctgtccaaaccgaaccagagccaga

SEQ ID NO: 208170 - DNA, 3188 bp, Zea Mays
ttcgcatggcccggcgctccctcggagccgacgggattcgccggaggtagcagcagccgtggatacgcgcgctcgcttgcgcgatttcagcccggtgcctgcgcagcggtcgcggtggattttctatcccgtgctgttgttgcttccgttcggtgtttttctcgtctattaggattcagttggtttcgtcagttttgggagtaggctgcgcgttcaagtggttagtttgcgatttttcaatctgtttctgctcttgcgccgcacgtattccacttccatcacgcgtcgcactgctgtaccctgccgcagtggtgctcgtcgctgtcgcgcatttgaaccgcgtcaaattcaaagtttttttatgcgtctggttgcctaataaaaaaaagcgtcaaatccgaattttcttttccgtgtatgctctgccgcctaatccaagttcgtaagtttcggtgcgggtgaaccgaactccaagcccgcttcctccaacaagaacccccgagatcggaaccccgcaaaagggagctttatttaaaggggaaattccccgtttaattgcatattggacatgtcttgtggcgtttgattggagaatttaattcttcccaacgatttccgttcttcggaggcttccatcttggtttcagttctgcagatctgtgactgagaggggaggaattccagtcagtcgtttatgaatcctggggcctgtgcttactagagggagggcaaggcaagttaggatccgagatgagggggagaaatgactccgggaacagcaagccggttgtgctgtgctgtgtgatgatcgtgtgcctatgcctcctcttcttgtatttctcgggctccaatggacaggctgggagcaccgcatttgagtacgggaccaaattctcacggtcacttggatggggcagtgatgatggttctgaagagtccatttttggaaccggggatgcagatgatgtcaagcctaagagctttcttgtgtgtgatgaccggcactctgagctgatcccctgcttggatcggaacttgatatatcaaatgaggctgaagctggatttaaacctgatggagcactatgagaggcattgccctccacctgaaaggcgttttaattgcttgattcctccaccacatggctataaggtccctataaaatggccaaaaagtcgtgatgtagtatggaaagcaaacattccacacactcaccttgcaaaagagaagtcagaccagaactggatggttgaagctggtgaaaaaatcaagtttccaggtggtgggacccattttcaccatggagctgacaaatacatatcaaatattgcaaatatgctaaatttcaaagataacaatataaacaatgaggggatgcttcgtacagttcttgatgttggttgtggagttgctagtttcggaggataccttctttcttctaatgtgatagcaatgtctttggcaccaaacgacgtgcatcagaatcagattcagtttgcactcgaaagaggaatccctgcatatcttggtgttttgggaacaaaaaggcttccatacccgagtagatcatttgaactagcccattgttcacgttgtaggatcgactggcttcaaagagatgggattcttctgctcgaactagacagattgctacggcctggaggttattttgcttactcctctcctgaagcatatgcacaagatgaggaagatctccgaatctggaaagaaatgagtgcccttgtagaaaggatgtgctggaaaattgcagagaaaagaaaccaaactgttatttgggtgaaacccctgaacaatgattgttacaagagacgagcacatggtacaacgccacctctatgcaaaagtggcgatgatccagattcagtatggggagtgccaatggaagcttgcattactccgtatcctgaacaaatgcacagagatgggggaagtgggctagctccctggcctgctcgattaacaaccccgcctccccgtcttgctgatttgtatgttactgctgacacatttgaaaaggacacggaaatgtggcagcaacgagtagaaaaatattggagtttgttgggcccaaaggtaaaaccagacactattagaaacatcatggacatgaaagcaaattttgggtcatttgctgctgcactcaaggaaaaagacgtatgggtgatgaatgttgtgccacatgatggaccaagcaccctcaagataatctatgatagagggctgataggcagcaatcatgactggtgtgaagccttctcgacctatcctcgaacatatgatcttctccacgcatgggcagtcttctccgacctcgataaaagaggctgcagtgctgaagacctgctcctcgaaatggaccgtatcctcaggcctaccgggtttgccatcgtgagggacaagggcactgtcatcgaattcatcaagaagtacctccacgcgctccactgggaagcagtagcggctgcagatgccgagcccagctcggaatcagaggagaacgagatgatcttggtgatccggaagaagttgtggctaccagaagcaggctcgcacacgtgattcccttcccggcgtctgcagctcagaagcgaggcgccagctgcaccagccatgatttatttctagccctactgcacacatggagatagatttattatttacgaggatacggaaaatatgtggcaggcctggattaaaaaaaggctatttttttctcattctcgacagatatgggacttgatgtttgttctctagtttggttaggaaataaacattctttttcgtcttaatgttgaggctcatttaggtgtttgatgtccatcaatggaagtctgatgtagtctgtagctagtgtatttagtgtttacttgaaagaactactgtacgcggatacgtggtttgcactagagcctcaagcctgcgggtccctcagctcgagacccactcatgcagatctcaacagggataacactccaatataaacaggttacagcgcatccgacaaagttgctctgaaattacatggatttatgctatacggtcaaaattcagcagcttaactatctctatctctatatttaaactctgccctataaacattgcagtatatagtataaaggcatctccaacaacctgtcctataaaaataccatataatttaaaaataa

SEQ ID NO: 208171 - DNA, 2832 bp, Zea Mays
ccagctttcatccaataggccaatacccacattcgctcgctctacccgactaccccgcaagtcgaggccttccgctggctctcgctcgctcgctcgccccgcgactggttgcctctccgccccgaccctgccctgagaccggagacgaccgcgccccgcggtggcgctgcgacccgcgatacggaaattccccgtttaattgcatattggacatgtcttgtggcgtttgattggagaatttaattcttcccaacgatttccgttcttcggaggcttccatcttggtttcagttctgcagatctgtgactgagaggggaggaattccagtcagtcgtttatgaatcctggggcctgtgcttactagagggagggcaaggcaagttaggatccgagatgagggggagaaatgactccgggaacagcaagccggttgtgctgtgctgtgtgatgatcgtgtgcctatgcctcctcttcttgtatttctcgggctccaatggacaggctgggagcaccgcatttgagtacgggaccaaattctcacggtcacttggatggggcagtgatgatggttctgaagagtccatttttggaaccggggatgcagatgatgtcaagcctaagagctttcttgtgtgtgatgaccggcactctgagctgatcccctgcttggatcggaacttgatatatcaaatgaggctgaagctggatttaaacctgatggagcactatgagaggcattgccctccacctgaaaggcgttttaattgcttgattcctccaccacatggctataaggtccctataaaatggccaaaaagtcgtgatgtagtatggaaagcaaacattccacacactcaccttgcaaaagagaagtcagaccagaactggatggttgaagctggtgaaaaaatcaagtttccaggtggtgggacccattttcaccatggagctgacaaatacatatcaaatattgcaaatatgctaaatttcaaagataacaatataaacaatgaggggatgcttcgtacagttcttgatgttggttgtggagttgctagtttcggaggataccttctttcttctaatgtgatagcaatgtctttggcaccaaacgacgtgcatcagaatcagattcagtttgcactcgaaagaggaatccctgcatatcttggtgttttgggaacaaaaaggcttccatacccgagtagatcatttgaactagcccattgttcacgttgtaggatcgactggcttcaaagagatgggattcttctgctcgaactagacagattgctacggcctggaggttattttgcttactcctctcctgaagcatatgcacaagatgaggaagatctccgaatctggaaagaaatgagtgcccttgtagaaaggatgtgctggaaaattgcagagaaaagaaaccaaactgttatttgggtgaaacccctgaacaatgattgttacaagagacgagcacatggtacaacgccacctctatgcaaaagtggcgatgatccagattcagtatggggagtgccaatggaagcttgcattactccgtatcctgaacaaatgcacagagatgggggaagtgggctagctccctggcctgctcgattaacaaccccgcctccccgtcttgctgatttgtatgttactgctgacacatttgaaaaggacacggaaatgtggcagcaacgagtagaaaaatattggagtttgttgggcccaaaggtaaaaccagacactattagaaacatcatggacatgaaagcaaattttgggtcatttgctgctgcactcaaggaaaaagacgtatgggtgatgaatgttgtgccacatgatggaccaagcaccctcaagataatctatgatagagggctgataggcagcaatcatgactggtgtgaagccttctcgacctatcctcgaacatatgatcttctccacgcatgggcagtcttctccgacctcgataaaagaggctgcagtgctgaagacctgctcctcgaaatggaccgtatcctcaggcctaccgggtttgccatcgtgagggacaagggcactgtcatcgaattcatcaagaagtacctccacgcgctccactgggaagcagtagcggctgcagatgccgagcccagctcggaatcagaggagaacgagatgatcttggtgatccggaagaagttgtggctaccagaagcaggctcgcacacgtgattcccttcccggcgtctgcagctcagaagcgaggcgccagctgcaccagccatgatttatttctagccctactgcacacatggagatagatttattatttacgaggatacggaaaatatgtggcaggcctggattaaaaaaaggctatttttttctcattctcgacagatatgggacttgatgtttgttctctagtttggttaggaaataaacattctttttcgtcttaatgttgaggctcatttaggtgtttgatgtccatcaatggaagtctgatgtagtctgtagctagtgtatttagtgtttacttgaaagaactactgtacgcggatacgtggtttgcactagagcctcaagcctgcgggtccctcagctcgagacccactcatgcagatctcaacagggataacactccaatataaacaggttacagcgcatccgacaaagttgctctgaaattacatggatttatgctatacggtcaaaattcagcagcttaactatctctatctctatatttaaactctgccctataaacattgcagtatatagtataaaggcatctccaacaacctgtcctataaaaataccatataatttaaaaataa

SEQ ID NO: 208172 - DNA, 1887 bp, Zea Mays
cggcgcggcgcgacgcgagttgcccgggcgccccggccttgtgcttctgcattggaccgcgatccaaatccagggaggatccgaacaggacaacagagaccctgccttgtcggggcagcacacttgggacgcgaggaggaggagttggtgagcgaactcgggatcagtgggtgaccgcagagttcttgcttcttcctcttggaggaggagggctgcagcctgcaggggccggagagagcaggaggaggcggagacatgggtagcttcgctaagctggcgaggagggcggtggagacggacgctccggtcatggtgaagatacaagaactgctccgaggggccaaggatgtgatgtcgcttgcgcagggagttgtttactggcaacctcccgagtcagctatggataagatcgaaaagatcatcagggaaccaatagtcagtaaatatggttctgatgatgggcttcctgagcttcgagaagcacttctcgaaaagctaagcagagagaataagcttaccaaatcatcagtcatggtcactgctggtgcaaatcaggcttttgtgaacttggtcctcactctctgtgatgctggtgattccgttgtcatgtttgcaccgtattatttcaatgcctacatgtcattccagatgacaggtgttactgacatattagttggtggctgcgatcccaagacacttcatcctgatgttgattggttggagaaggttctgaaagaaaatgagcctatccctaaacttgtcactgttgtgaatccggggaacccctctggagcttttattccaaggcctatgcttgagaggatttcagatctgtgcaaaaatgctggtgcatggcttgtggttgacaatacctatgagtactttatgtatgatggaatggagcactactgcttagaagatgctcatattgtcaacctcttctcgttctcaaaggcttatggaatgatggggtggcgtgtaggatacattgcatttccaaatgaagctgatggcttccacgatcagctcctcaaggtgcaagacaacataccgatctgcgcctccatcatcgggcagcgcctggcgctctactcgctggaggccggccccgagtggatcaaagaacgggtgaaagacctggtgaaaaaccgggcgctgctggtggaggcgctgtccccgctcggcgaggacaacgtcaagggcggggagggcgccatctacctctgggcaaagctaccggacagctgctcggacgacttcgaggctgtcaggtggctcgcgaacaagcacggcgtcgccgtgatccccgggagcgccagcggaggacccgggtacatccgcgtctccttcggagggctcaaggaagaagacaccaggctggctgctgagaggctcaggcgcggcctgcaggagctggtgaccgatggaatggtacagtgacggctccatgggtgtaagtaaaagctccaattttccaacggtgtaattccgccgtgattaattcgggagaagaaaaggaacttgttttcaagaatgcactgcgttgctcggacgagagacgggacggaataaaatgcgtctggtctgcagagtcacctatgttatgaatcatatgtagtgcatatgtcatgagtgacagagtgagtaattgtttctgttcgacttccagttctacatattactgatcgatggcagcaactgtacacagtcaaaggtataaccgtataagcaagaaccgtgagctgttcttgacgtgcagagcttgcctgttagcaaatatttctgtccagataacgacagcatctgccttcagaaccagcgtcacattctgtaatggcatggatgagtgtctccaagaaagataaatctactatatctacatgagcg

SEQ ID NO: 208173 - DNA, 6143 bp, Zea Mays
ggacagcacaattgtccatttggcctttttggtgtgatttctggactcacatttgagcttttaaaacctcctcttcctccgcacctgttcacccctttcttttccgttcttctccgtaccccaatcactgctactcaacagccaactctttcgcaaccaaatatttcttctggcgttttggggtttgcaaaccgctatcaacattggagttggagcagaatgtgatctgtccaattcttctcttgtcttatttttggcgtgctttgctcttctttccccctatttcctgaggaggggttcccgtcttaatctcttgcgtttagtgtggcttcgaagagttagcagctgccatggcacataatgtgtgggaggcggacaagatgttggattcctacatttatgattacctgttgaagaggaacctgcagaacacggcgaaggcattccaagccgaaagcaacgtgccttcggctcctgtttcgattgatgcgccaggggggtttctcttcgaatggtggtcggttttctgggacgtcttcattgcaagaacgaacgaaaaacattccgattctgccacttcttaccttgagtcaattaaagcacgggagcagcagcaacaatcgcagcaccagatccagacgcagcaactcttgctacagaggcatgcgcaacagcatccgcaagagcagcagcaatggcggcagcagaagcaacagcagcgcagcgaaaacactgattttccaactagtgcccagaatggtactgttgctgctgatccaccagcgcgacaaaatgatacaactgcaggtactttatctgcaaaagtatttgaggatagaatgaaaattactgttcagagggacgtttcagaagagacttcaatgaagcaaaggctcactgaaaccatttgcccattactggaatcaaacccaacttcaatgctaaagtcacctgcaagatcatctctagcttcagggccaatcttccaaagatcagctgggggcatgtccggttcattacagcaagctcagttcaggagccagccacttctgggatcaacacaggatattaaggcggaaacaaatgtagctttgaaccagagagctgcaggtgcagatggatcactatttggagtaccaggctctaatcaggcggggaacaatttgaccttgaaaggatggcctctcacaggattagaacagcttcgatctgggtttctccagcacaaatcttatatgtacccggcccagccattacaacaccagctccagtttctcactcctcagcagcagcatgctctaattcatgttcaagcacaacaaaatgccacttcacctggagacatggataacagacgacttcggatgctttttagcagccgaaacttggttcctgggagagatggtcaatcaactggtttcactgaaattgttcccagtgttggccagtcattgcaaaacatgtgcttacctatgcagcgcactgagacagatatgctgatgaagaagatagctgctctacagcaacaacagccgagtaacaatctgcaacagctcctccaacatccattactgagtcagcaacaacaaagctcaacttatcttgaaggtgagcaggaaaaaatgggtgctggaattgtaacagtggcttttgctggaaatgaacaggtttctaagaatcgaaatgggcgaaagcgcaaacatcctatctcctcgtctggcccagccaatagctctggtactacaaatactgctggtgcttcccccagttcaacaccttcaactctttctgcacattctcccggagaaacaatatcaacaccattgcagcaccaaaatgcgagctcatgtacgactttagttgtttatggttctgagggtccagtaccaataggatcgccgaccaatcaacttgttgatatggatcactataccgaggatgactccatggaagataatttagaaccattcttgccgcataatggcacaaatccaagagctgctggtagccattgtatcagttctggaaaaggatatatccttagagaggtatcttcagcccaagcaagcacaagcagtgttctgtgttgtcatttctcgtcagatggaaaattaattgctactggaggtcacgataagaaggttttcctgtggaatgctgacactctgaaacaaaaatcaatgctagaggagcattctctgctcataactgatgtgcgcttcagcccaagcactcctcgcctcgccacatcttcatttgacaaaactgtgagggtttgggatgctgataaccatggttattcaattcgtacgttcactgggcactcagcatctgttatgtcactcgatttccacccgaacaaggatgacctcatttgttcttgcgatggggacaacgagatacggttctggagcatcaagcatggaaatgctgtccgaattttcaagggaggttcgacccagctgagattccaaccacgttatggaggactccttgcaacggcttcagacaatgtagtctctatcctggatgtggagaggcaagcttgcgtgaggagatttgagagccacactaagggcgtcgattccgtgtgctgggatcccaccggcgagtacgtggtgtctgtcagtgaagacacggtgaaggtgtggtctttgaacgacgagagcttcgtgaacgagcttagctgcggcgggagaaagttcagttcgtgcactttccatcctacgtacccatccttgcttatcattggctgttaccagtctctggagctgtgggacatgtccgagaaccggagcatgactgttgcagcgcacgacagcctcgtctcggccctggcatcgtcgagctccggcctggttgcttcgagtggccatgacaagtatgtcaagctgtggagatgagcttcgactttcctgccctggcatgttaagtacggttgtggacgcgccccaacccttttggcaccattagctatctgcttgcattgcagtagcgctcaggagttaggatggtgactcgaccgcctgactgaacatgtgtccgctgaagtagcgtgcagtaaaaccctgaagaagtgggtttagcgcctagcttttgtataggaaattagaacacgggttatgttaagtatccaatgtctgtcactaccttgacatctgacatggcttgaaagcttttgctgctgcaactcggcttccgaaagggatcacatttctgtgctcgtgggtggcgtgtgtggtgtggtgttgcgtacaagacaagatgcaaggctagaaagataacggcagtcccaacttagaagaaaggaacccttgtagcccgtgatgcctagctaacgcaacgagattcccgtgttcaattctaattcgcacgtaggagtagcagatctgcggatctgccgttccgattcctctacgaggaagaacagctatgcctccggtcattcaagatctgtggccttgtttgctatgcctgcgtcgaatcatcttcttcgtctgcagacttgttcgagacgccaccctcccccgccgcgcgccgccgcccgcggacatggatctccttcgctctcatctccacaaggtccggatccccgagccaaccaaccgcatccacaaggacgagtgctgcgtctccttcgacactccgaggtcagagggaggcctgtacgtggacatggtctcgttcctggggttcgggagggagtacgtggagtggaacttcgagaagacggggaaccccgtgtacctccacatcgttcagcgccggaagccggagcccgacgaggcggatcgcccgcttaagaagcccaccctcctcgctataggtgtggaaggaggttttggtgatcaagaaccagaatatgatgaaacttttgaaatagtcatcttacctgattttatttgtcttccatttccgtcagttgatttgccagagaaggttaggcttgcggttgataaagttttacttgctgaaagtgctgatagaaaagaacaactggctgcttgggttgctgacaaaaagaacattagtgcatatgctatggacctgcagcagctagacaatggtgttattgtgcctcctactggatggaagtgtagcaaatgcgataaaactgagaacctctggctgaatttaactgatggtatgatcctttgtgggaggaagctctgggatggaagtggtgggaataatcatgccattgaacattatgaacagactaaataccctcttgcggtgaagcttggaacaattactgctgatttggaagcggcagatgttttctcgtaccctgaagatgatagtgttgaagatccgctattagctcagcacttatcacattttggtatcgatttttcttcactccaaaagactgagatgactactgctgagagggaacttgatgctaacacaaattatgactggaatagaatacaagaaagtggaaaagacgctgagcttctgtttggacccggctatactggtcttgcgaatcttgggaatagttgctatatggcttcaataatgcaagtcatgttttcaatccatcctttcatatcaaggtacttcgagaaacagagtttgaaagctgcatttgcaactgcacccgctgatccaacagtagacctaaacatgcaactgacaaaactagcgcatggtttgctctctggtaaatattctgctccagcaaaggaggggcaagaagggatacgttctcgcatgtttaagtcagttatcactgcgaaccatcctgaattttcaagcatgagacaacaggatgtccttgaattcttccttcaccttattgacagagttgagaaggcaaaccctggagaccgtgagctaaatcctttttccggtttcaagtttgttgttgaagagagggttcagtgcccttctgggaaggtttcttacaacaaacgatctgacaacgttctttctttgagcataccactgcatgaggcaactaataaagagcagctagaagcttttaatgagaagaaagctgcaatgaacttggatggaaaagaagtgtctaatgaggatattgtcaggcctagagtcccattggaggcatgcttgtcaagtttttcagggccagaggagattccagatttttatagcactgcattaaattcaaagactaccgtcactaagacagctggtttcactacctttcctgattaccttgtgctgcacatgcgtaagtttgtaatggaaacaggatgggtgccaaagaaactcgatgtttatatagatgtgccagatacaattgatatcacacatatgcgcagcaaaggattacagcctggggaagagctgctacctgaaggaggttctggtgacgacagtgccgagcctgctaatcctgttgccagtgaggatattgtaacccagcttgcaagcatgggcttcaactaccttcattgtcagaaagctgctattaacacatcaaacacaggagttgaggaagcgatgaattggctcctctcgcacatggatgatccagatataaacgacccaatatcaaaagattcacgtgcttatgagccatctgttgacgaagcaagtgttcaaactctcatctcctttggattccaggaagacattgccataaaggccctgaaagcttctggtggtaatatcgagaaagctacagactggattttcagccaccccgaagcatctacctcagcatctgctgattcttccactagcaatgtaaatgctgatgacacatatattccagatggaagtggcagatacaagctgatggcgttcgtgagccatatgggcacctctacccactgcgggcactacgtagctcatgtcctcaaagacgggaggtggacaatctttaacgacagcaaggtcgcagtatctgttgacctgcccaaggaaatgggctacctctatttctttcagaggattagcaactaggcacgtcacacacaatggaaagaatggtgggctgttaggatactgtcttgctgattttaaagcgaacgtttactcacatcctgccatgctggttactgaatggtcaaccgggatatttgcttttttgttccttgagacctcgattggcatcttccggttacataagaacaaaatcgcaatgaaagaaagtagacaataagaca

SEQ ID NO: 208174 - DNA, 3657 bp, Zea Mays
aacctacaaacgtatattcttaaataccttccccggcgcgatggccgcggccgcggcagaaacacagatgggcgacggggctccgccgccaggggctctatactccttcggaacgccgtggccggagctcaatcaaggcctcacctacaccgacacgttccgttgcgctgatgcggacgccgctaccaccttgattgagttctactctactaaccacaagagctcggcgccattgccagggtggatcaagaggattcgtaatgggcagataaccgttgatggtgaagttgtcactgatccagatatgactctggtggatgggtctaagttggtatatcatcgttttccttggcaggagccatttgcgccgtatttgctggaagtgctctacgaggatgatgacatggttgcccttaataagccttctggcttgcaagttctgcctaaaggactgtttcagcagcgaactgttttagcacagcttcaattgaaagactggaagatggcctcatcttgccggttcaagagaaaagatgtgcagtcacatccagtacctgttcatcgtttagggaggggaacatcaggcctcctgctttgtgccaagacaaaagttgccaaagttcgacttgcatcttattttgctgaaggtgctataaatgctgcaaagaaaagagttcagtgaagagcgaaaaatttcaaaattttatcgagccttagtgactggcatacttgatgatgatgaggttgttgttacgcaacctatagggttagttcattatcctggagttgcagagggactttatgcagcatgttcctcaggaaagccagcaatgagcaaagtatgtgttcttgagagacttgcacaccaaaatcacacactggtccaggttgaaattcattcaggacgacctcaccaaataaggatacaccttgcatacattgggcacccacttgtagatgaccctctctatggtattggtgggcaccccaattttgttgagccagaatctactggcacagatagttcttttgcatctgatgggggttatgagagacctttgcaacctgttcctggagactgtgggtatcacctgcatgcacattggctggttctttgccacccaacaaccaataagatggtaaaaattaccgctcctcttccacaaattctacagacacgggaggaacgccgcgctgcagctgagcaaaccggtggttgaacatgtagaatcttgaaaatgtatatttcttgaagttagcaagcagcaggttctcacagacgttagagttagacactcagacctctgctcctctgtcaactgtacaacggcgagctatggttccgcttgatgcagcgccgtctcatgtgacgtttaggccaggctaccgagatggagaaataacattaggtatttaaaaataaatagagtactagctaatgagctcacacaaatcttgttcagtctattcgaagcgcaattcgctgaaaaaatgtttcttcgctcacacaaatatgatttggtttgaaatggagggaggtgataattgtagaagaagatttccaatgaattcatttgcgtgcaatggacttggcgttacgcataactcccaaacattcctccccccaaaacctcccgaacaaagaggattcgaggggaattaaaggagggcgcggcggtggcgagcaccttccgctcagcgaggtagctgcacctgcaccggcgagctagccgcggcctctatgctcgcggggatctgaactagccgccgctgccccatcgcggcgatgactgcggcgccctctcctcatatcccattcccaacacaacactcattttctccattcccacgtaaaagatagaaaggcgagcatcgcagtgcacacgcgcaatggaaggctcgccggtggcgcgcctcccggaggctaattctctccccgacggcttcgtccccgacagcgagagctcagacacggacgcggctcctccctcctccgcgcccatagttgacgatgcaatcgactccgatagtcccgacgccaccaaccccggtggtgaggaaaccctaagtgatccctcccttcccgcgtccaccgccgaagatgcctcctcagccgccgctgctgaagcattggacacactttgtctggacgttgttgcggatccggagcgcgctctaggggagcacggacccaccactgctgcaagaggtgaaggatccttgaaggaaaatcgtgcatcagagcaagtgggcgctccaagtgatcaaaaggtggtcaaggggagcggtgagccaaaacgcaaggtcatcaagcatagcaagcttgagaaggacaaagagttatttcaactagcccagcaataccacaaagtggttgcagaaagggatcaagccattgcagtcaaagatagactagaatctctttgtagggaatttcagcgtcaaaacaaaatgctaaaggaagagtgccaaagggtatcgacagagggacagaacatgcgtacggaattgtctgaaaaatttgatcatgccataaagggtgtcagtgccaaacttgaggagcagagagttgagcgcatttctcagctagaagagaacaatacgttgagaagtaaactgaaagaccttgctgatcaatataacattactcagcagaaatatgctcaccaattgaaagagaaaatgctggaacttgaacttgctgatctgagacttcaacaacatcaagagaaggctgctcaggaacatacacaaatgcagttgtatgctgaacaagtttctcagcttatgactactgagaagaacctgcggttgcaactagcttctgacggggaaagatttcagcactttcaggatgccttgtcaaaaagcaatgaagtctttgaaacttacaagcaggagatggaaaagatgatttcagtgataaagaatcttaagaaggagaacgaatttctgaagggaaaatgtgagaactcagatattgctattgtgaagctcattgaagagcgtgagctaacaaagaagcaaatagagaaattgaaaaatcaaagggagaagctcgaatccctgtgtcgaacactacaggcagaaaggaaacaaggcccctccgccagtattccagatgccccttctagccaagaagtgtcagcgacaagtcaagaatcttaacattccagttgccccttctagccaagatgtgtcagcaacaagtcaagaatcttggcagttgtgcttgtcaatataccgttggtgccagctacagcttgcggagatttctgaagcctgacattcagctgtcaacctaccgtccgtctcaggccttttgatattgtggctagagcctagtggtgcattcctactcggtgttgttaccaagcatataagctctcggctgattccatctcttgtttttgtttgagacaaagcctgctgcattggagataattagatttttgccaatcataatattgtcttcttgttataattaccactgtgtctatgaattgtgggtctagctgggtctatgaaatgtgagtctgatgacaattttacaaacttgtttcttgctgatggtaaatatcagaatctctcgctgcattgtgagtgtgttaattattgtttgagacaaagctctcgcggctcccgttttggaatgat

SEQ ID NO: 208175 - DNA, 3301 bp, Zea Mays
tgctgtaagaaaggagaagttcttatcatttttttagaagatattttttcaagtattcacattatggatgcaagtcgaactttggcaatgatttatagggataaatcagagttcagtgaagagcgaaaaatttcaaaattttatcgagccttagtgactggcatacttgatgatgatgaggttgttgttacgcaacctatagggttagttcattatcctggagttgcagagggactttatgcagcatgttcctcaggaaagccagcaatgagcaaagtatgtgttcttgagagacttgcacaccaaaatcacacactggtccaggttgaaattcattcaggacgacctcaccaaataaggatacaccttgcatacattgggcacccacttgtagatgaccctctctatggtattggtgggcaccccaattttgttgagccagaatctactggcacagatagttcttttgcatctgatgggggttatgagagacctttgcaacctgttcctggagactgtgggtatcacctgcatgcacattggctggttctttgccacccaacaaccaataagatggtaaaaattaccgctcctcttccacaaattctacagacacgggaggaacgccgcgctgcagctgagcaaaccggtggttgaacatgtagaatcttgaaaatgtatatttcttgaagttagcaagcagcaggttctcacagacgttagagttagacactcagacctctgctcctctgtcaactgtacaacggcgagctatggttccgcttgatgcagcgccgtctcatgtgacgtttaggccaggctaccgagatggagaaataacattaggtatttaaaaataaatagagtactagctaatgagctcacacaaatcttgttcagtctattcgaagcgcaattcgctgaaaaaatgtttcttcgctcacacaaatatgatttggtttgaaatggagggaggtgataattgtagaagaagatttccaatgaattcatttgcgtgcaatggacttggcgttacgcataactcccaaacattcctccccccaaaacctcccgaacaaagaggattcgaggggaattaaaggagggcgcggcggtggcgagcaccttccgctcagcgaggtagctgcacctgcaccggcgagctagccgcggcctctatgctcgcggggatctgaactagccgccgctgccccatcgcggcgatgactgcggcgccctctcctcatatcccattcccaacacaacactcattttctccattcccacgtaaaagatagaaaggcgagcatcgcagtgcacacgcgcaatggaaggctcgccggtggcgcgcctcccggaggctaattctctccccgacggcttcgtccccgacagcgagagctcagacacggacgcggctcctccctcctccgcgcccatagttgacgatgcaatcgactccgatagtcccgacgccaccaaccccggtggtgaggaaaccctaagtgatccctcccttcccgcgtccaccgccgaagatgcctcctcagccgccgctgctgaagcattggacacactttgtctggacgttgttgcggatccggagcgcgctctaggggagcacggacccaccactgctgcaagaggtgattctctgtagtcctctctcgattttagttttcttcattcaccatgagtttcctgagcctagtcactatttctgaatggcagccattactatagcggttcagtgcaaacataggaaaataaggttttcatcgtggtagagtttgagctccagatgtgccttacgggctgtgtttccttaccatgttttaatgttcttttgtcaggtgaaggatccttgaaggaaaatcgtgcatcagagcaagtgggcgctccaagtgatcaaaaggtggtcaaggggagcggtgagccaaaacgcaaggtcatcaagcatagcaagcttgagaaggacaaagagttatttcaactagcccagcaataccacaaagtggttgcagaaagggatcaagccattgcagtcaaagatagactagaatctctttgtagggaatttcagcgtcaaaacaaaatgctaaaggaagagtgccaaagggtatcgacagagggacagaacatgcgtacggaattgtctgaaaaatttgatcatgccataaagggtgtcagtgccaaacttgaggagcagagagttgagcgcatttctcagctagaagagaacaatacgttgagaagtaaactgaaagaccttgctgatcaatataacattactcagcagaaatatgctcaccaattgaaagagaaaatgctggaacttgaacttgctgatctgagacttcaacaacatcaagagaaggctgctcaggaacatacacaaatgcagttgtatgctgaacaagtttctcagcttatgactactgagaagaacctgcggttgcaactagcttctgacggggaaagatttcagcactttcaggatgccttgtcaaaaagcaatgaagtctttgaaacttacaagcaggagatggaaaagatgatttcagtgataaagaatcttaagaaggagaacgaatttctgaagggaaaatgtgagaactcagatattgctattgtgaagctcattgaagagcgtgagctaacaaagaagcaaatagagaaattgaaaaatcaaagggagaagctcgaatccctgtgtcgaacactacaggcagaaaggaaacaaggcccctccgccagtattccagatgccccttctagccaagaagtgtcagcgacaagtcaagaatcttaacattccagttgccccttctagccaagatgtgtcagcaacaagtcaagaatcttggcagttgtgcttgtcaatataccgttggtgccagctacagcttgcggagatttctgaagcctgacattcagctgtcaacctaccgtccgtctcaggccttttgatattgtggctagagcctagtggtgcattcctactcggtgttgttaccaagcatataagctctcggctgattccatctcttgtttttgtttgagacaaagcctgctgcattggagataattagatttttgccaatcataatattgtcttcttgttataattaccactgtgtctatgaattgtgggtctagctgggtctatgaaatgtgagtctgatgacaattttacaaacttgtttcttgctgatggtaaatatcagaatctctcgctgcattgtgagtgtgttaattattgtttgagacaaagctctcgcggctcccgttttggaatgat

SEQ ID NO: 208176 - DNA, 4008 bp, Zea Mays
cgcccactacctcccaatcccaagtcccaactcgctccccattcgcctccctcccacccggctcctgtcctcttcccctccccaaccagcctccctcaaattcgccgatccccaaatcccgctcccctacaccacggtagctgagaagacggccggcgaagatgatgttcacggagggcctcgacgagtcggcgatcagctggatcaagcagggcatggactccccagcctcagccccagcccccgcacccccacggtccccgctgtcggagcgcccgccgctgggacaggtggcggcggcgccgaggagccccgcgctgcacgccaggccgtgcggggccggcgcaggcgtcggtttcttctcccccaagggcctcccgcaagtgcgggtgaacgggacgcaccactcgggcctgctcggccgccactccgtgctcctctcggtcgcggactccgatgagtgggaggacgagagcgtcgcatcgtggggcatgcccgaggactgctacggcggcggcaacttctccgagaccggcgacgaggcgtgctccagcgactccagactcatgcggagggccatggaccgctgcggcggagggtgggatgaggaggtcacgtcgcagctgagcaggaagggcggcggcggcgggatcgtgcgggggcagtccaaggagttcctgcgggtggaagtgcgaggtgcgggagcgttcgatgccgggaagtgctccggttccggggcacaacatccagtggactccatctcgcagggacgctactttgaggagcaggtattggggactcctagtgcccctccaattgcaggggtcgaggaggatgttatgtttcatgcagttgaaagggctgaaatggatggagggcttgagaggaatggagtatcatcagtagcagatatactggcccaagatgttcatgagcttcatacgagctcaattgttcatgaagatggcgttgagaataacttattagctcagataccgagcttcactattaatgtccaaaatgcatggcaatcctttgttgcatatgatgcatgcttcaggttatgtctgaatgcatgggcaagaaactgcatggaagctccagacttccttcgggatgagtgcatggtactgcgaagtgcctttggaatacagaacttcttgcttcatccaaaacacaatagtcaagttgatggtaaacaaatgtatgataaggatggaaattgtactataaagggaaggaaacttgttaaacagattgagattgaagtaaaaaagatacgggttgtacctcaaagaccaaagcttcgagcaacatcatcctttagaaatctctacatgcaagctggcagtgagtatgtcagacagatttctaagattctgaagagccaggttacgatgttgacatccacatcatctacatctttgccggaagaaatgttcacatgcactctagaactgcaaagttcttgcaaaggtcataagagagattcaatttctccacaatatttgaagccagggactggtgaatctcaactcttttatctagagagccagggggatgttattcttgttgaagtacaagacaacaatagggttgtcataggccgtgcaaaaattcaagtttcatcattgactgatactcaacaggatgaaatcatcaggtggtggcctctatatcttgatgatcaagattgtgtcggaaaagttcagcttggtatgaatttatccatgtcttccaataactatgggtccgaaaagatgctgcaaggtggccctgcagtggataccatcatatatgacatggttctggaagcggcaatgagggctcaaaatttcaacagcaaaatgcttcatatcaatggtccatggatttggctgttggacgagttttctgattactatggaatatctgatgcatatagaaaattgaggtacttgtcttacatcatgaacgtggcaataccaaccaaggattgtttggaacttatatatgaacttatcgttccagtcacaaaagcacgagaagatagaactttaacaagacaagagcgaagtattttgatagactgtgaagatcggattaagagtctccttgcagctctgtttgaaaattacaaatcactggatgaatattctccaactggcttgtcagatttatttggccccataacagattctgctgcaccagctttggcacctgctgttcagatattcagtgtactgcatgacattctctccaaagaagcacaagacatacttaggaactatttgcagattgctgctgcgaaaaggtgcaggaggcatatgatcgagacagatgaattcttatcaagcaataacgacagtcttcttacggaccctatgactatatctgctgcatatcttaaaatgaagacattgtgcattaacatgagtcgtgaaattcaagctgacattaagattcacaaccagaatatacttccaagttccatagatctgccaaacatagcagcatccctatatagtaccgaactctgcaagcggctgaaaggttttctttcttcaagtcccccatcaagaccagtacaacatgttgctgaactgataaccgcaacttctgagtttgagagagatcttgaatcttggcaagtgagacctgttcatggcggcgtaatttcgagacagctctttcatgactacatcatggtgtggattgaagacactcgattgcagttacttgataattgcaaagctgagaagatatcatgccctgccgtgtcaacagtctcgccatttgttgagcaaatgtatgagcaaataaaagagagcataaatgagtatggagtggttatcaatagatggcctcaatatctgatgagtttagagagtgctgttgctgatgttgagagagaaattatgaaggcactggagaagcaatacatggatattctaatgcccctaagagatggcataccagaaaaaattgagaagcaggtccagagattaacaagaagacaatctatagctccctatgttgtgccaaatcagttaggagcattcatgaacacagtaaaaaggatgctagatgtgttacactgccgagtcgaagacattctcaagtcatgggcagcgtaccttactatatcatgtgggaacactgtttttggagagcaaatgaactccatcacagtcatgctgaagaagaagtacaagaaatacctgcaagcgatagtggacaagcttgtcagcaacacacaagctaatcggaatacgagactcaagcgaattcttgaagaaacaagagaggctgatggtgaaagtgatatacgagataggatgcaggctgtccgcctccagctctcggattcaattcacaatctgcatgaggtcttctccagcagaatatttgttgctatttgccgaggtttctgggatcggttaggccagattgtgttgagatttcttgagagcagaaaggagaacaggatttggtaccgaggatctgactatgctctagggatccttgacgatgtctttgcatcggagatgcaaaagctgctgggcagcgctctgcaggacaaggacctggatccaccgcagtcagtgattgacgcccgctccatcctctgctagggcgtgtggcaacagttttctctacagattgcttcagcaaaaggccggcgttggtttagtttttgttttatatatattccttggtgtgcagaatatgtacagatggagacaaccgattattcctgttcatagtgttttgctgaattgttcaaataaatagtggttaaaaaaactgtagcccgtaaacaggttagagaacacaatctgtacttgattgtgtactttctacctcagttcttgccttccccatctaattccatccaaatattgtaccctgaattgagtgaaccttgatacaactgattcttgttggctcatatgtgttcaagcctgcaatttggagaacatcttttccccaatttacctcacctgtgccatggccacaacgactgag

SEQ ID NO: 208177 - DNA, 3960 bp, Zea Mays
cgcccactacctcccaatcccaagtcccaactcgctccccattcgcctccctcccacccggctcctgtcctcttcccctccccaaccagcctccctcaaattcgccgatccccaaatcccgctcccctacaccacggtagctgagaagacggccggcgaagatgatgttcacggagggcctcgacgagtcggcgatcagctggatcaagcagggcatggactccccagcctcagccccagcccccgcacccccacggtccccgctgtcggagcgcccgccgctgggacaggtggcggcggcgccgaggagccccgcgctgcacgccaggccgtgcggggccggcgcaggcgtcggtttcttctcccccaagggcctcccgcaagtgcgggtgaacgggacgcaccactcgggcctgctcggccgccactccgtgctcctctcggtcgcggactccgatgagtgggaggacgagagcgtcgcatcgtggggcatgcccgaggactgctacggcggcggcaacttctccgagaccggcgacgaggcgtgctccagcgactccagactcatgcggagggccatggaccgctgcggcggagggtgggatgaggaggtcacgtcgcagctgagcaggaagggcggcggcggcgggatcgtgcgggggcagtccaaggagttcctgcgggtggaagtgcgaggtgcgggagcgttcgatgccgggaagtgctccggttccggggcacaacatccagtggactccatctcgcagggacgctactttgaggagcaggtattggggactcctagtgcccctccaattgcaggggtcgaggaggatgttatgtttcatgcagttgaaagggctgaaatggatggagggcttgagaggaatggagtatcatcagtagcagatatactggcccaagatgttcatgagcttcatacgagctcaattgttcatgaagatggcgttgagaataacttattagctcagataccgagcttcactattaagttatgtctgaatgcatgggcaagaaactgcatggaagctccagacttccttcgggatgagtgcatggtactgcgaagtgcctttggaatacagaacttcttgcttcatccaaaacacaatagtcaagttgatggtaaacaaatgtatgataaggatggaaattgtactataaagggaaggaaacttgttaaacagattgagattgaagtaaaaaagatacgggttgtacctcaaagaccaaagcttcgagcaacatcatcctttagaaatctctacatgcaagctggcagtgagtatgtcagacagatttctaagattctgaagagccaggttacgatgttgacatccacatcatctacatctttgccggaagaaatgttcacatgcactctagaactgcaaagttcttgcaaaggtcataagagagattcaatttctccacaatatttgaagccagggactggtgaatctcaactcttttatctagagagccagggggatgttattcttgttgaagtacaagacaacaatagggttgtcataggccgtgcaaaaattcaagtttcatcattgactgatactcaacaggatgaaatcatcaggtggtggcctctatatcttgatgatcaagattgtgtcggaaaagttcagcttggtatgaatttatccatgtcttccaataactatgggtccgaaaagatgctgcaaggtggccctgcagtggataccatcatatatgacatggttctggaagcggcaatgagggctcaaaatttcaacagcaaaatgcttcatatcaatggtccatggatttggctgttggacgagttttctgattactatggaatatctgatgcatatagaaaattgaggtacttgtcttacatcatgaacgtggcaataccaaccaaggattgtttggaacttatatatgaacttatcgttccagtcacaaaagcacgagaagatagaactttaacaagacaagagcgaagtattttgatagactgtgaagatcggattaagagtctccttgcagctctgtttgaaaattacaaatcactggatgaatattctccaactggcttgtcagatttatttggccccataacagattctgctgcaccagctttggcacctgctgttcagatattcagtgtactgcatgacattctctccaaagaagcacaagacatacttaggaactatttgcagattgctgctgcgaaaaggtgcaggaggcatatgatcgagacagatgaattcttatcaagcaataacgacagtcttcttacggaccctatgactatatctgctgcatatcttaaaatgaagacattgtgcattaacatgagtcgtgaaattcaagctgacattaagattcacaaccagaatatacttccaagttccatagatctgccaaacatagcagcatccctatatagtaccgaactctgcaagcggctgaaaggttttctttcttcaagtcccccatcaagaccagtacaacatgttgctgaactgataaccgcaacttctgagtttgagagagatcttgaatcttggcaagtgagacctgttcatggcggcgtaatttcgagacagctctttcatgactacatcatggtgtggattgaagacactcgattgcagttacttgataattgcaaagctgagaagatatcatgccctgccgtgtcaacagtctcgccatttgttgagcaaatgtatgagcaaataaaagagagcataaatgagtatggagtggttatcaatagatggcctcaatatctgatgagtttagagagtgctgttgctgatgttgagagagaaattatgaaggcactggagaagcaatacatggatattctaatgcccctaagagatggcataccagaaaaaattgagaagcaggtccagagattaacaagaagacaatctatagctccctatgttgtgccaaatcagttaggagcattcatgaacacagtaaaaaggatgctagatgtgttacactgccgagtcgaagacattctcaagtcatgggcagcgtaccttactatatcatgtgggaacactgtttttggagagcaaatgaactccatcacagtcatgctgaagaagaagtacaagaaatacctgcaagcgatagtggacaagcttgtcagcaacacacaagctaatcggaatacgagactcaagcgaattcttgaagaaacaagagaggctgatggtgaaagtgatatacgagataggatgcaggctgtccgcctccagctctcggattcaattcacaatctgcatgaggtcttctccagcagaatatttgttgctatttgccgaggtttctgggatcggttaggccagattgtgttgagatttcttgagagcagaaaggagaacaggatttggtaccgaggatctgactatgctctagggatccttgacgatgtctttgcatcggagatgcaaaagctgctgggcagcgctctgcaggacaaggacctggatccaccgcagtcagtgattgacgcccgctccatcctctgctagggcgtgtggcaacagttttctctacagattgcttcagcaaaaggccggcgttggtttagtttttgttttatatatattccttggtgtgcagaatatgtacagatggagacaaccgattattcctgttcatagtgttttgctgaattgttcaaataaatagtggttaaaaaaactgtagcccgtaaacaggttagagaacacaatctgtacttgattgtgtactttctacctcagttcttgccttccccatctaattccatccaaatattgtaccctgaattgagtgaaccttgatacaactgattcttgttggctcatatgtgttcaagcctgcaatttggagaacatcttttccccaatttacctcacctgtgccatggccacaacgactgag

SEQ ID NO: 208178 - DNA, 3708 bp, Zea Mays
cgcccactacctcccaatcccaagtcccaactcgctccccattcgcctccctcccacccggctcctgtcctcttcccctccccaaccagcctccctcaaattcgccgatccccaaatcccgctcccctacaccacggtagctgagaagacggccggcgaagatgatgttcacggagggcctcgacgagtcggcgatcagctggatcaagcagggcatggactccccagcctcagccccagcccccgcacccccacggtccccgctgtcggagcgcccgccgctgggacaggtggcggcggcgccgaggagccccgcgctgcacgccaggccgtgcggggccggcgcaggcgtcggtttcttctcccccaagggcctcccgcaagtgcgggtgaacgggacgcaccactcgggcctgctcggccgccactccgtgctcctctcggtcgcggactccgatgagtgggaggacgagagcgtcgcatcgtggggcatgcccgaggactgctacggcggcggcaacttctccgagaccggcgacgaggcgtgctccagcgactccagactcatgcggagggccatggaccgctgcggcggagggtgggatgaggaggtcacgtcgcagctgagcaggaagggcggcggcggcgggatcgtgcgggggcagtccaaggagttcctgcgggtggaagtgcgaggtgcgggagcgttcgatgccgggaagtgctccggttccggggcacaacatccagtggactccatctcgcagggacgctactttgaggagcaggtattggggactcctagtgcccctccaattgcaggggtcgaggaggatgttatgtttcatgcagttgaaagggctgaaatggatggagggcttgagaggaatggagtatcatcagtagcagatatactggcccaagatgttcatgagcttcatacgagctcaattgttcatgaagatggcgttgagaataacttattagctcagataccgagcttcactattaaaatacagaacttcttgcttcatccaaaacacaatagtcaagttgatggtaaacaaatgtatgataaggatggaaattgtactataaagggaaggaaacttgttaaacagattgagattgaagaaatgttcacatgcactctagaactgcaaagttcttgcaaaggtcataagagagattcaatttctccacaatatttgaagccagggactggtgaatctcaactcttttatctagagagccagggggatgttattcttgttgaagtacaagacaacaatagggttgtcataggccgtgcaaaaattcaagtttcatcattgactgatactcaacaggatgaaatcatcaggtggtggcctctatatcttgatgatcaagattgtgtcggaaaagttcagcttggtatgaatttatccatgtcttccaataactatgggtccgaaaagatgctgcaaggtggccctgcagtggataccatcatatatgacatggttctggaagcggcaatgagggctcaaaatttcaacagcaaaatgcttcatatcaatggtccatggatttggctgttggacgagttttctgattactatggaatatctgatgcatatagaaaattgaggtacttgtcttacatcatgaacgtggcaataccaaccaaggattgtttggaacttatatatgaacttatcgttccagtcacaaaagcacgagaagatagaactttaacaagacaagagcgaagtattttgatagactgtgaagatcggattaagagtctccttgcagctctgtttgaaaattacaaatcactggatgaatattctccaactggcttgtcagatttatttggccccataacagattctgctgcaccagctttggcacctgctgttcagatattcagtgtactgcatgacattctctccaaagaagcacaagacatacttaggaactatttgcagattgctgctgcgaaaaggtgcaggaggcatatgatcgagacagatgaattcttatcaagcaataacgacagtcttcttacggaccctatgactatatctgctgcatatcttaaaatgaagacattgtgcattaacatgagtcgtgaaattcaagctgacattaagattcacaaccagaatatacttccaagttccatagatctgccaaacatagcagcatccctatatagtaccgaactctgcaagcggctgaaaggttttctttcttcaagtcccccatcaagaccagtacaacatgttgctgaactgataaccgcaacttctgagtttgagagagatcttgaatcttggcaagtgagacctgttcatggcggcgtaatttcgagacagctctttcatgactacatcatggtgtggattgaagacactcgattgcagttacttgataattgcaaagctgagaagatatcatgccctgccgtgtcaacagtctcgccatttgttgagcaaatgtatgagcaaataaaagagagcataaatgagtatggagtggttatcaatagatggcctcaatatctgatgagtttagagagtgctgttgctgatgttgagagagaaattatgaaggcactggagaagcaatacatggatattctaatgcccctaagagatggcataccagaaaaaattgagaagcaggtccagagattaacaagaagacaatctatagctccctatgttgtgccaaatcagttaggagcattcatgaacacagtaaaaaggatgctagatgtgttacactgccgagtcgaagacattctcaagtcatgggcagcgtaccttactatatcatgtgggaacactgtttttggagagcaaatgaactccatcacagtcatgctgaagaagaagtacaagaaatacctgcaagcgatagtggacaagcttgtcagcaacacacaagctaatcggaatacgagactcaagcgaattcttgaagaaacaagagaggctgatggtgaaagtgatatacgagataggatgcaggctgtccgcctccagctctcggattcaattcacaatctgcatgaggtcttctccagcagaatatttgttgctatttgccgaggtttctgggatcggttaggccagattgtgttgagatttcttgagagcagaaaggagaacaggatttggtaccgaggatctgactatgctctagggatccttgacgatgtctttgcatcggagatgcaaaagctgctgggcagcgctctgcaggacaaggacctggatccaccgcagtcagtgattgacgcccgctccatcctctgctagggcgtgtggcaacagttttctctacagattgcttcagcaaaaggccggcgttggtttagtttttgttttatatatattccttggtgtgcagaatatgtacagatggagacaaccgattattcctgttcatagtgttttgctgaattgttcaaataaatagtggttaaaaaaactgtagcccgtaaacaggttagagaacacaatctgtacttgattgtgtactttctacctcagttcttgccttccccatctaattccatccaaatattgtaccctgaattgagtgaaccttgatacaactgattcttgttggctcatatgtgttcaagcctgcaatttggagaacatcttttccccaatttacctcacctgtgccatggccacaacgactgag

SEQ ID NO: 208179 - DNA, 3965 bp, Zea Mays
cgcccactacctcccaatcccaagtcccaactcgctccccattcgcctccctcccacccggctcctgtcctcttcccctccccaaccagcctccctcaaattcgccgatccccaaatcccgctcccctacaccacggtagctgagaagacggccggcgaagatgatgttcacggagggcctcgacgagtcggcgatcagctggatcaagcagggcatggactccccagcctcagccccagcccccgcacccccacggtccccgctgtcggagcgcccgccgctgggacaggtggcggcggcgccgaggagccccgcgctgcacgccaggccgtgcggggccggcgcaggcgtcggtttcttctcccccaagggcctcccgcaagtgcgggtgaacgggacgcaccactcgggcctgctcggccgccactccgtgctcctctcggtcgcggactccgatgagtgggaggacgagagcgtcgcatcgtggggcatgcccgaggactgctacggcggcggcaacttctccgagaccggcgacgaggcgtgctccagcgactccagactcatgcggagggccatggaccgctgcggcggagggtgggatgaggaggtcacgtcgcagctgagcaggaagggcggcggcggcgggatcgtgcgggggcagtccaaggagttcctgcgggtggaagtgcgaggtgcgggagcgttcgatgccgggaagtgctccggttccggggcacaacatccagtggactccatctcgcagggacgctactttgaggagcaggtattggggactcctagtgcccctccaattgcaggggtcgaggaggatgttatgtttcatgcagttggtaaggacatcagagactgtgatagaaattcattgatttaacttgtcctggaaatggtgttttccttggcattcatatggtattgcaaacagaaagggctgaaatggatggagggcttgagaggaatggagtatcatcagtagcagatatactggcccaagatgttcatgagcttcatacgagctcaattgttcatgaagatggcgttgagaataacttattagctcagataccgagcttcactattaaaatacagaacttcttgcttcatccaaaacacaatagtcaagttgatggtaaacaaatgtatgataaggatggaaattgtactataaagggaaggaaacttgttaaacagattgagattgaagtaaaaaagatacgggttgtacctcaaagaccaaagcttcgagcaacatcatcctttagaaatctctacatgcaagctggcagtgagtatgtcagacagatttctaagattctgaagagccaggttacgatgttgacatccacatcatctacatctttgccggaagaaatgttcacatgcactctagaactgcaaagttcttgcaaaggtcataagagagattcaatttctccacaatatttgaagccagggactggtgaatctcaactcttttatctagagagccagggggatgttattcttgttgaagtacaagacaacaatagggttgtcataggccgtgcaaaaattcaagtttcatcattgactgatactcaacaggatgaaatcatcaggtggtggcctctatatcttgatgatcaagattgtgtcggaaaagttcagcttggtatgaatttatccatgtcttccaataactatgggtccgaaaagatgctgcaaggtggccctgcagtggataccatcatatatgacatggttctggaagcggcaatgagggctcaaaatttcaacagcaaaatgcttcatatcaatggtccatggatttggctgttggacgagttttctgattactatggaatatctgatgcatatagaaaattgaggtacttgtcttacatcatgaacgtggcaataccaaccaaggattgtttggaacttatatatgaacttatcgttccagtcacaaaagcacgagaagatagaactttaacaagacaagagcgaagtattttgatagactgtgaagatcggattaagagtctccttgcagctctgtttgaaaattacaaatcactggatgaatattctccaactggcttgtcagatttatttggccccataacagattctgctgcaccagctttggcacctgctgttcagatattcagtgtactgcatgacattctctccaaagaagcacaagacatacttaggaactatttgcagattgctgctgcgaaaaggtgcaggaggcatatgatcgagacagatgaattcttatcaagcaataacgacagtcttcttacggaccctatgactatatctgctgcatatcttaaaatgaagacattgtgcattaacatgagtcgtgaaattcaagctgacattaagattcacaaccagaatatacttccaagttccatagatctgccaaacatagcagcatccctatatagtaccgaactctgcaagcggctgaaaggttttctttcttcaagtcccccatcaagaccagtacaacatgttgctgaactgataaccgcaacttctgagtttgagagagatcttgaatcttggcaagtgagacctgttcatggcggcgtaatttcgagacagctctttcatgactacatcatggtgtggattgaagacactcgattgcagttacttgataattgcaaagctgagaagatatcatgccctgccgtgtcaacagtctcgccatttgttgagcaaatgtatgagcaaataaaagagagcataaatgagtatggagtggttatcaatagatggcctcaatatctgatgagtttagagagtgctgttgctgatgttgagagagaaattatgaaggcactggagaagcaatacatggatattctaatgcccctaagagatggcataccagaaaaaattgagaagcaggtccagagattaacaagaagacaatctatagctccctatgttgtgccaaatcagttaggagcattcatgaacacagtaaaaaggatgctagatgtgttacactgccgagtcgaagacattctcaagtcatgggcagcgtaccttactatatcatgtgggaacactgtttttggagagcaaatgaactccatcacagtcatgctgaagaagaagtacaagaaatacctgcaagcgatagtggacaagcttgtcagcaacacacaagctaatcggaatacgagactcaagcgaattcttgaagaaacaagagaggctgatggtgaaagtgatatacgagataggatgcaggctgtccgcctccagctctcggattcaattcacaatctgcatgaggtcttctccagcagaatatttgttgctatttgccgaggtttctgggatcggttaggccagattgtgttgagatttcttgagagcagaaaggagaacaggatttggtaccgaggatctgactatgctctagggatccttgacgatgtctttgcatcggagatgcaaaagctgctgggcagcgctctgcaggacaaggacctggatccaccgcagtcagtgattgacgcccgctccatcctctgctagggcgtgtggcaacagttttctctacagattgcttcagcaaaaggccggcgttggtttagtttttgttttatatatattccttggtgtgcagaatatgtacagatggagacaaccgattattcctgttcatagtgttttgctgaattgttcaaataaatagtggttaaaaaaactgtagcccgtaaacaggttagagaacacaatctgtacttgattgtgtactttctacctcagttcttgccttccccatctaattccatccaaatattgtaccctgaattgagtgaaccttgatacaactgattcttgttggctcatatgtgttcaagcctgcaatttggagaacatcttttccccaatttacctcacctgtgccatggccacaacgactgag

SEQ ID NO: 208180 - DNA, 1617 bp, Zea Mays
ggagtaacttcttatccctgctactttttaggggaatatgtggccttgaccggtgaaaagcttaatggaacagatatgattgctcttggccttgctacacactatttcatgagtggccatctggatctgatcgatgaacgacttgcaaagttagtaactgatgatccatcagttattgattcgtcccttgcacaatatggagacatggtttatccggacaaaaaaagcattgttcataggctggaggtgattgataaatgcttcagccatgacacagttgaagagattgttgatgccttggtgagtactgattaagctgttttttactgttcttacatacatcattgtttgattgatttgataatgaatgaaacatgaaatattattcattcatatatactattttgtggcttggtttgtgaccttttgctagcgtctcactatttactgtgaaactttcatgaatcttataattaacctttgatggaaacttaccatatcttcttgatatgattctcatcattgcaattttactgccctgtatggtgttggagtgttctggacttctggtcaacttggtacgatttaaaactaagttccggcataatcaggaaagtgaagcagccagctcaaatgaagaatggtgtatcttggcgctgaaacgattgaaagaggcctctccgttagctttgaaggtttcactgcgatcgatacgcgagggtagatatcagacacttgatgagtgccttgtccgtgagtaccgcatgtccatgaatggaatctcaaagcaattttctcatgaattctgcgagggagtcagagcacgactagtcgacaaggacttcactcctaagtgggatcctcctgcccttgagtatgttacgaatgacatggttgacgcatacttcgcacctcttggcgattcggagcctgagttgaagctgcctatagaatcgcgagaggcatttgtatgatcacaaatcattccaagaaccggatcattgcaaggaccggactgggacctgataaacgtgttataatctgtgtagccattatttttggcagcacaaccagcccgattggaccaactattcacgtgccgtatactcattcagactatcttcgctagcttacctatacatatattcaaactatactttagaaacagtgcaatgtactatgcaaaacggtgcaacagtgttttggttgaccatatgggtgtaacgtacagtagttcatctataaggtcaccaaaaacaccgtttttatactgtatattgtactgtctgtagagtatagtttgaatatcggtataagtacgagtaagctaccagagatgaggttttctgcggtgtgaaactcagcatatcatctgctgatttgttcacatgaatggaaacgaccagtggagtacgcgaatcatttctgatttggagtctgttcttcacgagggaaaccccgtctacaattctctggctctgtattccactgccactcacttgtcagcaatagcaggctgttgcagatgtttttccttttctttttgtttgtgcgactccttgcatcgaatcactagctaggatgacctaggtgcaacgttgataacatgaatataac

SEQ ID NO: 208181 - DNA, 1808 bp, Zea Mays
cagggtccaggcctcccgcctccctgcacagcacagcacagcacagcaccccgcatctctccccttcctcaccaaccccgccgcctccgacgttcacctcggcggccgccaccggcgaggccgcacctcgccggtcacccacccccgctactcgatattatatcctactccgaggatccgcgtagccgcctccggctgcccacccgcggaactctagatctccgataccccgcgctccctcccgccgacggccacccgaccggaatgggccgctgtcttcagtaaggtctaaggacccaagggaaccctcctccgccttcgctcgtgcgcgaagcgcggccgcgatggcgatccgcattacggtgtcctactcgggctacgtggcgcagaacctggccgcgtccttcggcctccgctgcaccgtggctgcgggcgcaagcgcggcgctcggcccggggtgccgcttcctccaggacgcgctatcccaccccttctgcctcttcgcttcctcccgccgcgccgacccccaccatgacgccgaggatcacaaccacccgaagcccaggtccaaggctctagcccccgccgccgcagcaagaggaggcggccactcattgctgctgccgcggtcgtgttccgggaaggcggcgccgccggtggatgaccccccagcctcgttggccgtggggctgctgtcggtgttcgcgtctgggatgggatcgactggtggcattgctggtgcgtcctcccttgctgcgtcgccgtcaatatcagccgggttcaaccctgcggcgctcctcccgttcttgcaggcgagcaagtggctcccctgcagcgacatagtcactgttgcaacgacgtcgcgcagctcaggacgcccagcaggttcaactgcttcgcctgtaccgcggacaactgcaccatcgccccgtcctacacaacgcgcagccgctccatctccctgccctgtgccatcacctgctgttgctgctccttccaaggtcggcatacaagcattggttggtagtgctagcatcgcctcaggttcagctgagattggaaggggagccattgcctctggtgtggctggaatggtgaagaagagtggtgctagtattcctgctggtgcaggggtgagaaggaagactggttggctctcaaagtgggtgagctcatgctcagatgatgcaaagacagtcttcgccgccgtgaccgtgccactgctctataaatcatccctagctgagccgagatccatcccatccaggtcaatgttcccaacatttgatgttggtgaccggatccttgctgagaaggtttcgtacattttccgggagccagaaattttggacattgtgatatttcgtgcacctccagtccttcaggcattgggctacaactcaggtgatgtgttcatcaagagagttgtggctaagagcggggacaccgttgaagtacgtgatggtaacttgttggttaatggagtagttcaggaggaggaatttgtgctggaaccagccaactatgaaatggatccgctgactgtgcctgaaggctatgtctttgtcctgggggataacagaaacaacagctttgattcacataactggggtccacttccatttaagaacatccttgggagatctgtgctccgatactggccaccatcgaggataacagatacaatatatgagcatgacatagtgcagtacacagctgctgcatcctgatagtacattgtggcaataccacatgctgcaggagtccacttccatttaagaacatccttgggagatctgtgctccgat

SEQ ID NO: 208182 - DNA, 585 bp, Zea Mays
gttttggacgacgagcacctcgtggtttccgcttttcccaaattgcccctctgaaatcctcgcaggcctacggtctcgcggtattgcgcttctcgtcttctctaatcctcttctgctccctccactaccagtccaccaccaccactgctaccatcggttccccaaaccctagccaagggacacggtggccagcgatggacggcgacagagaaggcgctgcggcggtgcaccaccacgcgcgctcccccgaggacgtcttccgcgatttccgcgcgcgccgcgccggcatcgtcaaggcactcaccacggatgtggagaagttctatcagcagtgcgatccagagaaagagaacttgtgcctttatggtttgccaaatgagacttgggaggttactcttccagctgaggaagtacctcctgagcttccagaaccagcactgggcataaactttgcccgtgatggaatggttgaaaaagactggttgtctctagttgcagttcatagtgatgcgtggctcctgtctgttgcattctactttggagctcgctttggatttgataaagatgcaagcatttggatttcag

SEQ ID NO: 208183 - DNA, 1947 bp, Zea Mays
ataaagttcacattggtcgtagtttgactgtttatttattgcggcaaatagctacgttccagtcagtttgtatgactaccttggcatgaggattcgatgaaatactagaattgggtcccatatagagctgtccttgagccagcaatgcaaggaagggacatggttggccgtgccaaaactgggactggtaaaactttggcatttggaatccccataatggatgcaattatccgccacaacgagaagtacaagcctggtaagtttcccttggctattgttttggcgccaacaagagaacttgcaaaacaggttgagagggagttccttgattcctcccctttggaaacactatgtgtatatggtgggactccaattatgcagcaaataaggaaacttaattatggcgttgatgtggtcattgggacacctggacgtgtgattgatctgctaaaaagaggttctcttagtttggcagagatccgttttgttgttcttgatgaagcagaccagatgttgtctgttgggtttgatctagatgttgagacaattttggagagggtgcctccgcaacgtcagacattgatgttctctgcaacaatgccaacatggatacggaagctcacacagaagtacctcaacaatcctgtcacagttgaccttgttggtgaggatgaccagaagcttgctgaaggaattagtcttctcgctgtctcttcggagaaccgtgaaaaaccagctgtccttggggaattgattaaggaacatgccaaaggtggtaagtgcattgtttttacacaaacaaaaagggatgcagatagattgtcacacaatatgagtcgaagtttccagtgtgaggctcttcatggggatatctctcaatcccaaagagagagaacactggcaggatttcgagatgggaggtttaatatattgattgctactgatgtcgctgctcgaggattggatatcccaaatgtagatctggtgatacattttgaattgccaaactcgtcagagttgtttgttcacagatctggccgaactggccgtgctgggaagaagggcactgcaattgtgatgtacaactatgaccaaagtagagctgtacgggtcattgaacgtgacgttggatgcaagtttacagagctgccaaaaattactgttgatggatctgacttgctgagtggtggatttgactccttcggtggcgggtatagcggttcaaactatgggcgctcaggtggattcggtggacgtggtggttttggccgatcaggcggtggcggcggatatggcaattctggatttggtcactcaagcggtggatatggacgttctggtggtggaggattcggtgactcagggtttggtggtcggtcaggtggcggtggaggattcggtgactctggattcggtggccaatcaggcggcggtggaggattcggcgactcagggtttggccgcacaagcggtggtgggtcaggttttggtcgttctggtggtttcggcgattctggttccggccggttcggtggcggtttcggcggttctggctcgggtggtttcggtggctttggcgacaagaactcacggtagactcttgcaagtaatagcagaaagtgcagaaatctgtgttttgcggtagcaagaacatctggagagacgatccgccggatctcagaaggcagaaggaaataatcacgtgcctttgcttattagtgttcttctctgtttgcattttgatcgttcaagctctagctctagaccatacctgtaaaatattccgtggctcctctatctactgtatgattattgtggcgctgtcttttcttgtaggctgttttaacctgaatgacggcctctatataagcatgtcataaatcgactttattcgtcacaaaaaatgaaaaaaatactatttgatggagcaaaatatacagaagatag

SEQ ID NO: 208184 - DNA, 2595 bp, Zea Mays
tttttttaatttaattttagctaggcgtgggatgcacgtgggaatgagaataggctttgtgggatagagaatgagaaagatacgtgatagccgggaatggaaatgtgaatggaaatgtgaatgggctttgcagggagggggaatggacggtccagataaatcgtagcggaaattgtagtctactatactttcgagttttgcaaaaaaaaaaaaaatcctcagcccgtctcctttccaaatttttcacccggcgtctgctcgcctgcgagacgccgcgaccgcgatcaccctctcgggtttctcggacgcgccgccatcgccactccgccactcgcgggttcgttggatcgacgccaccgtcacctcgcgccgcccagaggaggacgcctgcttctcccccgacgccgacgacccccgccaccgtcttccgcgccaacgccgccgtcgccatcacctcgcgtcgcgccatacgcccaggtctccgccgacgctgtcacacgccaggagctcgagtcttcgtcggtccctttgccagatcttcatcgtgcccttcaccagcgacgagcacccaacagagaggagaggattcgacgaaatggaggcgttggcgttggcttctctgttctggagacgcagcgacagccaaactccaaaacggaaatgagacagcgcttggagctgcgttaacagactactcctgctgtttcttattgccaataagcacaagcacacttgagaaccggccatcaccatggagatgagactctttatcgcccttcagtgcgtgcagtgcgccaccatgcaggtgaagcagcagaagaagagcagcaacaagtgggtgtgtgtggtgtgcaaccagcgtcagtctgtgcttcatgtccatgccaggggctatcgtgctgctgatctccgccgcttcgtccaggacaccaaccttgcccgtggccgccgggagttcgcaccgttggccgagcccgacgtggacagggatctggcggcagttgaggagggagatgtgttccctatcgagaagagtcagacggaatggtccgagtatctggacgatccaggggagacaggtaaaggttgtggtggccttggcgcagatgcttcagatggagaatcggatgaaggaattgaggtgataactgaactgcctcagaaaagacctaaagttaggcctcgcaaagcccaatcagatgtagtaggaaagagaaccaagctgtcaacacatcccactttatgtaataagaggcagcagatcaagcaaggatcaaatccccactgtgcaactactactgctgaagcacaaggatcaaaatggaccaagtatttggacacgagccgttttggtgggaggaaatgcttcgatacctctggtctgcactggactgaacatgatgaatctgccactactgaggctactactgacgtagtggtggatgatgaggtgcaccctgatttcatctgatctcatgttggtttgaaatgccaaatgctttgtgttttggtagtgtgtagtttggtagccataaattgtgctgctggcaattcacattgtcaagacaaaggatgtgcagtacttggtacccgagggaagaagactgttgttcccaagatgttatccagtatgatgggcaattcatagtaaaagcaccgtgctagtcaaaatcagcccaagactattgggttgttttatctctgatcaaaacacgagtatagtcaaactcggtcctctaatcaaatctggctaccgaaacatttttttcacgtgccttgtttacggtcgccggggcatggagccagaaaccgtatttcggcgttgcaacgtgatccagggtggatttggtggtagcggattccaaatactccctctgtttattttttatttatcgcgttttagttcaaaaatgaactggctaatgataaatattccatgtgaatctccaaacgggctactctctggtggcagaatcacagggtgcatccacggaatgtcacaagctcagtgtgaggtggctgagcacttgagctgaggaaaattcttgtttctgttctgcatcaactagagtcacctgaccatgtggcacagcacagagaagagccgaagacgtacagcatggatcacaggagcagtacaccttgatgactgactgttgtctgttggtacctataatcctgtgacaggtctgaacaaccgagtgattgattgatgtctccggcttccctgcagccaaaatgacgaatgggttaccctgcttgaatcctttgccactgcgcttgcgtgctactactattccatgcaaaacaacgtgttcggaaccaaaattaaagttccgaacatcgctgtgatgaatgggtgaatcgtcacctttttctttgaaatagcaactgtatgctcgaagaacagctgtgctggtccagctatctgggtaccgtactccctaccccgattgaactgtatttgggtcaaagtaatgggggagatactctttccatgctaggatataaggtgtaactacctttaattctaagatcaagaaatatatttaattctctttatcaataaagtattgttatgagcgtgcttatatt

SEQ ID NO: 208185 - DNA, 4015 bp, Zea Mays
gcatttccccccaattctctcccgcccaaagccccaaaccaccacccaaaatcctctctgccgcccgccgatggccaccgccgccgccatggccgatgacgacgacttcgcctcgccgccgctcgccccgcgtgcgcgggaggaaggaggaggcagaggcgtgtaccaggtgggcggcgtgccggtggagttcccctacaagccctacgggacgcagctggcgttcatgggacgggtcatcgcgacgctcgaccgtgcccggcggcaggggcgctcccacgcgctcctcgagtcgcccacaggcaccggaaagtcgctctccctcctctgctccgcgctcgcctggcagcggcactacccgctccgttcccctcccgcccccgatccattgctccacggcggaggattcgtcccagatgatacgcagccgcagccgacgccagtcgtcccggagaaggctgtcaagaagaagaacgccccgataatctattacgcgacgaggacgcacgcgcagataagccaggttgtccgggagtaccgcaagacgtcgtaccgagtgcgcatggccatcttggcctcaaggaagcactactgtgtcaataaatttgcttgcgcgagcgacaacattgatgagaaatgcaagtcactgctagacaagactgttcaaggttgcccagaattcaagaatgcacagaaactaagtcggcatccatcccttcagattggtggctgctatgaagttcacgatattgaggatcttgtcagagttggacagaaagcaaaaggatgtccgtattttgctgcacaacacatggcagaagcagcccaattggttttctgcccatataactacctgattagtccggttgtcaggagagcaatggacatcgatatcagtggttccatcattattcttgacgaggcacacaacatagaagatatagcacgtgatgctggcagtattgacatcgatgaagaatcactttgcttgttgcagggagaacttcaaaacctggccgctaatgaggccgttgcaatgatataccaacccttgcacgatattattcaggctcttattggttggattgctgagagggaggacaatttgcataatcatgagttcggacatccggcttcatattggactggtgaaaaggcaatgaatgaacttcagcgggctggtatttctccaatgtatttcccggtattgcaagaatgtgcaacaaaggcaattaaagctgcttcagatactgaatcagatggttcacacttaagtggtggtagtgctatgacactagagagtctattctcttcgttgagctacttttttgctcagaaaggacgcaattcatgtgattatcaacttgctttgcagcgttttgttaaaaaggaaggcaaggacgtaatttcttcaacatgcacaatgagtttgtggtgtctcaatcctgctgttgtttttcaagaaattgcagatcgaacactttcggtaattctgacttctggaacactttcaccaatgggttcctttacatctgaacttggtgtccagtttgaggcctgcatggaagctcctcatgtaattaatgctgattctcaggtttttgcagctgtgctatcatctggtccaacaaggcagatattgaatgctagctataaaactgcggacaattcatctttccaggatgaacttggagcttcactagaggaaatatgcagaattgtgcctggtggtgctctagtgttttttcctagctacaagttgatggacaaattgcaagtgcgctggtctcagacaggtcaatgggcacggcttaatgctcaaaaacatgtgtttgttgatactaacattgattcaacatggatcagaaacgatgttcaagtaaagctgaaaaggagatataatgattcatacaaatcatcaaaacatctgttaagtgggagtgaatggtactgtcatcaggcatttcgtgctttaaaccaagctgcaggtcgttgcattcgtcataaatctgattacggaggcataattctgattgatgagcgatatcaggatgacagaaatgttctctacatttccaaatggcttaggaatgcaatcaagaagtatgatagcttccaggagacaatggctaagttgcaaaagttctttcagaatgctcaggaaaaaataaaaattaaagattgtggcatcttccccaaggttaagttggataatgaagcacctcaatctttcagtgatgataaaagaaagttgccgtggccagaattgagttcctcaaaccactcagtatcacgatgtaatcagaaggtaaagactgaatgtcttagtcagaggattccagacattgatggtgtggcggtaaaccaaaaagttgtgggtatgtgttatacatcgccagaagtatcgaagatctctgttctagtaaagaaagaaaactcttcatcacctgaaagtttttcaacggtctgtccactgcatccgtgcaaaattcgatctgattccgaaggtgtagccaatactggagcaaattatggagtcaaaacagaaattataaaattggaggaggatgattttaaacctaggtatgcagagatcactatcttaaatccattagaagacaggtcacggcaacctactcttgttgagggaacttctgcagcgactccagtagctagtccaagcaactatgctgaggtaaacacctcagtaaatatcaacaatggagatcagattgcagacatgtccatttctcctttttcaacaaacagaaatctttcttccctgtccacactggcagctactcctgaaaggaccacagacaaagactgtcatgattcttttattaacagaagtgtaaattctcactatgagaaaaagagaaggttgagctccccaatgagttgtacttacacgacgcagtctagtcctccaagcaaatcattctgccacactggttctgttatgcctggggatttgaatagaaattctgaattgtgttgtaaaaatataggattgtccaggtgtgaaaatgtcaagtttgaaagaaactacagtccagaagaggtttcagcaaagaagtctatgcaaaagaaacttcttataaattgcattagatgcaaaacagctcttgggttagaagaagatgggtttcttgttacttgtacacaatattattcatcaaaattgtacttggcatatcttttgaaacatgggctatcaacttttggcatcctggaggatgatttttcagcatcgacaccaacagaggtacacgtagtgcagtgtgaagcttcgtcactcaacaaaaatgtatttggcaaattcagcagccagggtcatgtttggtttgcaaaggatggatgtgtatacaacgcaatgacctgttctttgtgctcttctgaaaacacaagtgccatggtcctcggtgtgcaagttcttgcaactgataggtcaaatcaacaattggtggaaaaggtgctcttgttcagtgatcgtttggatgtccagtctgagccatcaaagggacagatttcaagaactcgaagagatgctagtaacatctgccagcaatctgtgatcgaccttgattcttttgcatataaaccattaaagaaagatcctgtggcgctgaactcaagaaggtctaagcttaggttacctgccccgaacaaatccaccactggtacataatttgatggagagtttgagacaatggcgatctttgccgtgaagcattgggaagaactttgttctgtgagatatgacatgcggggagatgcagatgttacgtcgccatggagatttatagtttcaaacatccacatggattagagaagttccctgagctgaagtagggtgtaaaatgcatggcctggcagtagaaaattaggatgctgatgtctatatccatttacatgcgtcccattgtcgattatatctatgaacagtttttgcgttctgaaatttcgcatccgtgactagctgagcgtcctgaaatgtcctaatttcaatctc

SEQ ID NO: 208186 - DNA, 420 bp, Zea Mays
tatcttttgcagttctgcttgtgatcgctttcccagaatttcaagtgtaatcagcttaggttacctgccccgaacaaatccaccactggtacataatttgatggagagtttgagacaatggcgatctttgccgtgaagcattgggaagaactttgttctgtgagatatgacatgcggggagatgcagatgttacgtcgccatggagatttatagtttcaaacatccacatggattagagaagttccctgagctgaagtagggtgtaaaatgcatggcctggcagtagaaaattaggatgctgatgtctatatccatttacatgcgtcccattgtcgattatatctatgaacagtttttgcgttctgaaatttcgcatccgtgactagctgagcgtcctgaaatgtcctaatttcaatctc

SEQ ID NO: 208187 - DNA, 1128 bp, Zea Mays
caaacacggcactagaccaatgttataccggagtacatatccaattacagagaagggaaagcagaggtcttgggtcggtccaagtgggcagtactaccgtgagctgccttgccccagctgtaggggtagaggttacactccatgcaaggagtgtggaatagatagatcaagtttggactgccctatgtgcaatggcaaggggattcaaacttgtctacaatgtagtggagagtgtgtgatatggcaagaatctgttgatgaacagccatgggagaaagttcggtcaagttctcccttgaaagtaaaagaagatgacgaagttgacaagttagagataaatatcaacaaccccaaaagatcaaagcgtacttatgcatctacttcaccggaagttgccaagaagattagccggtctttaagaagtctaaatgctcaaacaggattgtttactaagcacatgaagattatacaccaagacccagaattgcgtgctcaaagagttgctgcaatcaagagaacaaaaggaactgatgttgcaagaaagcgtgcttctgaaattcagaaggcattcttcagtgatcctgagaaccggctcaagagaagcattgccatgaaaggggtgaaattttactgcagcaaatgtgggcaagaaggacatagaagcttttattgccctactttgagggaaggttcaaccagggtgcggttcaggtgccggttgtgtggcagagaagggcataatagtcgaacatgtggaaaaccaaagtccgagaaggagcacaaacaacgacctcaccactgcagccgatgtggtgaaaagggacataaccggcgcaactgccccacatccactgatttgggtagtgatgcttcaggctatgtggttaacaaagttaatggctctaattcagctgtttatcaatgtagtatatgcttagaaaaggggcataacagacgaacatgcccgaaaagaaaggctaccttactaaaatgaaaagtgtgagtaaaattaaaagaaaggctatcttttatgcctgtgttttttctatttctctattttgtattaattcgttcaaacatgctctaaaacattttagcggattttaaaacctgagtttcgtacacaaa

SEQ ID NO: 208188 - DNA, 1524 bp, Zea Mays
ccgagccgaacgggcgtgcgccatgcgcatgcgaccctgacgagcaacgacaaccacagagcccaaccgggaggaggatcggtaccagctcacggcggcgtcagcaccacacgccgccgccgccgcccacccccttcccgacaggcacgcttcttgcgcctcttgtgggatgctactacggataacgtacgcccaacccacgccttcggcggcggcccagttgaggctccctgggccgcgtttacgccgacgccgcgtcgctgcttccgcggcggacggcgccggcaattcaagctctccgctccattgcgacccttcgccccacgcgtacctcctgggtccgggcgtcgaacccagtggctcactctcactgagtacatatccaattacagagaagggaaagcagaggtcttgggtcggtccaagtgggcagtactaccgtgagctgccttgccccagctgtaggggtagaggttacactccatgcaaggagtgtggaatagatagatcaagtttggactgccctatgtgcaatggcaaggggattcaaacttgtctacaatgtagtggagagtgtgtgatatggcaagaatctgttgatgaacagccatgggagaaagttcggtcaagggatgaactgagactgcgttatggctttgaattgttgaacccgtcagcattaaattctcccttgaaagtaaaagaagatgacgaagttgacaagttagagataaatatcaacaaccccaaaagatcaaagcgtacttatgcatctacttcaccggaagttgccaagaagattagccggtctttaagaagtctaaatgctcaaacaggattgtttactaagcacatgaagattatacaccaagacccagaattgcgtgctcaaagagttgctgcaatcaagagaacaaaaggaactgatgttgcaagaaagcgtgcttctgaaattcagaaggcattcttcagtgatcctgagaaccggctcaagagaagcattgccatgaaaggggtgaaattttactgcagcaaatgtgggcaagaaggacatagaagcttttattgccctactttgagggaaggttcaaccagggtgcggttcaggtgccggttgtgtggcagagaagggcataatagtcgaacatgtggaaaaccaaagtccgagaaggagcacaaacaacgacctcaccactgcagccgatgtggtgaaaagggacataaccggcgcaactgccccacatccactgatttgggtagtgatgcttcaggctatgtggttaacaaagttaatggctctaattcagctgtttatcaatgtagtatatgcttagaaaaggggcataacagacgaacatgcccgaaaagaaaggctaccttactaaaatgaaaagtgtgagtaaaattaaaagaaaggctatcttttatgcctgtgttttttctatttctctattttgtattaattcgttcaaacatgctctaaaacattttagcggattttaaaacctgagtttcgtacacaaa

SEQ ID NO: 208189 - DNA, 1717 bp, Zea Mays
ccgagccgaacgggcgtgcgccatgcgcatgcgaccctgacgagcaacgacaaccacagagcccaaccgggaggaggatcggtaccagctcacggcggcgtcagcaccacacgccgccgccgccgcccacccccttcccgacaggcacgcttcttgcgcctcttgtgggatgctactacggataacgtacgcccaacccacgccttcggcggcggcccagttgaggctccctgggccgcgtttacgccgacgccgcgtcgctgcttccgcggcggacggcgccggcaattcaagctctccgctccattgcgacccttcgccccacgcgtacctcctgggtccgggcgtcgaacccagtggctcactctcactgagtacatatccaattacagagaagggaaagcagaggtcttgggtcggtccaagtgggcagtactaccgtgagctgccttgccccagctgtaggggtagaggttacactccatgcaaggagtgtggaatagatagatcaagtttggactgccctatgtgcaatggcaaggggattcaaacttgtctacaatgtagtggagagtgtgtgatatggcaagaatctgttgatgaacagccatgggagaaagttcggtcaagatcgactgcatattgttttttctgaaaatgttcagggatgaactgagactgcgttatggctttgaattgttgaacccgtcagcattaaagtattttcagtgactattactgatgtctgaagggattacatgatatggttcttatacacggcaaattgaaatatatccttttggattcctgtgcatacttgtgttctagaaaaatattcctgtgcacacattgtcatgtattctttttgtatttgcagttctcccttgaaagtaaaagaagatgacgaagttgacaagttagagataaatatcaacaaccccaaaagatcaaagcgtacttatgcatctacttcaccggaagttgccaagaagattagccggtctttaagaagtctaaatgctcaaacaggattgtttactaagcacatgaagattatacaccaagacccagaattgcgtgctcaaagagttgctgcaatcaagagaacaaaaggaactgatgttgcaagaaagcgtgcttctgaaattcagaaggcattcttcagtgatcctgagaaccggctcaagagaagcattgccatgaaaggggtgaaattttactgcagcaaatgtgggcaagaaggacatagaagcttttattgccctactttgagggaaggttcaaccagggtgcggttcaggtgccggttgtgtggcagagaagggcataatagtcgaacatgtggaaaaccaaagtccgagaaggagcacaaacaacgacctcaccactgcagccgatgtggtgaaaagggacataaccggcgcaactgccccacatccactgatttgggtagtgatgcttcaggctatgtggttaacaaagttaatggctctaattcagctgtttatcaatgtagtatatgcttagaaaaggggcataacagacgaacatgcccgaaaagaaaggctaccttactaaaatgaaaagtgtgagtaaaattaaaagaaaggctatcttttatgcctgtgttttttctatttctctattttgtattaattcgttcaaacatgctctaaaacattttagcggattttaaaacctgagtttcgtacacaaa

SEQ ID NO: 208190 - DNA, 1265 bp, Zea Mays
cctcctgagctgagtcccttccctttcccccggtccagtggcggacgccctagccaggcaccacaggccacagcctgggctgccccactgcccctgtcgccgtcgggcaagcgccgtccaacctgtgcgtcaccgcctccgccttcagtttcgcctccagcaggggcgccgcgtggggtattcggttcgtcgtcgaggagagagagtcacttctgccgagggagcagggatggagccggtcgtggggatcgtggtgtcaaacaagatgcagaagtcggtggtggttgcggtggaccgcctcttccactataagatgtacaaccgctatgtcaagcgcacctctaagttcatggcacacgacgaggctgactcctgcaacattggcgaccgggtcggttgtagggtggggattgggctcgagaagggcggcggcgctggggcgctgtcgtgaccctggctgggtcgcgcgcagggagaagattccaggagactctggcttcatctgggaagccagaataaattggttaggctggacccttctaggcccttgagcagatataagcactgggttgttgctgaaattcttcgcagagctaaggtatatgttccaccagctgcaacagcgtccagtcagtccagtgaacataatagcaaatctcaaaaggctggtgttgctaccaaatgatccatatgcagttactcaagcaagatgcagctatggctttttttcttcttctgtatgtttgtttggaatgtggatgccatgtttagccatggaagaaaaaatagcacgcagccaccatcttcgcttaatttagtttgttctcctgtggtgtcctccctttaatggtagccatcgaggatataattaccatattcaacaagaccagtggatactatatcggcagttgtctttgtatttgcatgcatggttggcaggtgtctaatactgctgaaatgagcaggcggaaagatccgaagagtaaagggttgtttggttcttggctacctgtctttaaactttaaggttaataagtcaaattgaagaactaaccttagatagaaaaatttagttgaactataacaaattagacaccacaccaaacaggccctaaaatgctgataataatctatatgaactggttgtctttgccgtgttcatattcgtactatcaggtggatgaatcgttttctgtgctgtttgctgcatactcgtaaattcatggtgatgtgcaatcaagattcggaaagtagacctcgatttc

SEQ ID NO: 208191 - DNA, 1268 bp, Zea Mays
cagaggccctcctgagctgagtcccttccctttcccccggtccagtggcggacgccctagccaggcaccacaggccacagcctgggctgccccactgcccctgtcgccgtcgggcaagcgccgtccaacctgtgcgtcaccgcctccgccttcagtttcgcctccagcaggggcgccgcgtggggtattcggttcgtcgtcgaggagagagagtcacttctgccgagggagcagggatggagccggtcgtggggatcgtggtgtcaaacaagatgcagaagtcggtggtggttgcggtggaccgcctcttccactataagatgtacaaccgctatgtcaagcgcacctctaagttcatggcacacgacgaggctgactcctgcaacattggcgaccgggttgtagggtggggattgggctcgagaagggcggcggcgctggggcgctgtcgtgaccctggctgggtcgcgcgcagggagaagattccaggagactctggcttcatctgggaagccagaataaattggttaggctggacccttctaggcccttgagcagatataagcactgggttgttgctgaaattcttcgcagagctaaggtatatgttccaccagctgcaacagcgtccagtcagtccagtgaacataatagcaaatctcaaaaggctggtgttgctaccaaatgatccatatgcagttactcaagcaagatgcagctatggctttttttcttcttctgtatgtttgtttggaatgtggatgccatgtttagccatggaagaaaaaatagcacgcagccaccatcttcgcttaatttagtttgttctcctgtggtgtcctccctttaatggtagccatcgaggatataattaccatattcaacaagaccagtggatactatatcggcagttgtctttgtatttgcatgcatggttggcaggtgtctaatactgctgaaatgagcaggcggaaagatccgaagagtaaagggttgtttggttcttggctacctgtctttaaactttaaggttaataagtcaaattgaagaactaaccttagatagaaaaatttagttgaactataacaaattagacaccacaccaaacaggccctaaaatgctgataataatctatatgaactggttgtctttgccgtgttcatattcgtactatcaggtggatgaatcgttttctgtgctgtttgctgcatactcgtaaattcatggtgatgtgcaatcaagattcggaaagtagacctcgatttc

SEQ ID NO: 208192 - DNA, 2255 bp, Zea Mays
gccaactgccatgtgaccaccggctatatatagcgatgcacagctccccttgctctgatcacgacccgcgtgtaggtgtagcactctccatcctcattgctaactgctcgattctcctccatacccttgtgcacgcacagccgacactgcagtgaggaacttgaacagaggaagaagcccggctgagcgctctctcgtctagctagctgcgctgcggcgatgaagatgcatcgcttcgctctgcgtggcctggggtttctcgtcctgtggatgctgcattgcggaagcgagctcgccgcggcggtgcctccagatggctggtacgattactccgcctacaccgacgggccagccggagccggcgctgtacaacggaggcattctcaagttcggcagcagcggcggagacccggacggataccgcacgacggagaccggcgtcttctccccggcgttcgtggtgtacaacctcaacaagaccaccatgtacaccttctcatgctgggtgaagctggaaggcgcgtactcggctctgatcaccgcgaggctggcgccggacaacaccggcgccaggtgcatcgccacggtcgttgccaggagcgactgctgggccttcgtcaagggcggattcgtcctggactggccgacgcagacctcggtcatcttctttcaggtacgcgcgcaagcacgcatcggatgcatgcgctggctgaattggcaaattgaggttttcattatatattgttcatgcgcgcgccctgcagaatgctgacaagacgcccatgaagatcaccgtggcgagcgggtcgctgcagccgttcaccacggaccagtgggcgatgcaccagcaggataccatccggaagaggaggaagcgcgtggcgaccatccacgtggccgacccgcagggcgcccgcgtggtgggcgcgtccgtgtcggtgcagcagacggccaaggacttcccgatcggttcggcgatcgcgtccaccatccttgggaaccaggcgtaccagcagtggttcgtggaccggttcaacgcggcggtgttcgaggacgagctcaagtggtactcgacggagcccatgtcggggcagctgcgcttcgacgtgccggaccagatgctggcgttcgtgcggtcgcaccgcgtgatggtgcgcggccacaacatcttctgggagaaccaggacgcgacgccccggtgggtgaagaacctgacggcggacgacctccgcgccgccgtcaacacgcgcatccagagcctcatgacccgctaccgcggcgagttcgcgcactgggacgtgaacaacgagatgctgcactacaacttctacgagcagcggctggggcccaacgcgtccgcggagttcttcagcgtggcgcaggacgccgacccgctggccacgctcttcatgaacgagtacaacgtcatcgagacctgcgacgaccccttctccaccgtcgacacgtacgtgtccaagctcaaggacctccgctccgccggcgccatcctggaagggatcggcctggagggacacttctccaagcccaacatcccgctcatgagggccatactcgacaagctcgccaccctggggctgcccatctggttcaccgagatcgacatcagcaacaagttcgacgcgcagacgcaggccgcctacctggagcaggtgctgcgggaggcatactcgcacccggccgtcagcggagtcatgctgtggacggcgctgcaccccagcgggtgctaccagatgtgcctcacggactggaacctcagcaacctgcccacgggggacgtggtcgaccgcctgctcaacgagtggcggacgctgcaggcggccggccagaccgacgcgcacggcgcctacagcttcaccggctacctgggggagtacgtcctcactgtcagctacaacaacaggacgacgcaatccaccttctcgctgtcgccgggagacgagaccaggcacatcaacgttcagatgtgatgcgccaacattatatttagggctcctcggatcggactacttattactagctgatgtagtgattgttgtggaagaagattgcacagtcaatctatgtttcttacttgtcctgtgtcaaatttagtgtaagaactggcgtccttgacagctggtatgtaaaatagtatgaccaccactattactatatataacaagagacttcactccacattaatcttcacaagacgcataaatgagaaggggcagggccgcagcccgcaggggatc

SEQ ID NO: 208193 - DNA, 1953 bp, Zea Mays
ggccgaccaagtgaccaactaacgcagcgcaagcaacatgcaggggccagccggagccggcgctgtacaacggaggcattctcaagttcggcagcagcggcggagacccggacggataccgcacgacggagaccggcgtcttctccccggcgttcgtggtgtacaacctcaacaagaccaccatgtacaccttctcatgctgggtgaagctggaaggcgcgtactcggctctgatcaccgcgaggctggcgccggacaacaccggcgccaggtgcatcgccacggtcgttgccaggagcgactgctgggccttcgtcaagggcggattcgtcctggactggccgacgcagacctcggtcatcttctttcaggtacgcgcgcaagcacgcatcggatgcatgcgctggctgaattggcaaattgaggttttcattatatattgttcatgcgcgcgccctgcagaatgctgacaagacgcccatgaagatcaccgtggcgagcgggtcgctgcagccgttcaccacggaccagtgggcgatgcaccagcaggataccatccggaagaggaggaagcgcgtggcgaccatccacgtggccgacccgcagggcgcccgcgtggtgggcgcgtccgtgtcggtgcagcagacggccaaggacttcccgatcggttcggcgatcgcgtccaccatccttgggaaccaggcgtaccagcagtggttcgtggaccggttcaacgcggcggtgttcgaggacgagctcaagtggtactcgacggagcccatgtcggggcagctgcgcttcgacgtgccggaccagatgctggcgttcgtgcggtcgcaccgcgtgatggtgcgcggccacaacatcttctgggagaaccaggacgcgacgccccggtgggtgaagaacctgacggcggacgacctccgcgccgccgtcaacacgcgcatccagagcctcatgacccgctaccgcggcgagttcgcgcactgggacgtgaacaacgagatgctgcactacaacttctacgagcagcggctggggcccaacgcgtccgcggagttcttcagcgtggcgcaggacgccgacccgctggccacgctcttcatgaacgagtacaacgtcatcgagacctgcgacgaccccttctccaccgtcgacacgtacgtgtccaagctcaaggacctccgctccgccggcgccatcctggaagggatcggcctggagggacacttctccaagcccaacatcccgctcatgagggccatactcgacaagctcgccaccctggggctgcccatctggttcaccgagatcgacatcagcaacaagttcgacgcgcagacgcaggccgcctacctggagcaggtgctgcgggaggcatactcgcacccggccgtcagcggagtcatgctgtggacggcgctgcaccccagcgggtgctaccagatgtgcctcacggactggaacctcagcaacctgcccacgggggacgtggtcgaccgcctgctcaacgagtggcggacgctgcaggcggccggccagaccgacgcgcacggcgcctacagcttcaccggctacctgggggagtacgtcctcactgtcagctacaacaacaggacgacgcaatccaccttctcgctgtcgccgggagacgagaccaggcacatcaacgttcagatgtgatgcgccaacattatatttagggctcctcggatcggactacttattactagctgatgtagtgattgttgtggaagaagattgcacagtcaatctatgtttcttacttgtcctgtgtcaaatttagtgtaagaactggcgtccttgacagctggtatgtaaaatagtatgaccaccactattactatatataacaagagacttcactccacattaatcttcacaagacgcataaatgagaaggggcagggccgcagcccgcaggggatc

SEQ ID NO: 208194 - DNA, 4396 bp, Zea Mays
atacttttgtcatactttagctttagcatcttcaccatacagttgagtgtctctcggatccacctgtttttgctctgtacaaactttgcttaaattacgaaagaaaaaggaaaaggaaaagtctctcgagaattcgaaataattggaattagatcgtcgtggggattccacatcgtaaccactgaagacgaggcggcggacgagacggagagcagaaccgcgcagcgaagcagcagcggcgacaagccctcgcgtcggtagaggcgccgtccgccgtccgccccctcaactccggtagccgctggccgctgcaggtcgagtcccgtcgagccgactcgcgcttcccgatctgggtggccgcggcgccggcatggcgcggttcgaggtgaacggcaagtcggtgcaaggcgtggacttgctgcggcggcgccactggccgtcgcgcctcgacttctggcccttccttgcactctatgcgctctggctgctgcttgctgtcccggcgctcgacttcactgacgctctcatcatccttgccgcgctctccgctgctcacattctcaccttcctcttcaccgcctggttcgtcgatttccgtgccttcgtcgggtactctaaggtcaaggatatccatgccgctaacacgtgtaaggtgactcctgctaagttctcggggtcaaaggagattgtacctctgcacaaacagaaaaatgtggcctcaacttcagctgcaggaattgatcggtcattatggcaagggcactggttatggaactgaggccaagattagcaccgcagtggacaagtggggcagaaatgtattcgaatatccacagcccacatttcagaaattaatgaaggagcaaatcatggaaccattttttgttttccaggttttttgtgttgctctatggtgcctggatgcgtattggtactacagtttgtttacacttttcatgcttttcctgtttgagtctactatggcaaagaataggctgaagacattgactgagctaagacgtgtgaaagttgatagccagattgtgttgacctatagatgtgggaaatgggttaaagtccctggaactgaactactaccaggagatattgtgtcaataggccgctcaactagtggtgaagatagatctgtaccagcagatatgctattgttagctgggtctgcaatagtaaatgaagctattcttacaggagaatctactccacagtggaaggtttcaattgctggacgtggtcctgatgatatgctatctataaggcgagataagaaccatatcctatttggtggcactaaagtattgcaacacactgcagataagtctgtaaatcttcgatcacctgatggtggctgtctagcttttgtattgaggactggatttgagactagccaagggaaattgatgaggactatcttattttcaactgagagggttactgcaaataacaaagaaagtggcctgtttatactctttttgcttttctttgcaatcattgcgtccggttatgtgcttgtgaagggattagaggacccaacaaggagcagatataaacttttattgagctgttcgttgattattacttctgtgataccaccggaattgccaatggagctctccatagcagtcaatacatctttaattgcattggctcggcatggtattttctgcacagagccattcagaataccatttgctgggaaggttgacatatgctgctttgataagacagggactctgacatcagatgatatggaatttcaaggtattgttacatcggaaggtgatgacttaatatctgatgcaaataagctgcctctccgaactcaagaagtgctttccagttgccatgcactggtatttgttgacaacaagctggttggcgatcccctagaaaaggctgctataaagggcatagactggatctacacatctgatgagaaggccatgtccaaaaagcctggtggtcaacctgttcaaattgtgcacagataccattttgcttctcacttgaagagaatgtctgttatcgtccgtattcagcagaaattttacgctttcattaagggtgcaccagagaccatccaagagaaattagttgatttacctgctgcatatgtggagacatataagaaatacacacggcaaggttctcgggtcttggctcttgcatataaattgcttcctgagatgcctgttagtgaagttagaagtttggaaagggatcaagtagagagcgatctaacatttgctggttttgcggtcttcaattgtcctataaggagcgactctggtgctgtcctacaagaactgggacaatcttcccatgacttggtcatgatcaccggagaccaagctttgactgcctgccatgttgctagccaagtacatatatcttccaaacctgttttgattttgacacggataaagactggtggttttgagtgggtttcgccagatgaaactgatagagctccatacagtgctgtggaggttgcagtgttatcagaatctcatgacctttgtattaatggggactgttttgaaatgctacaaagtactgaggctgttctccaggttatcccttatgtgaaggttttttcacgtgttgctccagaacaaaaagaacttgtactaactacattcaaaagtgttgggagggtgacactgatgtgtggagatggaaccaatgatgttggtgcactgaagcaggcacatgtcggcgttgctcttttgaatgctgaaccagttcagaaagtggattcaaaatctaaagctgaaaataaatctgggaaattgaaaaacaagaagcctgctaatgaagcatcatcacaagtgactccggtagctaatagttctggtaaagcatccagcagcctttccttgactgctgctgagaggcagcgagaaaagctgcagaagatgttggatgaaatgaatgatgaaagtgatggtcgttcagcaccaattgttaagcttggtgatgcttctatggcttcacctttcacagcaaagcatgcatctgttacccctactcttgatatcatccgtcagggaagaagcaccctagtcactacacttcaaatgttcaagattcttgggctcaattgccttgcgacagcttacgttctcagtgtcatgtacttggatggtgtcaaactgggcgatgttcaggctacaattagtggtgtcttcactgcagccttcttcctcttcatctccaatgctcggccactccaaacgctgtctgcagagcggcctcagcctaacatattctgtgcatacgttctgctctcgattcttggccagttcgccatgcacatattcttccttatcacggctgtcaatgaagcatcaaagcatatgccagaggaatgcattgagcctgactcagacttccatccaaaccttgtgaatacggtttcgtacatggtgaacatgatgatccaggtggcaacctttgctgtaaactacatgggccacccatttaatcagagcatatccgagaacaagcccttcaagtatgcattgtatggagcggttgctttcttcacagtgatcacatcagatatgttcaggggtttgaatgactacatgaaacttgaacctttgccagagggaatgcgtggcaaattgatgttgtgggctattctaatgttttgtggttgctacggatgggagcggctcctgcgatgggtgttcccggggaagattccggcgtgggagaagcgccagaaacaggcagttgcaagcttggagaaaaaacaccactagaattcttttagttgtctgcacttctttaccctttgatgcccatttcgatacttggtagtacatactgatcatgtcttgtcatggtttcaatctaatctgtagcctaggggaattttggcagtgaaagccctaaatgatagcatagagggtcacttatcaggattgttaaattttcggttacaatatgaaagttaatattagatggcaatgcatatcgggtgatgtacaaggcaaaatacagaaactatgccaggatttccttcattcttctactcttacaatgcgcattgatcttaatgtgtacaccctatgagaaaaggaatccctgtattctgctgctttatttatttatttatttaataatagcgtaaacatccatgttggtacagcgaaatgttggttacagcgaaagtatcaagacggaggaagggcaaaaggatcaagatgaagagtaaaattttcttttctattttttgtgtaaattaaattctaaaccaaagcttaatagtgtgatgaagcgttttgtaccttaattttcatgacaaatactagcatgacaatttgatgtataagcttaaatcattttgaattgaattgttcaaatataa

SEQ ID NO: 208195 - DNA, 4567 bp, Zea Mays
atacttttgtcatactttagctttagcatcttcaccatacagttgagtgtctctcggatccacctgtttttgctctgtacaaactttgcttaaattacgaaagaaaaaggaaaaggaaaagtctctcgagaattcgaaataattggaattagatcgtcgtggggattccacatcgtaaccactgaagacgaggcggcggacgagacggagagcagaaccgcgcagcgaagcagcagcggcgacaagccctcgcgtcggtagaggcgccgtccgccgtccgccccctcaactccggtagccgctggccgctgcaggtcgagtcccgtcgagccgactcggtaaaacctccccaaacctccacttgtatcacctctttggtctacatcaggacacgatccgactctgggtagctccgcagcgcttcccgatctgggtggccgcggcgccggcatggcgcggttcgaggtgaacggcaagtcggtgcaaggcgtggacttgctgcggcggcgccactggccgtcgcgcctcgacttctggcccttccttgcactctatgcgctctggctgctgcttgctgtcccggcgctcgacttcactgacgctctcatcatccttgccgcgctctccgctgctcacattctcaccttcctcttcaccgcctggttcgtcgatttccgtgccttcgtcgggtactctaaggtcaaggatatccatgccgctaacacgtgtaaggtgactcctgctaagttctcggggtcaaaggagattgtacctctgcacaaacagaaaaatgtggcctcaacttcagctgcaggtgagacagaggagatttactttgattttcggaagcagaggttcatctactcggctgagaaagataactttttaaaactccggtacccaacgaaggaattgatcggtcattatggcaagggcactggttatggaactgaggccaagattagcaccgcagtggacaagtggggcagaaatgtattcgaatatccacagcccacatttcagaaattaatgaaggagcaaatcatggaaccattttttgttttccaggttttttgtgttgctctatggtgcctggatgcgtattggtactacagtttgtttacacttttcatgcttttcctgtttgagtctactatggcaaagaataggctgaagacattgactgagctaagacgtgtgaaagttgatagccagattgtgttgacctatagatgtgggaagtatgaattctccatttcatttaatttttttctgtttcagcatatatcccatcctaattgcatgttctttgttcagatgggttaaagtccctggaactgaactactaccaggagatattgtgtcaataggccgctcaactagtggtgaagatagatctgtaccagcagatatgctattgttagctgggtctgcaatagtaaatgaagctattcttacaggagaatctactccacagtggaaggtttcaattgctggacgtggtcctgatgatatgctatctataaggcgagataagaaccatatcctatttggtggcactaaagtattgcaacacactgcagataagtctgtaaatcttcgatcacctgatggtggctgtctagcttttgtattgaggactggatttgagactagccaagggaaattgatgaggactatcttattttcaactgagagggttactgcaaataacaaagaaagtggcctgtttatactctttttgcttttctttgcaatcattgcgtccggttatgtgcttgtgaagggattagaggacccaacaaggagcagatataaacttttattgagctgttcgttgattattacttctgtgataccaccggaattgccaatggagctctccatagcagtcaatacatctttaattgcattggctcggcatggtattttctgcacagagccattcagaataccatttgctgggaaggttgacatatgctgctttgataagacagggactctgacatcagatgatatggaatttcaaggtattgttacatcggaaggtgatgacttaatatctgatgcaaataagctgcctctccgaactcaagaagtgctttccagttgccatgcactggtatttgttgacaacaagctggcctggtggtcaacctgttcaaattgtgcacagataccattttgcttctcacttgaagagaatgtctgttatcgtccgtattcagcagaaattttacgctttcattaagggtgcaccagagaccatccaagagaaattagttgatttacctgctgcatatgtggagacatataagaaatacacacggcaaggttctcgggtcttggctcttgcatataaattgcttcctgagatgcctgttagtgaagttagaagtttggaaagggatcaagtagagagcgatctaacatttgctggttttgcggtcttcaattgtcctataaggagcgactctggtgctgtcctacaagaactgggacaatcttcccatgacttggtcatgatcaccggagaccaagctttgactgcctgccatgttgctagccaagtacatatatcttccaaacctgttttgattttgacacggataaagactggtggttttgagtgggtttcgccagatgaaactgatagagctccatacagtgctgtggaggttgcagtgttatcagaatctcatgacctttgtattaatggggactgttttgaaatgctacaaagtactgaggctgttctccaggttatcccttatgtgaaggttttttcacgtgttgctccagaacaaaaagaacttgtactaactacattcaaaagtgttgggagggtgacactgatgtgtggagatggaaccaatgatgttggtgcactgaagcaggcacatgtcggcgttgctcttttgaatgctgaaccagttcagaaagtggattcaaaatctaaagctgaaaataaatctgggaaattgaaaaacaagaagcctgctaatgaagcatcatcacaagtgactccggtagctaatagttctggtaaagcatccagcagcctttccttgactgctgctgagaggcagcgagaaaagctgcagaagatgttggatgaaatgaatgatgaaagtgatggtcgttcagcaccaattgttaagcttggtgatgcttctatggcttcacctttcacagcaaagcatgcatctgttacccctactcttgatatcatccgtcagggaagaagcaccctagtcactacacttcaaatgttcaagattcttgggctcaattgccttgcgacagcttacgttctcagtgtcatgtacttggatggtgtcaaactgggcgatgttcaggctacaattagtggtgtcttcactgcagccttcttcctcttcatctccaatgctcggccactccaaacgctgtctgcagagcggcctcagcctaacatattctgtgcatacgttctgctctcgattcttggccagttcgccatgcacatattcttccttatcacggctgtcaatgaagcatcaaagcatatgccagaggaatgcattgagcctgactcagacttccatccaaaccttgtgaatacggtttcgtacatggtgaacatgatgatccaggtggcaacctttgctgtaaactacatgggccacccatttaatcagagcatatccgagaacaagcccttcaagtatgcattgtatggagcggttgctttcttcacagtgatcacatcagatatgttcaggggtttgaatgactacatgaaacttgaacctttgccagagggaatgcgtggcaaattgatgttgtgggctattctaatgttttgtggttgctacggatgggagcggctcctgcgatgggtgttcccggggaagattccggcgtgggagaagcgccagaaacaggcagttgcaagcttggagaaaaaacaccactagaattcttttagttgtctgcacttctttaccctttgatgcccatttcgatacttggtagtacatactgatcatgtcttgtcatggtttcaatctaatctgtagcctaggggaattttggcagtgaaagccctaaatgatagcatagagggtcacttatcaggattgttaaattttcggttacaatatgaaagttaatattagatggcaatgcatatcgggtgatgtacaaggcaaaatacagaaactatgccaggatttccttcattcttctactcttacaatgcgcattgatcttaatgtgtacaccctatgagaaaaggaatccctgtattctgctgctttatttatttatttatttaataatagcgtaaacatccatgttggtacagcgaaatgttggttacagcgaaagtatcaagacggaggaagggcaaaaggatcaagatgaagagtaaaattttcttttctattttttgtgtaaattaaattctaaaccaaagcttaatagtgtgatgaagcgttttgtaccttaattttcatgacaaatactagcatgacaatttgatgtataagcttaaatcattttgaattgaattgttcaaatataa

SEQ ID NO: 208196 - DNA, 4551 bp, Zea Mays
atacttttgtcatactttagctttagcatcttcaccatacagttgagtgtctctcggatccacctgtttttgctctgtacaaactttgcttaaattacgaaagaaaaaggaaaaggaaaagtctctcgagaattcgaaataattggaattagatcgtcgtggggattccacatcgtaaccactgaagacgaggcggcggacgagacggagagcagaaccgcgcagcgaagcagcagcggcgacaagccctcgcgtcggtagaggcgccgtccgccgtccgccccctcaactccggtagccgctggccgctgcaggtcgagtcccgtcgagccgactcgcgcttcccgatctgggtggccgcggcgccggcatggcgcggttcgaggtgaacggcaagtcggtgcaaggcgtggacttgctgcggcggcgccactggccgtcgcgcctcgacttctggcccttccttgcactctatgcgctctggctgctgcttgctgtcccggcgctcgacttcactgacgctctcatcatccttgccgcgctctccgctgctcacattctcaccttcctcttcaccgcctggttcgtcgatttccgtgccttcgtcgggtactctaaggtcaaggatatccatgccgctaacacgtgtaaggtgactcctgctaagttctcggggtcaaaggagattgtacctctgcacaaacagaaaaatctgcaggtgagacagaggagatttactttgattttcggaagcagaggttcatctactcggctgagaaagataactttttaaaactccggtacccaacgaaggaattgatcggtcattatggcaagggcactggttatggaactgaggccaagattagcaccgcagtggacaagtggggcagaaatgtattcgaatatccacagcccacatttcagaaattaatgaaggagcaaatcatggaaccattttttgttttccaggttttttgtgttgctctatggtgcctggatgcgtattggtactacagtttgtttacacttttcatgcttttcctgtttgagtctactatggcaaagaataggctgaagacattgactgagctaagacgtgtgaaagttgatagccagattgtgttgacctatagatgtgggaagtatgaattctccatttcatttaatttttttctgtttcagcatatatcccatcctaattgcatgttctttgttcagatgggttaaagtccctggaactgaactactaccaggagatattgtgtcaataggccgctcaactagtggtgaagatagatctgtaccagcagatatgctattgttagctgggtctgcaatagtaaatgaagctattcttacaggagaatctactccacagtggaaggtttcaattgctggacgtggtcctgatgatatgctatctataaggcgagataagaaccatatcctatttggtggcactaaagtattgcaacacactgcagataagtctgtaaatcttcgatcacctgatggtggctgtctagcttttgtattgaggactggatttgagactagccaagggaaattgatgaggactatcttattttcaactgagagggttactgcaaataacaaagaaagtggcctgtttatactctttttgcttttctttgcaatcattgcgtccggttatgtgcttgtgaagggattagaggacccaacaaggagcagatataaacttttattgagctgttcgttgattattacttctgtgataccaccggaattgccaatggagctctccatagcagtcaatacatctttaattgcattggctcggcatggtattttctgcacagagccattcagaataccatttgctgggaaggttgacatatgctgctttgataagacagggactctgacatcagatgatatggaatttcaaggtattgttacatcggaaggtgatgacttaatatctgatgcaaataagctgcctctccgaactcaagaagtgctttccagttgccatgcactggtatttgttgacaacaagctggttggcgatcccctagaaaaggctgctataaagggcatagactggatctacacatctgatgagaaggccatgtccaaaaagcctggtggtcaacctgttcaaattgtgcacagataccattttgcttctcacttgaagagaatgtctgttatcgtccgtattcagcagaaattttacgctttcattaagggtgcaccagagaccatccaagagaaattagttgatttacctgctgcatatgtggagacatataagaaatacacacggcaaggttctcgggtcttggctcttgcatataaattgcttcctgagatgcctgttagtgaagttagaagtttggaaagggatcaagtagagagcgatctaacatttgctggttttgcggtcttcaattgtcctataaggagcgactctggtgctgtcctacaagaactgggacaatcttcccatgacttggtcatgatcaccggagaccaagctttgactgcctgccatgttgctagccaagtacatatatcttccaaacctgttttgattttgacacggataaagactggtggttttgagtgggtttcgccagatgaaactgatagagctccatacagtgctgtggaggttgcagtgttatcagaatctcatgacctttgtattaatggggactgttttgaaatgctacaaagtactgaggctgttctccaggttatcccttatgtgaaggttttttcacgtgttgctccagaacaaaaagaacttgtactaactacattcaaaagtgttgggagggtgacactgatgtgtggagatggaaccaatgatgttggtgcactgaagcaggcacatgtcggcgttgctcttttgaatgctgaaccagttcagaaagtggattcaaaatctaaagctgaaaataaatctgggaaattgaaaaacaagaagcctgctaatgaagcatcatcacaagtgactccggtagctaatagttctggtaaagcatccagcagcctttccttgactgctgctgagaggcagcgagaaaagctgcagaagatgttggatgaaatgaatgatgaaagtgatggtcgttcagcaccaattgttaagcttggtgatgcttctatggcttcacctttcacagcaaagcatgcatctgttacccctactcttgatatcatccgtcagggaagaagcaccctagtcactacacttcaaatgttcaagattcttgggctcaattgccttgcgacagcttacgttctcagtgtcatgtacttggatggtgtcaaactgggcgatgttcaggctacaattagtggtgtcttcactgcagccttcttcctcttcatctccaatgctcggccactccaaacgctgtctgcagagcggcctcagcctaacatattctgtgcatacgttctgctctcgattcttggccagttcgccatgcacatattcttccttatcacggctgtcaatgaagcatcaaagcatatgccagaggaatgcattgagcctgactcagacttccatccaaaccttgtgaatacggtttcgtacatggtgaacatgatgatccaggtggcaacctttgctgtaaactacatgggccacccatttaatcagagcatatccgagaacaagcccttcaagtatgcattgtatggagcggttgctttcttcacagtgatcacatcagatatgttcaggggtttgaatgactacatgaaacttgaacctttgccagagggaatgcgtggcaaattgatgttgtgggctattctaatgttttgtggttgctacggatgggagcggctcctgcgatgggtgttcccggggaagattccggcgtgggagaagcgccagaaacaggcagttgcaagcttggagaaaaaacaccactagaattcttttagttgtctgcacttctttaccctttgatgcccatttcgatacttggtagtacatactgatcatgtcttgtcatggtttcaatctaatctgtagcctaggggaattttggcagtgaaagccctaaatgatagcatagagggtcacttatcaggattgttaaattttcggttacaatatgaaagttaatattagatggcaatgcatatcgggtgatgtacaaggcaaaatacagaaactatgccaggatttccttcattcttctactcttacaatgcgcattgatcttaatgtgtacaccctatgagaaaaggaatccctgtattctgctgctttatttatttatttatttaataatagcgtaaacatccatgttggtacagcgaaatgttggttacagcgaaagtatcaagacggaggaagggcaaaaggatcaagatgaagagtaaaattttcttttctattttttgtgtaaattaaattctaaaccaaagcttaatagtgtgatgaagcgttttgtaccttaattttcatgacaaatactagcatgacaatttgatgtataagcttaaatcattttgaattgaattgttcaaatataa

SEQ ID NO: 208197 - DNA, 4498 bp, Zea Mays
atacttttgtcatactttagctttagcatcttcaccatacagttgagtgtctctcggatccacctgtttttgctctgtacaaactttgcttaaattacgaaagaaaaaggaaaaggaaaagtctctcgagaattcgaaataattggaattagatcgtcgtggggattccacatcgtaaccactgaagacgaggcggcggacgagacggagagcagaaccgcgcagcgaagcagcagcggcgacaagccctcgcgtcggtagaggcgccgtccgccgtccgccccctcaactccggtagccgctggccgctgcaggtcgagtcccgtcgagccgactcgctccgcagcgcttcccgatctgggtggccgcggcgccggcatggcgcggttcgaggtgaacggcaagtcggtgcaaggcgtggacttgctgcggcggcgccactggccgtcgcgcctcgacttctggcccttccttgcactctatgcgctctggctgctgcttgctgtcccggcgctcgacttcactgacgctctcatcatccttgccgcgctctccgctgctcacattctcaccttcctcttcaccgcctggttcgtcgatttccgtgccttcgtcgggtactctaaggtcaaggatatccatgccgctaacacgtgtaaggtgactcctgctaagttctcggggtcaaaggagattgtacctctgcacaaacagaaaaatgtggcctcaacttcagctgcaggtgagacagaggagatttactttgattttcggaagcagaggttcatctactcggctgagaaagataactttttaaaactccggtacccaacgaaggaattgatcggtcattatggcaagggcactggttatggaactgaggccaagattagcaccgcagtggacaagtggggcagaaatgtattcgaatatccacagcccacatttcagaaattaatgaaggagcaaatcatggaaccattttttgttttccaggttttttgtgttgctctatggtgcctggatgcgtattggtactacagtttgtttacacttttcatgcttttcctgtttgagtctactatggcaaagaataggctgaagacattgactgagctaagacgtgtgaaagttgatagccagattgtgttgacctatagatgtgggaaatgggttaaagtccctggaactgaactactaccaggagatattgtgtcaataggccgctcaactagtggtgaagatagatctgtaccagcagatatgctattgttagctgggtctgcaatagtaaatgaagctattcttacaggagaatctactccacagtggaaggtttcaattgctggacgtggtcctgatgatatgctatctataaggcgagataagaaccatatcctatttggtggcactaaagtattgcaacacactgcagataagtctgtaaatcttcgatcacctgatggtggctgtctagcttttgtattgaggactggatttgagactagccaagggaaattgatgaggactatcttattttcaactgagagggttactgcaaataacaaagaaagtggcctgtttatactctttttgcttttctttgcaatcattgcgtccggttatgtgcttgtgaagggattagaggacccaacaaggagcagatataaacttttattgagctgttcgttgattattacttctgtgataccaccggaattgccaatggagctctccatagcagtcaatacatctttaattgcattggctcggcatggtattttctgcacagagccattcagaataccatttgctgggaaggttgacatatgctgctttgataagacagggactctgacatcagatgatatggaatttcaaggtattgttacatcggaaggtgatgacttaatatctgatgcaaataagctgcctctccgaactcaagaagtgctttccagttgccatgcactggtatttgttgacaacaagctggttggcgatcccctagaaaaggctgctataaagggcatagactggatctacacatctgatgagaaggccatgtccaaaagcctggtggtcaacctgttcaaattgtgcacagataccattttgcttctcacttgaagagaatgtctgttatcgtccgtattcagcagaaattttacgctttcattaagggtgcaccagagaccatccaagagaaattagttgatttacctgctgcatatgtggagacatataagaaatacacacggcaaggttctcgggtcttggctcttgcatataaattgcttcctgagatgcctgttagtgaagttagaagtttggaaagggatcaagtagagagcgatctaacatttgctggttttgcggtcttcaattgtcctataaggagcgactctggtgctgtcctacaagaactgggacaatcttcccatgacttggtcatgatcaccggagaccaagctttgactgcctgccatgttgctagccaagtacatatatcttccaaacctgttttgattttgacacggataaagactggtggttttgagtgggtttcgccagatgaaactgatagagctccatacagtgctgtggaggttgcagtgttatcagaatctcatgacctttgtattaatggggactgttttgaaatgctacaaagtactgaggctgttctccaggttatcccttatgtgaaggttttttcacgtgttgctccagaacaaaaagaacttgtactaactacattcaaaagtgttgggagggtgacactgatgtgtggagatggaaccaatgatgttggtgcactgaagcaggcacatgtcggcgttgctcttttgaatgctgaaccagttcagaaagtggattcaaaatctaaagctgaaaataaatctgggaaattgaaaaacaagaagcctgctaatgaagcatcatcacaagtgactccggtagctaatagttctggtaaagcatccagcagcctttccttgactgctgctgagaggcagcgagaaaagctgcagaagatgttggatgaaatgaatgatgaaagtgatggtcgttcagcaccaattgttaagcttggtgatgcttctatggcttcacctttcacagcaaagcatgcatctgttacccctactcttgatatcatccgtcagggaagaagcaccctagtcactacacttcaaatgttcaagattcttgggctcaattgccttgcgacagcttacgttctcagtgtcatgtacttggatggtgtcaaactgggcgatgttcaggctacaattagtggtgtcttcactgcagccttcttcctcttcatctccaatgctcggccactccaaacgctgtctgcagagcggcctcagcctaacatattctgtgcatacgttctgctctcgattcttggccagttcgccatgcacatattcttccttatcacggctgtcaatgaagcatcaaagcatatgccagaggaatgcattgagcctgactcagacttccatccaaaccttgtgaatacggtttcgtacatggtgaacatgatgatccaggtggcaacctttgctgtaaactacatgggccacccatttaatcagagcatatccgagaacaagcccttcaagtatgcattgtatggagcggttgctttcttcacagtgatcacatcagatatgttcaggggtttgaatgactacatgaaacttgaacctttgccagagggaatgcgtggcaaattgatgttgtgggctattctaatgttttgtggttgctacggatgggagcggctcctgcgatgggtgttcccggggaagattccggcgtgggagaagcgccagaaacaggcagttgcaagcttggagaaaaaacaccactagaattcttttagttgtctgcacttctttaccctttgatgcccatttcgatacttggtagtacatactgatcatgtcttgtcatggtttcaatctaatctgtagcctaggggaattttggcagtgaaagccctaaatgatagcatagagggtcacttatcaggattgttaaattttcggttacaatatgaaagttaatattagatggcaatgcatatcgggtgatgtacaaggcaaaatacagaaactatgccaggatttccttcattcttctactcttacaatgcgcattgatcttaatgtgtacaccctatgagaaaaggaatccctgtattctgctgctttatttatttatttatttaataatagcgtaaacatccatgttggtacagcgaaatgttggttacagcgaaagtatcaagacggaggaagggcaaaaggatcaagatgaagagtaaaattttcttttctattttttgtgtaaattaaattctaaaccaaagcttaatagtgtgatgaagcgttttgtaccttaattttcatgacaaatactagcatgacaatttgatgtataagcttaaatcattttgaattgaattgttcaaatataa

SEQ ID NO: 208198 - DNA, 2154 bp, Zea Mays
tcgccgcgcggaatcgatggtcgtgggctcgtggctcccgagtcccggacagcttcccgctaggtggtgagattggagagcgtggggattagtctctgacgaggtacaatcagggcgaccagtacgtgccctgaattttcaggcttctctagctgctaaggatctccagatttccaccgcgtcaagtccaaggctgcattcctcttcaagtaccataagccatcacctcagattcaatcacctcaattgccatgaaaacaaggaagatggcctggggactgaaaatgctgaaacaagtggccttgaaagctcatctaggaaggctgtcatggttaggggaagtttcagtaatgaagctgttaatagtgatatgtcaggagaagggataagttttataggatcagagctggaaaatattcctagcacagtctccactaatgaaactggtggctcagccgctgaatctggtttgggcccctcattgatggcatctgaaaggatcatgtctgacttagaaggagaggtatctccgcaagggacctcatccacaactgccatgacaagtgaaagatcagatgtatctcaagctagcttaacatctatgtttcctaactcttcaattgcatcatctgtgattgtggaaccaatgccagatccaatctctaccagggcagatgtccccatattcagtgggccacatggtgagcctggagggagtatattacatgatgacatgatgagcattttctcaaatgacggtctaggacgctctagggattctagcagcagtgaaacaaggaggagtcacagaaggattctatgggacacgttttccaggcgtggctcaagaggttatccagaatttgatgctgatgacctcggattttacagcacatggctagaccttggtgatgacatttttgaagagttgggggaatcaagatattttcatcgcaggcgacatggttcgatcagagtaagccagtattcaagatcccggattagggagcatcgccgtgctgtttttgatagtggtaatgaacaaggcactgctgcatgtcctttggggattcatcaaactggccgatgcacatgtgattctttcttggttgctgaagaatctagtgcccgagcaagtatatcaagaattgtcatgttaactgaagcgttatttgaggtgttggatgaaattcaccgtcaacctgcatcactttcactttccatggtctctgttcaggctcctgaatctgtagtcaattcgttgccgtgcaagagctacaaaaagctagaggcaccccaacgcagtgatgatatggaacagtgccatatctgcctaactgaatatgaggatggagaccagatacgaattcttccttgcaagcacgagttccacctgcaatgtgttgacaaatggctgaaagaaatacacagggtgtgccctctgtgccgcggagacgtctgcgaagtcgcctcgtgaagaccttggcgctgccatcccttcctcacggcaccggcagatagcgcatcccccgcctgctccgttgttgaagctggtttggtcaggcaacggcgatcacgtcccgtcaatctgggcgtccctgccgaagagcgtggccagatcctgcgaccaatgcgtcgctgttcctgccatcaactttttaagataccgagactgtatatagctcttgtagcctctccgtgtatgacaacctgtacatatatatgtaaattctagattccaatgtccattattttgtcctacattcagatcttattctcgcagccctgatgctcaaactagctttaccagaatctgtcaacacctcttcaactataaaaaggtataattattgcagaatgaccccaaatatcagacgcttccgattaagagaattcgattcaaatctagaaaggcaacagctgaatcttttccaaataacagaattttatccaaatctagaaaggaacaaactgaaacatttgggtcacaaaaatactgatttattttggcaggggccgcgcggacgcgtaccccctcaatcacaaattatgacatccactctcccagttggggagatggtagatcagcgcatccaccaagtgcaatgtggaccactaatctagaccatgggtcttcttgaacacccatcgatc

SEQ ID NO: 208199 - DNA, 1878 bp, Zea Mays
ggcttgttcgccaaattggcagctcgccacgttcttcttctctcaaccttcccctctttctctacttctcgtcccaactcccaagttgcaacccagccacctcgtctcctcccctccaactccaagcctactcccacccgatcccccctgccccgccccgggcgccgccggttctcgcattcgcggcagtccatctcgttgccccttcccggcggcctctgatccgtgctgctcgtcgcccacgcgaaacctgccgcctcccttgttgccgcgaccgcgagccctctcccctcccctcgcggccctgatctcagttccactgtgccccgaccgtgatccgtccgcacccgcttcatgcccagcagcgttcaacccgtcccctaaatgccgctgcctccaaatagttctccgtgtgctggttcttgcggattgcgctgtcaggtctacataatattgggggcggtgcagagtgtcctccgttttttcctctctcgcacctaaagttttcgggagcagttagttagagtatattcgattccccctgatatagtttgtttatttcacactacgaagtctatgcactcgagagaaaaatcactggtagcgacggcatcaattcttgtgacgtttagtagctagaacaccctcactagcgctcattcatgtttactcgaccttgtccttttcccttccatcttccgtgtgctggtatcaatttgttgtaatttggggagaccaggagttttctcgccttcttgcccttgttctgcccgtagataatcataagcaaggtttccccaaaattcttagaccagttgggatcaggacccgaaggtagattgtgttggctatttgccggtagggcattgtgactccgtgatgtcttgcacctctccagatccaccagactactgctcagccgaatcgcctgagctcaagctataccaggccttcatcttctcggtgcctgtcttcttcacgttcgtcttgcttctcttcttctacctcttctacttgaggcggcgcagggccaattggcagtccttgcggatgaggacaaataatttgatacgaggagataatgccagactggagtgtggcttaaagaaggagatgcgggaaatgttgccagttgttatcttcaaagagagtttcttgatcagggagacacagtgctcggtctgcctagcagaatacgaaccggacgagaggcttcagaagatacctccctgtgggcataccttccacatcaactgtatcgaccactggctctccacaaacaccacctgccccctctgccgagtatcgctccttcccgcccccaaggcaaccagcaccggactggatctggaagcacagactgcggtagaagaggagtctccgaacgcacatcatcgccaggaggagggactcgttgatgccaacacaccacaggaaggtgaggcggccggaggtgacggatcaagtagcgtccaggttgaagaactgcacggcgatgcggccgagccattggcggtgacggtggtcgctgtcgctgcgcctcaggctgacgctgaaggttcaccgagtacagcatgccaaactgttaaagggaagaaataaggatagcctagcccatcgatgtatttctattaccattgtgtgtttagctgggaaaggaaaaaaacgcataaagatggggccattgatgttatgattgccatttttctggggaggaagaagaagagcaagagttcagttgtggggaaatcttattgatacagcacttaacataaccgagattagtagtacttgtgagctgtttttcatctggtaaaccatactgtcagataacaggtgtttgtttttcgaacgccctgggattcgtgagatggcaga

SEQ ID NO: 208200 - DNA, 1189 bp, Zea Mays
tcggcctattccaccggtcgtcgcctttttgctgctgcgcgacgccgacgcggccgtgcgagtgcggcgcagcgacggtcgagccaagctcactactccaaattcgtgtcgtagtcgtaggaggaatgtgggagagaatacaggggagaagccgagagccgaacgaagagaccgagcccccgccgcccgcggcgtctgttcctttcgtgccgcttcgtggtggcgccgtggcgcccaccaccacctcacctctcagtctctcaccacctatagcaataccacgagtccacgatccatggaatagactagactacaccgctcggccggtgacgacgacggcgacagccgacagtctatccccaactacgctctgcaccagcgccttatccgccgcctggggtttgttctggcgcggtggcagttgataaaggcgggagggattagagcaaggagagggatcggcgatgagcttcgcggatctggaggcgggggctctcagggcgcccctcgggaggaaagcgagaggggggccaaacgacgcgagagcgctcgtcttccagataaccaccgcggtggcctcgtaccgccgcctcctcaactcgctcggcacgcccaaggacaccatcacgcttcgtgataacctgcataagactagtcagaacatccttcaattagcaaaggatgcgaaagataagctccaaaaggctgctgaagcagacaagagcactgatacaagtgcagacaagaggatagctgatatgaagcttgccaaagattttgctgccacaatggaggagttcaggaaacttcagagtcttgcgattcagagggagacggcatataagccagttgttccacagaatacgcagtcaaactattctacagatgagcgaagttccgaatctggtaatatgcctgagcagcgtgcattactcgctgaatcaatgaggtcagtattgagctattagctggcgatcaggtggaagctcagctgaagctctgtagtgcattaggcaaatgttggatagatatacatgttaggatatcttattgactattgcattagctcatgtacttgaaaaaacaggacgttcatctagatcttatgtcccatggcatacttgcccctgggtttgtgatgaagctgtagggcttgcgctaatttcttagtcgatacaagtggactgta

SEQ ID NO: 208201 - DNA, 2215 bp, Zea Mays
aggtgcgcgcgtgtttgttttccggccatctgctccatttgctcggggagccagctgattaataaagcatttaggcgcgcgcgaagcaacaaactaattctgggctagctatggccggtagcaacggaactctgctgctcgcactccgcatcgtcctcttctgcgccctcgcctccgtggccaccaccttgctccctctcgtcacaaggccatgcgcctactccctgccaagaaccatcctcgccgccagcggcctcgaccctcgcctcatctcctgcgcggacgacggctccgccaaggcccagctgtcggatggcgatggaggccacaacaaggccggtagcggcggcaggcccatagtcaccgacctgctgtcgtgcggcgagccccgcctcccatcccacgcgctcccgcccttccgctgctgcccgccgacgccggcgtccgacgctgccgtcgccaacttcacgttccccgacccaggcgagccgctccggacgcggcagccagcgcacggggccgccggcgcggacagcgtcgccaggtacgcgcgcgcggtggcgctgatgaaggcgcttccggagtcggacccgcgcagcttctaccagcaggccaacatccactgcgcctactgcaccgcggcgtaccggcaggcggggcggccggagctgcacgtgcagatccacttctcgtggctcttcttccccttccaccgcgcctacctctacttcttcgagcgcgtcgcggcgaggctcctgggcgaccccgggttcgccgtgccgttctggagctgggacgtgccggaggggatgcgggtgccgccggagttcgccgacgcggcgtccccgctgtacgacccgataaggaacccagagcacgcgccgcccagagtcgtggacctcgacttctcgaaagtggacaagaattacaccgacgagcagcaaatccagctcaacctccggaccatgtataaacagatggtcaccaacgcgccgctgccgtccctcttctacggccagccctaccgcgccggcgaccgggagatgccgggggctggaacggtggagctgagcccgcacaacacaatccatgtatgggccggcgacctctcgcagcccaaccacgagaacatgggcacctactactccgccgcccgcgaccccatcttcttcccgcaccacaccaactccgaccgcctctgggaggtctggcgcggcggtccggcgcgccacgcggacttcacggaccccgactggctcgactcgtcgttcctgttctacgacgaggacgcccggctcgtgcgagtcaccgtccgtgacatgctcgacatcgggaggctccgttacgcgtacgccgaggtcgggctgccgtggctcagcgcgcggccccccatcaaccctggcgacgtgaaccgcggaagagacccgccgcacctggagtccgtccgcttcccggtgtcgctcgatgccccggtgactgcggaggtgagccggcggccgggaaagccacggagccactgggaggaggtgctggtggtcgagggcatcaaggcggacggcgcggacttcgtgaagttcgacgtgtacgtgaacgcggtggatcacgagaagatcatgccgggcggtcgggagatggctggaagcttcgtgtccctgaagcaccccggaaatatggtggtgcagagcagcatgagggtggcgctgaacgagctcctggaggacctgggcgccgagggagacgacagcgttacggtgacgttggtgcccgtggaggggagggtcaggatcggaggtctcaggatagtgtacatggcggagtgaggaccagcgtaggaaccgtttactctgcagtacgtccagggaggttttgaacagacccacatatctctgtattttaattatttggcagtgcaccctcacattgctagagccttcaagaagatgtcgttcgaccacaagttaatttgggctcgtaatttcgtcaatgagaagttcccaggagtgtgagggctattactaggtaggcttggacaattcttttgcttgaaccacatcgaacaatgatttgtggtctaagtacgtgtggattttgtgtaaaccttgaacttgatattatttgtaaggctatgacacattattatgtgtgttgtgtggagttaatagtaatatgtgtgttttgtggacttaatattagttgtaacatattttgagatggg

SEQ ID NO: 208202 - DNA, 2397 bp, Zea Mays
attcagtgcggagcacgggagagattccctggtggacacgtcttcctccgcgaactgcgcccacctccgatctccccggcttgcctacaagtctccctgccccctcacttctcgcgctcttcctcttctccagcctccctctgccaacaactctcgcgagggcgccgtccgcctccgcctccgtctcggggagcgatgacgatcgcgcgacgcctgctccgatccaatgcctccgcccaggcaatcagcttactgaagcatgtaactggcactgcaagtttgcaaggccatgcacatagtccgttggatgcgtcagtcagacattttagttcagctccatctgcccagtctgacacaactgaagaaaatgggttcaagggccatggcatgttggcaccttttacagctggctggcagagcaatgatttgcatcctctaattattgagagatctgagggttcctatgtttatgacatcaatgggaataaatacctggattctcttgcagggttatggtgcacagctttaggtggtagcgagcctcgattagtcaaggcagcaactgagcaattaaacaatttgcccttctaccattccttttggaaccgcacaaccaaaccttcattggaccttgcacaggagatccttagcatgttcactgcaagggaaatgggaaaagttttcttcacaaacagtggttcagaagcaaatgactctcaggtcaaactagtatggtattataacaacgcattggggaggccagacaagaagaaatttattgcacgatcaaaagcataccatggatctacactgatatcagcgagcctaactggtcttcctgccctgcaccagaagtttgatctaccagcaccttttgttctgcacactgactgccctcactactggcgatatcatcttcctggtgagacggaagaagaatttgcgactagacttgccaccaatttagagaatcttattctcaaagaaggaccagaaacaatcgctgctttcattgctgaacctgtgatgggtgccggtggtgtcatccctcctccaaagacctattttgacaaggttatacactatgggttccaaaaattattgactcttctatgagcaaactgcacttctctggaagtatagatgctttcattcacctgtccctctttgtctcttccctttatcttcgttcatctcattgtagctgttccacaaaaataattgtttttcatgaactggtagagttggtatattatgcaaaggactctaattattgttctgaatgcttgttgtgtgttattttatttcctatgaacaggttcaagcagtggtcaagaagtatgacattcttttcatagcagatgaggtcatcactgcatttggaaggttgggaactatgtttggatgcgattattataacatcaagccagatctagtttccttggccaaggctctttcaaatgcctatgtacccatcggggcaactcttgttagcccagagatatcagaggtgattcactcccagagcaataagctcggctcatttgctcatgggtttacatactctggtcatccagttgcctgtgcagtggcaatagaagctttgaaactttaccgcgaaagggatattcctggtcatgtcaagcaaatcgctccaaagttccaggacggaattagggcgttggcagacagcccaatcatcggggagatacgtggcttagggatgattatgggaaccgaattcaccaacaacaaatcaccggctgatctattccctgccgaatggggggttggtgccatctttggagaggagtgccagaagcgcggcatgctggtcagggttgctggcgacgccatcatgatgtcgcccacgctgatcatgacgcccggcgaggtcgacgagctggtgagcatctacggggaagccctcagggccacggaggagagggtgtcagacctgaagatgaaatccgagaagaactaaccaaaagggcgaggacgacgacgataacgcctggcggcaacggtagcagctgatgtacaggtgaataaaatggtcgtgactgcgagatggcaataatgcgcgggaatggtcgacggtcgtctctgatcttggagtgcaaggtcaagctgctcggtcgctaaacaacggtggctgaacttttaaacgggacatagatgtttttttccctaagcaatggcagtatctcaaatgtttgctgccctgtagtttctgaacataaagggttagcagacgttataaaatttaaattttatcgtaaaacagttgttattctcattttctagtgtatcttcctctcccccctcccccaaaaaaacaattgcatgtcttgttgaacttttatgcgattgggcttagggatagcaacacaaaat

SEQ ID NO: 208203 - DNA, 2310 bp, Zea Mays
acacgtcttcctccgcgaactgcgcccacctccgatctccccggcttgcctacaagtctccctgccccctcacttctcgcgctcttcctcttctccagcctccctctgccaacaactctcgcgagggcgccgtccgcctccgcctccgtctcggggagcgatgacgatcgcgcgacgcctgctccgatccaatgcctccgcccaggcaatcagcttactgaagcatgtaactggcactgcaagtttgcaaggccatgcacatagtccgttggatgcgtcagtcagacattttagttcagctccatctgcccagtctgacacaactgaagaaaatgggttcaagggccatggcatgttggcaccttttacagctggctggcagagcaatgatttgcatcctctaattattgagagatctgagggttatggtgcacagctttaggtggtagcgagcctcgattagtcaaggcagcaactgagcaattaaacaatttgcccttctaccattccttttggaaccgcacaaccaaaccttcattggaccttgcacaggagatccttagcatgttcactgcaagggaaatgggaaaagttttcttcacaaacagtggttcagaagcaaatgactctcaggtcaaactagtatggtattataacaacgcattggggaggccagacaagaagaaatttattgcacgatcaaaagcataccatggatctacactgatatcagcgagcctaactggtcttcctgccctgcaccagaagtttgatctaccagcaccttttgttctgcacactgactgccctcactactggcgatatcatcttcctggtgagacggaagaagaatttgcgactagacttgccaccaatttagagaatcttattctcaaagaaggaccagaaacaatcgctgctttcattgctgaacctgtgatgggtgccggtggtgtcatccctcctccaaagacctattttgacaaggttatacactatgggttccaaaaattattgactcttctatgagcaaactgcacttctctggaagtatagatgctttcattcacctgtccctctttgtctcttccctttatcttcgttcatctcattgtagctgttccacaaaaataattgtttttcatgaactggtagagttggtatattatgcaaaggactctaattattgttctgaatgcttgttgtgtgttattttatttcctatgaacaggttcaagcagtggtcaagaagtatgacattcttttcatagcagatgaggtcatcactgcatttggaaggttgggaactatgtttggatgcgattattataacatcaagccagatctagtttccttggccaaggctctttcaaatgcctatgtacccatcggggcaactcttgttagcccagagatatcagaggtgattcactcccagagcaataagctcggctcatttgctcatgggtttacatactctggtcatccagttgcctgtgcagtggcaatagaagctttgaaactttaccgcgaaagggatattcctggtcatgtcaagcaaatcgctccaaagttccaggacggaattagggcgttggcagacagcccaatcatcggggagatacgtggcttagggatgattatgggaaccgaattcaccaacaacaaatcaccggctgatctattccctgccgaatggggggttggtgccatctttggagaggagtgccagaagcgcggcatgctggtcagggttgctggcgacgccatcatgatgtcgcccacgctgatcatgacgcccggcgaggtcgacgagctggtgagcatctacggggaagccctcagggccacggaggagagggtgtcagacctgaagatgaaatccgagaagaactaaccaaaagggcgaggacgacgacgataacgcctggcggcaacggtagcagctgatgtacaggtgaataaaatggtcgtgactgcgagatggcaataatgcgcgggaatggtcgacggtcgtctctgatcttggagtgcaaggtcaagctgctcggtcgctaaacaacggtggctgaacttttaaacgggacatagatgtttttttccctaagcaatggcagtatctcaaatgtttgctgccctgtagtttctgaacataaagggttagcagacgttataaaatttaaattttatcgtaaaacagttgttattctcattttctagtgtatcttcctctcccccctcccccaaaaaaacaattgcatgtcttgttgaacttttatgcgattgggcttagggatagcaacacaaaat

SEQ ID NO: 208204 - DNA, 1460 bp, Zea Mays
aaaatggttgctggttcaccgatcatggtcaaactagtatggtattataacaacgcattggggaggccagacaagaagaaatttattgcacgatcaaaagcataccatggatctacactgatatcagcgagcctaactggtcttcctgccctgcaccagaagtttgatctaccagcaccttttgttctgcacactgactgccctcactactggcgatatcatcttcctggtgagacggaagaagaatttgcgactagacttgccaccaatttagagaatcttattctcaaagaaggaccagaaacaatcgctgctttcattgctgaacctgtgatgggtgccggtggtgtcatccctcctccaaagacctattttgacaaggttcaagcagtggtcaagaagtatgacattcttttcatagcagatgaggtcatcactgcatttggaaggttgggaactatgtttggatgcgattattataacatcaagccagatctagtttccttggccaaggctctttcaaatgcctatgtacccatcggggcaactcttgttagcccagagatatcagaggtgattcactcccagagcaataagctcggctcatttgctcatgggtttacatactctggtcatccagttgcctgtgcagtggcaatagaagctttgaaactttaccgcgaaagggatattcctggtcatgtcaagcaaatcgctccaaagttccaggacggaattagggcgttggcagacagcccaatcatcggggagatacgtggcttagggatgattatgggaaccgaattcaccaacaacaaatcaccggctgatctattccctgccgaatggggggttggtgccatctttggagaggagtgccagaagcgcggcatgctggtcagggttgctggcgacgccatcatgatgtcgcccacgctgatcatgacgcccggcgaggtcgacgagctggtgagcatctacggggaagccctcagggccacggaggagagggtgtcagacctgaagatgaaatccgagaagaactaaccaaaagggcgaggacgacgacgataacgcctggcggcaacggtagcagctgatgtacaggtgaataaaatggtcgtgactgcgagatggcaataatgcgcgggaatggtcgacggtcgtctctgatcttggagtgcaaggtcaagctgctcggtcgctaaacaacggtggctgaacttttaaacgggacatagatgtttttttccctaagcaatggcagtatctcaaatgtttgctgccctgtagtttctgaacataaagggttagcagacgttataaaatttaaattttatcgtaaaacagttgttattctcattttctagtgtatcttcctctcccccctcccccaaaaaaacaattgcatgtcttgttgaacttttatgcgattgggcttagggatagcaacacaaaat

SEQ ID NO: 208205 - DNA, 1810 bp, Zea Mays
cgctccggccgagctcagcgtattaggcctaggcggcggggcggcggctgcctcgggcgcggtcacccgggccgacttccccgccgggttcgtcttcggcgtcggctcctcggcgtaccaggtcgaaggtgcagttgcagaggacggaagaaagcctagcatctgggacacattcacacatgaaggctactccctcgacaacgccacaggcgacgtaactgcggatcagtatcataagtacaaggacgacgtaaagcttctgcatgagatgggtgtcgatgcctaccggatgtcgattgcctggcctcgacttatcccagatggtcggggagccgtgaatccgaaggggctggagtactacaacaatctcatagatgagctccttagctacggaatacagcctcacgtgacgatataccatttcgatttcccacaggctcttcaggacgagtacagcgggctgatcagtcccagattcatagaggacttcacggcgtacgcagacgtgtgcttcagcaacttcggcgacagggtcaagtactggagcaccgtcaacgagcccaacgtcgagacgatcggcgggtacgaccagggaatcctgccgccgcggcggtgctccttccccttcggcttcggctgcgaggaaggcaactccaccacggagccatacgtagcggcgcaccacctcctgcttgcgcacgcgtctgcggtgtccctgtacagagacaggtaccaggctgcgcaaggaggacggatcggactcaccttgcttggttggtggtacgagcctgggacgcagactcccgacgatgtcgcggcagccgcacggatgaacgacttccacatcggatggttcatgcatcctatggtgttcggggactaccctccggtgatgaggaggaacgtcgggtccaggctgccgaccttcacggacgaggaggcggcgcgagtgagggggtctttcgacttcgtcggattcaaccactacatcgtcgtctacgtcaaggctgaccttggccgcctagacgaccaagtgcgagactacatgggcgatgcagccgtgaatgccgtttctcaagtcacgcaaccagttcccgttcggcgccttgacgagcgacttcatgacgtccaccccctgggctctcaagaaaatgctgaggcatctccgggtgacatacaagaaccctgcagtcatgatccatgaaaacggagctgccggacagcctgatccatccggcgtgaacagctacgacgacgagttcaggtcacagttcctgcaggactacatcgaggccacgcttcagtccatcaggaacggatcgaacgtgcaaggctacttcgtgtggtcgttcctggacgtgttcgagtacctgttcggctaccgcctccggttcggcgtctacggcgtcgagttcaactcgacggcaaggacaaggtaccagaggcactcggccaagtggtacgccagcttcctccggggcggcgagctgaggccagtcgctctgcctgacggagcatattcacagtgaccagttacacgtgtacgctccggctccaggggaatatctggcgatcagcgctctcggtgaggtggagagaaaatagagagtttgtaagcaaggatagtcggggtggtatatatagcagtgcttagatacggttttcttgggtaaatgtggtacgagttgaataagttgtggcatgtttggttagaggttagaggattggctctacccgaaaccagctgattcagatggtcgtttctatatatttggttagggggatggagtggatccattttttgtttagg

SEQ ID NO: 208206 - DNA, 2183 bp, Zea Mays
cgatcgagcgaagcagaagcgccaaggcagccgacgcgcatggggaggacggacggcaacgcaacggtgtcgccacgtgcacagccgctagcgaaaccgggcaggaaggaccgcagtagtatatagagacctctccggccggcgcgcgcgacgtcagcgacgacgtccgcgccacgcgggcggaacttcgtagtttgcgacggggcacgcacgcacgacgcaccccacgcattttcaactatataaaaagcaccccccgcgagcgcggccggccggcgaacagaggagaggagaggagagactagacccgctagctgaggccggccggcgcgctggacacgaacatgatggggagaaaggcgccgctcggctgtgctactactcttctcctcctcttggccgccgccgtcgctccggccgagctcagcgtattaggcctaggcggcggggcggcggctgcctcgggcgcggtcacccgggccgacttccccgccgggttcgtcttcggcgtcggctcctcggcgtaccaggtcgaaggtgcagttgcagaggacggaagaaagcctagcatctgggacacattcacacatgaaggctactccctcgacaacgccacaggcgacgtaactgcggatcagtatcataagtacaaggacgacgtaaagcttctgcatgagatgggtgtcgatgcctaccggatgtcgattgcctggcctcgacttatcccagatggtcggggagccgtgaatccgaaggggctggagtactacaacaatctcatagatgagctccttagctacggctcttcaggacgagtacagcgggctgatcagtcccagattcatagaggacttcacggcgtacgcagacgtgtgcttcagcaacttcggcgacagggtcaagtactggagcaccgtcaacgagcccaacgtcgagacgatcggcgggtacgaccagggaatcctgccgccgcggcggtgctccttccccttcggcttcggctgcgaggaaggcaactccaccacggagccatacgtagcggcgcaccacctcctgcttgcgcacgcgtctgcggtgtccctgtacagagacaggtaccaggctgcgcaaggaggacggatcggactcaccttgcttggttggtggtacgagcctgggacgcagactcccgacgatgtcgcggcagccgcacggatgaacgacttccacatcggatggttcatgcatcctatggtgttcggggactaccctccggtgatgaggaggaacgtcgggtccaggctgccgaccttcacggacgaggaggcggcgcgagtgagggggtctttcgacttcgtcggattcaaccactacatcgtcgtctacgtcaaggctgaccttggccgcctagacgaccaagtgcgagactacatgggcgatgcagccgtgaagtatgacatgccgtttctcaagtcacgcaaccagttcccgttcggcgccttgacgagcgacttcatgacgtccaccccctgggctctcaagaaaatgctgaggcatctccgggtgacatacaagaaccctgcagtcatgatccatgaaaacggagctgccggacagcctgatccatccggcgtgaacagctacgacgacgagttcaggtcacagttcctgcaggactacatcgaggccacgcttcagtccatcaggaacggatcgaacgtgcaaggctacttcgtgtggtcgttcctggacgtgttcgagtacctgttcggctaccgcctccggttcggcgtctacggcgtcgagttcaactcgacggcaaggacaaggtaccagaggcactcggccaagtggtacgccagcttcctccggggcggcgagctgaggccagtcgctctgcctgacggagcatattcacagtgaccagttacacgtgtacgctccggctccaggggaatatctggcgatcagcgctctcggtgaggtggagagaaaatagagagtttgtaagcaaggatagtcggggtggtatatatagcagtgcttagatacggttttcttgggtaaatgtggtacgagttgaataagttgtggcatgtttggttagaggttagaggattggctctacccgaaaccagctgattcagatggtcgtttctatatatttggttagggggatggagtggatccattttttgtttagg

SEQ ID NO: 208207 - DNA, 3100 bp, Zea Mays
atttgcgtttgctcggccggcatagcgcggcgtggttcaaggggtcttttcccctgaatggtgatgtggaggtcattctcttcaattcaaatggtccccccccgcagagcaagatgaggaaatgttcaaaatactcttaagccgtgtagcacgacaagtttgttgcagaggacaagcgacgactgggttttcttggcactttgtcaagtccgtgagtagaagtttggtgtaagcttgtcttcgaacaagatgatgcagaggccaccgctccgtccggaggagtactccttgaaggaaaccacacctcaccttggtggtgcagctgctggtgacaagctcacaaccacatatgacctggttgagcagatgcagtacctttatgtaagagtggtaaaagcaaaggaacttccgaacaaggacatcactgggagttgtgatccttatgttgaggtgaaactaggaaattataagggccaaactgggcatttcgagaagaagaacaacccggagtggaatcaggtctttgcctttgcaaaggagcgcatccagtcatcagttgtggagattctggtcaaggacaaggatcttgtcaaggatgacttcattggacgtgttatatttgatttgaatgaggtcccaaagagagtgccacctgatagcccattggctccacaatggtatcggttggaagaccgcaatgggcacaaggtgaagggggagttgatgctggctgtttggatgggtactcaagctgatgaagcgttccctgaagcatggcattctgatgcagcctccgtccctggtgatggccttgcaagcattaggtcgaaagtgtatctaactccaaagctttggtatctccgtgtaaatgtcattgaagcccaggatcttataccaaatgacaagactaggttccctgaagtttatgtcaaagcaatgctaggcaaccaagtccaaagaaccagggcattggcaagccggactttgaatccattgtggaatgaggacttgatgtttgttgcagctgagccatttgaagagcacctagttttgagtgtagaggacagggtggccccaggaaaggatgaagtaattggaaggacaatcattgcactgcagcatgtaccccggaggctggatcacaggttgctaaccagccagtggtataaccttgagaagcatgtgattattgatggtgagcagaagaaagagaccaagttttcaagccggatccacttgagaatatgtcttgaaggtggatatcatgtcttggatgagtcaacacattacagtagtgatttaaggccaactgcaaagcccctgtggaaacctagcattggcattcttgaactgggtatattgacagcacagggcctgttgccaatgaagaccaaggatgggcgtggcacaactgatgcatattgtgttgcaaagtacggacaaaaatgggtgcgtaccaggactataatcgacagtttcactcccaaatggaatgaacagtacacctgggaggtgtatgatccatgcactgtggtcacaattggtgtattcgacaattgccacctgaatggcggggaaaaggccaatggtgcgagggacaccagaattgggaaggtccgcatccgcctctcgacactcgaaactgatcgggtgtatacccactcataccctcttattgttctgacacctggtggtgttaagaagatgggtgaggtgcagctcgctgtccgtttcacgtgttcatcactgctgaacatgatgcatctgtactcacagcccttgctgcccaagatgcactatgtgcacccgctgtctgtgatacaggtggacaacctgaggcgccaagccacaagcattgtctccacaaggctgggccgtgcagagccaccgctgcggaaggaaatcgtggaatacatgcttgacgtggactcgcacatgtggagcatgagaaagagcaaggcaaatttcttccgtatcacgggtgtcctgagccccctgtttgccgtggcgaggtggttcgatcagatctgtcactggaagaacccgctgaccaccgtggcggccgaggcagccaccgcacatggacacccgcctctcccacgcagagaccgcccacccggacgagcttgacgaggagttcgacaccttccccacctcccgcccaccggacttggtgcggatgcggtatgacaagctgcgcagcgtcgccgggaggatccagaccgtggtcggcgaccttgccacgcaaggcgagcggctgcagtcgctgctgagctggagggacccaagggcgaccgcgctgttcgtggtcttctgcttcgtcgccgccatcgtcctgtatgtcactccgttccgcgtcgtggtcttcctcgcaggcctgtacgtgctgaggcaccccaggttccgccacaagatgccatctgtcccgctcaacttcttcaggcgtctgccggcgaggaccgacagcatgctgtaggcgcggcaggtgcatggccccatcgctggcgggtggtttcgcctctcagttgcagctcacagatggttgttgctctctcttaagtaagtgtatcaaaaaaaaaaaggggctgctagctatcttcgtttactttttgagcttctctgtgttgcatggttggttatgtattcatatggttgtgaacctttcctgtaacaactggacgcatgatgcgtgactgtgtctaggtatgcatgcatgtgtgtgatgcttgaaaactccgagctttagtgtttattgctttacctacttgttcagcggcagtgctgtcagctaacaaggctctctactgctgcatgtgcatcgtgtttggtttgcagctcaatttaccgacttgccagttgtaattgggaaatactgatctgaattttgcctagccgagagcccgagagttctcttctacgcagactggaactatttgggtgccaatctgagcagaggcgagctgttgtacttgtgaacttaatagtgatgtcatggttgaatttccttccaaacggagctgatgcttgtcttcaaaacgctcatggttagggatgtaataaatggcacggatattatctatttgtatttatatccgttcat

SEQ ID NO: 208208 - DNA, 2390 bp, Zea Mays
gccagactgccagtgctctcaacactccactacggtacctcagcaacaatgaactgcttgcgaattaacactaggaatatactactggtaggagtagaccgtagtttttagagctgatcactgtttttagagctgatcactgatgaagatgaaaacggcagtaaacaggggccagaccgcacaaaggaaggaaggaaggcggttttttcggacgtggcgtgtccactcatcttctcacctctttcttcacgctgttttgtcctctcctcgcctcgcccggccccatccatctcggcatctcgctcgtcgtcctcctctcccctccataaaatccgatcggcagctcctggccgctgcccactcctccccgctctggctcttcctcgcgcctcgcgcgcccacccaccttcacgcgctctcccagctagatcgaccccactggcaatcgcgcaggctcccctatcccttcctgttccttcaaaaagactggactggatcttcccagagttcccgttcggagagccgccggatcttcttcgacgaggcttcgatctgctgctctccgtcggcgtgttggggacttgcaccttatccgaagatgtcttttcggagcatggttcgtgatataagggaaagttttgggaatatatcgaggcggaactttgaggtgagaattcaccacagagggaagtctcttgggtcttcaggtgacttgcaagacaggcctgctgaagttcagcaaagcaggtgggctagccttcctcctgagttgctctgcgatgtgatgaaaaggttggaggaagatgacagtagctggccggatcgcaaggatgttgtttcctgtgcatctgtttgtacaacctggagggatatgtgtaaggatattgttagaagtccagaacattgtgcaaagctcacatttccagtatctcttaagcaggtaatgagtgggttcagtgaatgtttatgaattgtgaatcctttccctctaaattcaccttgcctttgctgaaattctctcatatcacctaatattggtgaggagcgggggcatagttttagttattcagatttagaactcttaattaacaaggaaactctctgtccacgaattctgtttcctgtctttcttaacacttgtttgaatttttcttgttcagcctggaccccgagacggggtaatccaatgtttcataaaaagggacaaatcaaagctaacgtaccggctctacttgtcccttagctctggtgtgcttgatgagaacgggaagttcctgctagcagcgaaaaggagccgcaggatggcgcacacggagtatgcaatttttatggactcgaggaatttctcccgatcgagcactggctacattgggaagctaaggtcaaatttccttggaactaaatttatcatctacgacacacaggctccgtacaatggcgggagagtttgcacacaggaacgtgcccccagccgtcggttgtcttccaggaaagtttcaccaagagttccaagcggcagctaccccgtcgctcaggtgaactacgagctgaatgtgctgggaacccgagggcccaggcggatgcagtgcgctatgcattccatccccgcatcagcggtggagcccggcggcgtggtgcctgggcaaccgaaagagctcctcccgaggctgttcgacgagtccttccgcagcaccgcaacttcctctttctccaagtactccgtcgcggacagctccatggacctgggcagctgcccgttctccgaggtcgaggtgggcgggggaagtctgcgagaaggtgacgagtcggagaaggagaggccactggttctgcgcaacaaggcgccgaggtggcacgagcagctgcagtgctggtgcctcaactttcgcgggcgcgtcaccgtggcctcggtcaagaacttccagctgatagctcctgcaaagacgcagccgcagccgcaggcctccggccccccgccgccgccgccgccgtcgtcgtcgtcgtaccatgacccggtgatcctgcagttcggcaaggtcgggagggacatgttcaccatggactaccggtacccgctgtcggccttccaggccttcgccatatgtctgacgagcttcgacaccaagctggcctgtgaatgaatgaatgaatgaatgaatgaacgaacgaacggtgagagagtcgttcgttttatgtgttccaaagtgataagcattctgagccttggcatgtaaataatttaagaagtaggtgtttgattcaagtattgtattgtttcgtgagacaagacaatgttgcttctgaaacctaaaagtgtttcttggtcagtgaagcaaatctactaaactagctgcctgcaattatttattcttgtcctgtttaattttcag

SEQ ID NO: 208209 - DNA, 1706 bp, Zea Mays
ctagattattcaagttggtgtgggattactccagactcttggactgagatcgactgacatcacatgattgcgggtggccctctccaattttactgaattattattgaatcccaagacttgcaccttatccgaagatgtcttttcggagcatggttcgtgatataagggaaagttttgggaatatatcgaggcggaactttgaggtgagaattcaccacagagggaagtctcttgggtcttcaggtgacttgcaagacaggcctgctgaagttcagcaaagcaggtgggctagccttcctcctgagttgctctgcgatgtgatgaaaaggttggaggaagatgacagtagctggccggatcgcaaggatgttgtttcctgtgcatctgtttgtacaacctggagggatatgtgtaaggatattgttagaagtccagaacattgtgcaaagctcacatttccagtatctcttaagcagcctggaccccgagacggggtaatccaatgtttcataaaaagggacaaatcaaagctaacgtaccggctctacttgtcccttagctctggtgtgcttgatgagaacgggaagttcctgctagcagcgaaaaggagccgcaggatggcgcacacggagtatgcaatttttatggactcgaggaatttctcccgatcgagcactggctacattgggaagctaaggtcaaatttccttggaactaaatttatcatctacgacacacaggctccgtacaatggcgggagagtttgcacacaggaacgtgcccccagccgtcggttgtcttccaggaaagtttcaccaagagttccaagcggcagctaccccgtcgctcaggtgaactacgagctgaatgtgctgggaacccgagggcccaggcggatgcagtgcgctatgcattccatccccgcatcagcggtggagcccggcggcgtggtgcctgggcaaccgaaagagctcctcccgaggctgttcgacgagtccttccgcagcaccgcaacttcctctttctccaagtactccgtcgcggacagctccatggacctgggcagctgcccgttctccgaggtcgaggtgggcgggggaagtctgcgagaaggtgacgagtcggagaaggagaggccactggttctgcgcaacaaggcgccgaggtggcacgagcagctgcagtgctggtgcctcaactttcgcgggcgcgtcaccgtggcctcggtcaagaacttccagctgatagctcctgcaaagacgcagccgcagccgcaggcctccggccccccgccgccgccgccgccgtcgtcgtcgtcgtaccatgacccggtgatcctgcagttcggcaaggtcgggagggacatgttcaccatggactaccggtacccgctgtcggccttccaggccttcgccatatgtctgacgagcttcgacaccaagctggcctgtgaatgaatgaatgaatgaatgaatgaacgaacgaacggtgagagagtcgttcgttttatgtgttccaaagtgataagcattctgagccttggcatgtaaataatttaagaagtaggtgtttgattcaagtattgtattgtttcgtgagacaagacaatgttgcttctgaaacctaaaagtgtttcttggtcagtgaagcaaatctactaaactagctgcctgcaattatttattcttgtcctgtttaattttcag

SEQ ID NO: 208210 - DNA, 3083 bp, Zea Mays
ctccgacctccccacgttcgacggttcgaagcctcggagggaaaccaccaaaaattctcccaaaacccttcgctcatttggtttccatatgaaacgaccgccaaaaacttccttcccaaaaaatgaggcgccggaacctaattgtgcattctgattccgacgaggacgacggcgagggcatgaccaccgccacaacccccgcctcagtttcagcttccgtcgctagcggcggcgtaagcggcagcggaagcgtcggccggccctcgccccaaaacctcagccccctaccagtccccttcccgtcactctcgctatcttctgcccccttcgtcatctccgatgacgacgaggacgtcgacgagatcgtggaccctgacggggactctcccatcgttgacgcccctgaggtcttctccccgccagctcctcccgcgctccatgctcccgctcccgctcccccttcccctccccctcctatcactaccccgtcccagaccccaatcccgactccaccttcggcacggaccccgaccccgactccgccttcggcgcggaccccgaccccgactccgccttcggcgcggaccccggcctcaatagcgcctccgcacccgtccccgctgagcggccggttgcgcccggtggacgagttcctgcggcggctcgggttgcttctgcggccggactggctcgagtcctgcgctgcggggattcccggcttcgacggcctcggtggtgttgaggcgcaggccaggcggtgcttcgagcagtttctcttcgccgatatgaactcttgcggtgctggggtgctgccggagggcgtcgggggcatgcacgctgagttccttgatggccccttcgtgcttcaggttgatgaagttgtcaatatttcagttcctttaaaggaaaggtatcgtgaagcaccggcaggacccaaaaggtgtttaaaactatcaatgacagatggcatacgacatatatttggaatggaatacagacccatcaaagacctgacagttcttgctcctgctggtttaaagattattgtaaggaatgtacacacaaggaggggtcttcttatgctagttcctgaggctgttgagattcttggtggtgtagttgacgaattggaagcagcgcgtgccagacttgtttctgaagtaaacaaaccacctcgtggcaaaagtaaacagggtggattatctttgtcttcaagagctacgcgagctgcctggccatgtagcaccgatattacaaatggtgttgcgcaggggatctcaatgcaaagagcagttaattcctcgtatccaacaggatcaggtaatgctttccaggttggtggagctacagaaactgtggttgaagagcttgttagccctcttgtagcaaaccgtgtccaagaaatcaacatgcagggctcatatgcttctcttaccagggaaactactgaaacttctatgcatactacccatgaatatgatcccactcatatcactgaaaaaagtacagggaccgtcatggaagaacgtcctgatcctcctattctagcaaacagtgtccatgaacaaatgcagcgagtccaacctgctaacggtgcacaatcttcaaatgttggcaagatcaatcagatggaacagtctttcattctaagcggtgaaaatgaaaaaccatttacatacatatacagcatgcttattgactggggtaggcaacaggacacaaaagcctacattcaaggaaaaatcaagggtctgatcacttctgtaaaaaaatttcaatataaacaacgcaccaagtacgagctttatgtatatatagatgatgggagtttcatttcagaggccttcattgacagtgatgttactgctgcacttgctggtgaattagagtttgcatcacccagtgaagtgaaagaaactttgaaaggatttcagaagtttttggtgaagtttgagggtatgatgcttatcgagttaaacaagaactctcctgttcctgttgttcgtgagttaaatgaaggttgctcaagttctactgcatggcttctgctcggaaggctgaaaacaatttcttctcagaagaagaccatccaaactcaggatattatggacaccactccatgattgtttcgatcctctaaaccccagcgggtacgcagatccgcaatgattttttgttgagccaggccattggccaaatgcatttgagaagtatggttaattaaattagctttacgatacatatatctgttggcttgtaaatcttagggctagtttggaagccacaaaaccggagaggattggagaggttaaaatccctttcttatttaaattgaataaggcctagtttggaaggctaaaacccggagaggattgaagggttaaaatccctttcttattcaattttgaataaggaggggattttagcccctctatccccttccgggtttaaggttcccaaactagcactaaaaaggggattttagcccctctaatcccctccgatttttgaatcccaaactaacccaactaacccttaatgtaattatcgttcatgtgtcctcatgccttattatggtctggaagtgcagcttggtcattgcctgctcctgacattcacagtcatctgttgtggtcttcgcagccgattataatctttcaatgctggtgcgggtgacacaatgatgtggcatggaaggagtgctaccaaaacattctcattgagcctagaagctttcgtccatctcattcattttcgtctcattttaataaccgtagaaaaaggtcctaaatgattggcggagtagaaaggctgacggagaaagtctgacggtgagatcctgaagaccacaaccgtaatcgtcggatggctgcaatgtcagaataagtatgatagaatccgttctcgaatatttgtccgtgcccgctattttatttttggaaaaaagcgacaaataaaaaaacaacagagggagtaatttgtagtagcattaagataattgagtcctttattaatcgtgtcgatgtctaaaggaacttcggtctcatacagctagtgctatccatggccacagaacgtacacg

SEQ ID NO: 208211 - DNA, 2494 bp, Zea Mays
ctccgacctccccacgttcgacggttcgaagcctcggagggaaaccaccaaaaattctcccaaaacccttcgctcatttggtttccatatgaaacgaccgccaaaaacttccttcccaaaaaatgaggcgccggaacctaattgtgcattctgattccgacgaggacgacggcgagggcatgaccaccgccacaacccccgcctcagtttcagcttccgtcgctagcggcggcgtaagcggcagcggaagcgtcggccggccctcgccccaaaacctcagccccctaccagtccccttcccgtcactctcgctatcttctgcccccttcgtcatctccgatgacgacgaggacgtcgacgagatcgtggaccctgacggggactctcccatcgttgacgcccctgaggtcttctccccgccagctcctcccgcgctccatgctcccgctcccgctcccccttcccctccccctcctatcactaccccgtcccagaccccaatcccgactccaccttcggcacggaccccgaccccgactccgccttcggcgcggaccccgaccccgactccgccttcggcgcggaccccggcctcaatagcgcctccgcacccgtccccgctgagcggccggttgcgcccggtggacgagttcctgcggcggctcgggttgcttctgcggccggactggctcgagtcctgcgctgcggggattcccggcttcgacggcctcggtggtgttgaggcgcaggccaggcggtgcttcgagcagtttctcttcgccgatatgaactcttgcggtgctggggtgctgccggagggcgtcgggggcatgcacgctgagttccttgatggccccttcgtgcttcaggttgatgaagttgtcaatatttcagttcctttaaaggaaaggtatcgtgaagcaccggcaggacccaaaaggtgtttaaaactatcaatgacagatggcatacgacatatatttggaatggaatacagacccatcaaagacctgacagttcttgctcctgctggtttaaagattattgtaaggaatgtacacacaaggaggggtcttcttatgctagttcctgaggctgttgagattcttggtggtgtagttgacgaattggaagcagcgcgtgccagacttgtttctgaagtaaacaaaccacctcgtggcaaaagtaaacagggtggattatctttgtcttcaagagctacgcgagctgcctggccatgtagcaccgatattacaaatggtgttgcgcaggggatctcaatgcaaagagcagttaattcctcgtatccaacaggatcaggtaatgctttccaggttggtggagctacagaaactgtggttgaagagcttgttagccctcttgtagcaaaccgtgtccaagaaatcaacatgcagggctcatatgcttctcttaccagggaaactactgaaacttctatgcatactacccatgaatatgatcccactcatatcactgaaaaaagtacagggaccgtcatggaagaacgtcctgatcctcctattctagcaaacagtgtccatgaacaaatgcagcgagtccaacctgctaacggtgcacaatcttcaaatgttggcaagatcaatcagatggaacagtctttcattctaagcggtgaaaatgaaaaaccatttacatacatatacagcatgcttattgactggggtaggcaacaggacacaaaagcctacattcaaggaaaaatcaagggtctgatcacttctgtaaaaaaatttcaatataaacaacgcaccaagtacgagctttatgtatatatagatgatgggagtttcatttcagaggccttcattgacagtgatggtatgatgcttatcgagttaaacaagaactctcctgttcctgttgttcgtgagttaaatgaaggttgctcaagttctactgcatggcttctgctcggaaggctgaaaacaatttcttctcagaagaagaccatccaaactcaggatattatggacaccactccatgattgtttcgatcctctaaaccccagcggccgattataatctttcaatgctggtgcgggtgacacaatgatgtggcatggaaggagtgctaccaaaacattctcattgagcctagaagctttcgtccatctcattcattttcgtctcattttaataaccgtagaaaaaggtcctaaatgattggcggagtagaaaggctgacggagaaagtctgacggtgagatcctgaagaccacaaccgtaatcgtcggatggctgcaatgtcagaataagtatgatagaatccgttctcgaatatttgtccgtgcccgctattttatttttggaaaaaagcgacaaataaaaaaacaacagagggagtaatttgtagtagcattaagataattgagtcctttattaatcgtgtcgatgtctaaaggaacttcggtctcatacagctagtgctatccatggccacagaacgtacacg

SEQ ID NO: 208212 - DNA, 1630 bp, Zea Mays
attataagcaagcaaagcgcagacttgcataagcaaaccccagccgtcgcagacttgcataagcaagcaaagcgcaggcctcgctcggcctctcgccagttcttcctctcttcttcccgcgacgtacgtcacactgcagcctgcttgctactcttgatttatcatccctcttggtgccgagcaggcagacgtagctgctgcatctcctagctgcctgcctccgttgattatccgatcgacctgttcgacaacaacaagtgaggacgaaccaggcgatccaggtggggcccggccggcaatcaggtgaaaagttgagctgtgttgtcaagacagactgacagagacatcagtttctcgctcgcatcacatgcgtgcattctacgcgggcaagaagggcgatgagagcagtccgtcagctgatgtattagcaaccacaagagagagagggaagagaagagaacaatgagtatttattatccagcaaagagtccaaagggcccagtagcagcgttccctctacgaaacgacggccagcggaggcggagcagaacccacagagacccgttgcacaaataggcccgcgatcattccacatgggccacagacgcggtacgtgcacttcccgaggcccgccacctacgacaggggcgaatgcgtttgtaacccggtgcgcttcttcgtgatcgtgtcgacgcagaggtcggggagcgggtgggtggaggccttgctcaacagccaccccaacgtcagctccaacggcgaggtgttctccatgagggagaggagacagaacctctcctctgttctggggactcttgacaggctgtacggcatggactggctcaccagcgcggccaagaacgagtgcacggcggcgttcgggttcaagtggatgctcaaccagggactgatggaaaaccatcgcgacatcgtgaactatttgaacaggaagggtgcgatggtggtgttcctcttcaggaggaacacgctgcggaggctcatctctgtggtggccaacaactacgacaggagagcgaggcagctcaacggcgtccacaaatcacacgttcattccaaagaggaggctgaggtcctcgcaaggttcaggccggagctggacgcgccggctctgattccgagcatcagaaccgcccagcgcgccgtgagagcctgcctgcgccgcttcggcagcacgcgccacatggtcctctactacgaggacgtggtccgggacagcaggaaggcgttgtcccgggtgcaggagttcctcggggttccggcgagggagctgtccagcaagcatgtcaagatccacaccaggcccctcccggacctcgtcggcaactgggaggaggtgaggcggacgctgcgcgggacagagtacagccgattcctagatgatgatgcagagtaggtcaagtgtcgagtttctatggaggtaatacaagacaaacagtcaagcggagagatggagaaagcgatgggagttttatctccgccttttagattcctgtgtaggtatactggtttaaactcatcattgctgcttgggtagtggggtgccgcgtgggatagcaaaaggtaatgtattggttcaagtgcattacataaaccaaagtcttgaaacaaa

SEQ ID NO: 208213 - DNA, 694 bp, Zea Mays
gttctgattactgatgctatagatggatgaagtgctggcagcagtagctgagaccataaagaactttgcggtcatctaccttgttgacatcacagaggtccctgatttcaacaccatgtatgagctgtacgacccttcgacagtgatgttcttcttccggaacaagcacatcatgattgatctcgggactggaaacaacaacaagatcaactgggccctgaaggacaagcaagagttcatcgacattgtggagaccgtatacaggggcgcccggaaaggccgtggtctggtgattgctccaaaggactactccaccaagtaccgttactaagaaggcaggcattccccttatgcaatctattggggatgtttacacggacagttagtccgacaggtgatccctaactgtatcttggcataccctagtaattcaagttgctggctggagtgatgcttatccatgtcttggcatgccatagtgaacatgtaaacctgtgatttgaggtgattattcgagtgtaaagaaaccaggattgcgttcgcctatgactatgtgtctagttgtctacttaataagaaacagttattggtttggaatatcggaactgagacaatggtttcctttcggtatttctattatcaactaccctgctttgctacgttttttatatattatataaataggtacggagat

SEQ ID NO: 208214 - DNA, 2838 bp, Zea Mays
ccaatttctctgagaatcctaatgtcctgagagggattgcaggatcctcttggaccgccccccgcttcccgcacacgccatccaacagcataacaaacacacaggattgctccgcctctcggaatcagatagttcttggccgcctttgttgtgatcgtggccacaaggccccaagggatgcaggtcgcgtcgattgaatgagaagtaggtgagggagatagagcatggttgaggatggcgccgatcatacttcaccgtgcgttgtccttctccatcccgttgcttcatcgccgtgatgtgtcgtcgcccttacaggcctcggatgtgtcgaacagacctgaaggcctggcattattgacgagaattgctgaggacactgactgctgcgattctggacctccattgccagaccactcgccgttggagaaaagcctcatcagcaagatcctccgtctgagaggtgttttggatctgccatgtcgaagttcatgcgacgcgttggatcagttgcttctggataccctgggggttctgaaggttgcatatcccaaatgcttatcaggtgtatcaggaaaccatacatcttctgtacgggagggacttgttcacctccatcaggtcctcgtgttggttcaggattgctactcgaaaatcaagcagctgcctaactctggctctgagaagcaaacaatcatggagagcgagagcttagaccatgtaagcgtgtcattgagatgcttgatcaggtgactccagtggtgaaagaaatgttcagttccatggaaagctccagttctgcacaggcggcggcggcagcagcagcttggccggaggatctcccagaaagaagaaccctccctcctgttctctgtcgcactacatcccatcatccatcagacggtgacgaggttgcgatgcacacaggacgttgcaaagttgaggcaccggcgcctgggcacgagacagatgagggcgtttgcaccagggaggaggatggccaaaccagcagccgtgaaccgctgtcagctcctattcctaccgctgagtttttaccgctgcagccgacgctgtcgtcggtgtccccacatctgctgtcggcgccgccgccgtccccgatgcccgtggttggcttgtccatgcttctgcagtcgtgggaggcaacgcaagatggccacgccaccgccgccgcagtggtgccacctgctggcgtcgcacagcctgctgaggcagcgccgacggcacacaaagacaccacgcccgtcggcaccagcatggaagtcgaaggctctacgtcctctgtgttacttgaagctggtcagcctgagccatgcgtggattcacccaatgggagcacgcaggcaccagcgcagggcggcaatgccgctgttccaaacgtgccgccgccgccgccgccagtaccggcgcacagaggcagatctcaagaggggccgtctatggacgagcccggtccggcagtgacagacacgccacctcgaccgccgtgtgaaatgcaaggagaaccacctgcactgccgccggccgccgccaaggttttgccgtcgccgtcgccgtcgccgtcgccgccgccactaccggcgcacagaggcagatttcaagagggggcgtctatggacgagcccggtcaggcagtgacagacacaccacctcggccgccgtgtgaagtgcagggaggaccgcctgcaccgccgccggccgccgccaaggtttcgccagcgccaccgccgccccctggaagcatctcggcagcggtgcgcggcaagaaagccgcgagcaagctgaaacgatcgacgcagatgggcagcctgtacagacgcctgcgagacagagtggaaggctctggcagcacgcacggcgacaggatgcggcagaaccgcaagaggccccggacggtaggcgcgtccaagagcgacgccggcggccagggcatggccgatgcattggccgagatggctaagagatcgacgtacttccgacaaatcgaagaggacgcggagaagtatgcagcggtgatcctggagctgaaggacgccatcggctcgttccagtccaaggacatgtccgagctggtgaggttccgtcagcacgtcgagcggcagctggtgtgcctgaccgacgagacacaggtgttagccaggttcgagggcttcccttccaagaagctggaggcgttgaggacggcggccgcgctctactccaagctggacggcaccgcctcgaggctccagtgctggaagcacaccgccggccccgtatcggcgcagctcgacagattggagagctacttcaacaaggtcaaagacgaggtggacatggtagagcggaacagagacgaggagatgaagcggctgcagtcccagggcgttcacttcgacttcggcgtgctggtccggatcaaggagggcatggtagacctgtcgtccgcctgcatggagctcgccttgaaggagagccaggacgccagagagacgccgacgccgacgcgtgcgaagtgggcgagcagccacggcgatggagagtcgaggatgctgtggcgggtgttccagctggccttccgggtgtacaacttcgccggaggccaggacgagcgggcggacaggctgacgagcatcctggcgcacgagatcgaggagcgagcgctcctgtaagcctttccgtgcgacgtgtacggtttttttttttttggtgtgtccgtgtgtgaaagcgagaaagtgtacgcatcatgtcatgtgcaatctccgagaggtgcaacttgcaagttctatatgtctccttcgaactttaaatagatttatttatggtatagttcaagtgaaaaaa

SEQ ID NO: 208215 - DNA, 1756 bp, Zea Mays
ccgccgtccggtcctaggaattttccgggaaggtcactctgccgtgattcggcgcctcgaggtccatccgtctcgtcgcccgtgcatccatggttttggccggttgcagattttgctgggggcaacggagcgagaacaagttactgcagaaggaaagggcaaaggtgggggaggcgccggagatgagggatgctatcagctctgatggattatttgaaatcttgctggggtccggcatcaccggctgggcgtccccgcaaaggatcggatgccaccggccgccaggacgggctcctgtggtacaaggacggcgggcaggtcgtcgatggtgagttctccatggccgtggtccaggccaataacctattggaggaccatagccaggttgaatccgggccgcttagcacatcggagcctggactgcaaggcaccttcgtcggggtctacgatgggcacggtggcccggagacagcgcgttacatcaatgaccatctcttcaaccacttgaggagattcgcatctgagcacaagtgcatgtcagcggatgtgattcggaaggcattccgagcgactgaggagggtttcatttctgtggttagtaaccaatggtcattgagacctcaattagcagctgtaggctcttgctgtctagttggtgtggtttgcagcggaactctatatgttgcaaaccttggggactcccgtgctgttctggggagacttgtcaagggaactggggaggttttggcaatgcagctctcagcagaacacaatgcatcctatgaggaggttagacgagagctgcaggcatcacatcctgatgatccccatattgtggtcctaaaacacaatgtttggcgtgtaaagggtattatccagataacaaggtcaattggagatgtgtatctgaagaaaccagaatttaatagagaacctttgcacagcaagtttcgtcttcaggaaacttttaggagaccacttcttagttctgatccagcaattactgtccaccaaatacagccaactgataagttcatcatttttgcatctgatggactctgggaacatcttagtaatcaggaagtggttgacatggtccaaagtagcccgcgtaatggaatcgcacgaaagttagtaaagtctgcagtgcaggaagcagcgaagaagagggagatgcggtattcagacctcaagaaagttgatcggggggtgaggcggcacttccacgacgatataactgtcattgtggtatttttcgattcaaacgccatgacaactgctgcctggagcagaccctcggtctctctccgagggggtgggtttccaatccattcaaacacccttgctccattctcggttcctacagagctaaacaactcctactgaaaccacgcggtatgtgaaggagccaggcaagaggataaaaaaaaagtaaaggaaaacggagaaggaaaaacagctgttgtgatcagttgtagtgtatttcaccgttcatgttcatttaaaacattttttagattctcaagtctcaacctggtgaccagtgcactgatagcaaggtataagattagattattcttagcttttttatcctcttttttttttctcgtccttaccctttagattcactcatgggatatccgatatcaggtgcttgtacattctttggttcaacttgtgataatagttcatcgcccccctcttttcgccatacagcgttgttccgtcatgttatctccagcaggtacctcgtgat

SEQ ID NO: 208216 - DNA, 1842 bp, Zea Mays
attaagagagatatatttaaatacgaatagaaaataggaataataaaatttggaaggggaatggtcggagagagaaagcttcctccctcttccctggtctggtcgcttctcctgtagctgtaatttttgagagtccctctcaaactttgcttgcttgcgctctccatatatcctgtggatcggagaggatgctctgatctacctgtctgttcttcgatcgagtctgagagatttgggaggaggagggaaacaaagcgaaagagcccatcttttttgtctttttggttcggtttcgtggttgcttcttttggaccccgcggaggagcccaccgtttctacaaaaacccaatctttgctgccttctcagcggtcgagatcgataggtttccagatctgaggctccgtgttctggctgtgagatcggaggcgcagcaatccgagcacgcagctagtagggaaagtatccgagaaaagttgcagattttgctgggggcaacggagcgagaacaagttactgcagaaggaaagggcaaaggtgggggaggcgccggagatgagggatgctatcagctctgatggattatttgaaatcttgctggggtccggcatcaccggctgggcgtccccgcaaaggatcggatgccaccggccgccaggacgggctcctgtggtacaaggacggcgggcaggtcgtcgatggtgagttctccatggccgtggtccaggccaataacctattggaggaccatagccaggttgaatccgggccgcttagcacatcggagcctggactgcaaggcaccttcgtcggggtctacgatgggcacggtggcccggagacagcgcgttacatcaatgaccatctcttcaaccacttgaggagattcgcatctgagcacaagtgcatgtcagcggatgtgattcggaaggcattccgagcgactgaggagggtttcatttctgtgataacaaggtcaattggagatgtgtatctgaagaaaccagaatttaatagagaacctttgcacagcaagtttcgtcttcaggaaacttttaggagaccacttcttagttctgatccagcaattactgtccaccaaatacagccaactgataagttcatcatttttgcatctgatggactctgggaacatcttagtaatcaggaagtggttgacatggtccaaagtagcccgcgtaatggaatcgcacgaaagttagtaaagtctgcagtgcaggaagcagcgaagaagagggagatgcggtattcagacctcaagaaagttgatcggggggtgaggcggcacttccacgacgatataactgtcattgtggtatttttcgattcaaacgccatgacaactgctgcctggagcagaccctcggtctctctccgagggggtgggtttccaatccattcaaacacccttgctccattctcggttcctacagagctaaacaactcctactgaaaccacgcggtatgtgaaggagccaggcaagaggataaaaaaaaagtaaaggaaaacggagaaggaaaaacagctgttgtgatcagttgtagtgtatttcaccgttcatgttcatttaaaacattttttagattctcaagtctcaacctggtgaccagtgcactgatagcaaggtataagattagattattcttagcttttttatcctcttttttttttctcgtccttaccctttagattcactcatgggatatccgatatcaggtgcttgtacattctttggttcaacttgtgataatagttcatcgcccccctcttttcgccatacagcgttgttccgtcatgttatctccagcaggtacctcgtgat

SEQ ID NO: 208217 - DNA, 911 bp, Zea Mays
cttttattctcttcatagctgagatttgcattatataacaaggtcaattggagatgtgtatctgaagaaaccagaatttaatagagaacctttgcacagcaagtttcgtcttcaggaaacttttaggagaccacttcttagttctgatccagcaattactgtccaccaaatacagccaactgataagttcatcatttttgcatctgatggactctgggaacatcttagtaatcaggaagtggttgacatggtccaaagtagcccgcgtaatggaatcgcacgaaagttagtaaagtctgcagtgcaggaagcagcgaagaagagggagatgcggtattcagacctcaagaaagttgatcggggggtgaggcggcacttccacgacgatataactgtcattgtggtatttttcgattcaaacgccatgacaactgctgcctggagcagaccctcggtctctctccgagggggtgggtttccaatccattcaaacacccttgctccattctcggttcctacagagctaaacaactcctactgaaaccacgcggtatgtgaaggagccaggcaagaggataaaaaaaaagtaaaggaaaacggagaaggaaaaacagctgttgtgatcagttgtagtgtatttcaccgttcatgttcatttaaaacattttttagattctcaagtctcaacctggtgaccagtgcactgatagcaaggtataagattagattattcttagcttttttatcctcttttttttttctcgtccttaccctttagattcactcatgggatatccgatatcaggtgcttgtacattctttggttcaacttgtgataatagttcatcgcccccctcttttcgccatacagcgttgttccgtcatgttatctccagcaggtacctcgtgat

SEQ ID NO: 208218 - DNA, 1732 bp, Zea Mays
ccccctcctcagagctagcctccaagctcgcaattatataagcatcgtcccttgcaactttccagaacttttgtccccctccctcctccacacctctcgttctctccccctccgcctgctccctctcaggagcgcgcgcgcgcgcgcccagatctagggtttcgtccgcggcaagatgagcagcccgcatggcggtctcgacgaccagatcgagcggctcatgcagtgcaagccgctcgctgagcctgaggttagagctctttgtgagaaggcaaaggagattctgatggaggaaagcaatgttcagcctgtaaagagtcctgttactatatgcggtgatattcatggacaatttcatgatcttgctgaactcttccgaatcggtggaaagtgtccagatacgaactacttgtttatgggagattatgttgaccgtggttactactctgtcgaaactgtcacacttttggtggctttaaaagttcgatatcctcagaggatcaccattctcagaggaaaccatgaaagccggcagattactcaagtgtatgggttctatgacgaatgcttaaggaagtatggaaatgcaaatgtctggaaaacctttacagatctatttgattacttccccttgactgcattggtcgagtcagaaatattttgcttgcatggtggattatcgccatccattgagaccctcgacaacatccgcaactttgaccgcgtccaagaagttcctcacgaaggtccaatgtgtgatcttctgtggtctgatccagatgatcggtgtggctggggtatttctcctcgtggtgctggttataccttcggacaggatatatcagagcagttcaaccataccaatagtctaaggctaattgctagagctcaccagttggttatggagggattcaattgggctcatgagcaaaaagtcgtgactatatttagtgcacctaattattgctaccgctgtgggaacatggcatcaatcttagaagtggatgattgcagagagcatactttcatccagtttgagccagccccaagaaggggagagccagatgtaactcgtaggacacctgactatttcctgtgacgcaaaagtgatgtggatcatgcagagcgaaggtttgatagataggcgcagtttcctggttgcagatatatatatttatatatgtttttgctgggacccctccgtgtgctattcttattatttttgccctggctcgccggccgctctgccgcgtcgtgattcaagtgtatacctacagcctgctacagctggaaggactggactgtgttctcaccttttctcaaactgttgtgctggaatgttttgacttggacggcatggaattcatggttgcttctctggtgttcatcccgcccgtcgtgatcggttgaccgcccgagcaggatccggcctctccaaggccgtggcttcctggctggtgccgcctcgcccacagatcgtgcagtgccatgccatgtggtctgggggcaggtctgggattcgttgggcgctcgctattccctcgtttcgctgtcgcaaccagctaatgctgtgggttgaagctgagatttcagtggtctagggccaacataaacaattgggcctcctttatacatataatatttttagtatacatttatataatgttataatatattgataaaaaatagtgtgatatcaaaatattatatcaaataaattttacaatacctt

SEQ ID NO: 208219 - DNA, 614 bp, Zea Mays
gtgagacttagtgatcttgagcctttgaaagacattcaaatggcaagactacatcatgtggatgaaaaaggaaaatgaagcaaaggcggacgctgccacgctcagatccagcataggctcggccaatagtgatgcacagaaagctcctccaagcaaatggaggacgttcttcatgagatcccgcacaccaagcatggaaccagttgtgagaaacaacatatatgacagaggcatgattacaaacctgtgcgaggtggtcgtccctttatcagaacggaaggcattttcccgcatgaaatcagattgatgtcttttgttgcagttgctttgtcaccaaactgttgttgtatatcagtgtagaatttgcgacacattttttttggtcataccatagaggcataggggaaaatattcaggataatcgtgttcagtacctacgacctatttattataggtgaaaggttttgaagttgcatttgcctttgcaatacgccgatgtcactattctgtttttagaacatgattctgaaatggcactaaatatgaaactcatactatatgtcttcgagcaattatctacccttaaaataaatttacacaagagtgagttatat

SEQ ID NO: 208220 - DNA, 1342 bp, Zea Mays
caaaaacgtggaggggccatggccctaatgaagctctgcctttgggtgaaaggaaggaggaaataaaactcgttaggggacgagagatggatttgaaaggtattttatgttgccataattggagtgacatattttataatagtgcagacatctttccagtatattcctgggtattatgtgagtggattgcacagatatctgagtgttgtggctgtttctgttggtgctatactcttcgtgcttactagcttttctgatcctgggactgttactgctgaaaatgtttctcaatacgtatcttcctacccatatgacaacattatttttgtggagaaagaatgttcaacttgcaagattactaggccagccagggcaaagcactgtagaatatgtgacaagtgtgttgctcgattcgatcaccattgtggatggatgaataattgcattggggagaaaaatattcggtattttgtggcctttttagtttggcatttccttatatgtctgtacggggctttaatccttggcttcattcttgctggtgaaataaaagagcggaaaattatatacattctgacagtttattatggcatcgataattcattctcgggcttgtttccacatgttgcacagtggttgcttgctgtgcataacactcagatactcttgagtgtatttttggctatattagcactgctccttggtggcttttgtgcttaccatgcacatctttgtttgacaaatacaacaaccaacgagacattcaaatggcaagactacatcatgtggatgaaaaaggaaaatgaagcaaaggcggacgctgccacgctcagatccagcataggctcggccaatagtgatgcacagaaagctcctccaagcaaatggaggacgttcttcatgagatcccgcacaccaagcatggaaccagttgtgagaaacaacatatatgacagaggcatgattacaaacctgtgcgaggtggtcgtccctttatcagaacggaaggcattttcccgcatgaaatcagattgatgtcttttgttgcagttgctttgtcaccaaactgttgttgtatatcagtgtagaatttgcgacacattttttttggtcataccatagaggcataggggaaaatattcaggataatcgtgttcagtacctacgacctatttattataggtgaaaggttttgaagttgcatttgcctttgcaatacgccgatgtcactattctgtttttagaacatgattctgaaatggcactaaatatgaaactcatactatatgtcttcgagcaattatctacccttaaaataaatttacacaagagtgagttatat

SEQ ID NO: 208221 - DNA, 2009 bp, Zea Mays
tgaccttttgctagctggggaagtggggagtagggaggcgggtcgggacctggcagtcgcgtcgacctccccgccgcgcccacggcactcgccactccacccaccaggccaagcacgcggcggcgacgccaaagcatcagggcaccaatggttgtgctccccgcggccccgcggcccctactcctacagtcctaaataatagccttccattccaatctgttcccacagttcagtcgcacactcgggcgggtcaaattcgactcgggaggaaccaaccacccggaaattcccccctcctccagtctccacttgatcggcgaggcgctgcggccgcgggcgaatggcgtcggaggcggagtcgcccgtggtgatccacgcgtggtcggcgccgcgctccctcagcaccagcctcatgtactccttcgcccagagggacgacatggaggtgcttgacgagcctctctacgcaaatttcctgcgtgccacaggcgtcgacaggccctaccggcaggagctcctgtccaaaatggaccctgatggaaataaggttgtcaaggaggtgatttttggcccaggggacaaaaagtatcgttactgcaagcacatctcaaagcaacatctcccaaatctgtcaagcgacctcatgaagaagggaaaacatttcatattgatacggaaccctctagatatactgccatcttttgataaagtcgttccaccatccttcatggagcttggcataggcgaacttgtctcaatatacagtgaattatgtggacttgggagcccaccccctgtgatagatgcagatgatctgcaacaggatcctgaggccgtcctaagtggtctctgtgaggatctgggcattcctttccagccacaaatgttgaaatgggaagctggccccaaggaatttgatggtatatgggcaccctggtggtatgggagtgtgcacaagtcttcaggtttctctaagcctcgccaatatcctctgactttcccattcgtgttttatgacctgcttgagcaaagcttgcctttctacaacatgctgaagcgccaaataaggaagataagaggaccgcagcaaccaccattatcggaccctcctctgcctgtccctgcaaataaaaacattcttgtttgggttggagatgaacttttgccccgtaacagtgcaaaggtttcagtgtttgattcagttgtacaaggaggagatgctgtttgggaaggtttacgtatatatgatggaaaagtattcaaattagatgaacatttggacagattgtttgattctgcaaaagctatggccttcagcaatgtgcctactcgtgattggattaaggatgccatctttaagactctgattgcaaatggaatgttcaacaatgctcatataaggctcacgctcacccgtgggaaaaaggtgacatctggaatgagtccagctttcaatctttatgggtgtgccttgattgtgcttgcagagtggaaaccaccagtttatgataactctcatgggataaaattggttactgccaccacacgtcgaaattctccaaatagtatagattccaagattcatcacaacaatcttatcaacaatattctggcaaagatagaaggtaatcttgcccaggctgaggatgccattatgctagataaggatggctttgtatcagaaacaaacgcaacaaatatttttatggtcaaaaagggaattgtattgacacctcatgctgactattgccttccaggcattacgcgagcaactgtcatggatcttgtggtgaaagaaaactttgtgttacatgaacgacgcattagtctgtcagaattccatgctgcagatgaggcgcggacgcgcatggccaaggtgtgtgttgctgctgccgcggcacagatgccactgcagcacatgtcgctgctgccgcagaagctgccctggacgctaccgctgcaggcacagtcggcttgggcatgggttctttccccacactcctgtcgca

SEQ ID NO: 208222 - DNA, 1275 bp, Zea Mays
cagaatttggcaaatgtcgtgatgtttcgtaccgtcgtgtgcttctgagcgtgtggacaaatggaggaatttaagtttcagtgcaagtggactgggatcaagtaaactgcgggttccaaagataactggaccctcatcttccccatcatctagctcgcagcctctgcttctcccagcggcaaacaaatttactgaagctacactgcctgcagatgctgagaaaaagccacaggatgggaaaactctgccaaagtatggtgccatgatcatggaagctcttttggaattgaatgagccgaatggttcagatattgctgcaatcttcggcttcatagagcaaaggtatgcggtacaaccgaccttcagaagatttctagcctcaaagttacggcgacttgcagactcaaacaaaattgaaaagatcgataagtcctataggctcccagactcccttgcaacaaggactccagctccaatgaatgcttcagctccaaaacagaaggatccatcaaagccatcgaaggtgtcaaaggccataggattgttttctgcctccagccctgcactagaggctgcgatggcagctgctgtcaaggtggctgacgcggaggcaaaagcacatgatgcgcatgatcagacgatggaggcagaaaggatcttcaagatggccgaggataccgagtctctcctcataattgcagcagagatctatgatcgatgttcaaggggagagataaccacgttagttccagtggcacaaagggagatttgagatctattggagtctctcttgtgttgtttgttgtacatggataggttctggaatccagtggcccggattgctcctgttgtatgatgtaaccgtttgtgttatactgtctccgttcttcgatatttatcgtatcctagttcatttttaaaataaaatgcgacaaataaaaaagaacggagtgagtacttaggatgtgccctagggttaacaaaataacatcagcgcaccgcctgccttcaaacttctgtaatatgtaaccccgtctttcccagcctgtcactgcaagctgcgatcgtgtatcctgatgtcagtattgtattttttttttccttggcatgatgagagaatagggaagtgttctaaacaaatgaagtagggtaggaaggtgaagtgttcttggtatgcgataacaataatctgtgccgcactttcaatttgagaatgttgtgttagacccttgttcatcacgactgtgataattgtttttttagagtactcttttt

SEQ ID NO: 208223 - DNA, 1028 bp, Zea Mays
tctccctgctgcctttgctcgctgtcatggaaacgacgtcatgcttcctggcctccaaagcatcgtccgccagcaggagcaccgcggtgctgccgcccaccgcccccggcttcgcaaagcctaagccttatctgcagctccttggtagcagccgccgccgtgcctgctgcggcagcatcagcgcgcggggggcgccggaggacggcgccgcgccaccacccatcggtcccgactggcgctcgttccgtgcgcagctctacttcaaagagcagctgccagcggtacagaccggcggcgacaggtgggcgcaccctctagcggagcccgagaaggggtgtctcttgatcgccacggagaagctggacggctcgcacatcttcgagcgcacggtgatcctgctgctgtcgtcgccgtcgtcgctgggccccgtcggcgtgatcctgaaccgcccctcgctcatgtcgatcaaagaggcgtcagggtccatcttcgcggacgacgccgacatcgcgcgcgccttcgcgggccggccactcttcttcggcgggccgctggaggagtgcttcttcgtcatagggccccgagcggcggccggaggcggaggcgacgacgcggtggcgcggacggggctgttcgaggaggtgatgcccggcctccactacggcacgcgggagacggtcgggtgcgcggcggagctggccaagcgcggcgtggtgggcgtccgggacttccgcttcttcgacggcttctgcgggtgggagcgcgagcagctgcgcgacgaggtgcgcgcggggctctggcatgtcgcggcctgcagcgccgccgtgctggagctcgccaccgtcgtcaagggcgggctctgggaggaggtgcaggggctcgtcggggagaggaggctctggtgacgacctcactctcactgctgccgtggggcgttcaatcttcaatcgcccgcctccctacggcgagctccaccacggcgagctccaccgacgttggtcggctccatacgatcgcggaggtgcttg

SEQ ID NO: 208224 - DNA, 1970 bp, Zea Mays
cgtgttgaagtcatagtggccagtgggggtggaccggacgcctggaccgcagatggcgtatcaaaaataaaaattcgatgccgccaaaaagctaatatatgggagggatatgtatttccttctccgatatgttaggacggcagttcccacaacatcttccccaacctcgtacgagccggctgcgagatccaacgacctccgcacggcagttccattagagatgcctctagggaagagatccacacgactatcctagaaatccgaagcggcctcctcgctcggcaaattctccgccgacgacagggagaaggtgctcactgccgttggagtacacacggcgatatctattgcacaacctacttcccagatacaggaggagggtgataaccacactgggaatcaagaaatcataccaaggtcaaatagaatgggcaggcaacttgaatcgttaagcagaggactgggaatcaagattccaacccaaatcactgaagggaacaaaagccagagccacctattcaagctactaagtttgcattagagggatggtcgccaaggccagggatttactgtcgaggtgtacaagtccatggcagtggctgtttgtgcagattagaagctgatgagggagtctcgtagcagaacttcaatgttgagatgtactgacttaactatgttcatgtagtatatcatgttactttttttattaaactagcaaaaggttgtgttaataattcatggtgtactaaatgtgataccatcttcattttgtctaattggatgattaatgccatgcacattaaagatggaaaagctacctatgtatcaagatatgtgaagactgcccgcctcaaacaagaggaatattttggtggagcgaagtttatgaagacttttgtgtgtgttttgaactgcagggcatggaggtactgctggtaacaagttctgaatgtcattaggtctaccattgatagctactgtgaattgtgctggtaacactggagccaagaacctctacatcatttctgtgaagggaatcaagggcgccttaacaggcgtccttctgcctgtgttggtgaccatggagaatggaaagcctaaccttaggaagaaggtgatgccagctgtcattgtgaggtagcgcaagccatggtgctgaaaggatgacgtctacatgtactttgaagaagcaagacaaatataaggatgctgaacctagtgcaatagatctttttaaggagatgcattgcagcaaaaagaaaggttttagcaaaaatgttcagaaagctattgttgatatggaagaaatggtggtaacatcagttcaagatggacaacaaccaaaatatcctacagaagttgtttatagtgtgcaactgggctccagtgtgttcttatgcaatcttggtctttagtccgtctccaagaaaatctcaacatcaatagtttctataaaggttcaacaacttcaggatcgactggaggccaagaagcaagaaaaagatagactttgggaagaagtgtaaaccttaaatgctcaggcagtcatctcaggagaccattgatagtatgaagaggtcgaccgaagaaaataacaatctccttagtcaactattaagcttcaatagaggccaagtgcctccatctcaagtctacttaaccattataggatctgcagccttatggttgctatagtagctagttacaatagctctggatttgaagagtagctctggatttgaagttataggattattttcaattaagcttaatgtttaattccttgagttgaagttataggattttctttggatcttatgtaaaaggatttgtagatatatgttttgaagttatatgattctttgttggatgaaatatttgtgttaaacaaattcataagatattttggttgtgatgtgtaatattctatgacgatatgaatttatatgacatgttccttctgatgacga

SEQ ID NO: 208225 - DNA, 1382 bp, Zea Mays
cccacgcggtttttgtgtttgctgccgccgcggtttccattgcttctcccgtcgctagggcgctcgtgaatacgtgatccatcgtctccatctccgtctggtgtggtgaggtttgagagactcgaggtgtgagcgtcgcttcgtctggaatcggctctctcatttgttagatagatccttctatctccccacgtttgggcgtcgcttcgtcggctgcgacttgcgagacgccggcgccgccggcgccggtggacgaaggcgatcaaggattaggcgatccgatccgatccgaaccaattctccattcttcgattccttccttgggtgggcggctgccctcagattccttccacatggctcgttccccgccgccgccacccccttccccggcgcaagggaacgggaacgggagtgggagcgggagcctcaccgccagagacgccctcgcctacatcaaggccgtcaaggacaacttccaggaaaagcggcacacgtacgaacagttcctccaggtcatgcgtgattttaagagcaacaggctcgacagcgccggcctgatcgcccgtgtcaagaccctcttccacggctacccggacctagtcctcggcatcaacgccttcctgcccaaggggcatgccatcaggcctcaggacctcagcgaggacaaggagcccgtcgattatcccagggccatcaaccttgtcaacaggattaagatacgattccagcaggaggaacatgtctacaagtcattcctgggaatcctcagtatgtaccgcatggataacaagcccattcaagatgtttacgacgaggtcaccttgctgttccacggccatccagatttactcgaggagttcactcatttcttgcctgatacgcccatacctcctccggaggcaggcactacctctaaagttaggaatgatgacaagaatgctataacgcattctgccatgagagctcagacagttcagagtgagagagctcttccatcagctgctgattcggactccagtgttgatcgccttgatcttgagcatgatattcaaaaagagtgtattgaaaaggacaaagtccgtaatgcctgccacgatcagcatagaggagattataaaaggaacaggatgaatgacgaatatgaaaacgaagatttggatgcagaacaatctggtcccaaatctcaaagaaaggtggagggtactggtgatgatacaccaggggttgttaccatgtcctcattcaattgtaacgagggggacaacgatcctgaggaagagtctaaagttaggaatgataacaagaatgctataatgcattctgccatgagagctcagacagttcagagtgatttgttcctgcatttacctttaaacttcaag

SEQ ID NO: 208226 - DNA, 1845 bp, Zea Mays
agagggcgtcgcgatcgcaaccgcccgagcccggccggtcccatcatcgacgccagtgtgcattattacgccccgccatcagccggccggcaactcgacagggaaaaggaagacgcaccgctagagctgagatgtccttcttcttccgcatggcgtcgcggctgcggccgtcgacgccggaggaggtggtgcgctccatcaaggactccttcctcgcgctccacacgcgcacccacgccaaggctctggaagaggtcgagaaaaatatgtcatccttgagattgttgatctttggtgatggagaagtcgaaccaaatgaagagcaggtcctgcaaataacccttgagatttgcaaggaggacgtcatttccctgatcgtccaggatctgccttccttgggctggggagtaagaaaagatctggctatctgctggtgcatcttgcttaggcagaaggtcgatgaaacttattgctgtgtgcagtatcttgaaaatcatctggagcttttagatttccttgttggttgatacatattggaatctggtagctttgagctgttctttgagtatgttgagcttccaaactttgatattgcttcagatgctctgaacaccttcaaggatctgcttaccaagcacgaagttgtagtcgcagagttcttgagttcccactacgagcaggtcactacttgttctgaaatacacctttggttatgtcaacaaaagaaaggcatcagaaaacttttttagataaagtttcattaaagcatatactccttgaatctatattattcatggcatactcacgtatgcattatatgttgttgcttcgctaatgtcttattcaaaaaatgtattgcaattgtgtcaatacctgcatgccagatatattctgtttgtttctgtttatcactctgattatgtaaactttatagttttttgaactctactcaaggctcttgtcatcaactaattatgtaacaagaaggcaggcaatcaagttcctttcagagttcctgctagagactcataactctcaaataatgaagagatacattgtggaagttcgttttttaaatattatgatcaatctactaaaggattcaagcaaaaatatcagaatatgtgccttccatgtttttaaggtatttgttgccaatccgaacaagcctcgatgtatcgttgtagctttgctagacaatcgtagagaagttctgaagctactccacaatcttccttcaagtaaaggcgacgatgaactcgatgaggagaaagacctaatcattcaggaaatccagaagttggcataacacaaaagcatcaagttatcgtttagcaatgcaagactctccttatagaggacatattgccaaggccagaaccatgtatatcacattgcacatgtagccttcaagagttgtatttttggaggttttttcttttcttttggtctcagaaaaccatagcaaagtattctctttttgaaggaattatatacatgattttggtgaccaaggaccgttggattaattgagctagacccataactaatctagcaatgaattaaagaattctaaggaccatgttgaaaatagcaaagcatacttgagaagcttctagatgattggagaagaggatgcatgagtcatggatgccatgatttgtagtgaagtatgtaatctactacttattaagttagcaatagtagcctgcctttttgtgtcctgccattctgcgatctcaggcgtccaattctatcattctacaatctcagctgtccaatcccgcacaccagtttttcgcgcgcagaaaaaaaatcaaactgaaataaagaaaatatgaaaaa

SEQ ID NO: 208227 - DNA, 1688 bp, Zea Mays
gccaaatacagaggagacagagagagggcgtcgcgatcgcaaccgcccgagcccggccggtcccatcatcgacgccagtgtgcattattacgccccgccatcagccggccggcaactcgacagggaaaaggaagacgcaccgctagagctgagatgtccttcttcttccgcatggcgtcgcggctgcggccgtcgacgccggaggaggtggtgcgctccatcaaggactccttcctcgcgctccacacgcgcacccacgccaaggctctggaagaggtcgagaaaaatatgtcatccttgagattgttgatctttggtgatggagaagtcgaaccaaatgaagagcaggtcctgcaaataacccttgagatttgcaaggaggacgtcatttccctgatcgtccaggatctgccttccttgggctggggagtaagaaaagatctggctatctgctggtgcatcttgcttaggcagaaggtcgatgaaacttattgctgtgtgcagtatcttgaaaatcatctggagcttttagatttccttgttggttgctacaagaacttggatattgcattgaactgtggaaatatgttaagagaatgcataaagtaccctacacttgcaaaatacatattggaatctggtagctttgagctgttctttgagtatgttgagcttccaaactttgatattgcttcagatgctctgaacaccttcaaggatctgcttaccaagcacgaagttgtagtcgcagagttcttgagttcccactacgagcagttttttgaactctactcaaggctcttgtcatcaactaattatgtaacaagaaggcaggcaatcaagttcctttcagagttcctgctagagactcataactctcaaataatgaagagatacattgtggaagttcgttttttaaatattatgatcaatctactaaaggattcaagcaaaaatatcagaatatgtgccttccatgtttttaaggtatttgttgccaatccgaacaagcctcgatgtatcgttgtagctttgctagacaatcgtagagaagttctgaagctactccacaatcttccttcaagtaaaggcgacgatgaactcgatgaggagaaagacctaatcattcaggaaatccagaagttggcataacacaaaagcatcaagttatcgtttagcaatgcaagactctccttatagaggacatattgccaaggccagaaccatgtatatcacattgcacatgtagccttcaagagttgtatttttggaggttttttcttttcttttggtctcagaaaaccatagcaaagtattctctttttgaaggaattatatacatgattttggtgaccaaggaccgttggattaattgagctagacccataactaatctagcaatgaattaaagaattctaaggaccatgttgaaaatagcaaagcatacttgagaagcttctagatgattggagaagaggatgcatgagtcatggatgccatgatttgtagtgaagtatgtaatctactacttattaagttagcaatagtagcctgcctttttgtgtcctgccattctgcgatctcaggcgtccaattctatcattctacaatctcagctgtccaatcccgcacaccagtttttcgcgcgcagaaaaaaaatcaaactgaaataaagaaaatatgaaaaa

SEQ ID NO: 208228 - DNA, 2854 bp, Zea Mays
catggctcgggcgccaccactagtagcttagcacgcgccatatatctaataagccggcgctgctgtacgtcgcttccgccatctacttgctagcagctatctaataggccggccgggcagcgcgaaacagcagcgggagctcagctcgctcgctcgctcgtctctgccgccccgcccgtcgcggtcgtcgcgcgagaggggtggccatcatccatgggcggcgtccgcggccacagcagcgccgccggcgtctctgaggaggcggcggcggcggcggcttgggtgtgggccgcggcggatctccccgtgcgcgtggactgggcgggcgcggcggcgcaatgcgcgtccctgtgggcgcacgcgcgggcgctgctggtcgtgccggcggtgcggctcctggtggccctgtcgctggcgatgacggtgatggtgctggccgagaagctgttcgtctgcgccgtgtgcgtcgccgtgcgggcgttccggctcggcccgcaccggcggtaccgctgggagcccatcgccgccgccgccgccgccgtggggtaccccgtggtgctggtgcagatccccatgtacaacgagcgggaggtgagtgagtgagccagctgagcatgagcatgggcatgagctggcgacataacgcgtagtagtagtagtagtgggcaagactgacatgagctggtggttgcaagcagagagtgaattaactgagcgagcgagcgagagagagagaattgattactagtgttttgaccgtgcgtgcatgtcgcgttggcgcggtgactgatggaagatgccgtgttgttttctgtgaaccgtgcatgtcgggcgccggcgaatggaatggaaggtgtacaagctgtcgatcggggcggcatgtgcgctggagtggccgccggagcgcttcgtgatccaggtgctggacgactccacggaccccgttgtaaaggacctggtggagacggagtgccagaggtggaagagcaaaggcgtgaacataaagtacgaggtgagggggaaccggaaggggtacaaggccggcgcgctcaaggaaggactgaagcacgactacgtcgcagactgcgaatacatcgccatgttcgacgccgacttccagcctgactctgacttcctcctcaggactatcccgttcctcgtgcacaacccggagatcgccctcgtccaggctcgctggaagtttgttaattctgacgagtgtctgctgacaagattccaagagatgtcgttggactaccatttcaagtatgagcaagaggccggctcctcggtgtattcattctttggcttcaatgggacagctggtgtctggaggatctcagcgatcgatgatgctgggggctggaaggaccggacgacagtggaagatatggacctggctgtccgtgcgatgctgcagggatggaagttcctttacgtcggcgacattaaggtcaagagcgaactgcctagcacattcaaggcgtaccggtttcagcagcacaggtggtcatgtgggccggcgaacctgttcaagaaaatgatggtagagattttagaaaacaagagagtgtcgctgtggagtaaaatccacctatggtacgatttcttcttcgtcgggaaagtcgctgctcatacggtgacattcatctactactgcttcgcgatccctgtgtctgttctgttccctgagatccagatccctctctggggagttgtctatgtcccgacagtcataaccctcttgaaggctcttggcacaccgagttcctttcacctggtgatcctctgggtcctgtttgagaatgtcatgtcgttgcaccggattaaggctgcagtaagtggtcttctggatgctggtgggcgagtcaatgagtgggttgtcactgagaagttgggcgacaccagcaaggcaaagcctggcaccaatggatcagacactgctgtaaaggtgatagatgtgaagctaacagaaccgcttgttccgaagctagtgaagaggcgagcaagattttgggagaggtaccactgctcagaacttttcgttggaacctgcataatcctgtgtggtttctatgacctgctttttgcaaataagggatactacatttttctcttccttcaaggcacggcgttccttgttgttggttttgggtatgtcggcacactacctccttgcactgcataagctgtcatggacaactgatattacctgctcaccagaaactgagcaagcaaagctcctctctcctgcacatatcaaactcttgaattcaatgatagttgagcaatgttcccccatcagtcttggcctgacatgatccaccgccgagaaggttgttcagatatcgccgtcgttctcctgtcagtgttggtcagatttgagccaaaccattctttattgtcagaaggccattcaaatagtgtcaccattgcaaattttataataacggtgtttaccgaagcatcatgaaaagaaaaatgattggtgcagcagcatttcgttcgcattccatagagatgcagttcacatccagtatttttttttggaaatctagtgttattactcagagttcagatccataatggaagattgttggcttcctcagttcataacctgtgtaggcttaaaacttgtagatgtaaattgttattaacactaatattttttattgaatccgggtattattgaaatgcaagtgtagcatgcatttcttttcctgtaagaagccaaagatgacttctgagtaacacgtctaatcagacattttacttgatgtggcacatggaatagtggatctattttaactatgtagcagcaaccatttggtcatactggtcacgcatgattgaa

SEQ ID NO: 208229 - DNA, 888 bp, Zea Mays
acccaatccacagcacgagcgtgtcaaacgttatccggttcaaagccgagcggcgtctcctctctccagcggctccagccaatccggcaatcccgctcccccagctcgctgctcgcccgctctcctccgccctccgccatggcggccttcccctccgcctccccgtcgccggcgatctccgcctcgacctggagcatggcttccctccagaactcaagctttgagcatcggttgtttggtattgatgcccgtggaaggatagttgcgatgcgacatgggagacgcgttcctaaacttaacaggcctccggatcaaaggaaagcgctgttgcgtgggcttaccacacagctgctgaagcatgggaggataaagactacaaagccaagggcaaaggcaatgaggaagtatgtcgagaagatgatcacgttggcaaaggatggatctcttcacaagaggagacaggctctggcatttatttatgagaagcatatcgtccatgccttgtttgctgaggttgcagacaggtatggagaccgagaaggtggctacacaaggatcatcccgacgttcccgaggcggggagataatgcacctatggcgtacattgagcttgtttaggattttccatcggttgctgtggtttcattggttggtgccatgcaggctgagtggtcatgtttgcgcattgccgttcggagatctgtttttttttccctttccttatcaagttgttctgtaccaaagtgtagatcacgcgtgaaatttggaactcgtcaaacttcgttctgtaattgacaaggcgccattatataatctggaaaataagttcgtggcctcacataaaaaaaagaataattatatacatgacattcaaaatttacaaaattg

SEQ ID NO: 208230 - DNA, 1089 bp, Zea Mays
attaaagtcctgttgcttatataactctcaggcaaatatgttgttcgcgagcctttgaatctcaatccgtttttcttgaacttgcaatgctgtattgaaggttctctaaacagcatctttcctagaaatgttcatggtttctctgcaatataatcggttacttttacaatattttgcaatgtgcttctagcctgccttacctatcattcccttgccaccagcataaatctatttgatcctaacaagccgacgatgctttattgctctgtttctgcctatgtctttcctatttctgctcccttgtgacacgctttacctacaccgtttcatgatttttcaaggaggacaaactacggggaaaaccaggctatgagcacctgagtgatcctctgcatatcttgatagaggccgagttccctgccagtatcatcgatgcaaggttgagacatgcgcaggagattatagaagaattgcttaaaccagtggacgagtcccatgatttctacaagaggcaacagctcagggagctggcgctgctgaactcaaccctgagagaggacagccctcaccctgggagcgtttctccattcagcaacggcggtatgaaacgcgcgaaaacaggccagtagagaaacacccgtgctctcctacctggccctgtccaggtgtgttacgcggtcgtcgtcacgaaagacgccatgcctgccttggggagggcaatgttttgccatgggcatgcgtgaaggaagcaatgcgccttcactggcggagtccgtcgtccggtgccagctaggtttcacctccatacaggggaagctgctgctgggaaagatgagatagatagtcgcggtcgcggatcgttggttggttgttgtatggtgttagaacattccttctatttgttattgacggtttgaccctagtatgtggtggtacactgcgaagttgctaaactagaggcctaagctttatttaggtggttcattgaccttgtatcataaccttttgacattatcgagttgcaaaataaggaccatcagctttgtacattgttgtgatctgtgtgccataaaccgccactagaacatg

SEQ ID NO: 208231 - DNA, 1849 bp, Zea Mays
cgcctcctagaccgtccgatcggtgtcgttccagaacaatccgcctccgaatcaacggcgggctctgacaggtgacagccgctcgcgccgtgagccgcttacccgctataaaggcctccctccgcccaaatctgacctcttttctctctccccgtctgcctcgccctccacaccaggccacgccacacacaggatagcgagcgggagcgacggcggcggcggaggagctagggttttgatccggcctcgccggctaggctgcgccgccccgacgccgaagccatggacagggagcttctagagacgtttgacgcggccaagaaggcggccgacgaggcggcaggggacggcaactcgccggaggctggccgctgcctcgacgcgctgcggcggctgcgcgacattcgcgtcaacaccgacatcctcgtctcgacgcagatatgcctcgtcgaatcgacggcctgtttcccctccctctcctctaagacgacgccgggtagacgcgcgcaagaaacagggccttcgtttggaactagatctattgagttcctgtctctattttgggtggatactggataggttggcaaacgccttcgaccccttactaagcatcctcactcaggcattcaagcagttgctgcagacctttttgggtactggaaaaaggttgtccttgaagagtcaggaaagaaaaatggcggctcagagaatgaaagatcaagtgactcttcaggaaaggttgagaaggtgaggcccgtgaagattgaaaagaactctgcatcagcaagcatgaagcttgagaaaagagatgtggatgttaggggtcagaagcctaacaatgtcaaagttgagaagactactagtaatggttccaaagctcaatctgtgaaggtggaaagggtatccaaagaagtcataaggactcctgactcgaagaggccagcatccgtccccaatggccacccaaagcttacatctcttgtcaaatgcaatgatcctacccgagataaaatccgggaactacttgctgaagcctttgtaagtgtttccagagagactagtgatgatgacagagacgaagtgaaaaacatcttggatgaagtcgaggcatgcgacccatacagggttgccgtgacagtagagtctgcactattcgagaggcttggaccttccactgggactcacagggcgaaatacaggtcaatcatgttcaacctgagggctgaaaacaataccgatttccggaggagggtcctcatcggtctagtggcgccggagaggcttccagacataccccctgatgagatggctagcgacgcaaggaagcaagagaacatgcagatcaaggagaaggctctgttcgactgcgagcgtggagcggcaccaaaggcgacgacggaccagttcaagtgtgccagatgtgggcagcggaagacgacttactaccagctgcagactcggagtgctgatgaaccgatgacgacgttcgtcacatgcgtgaactgcaacaatcactggaagttctgctgagtgttcagccttgctaaagtgtttacttagttgtgctgagcacactatcctgctgtgatgtgtgtgctctgttagttgtgactggaagttcgacagggcaggctgaacaactcaacttttttccccttttttaccccccgtaaactaggagcagttatcctcttcctctgtcaggcagcctcctgattcattcagattgtactagtcgaacgcgtgaatgttgttgacttgatcgcatcgtcaccagatgtgaatgttcttgggtggagttagaatagaatggtgccaagtcagacgatgctgatggattaaaaaaaaa

SEQ ID NO: 208232 - DNA, 3896 bp, Zea Mays
gtcgcaaccaaaccctcgcatacagccgcagcgccaaatctcgccgcctccggggctacaagcgcgccgccgccgcctccgctgacggggaccacggaaggacgcgccgacaccggatctccgaacgcacgccactgaactgacgcgggacttggtttgggtgctcgattgcgcctcccggaagagggagagcccccgccggatttaaccagacacaccgaacgcgcagctcctccgcgccgggggccgcagagaattcatgctgccgaggtcccgcattcggggccgtgacccgccgccgtcgggaggacgctaccgccgccgatctccggccccgccgtcaccgcgccaccagcgccgcccgcgtgacccgccctatccccagccgaagaggcgcagctccgagctgccgccgccgcggcgatacgacgagaatcccctccccagcggcttcgccgccgctgccgagaggcgttcgcgcggcgacatcctgctcgaggccggccgcctggccgctcactacttggtcgccgaaggcctcctccccgagcacgttctcctgtcaagggaggacccaaatcacaatcacagttaccgccccgagcctcccgttcccgttcctgccccggttcccgctcccgctccctccagctatgggaggaagagagacgaggacgacggccccaggtggcggcggagtggaagtggagccggggacctggaccgtggctcaaagtgggacgacaacagggaagccaagaggtcggggtgggacaggaggagccacagctttgacgagaggcgtaaatacaacgatggcggtgacgttgaccggggtggccgccggacacgcgactacaatgagctgaagagaccaccaatgtcaaggtcctattcgcataacgatcgccgggctttggctgatggcacagttgatcggaggaggagaagtagaagcaggagcaggacgaggggctactacactggcagcaggagagatccagatctgcgagcaggcactcgagatttggatcgcaccaaggtgacagactctggcgctgttcctgctgctggtggtgatggaggcatgcacaatgtggatgccaacgaaataccaaggcagccgaaggtgcctggttcagtggtggtttcggagacggatgacagcgctgttgaagctgtggctatcgaagataagcaaatggagtcagataccgctggactggaccatgctcaagacatgtctgaaggcgaggacagtgagtttgccgaagacatttctgaagacgaggatggtgagtttgcaggctctgacttgaatgatgaagatggtgatgaaatggataacacccagagccaactgtccgatgtgcatgttcatacatctgaatctgttgaggaacttgatcttagacagtctcagctcagcaatgctgaggagggaatggaaacatgcattgcacacgtctatgcatgcatggtagagccattggcagagaacaatgtttgctctgaaacaaggtatgaaatggaggaaccacaaaatggatctgaaactgctgttggtgatctttatagtgatgaacaagagcaaccattgacagagtataatggttgctctgaagtaaagtgtgagatggaggctgcacggagtgaatttgaaactggtgttgataatcttgatagagatgaacaagagcgactattggcagagaacaatagttgctctgaagtaaggtatggcatggaggctccacaatgtgaggttgaaactggtgttggtggtcttaatagagatgacaaagagcaaccattggtggtgaccaatgattactctgaattaaggtatgaaacaacagcttcacaaactgaagttgaaaccgtcgtcggtgatctcagtagggatgaacaagagctgccagcttggtacaaaatttttgatctcaacgtcattgaaactccagtgggttgtgagttctccgagatttctcgcagtcctccagcagatgatctttgtgattctgtgcctgatttaattggtctggtgaatcaacaagaaaacaatgacacttcagaaattcatggtcaagatgatcgtgcaggggccaatcaaatgttggaggatgagtctaatttggataactatgatctgaacaatgaggctgatgaacatgcacgggatgatacttcagtaaatcaagttcaagacgagaatgcagaggataatcacctaccagaggatgggcatggtttgatgaagtatgatatgaacattgaggctggtgagcctgcacatgataatcaccaaatgaacaatgcggaaatacatctaaatcatagtatggttgcacatatttcagataattgccatatgaacaatgagaaaatgcttctaaagcaaaatgtggacgagcaacagatggagaatgagcagatgcttatagatcaggtcactactgttcatgttttggatagtcaccatgtgaatcatgaacaattgctgctaggtcatagtgtggatgatcatgaccaaatggagccaaatcccatggctttgggtgttcataatttggataactactatctgagcagcaagcaagtactcctgaataatgatgcagaccaacatgcaggagatatacaccatttgaaggatgggcaaattattttagatgaggctgcagatggacaagctagagttaatgggcaaacaattcatgtaattgatctggaagaagattatcaaacctcaacttttcgtgacaatcttcagactaacacacaagcagcttcttcaactgccacaccagatttttgaaactggtgtagtgaaaaggtagctgtgaatgcagatgcacaggtgattcccatttctcagtgatgacgatgtcctgtactcctgtattatatttggattcaacaatatgccattagaagttatggatgtctatgacctgccgtcctctgagcttgggagatcctttgctgaagtaagttagttagtcgactggtcactattctgtatattgtgcagtagtgtaatgccttttagatttcctagtgctcgcattttttttttcttcaaggctcctcgttaacaagttggttacctctgatccccgagatataaggtgcgatgtcagtatgtctcggtagctgaatagatcgttcttttggctagaaatgactcttgctctcctgcttttcaatggaattgtggagtgcacagagaattatggttatggatgcttcacgtgcagctcgtcaggcagaggctgttgcttgcacgggagtaccagtatccatgtccacttcaatcgactctagtctaactgaagcgtgccgtacacatctgcagtaactcctaaggtattcgtggttatcagcttctttaaagcttttggacacgagctttaggatcttccaaacgacaaaaaaaaaaaacttccatgggccaaaagaaaaaaaccaaaaactttgtccccaaataaaggtcgttattatcagcttctttaaaccttttgaacatcagctttgggagttgggaccctccagaagactaaaaactttgtcccaaaataggtggattttgcctatggaatctgtcgttgcagttgacatcacagggaagccgtttgcatgaaagactgagctctggtagctttttccggcgtgatgaggccgaattttttgtattttagcccctaaaccgaagtaaatttacgtttagacctaaaaaaattttaaatgcagttttggaccctttgctcggcgccataggccgtggcaccgagctaacacagctcgacgccacagtctatggcgccgagcttcgtgacgtggcagcccgcgtggcacacctagctcgacgccacagatcttggcgccgagctagg

SEQ ID NO: 208233 - DNA, 3756 bp, Zea Mays
gttccttcgccactcgcaagtcgcaaccaaaccctcgcatacagccgcagcgccaaatctcgccgcctccggggctacaagcgcgccgccgccgcctccgctgacggggaccacggaaggacgcgccgacaccggatctccgaacgcacgccactgaactgacgcgggacttggtttgggtgctcgattgcgcctcccggaagagggagagcccccgccggatttaaccagacacaccgaacgcgcagctcctccgcgccgggggccgcagagaattcatgctgccgaggtcccgcattcggggccgtgacccgccgccgtcgggaggacgctaccgccgccgatctccggccccgccgtcaccgcgccaccagcgccgcccgcgtgacccgccctatccccagccgaagaggcgcagctccgagctgccgccgccgcggcgatacgacgagaatcccctccccagcggcttcgccgccgctgccgagaggcgttcgcgcggcgacatcctgctcgaggccggccgcctggccgctcactacttggtcgccgaaggcctcctccccgagcacgttctcctgtcaagggaggacccaaatcacaatcacagttaccgccccgagcctcccgttcccgttcctgccccggttcccgctcccgctccctccagctatgggaggaagagagacgaggacgacggccccaggtggcggcggagtggaagtggagccggggacctggaccgtggctcaaagtgggacgacaacagggaagccaagaggtcggggtgggacaggaggagccacagctttgacgagaggcgtaaatacaacgatggcggtgacgttgaccggggtggccgccggacacgcgactacaatgagctgaagagaccaccaatgtcaaggtcctattcgcataacgatcgccgggctttggctgatggcacagttgatcggaggaggagaagtagaagcaggagcaggacgaggggctactacactggcagcaggagagatccagatctgcgagcaggcactcgagatttggatcgcaccaaggtgacagactctggcgctgttcctgctgctggtggtgatggaggcatgcacaatgtggatgccaacgaaataccaaggcagccgaaggtgcctggttcagtggtggtttcggagacggatgacagcgctgttgaagctgtggctatcgaagataagcaaatggagtcagataccgctggactggaccatgctcaagacatgtctgaaggcgaggacagtgagtttgccgaagacatttctgaagacgaggatggtgagtttgcaggctctgacttgaatgatgaagatggtgatgaaatggataacacccagagccaactgtccgatgtgcatgttcatacatctgaatctgttgaggaacttgatcttagacagtctcagctcagcaatgctgaggagggaatggaaacatgcattgcacacgtctatgcatgcatggtagagccattggcagagaacaatgtttgctctgaaacaaggtatgaaatggaggaaccacaaaatggatctgaaactgctgttggtgatctttatagtgatgaacaagagcaaccattgacagagtataatggttgctctgaagtaaagtgtgagatggaggctgcacggagtgaatttgaaactggtgttgataatcttgatagagatgaacaagagcgactattggcagagaacaatagttgctctgaagtaaggtatggcatggaggctccacaatgtgaggttgaaactggtgttggtggtcttaatagagatgacaaagagcaaccattggtggtgaccaatgattactctgaattaaggtatgaaacaacagcttcacaaactgaagttgaaaccgtcgtcggtgatctcagtagggatgaacaagagctgccagcttggtacaaaatttttgatctcaacgtcattgaaactccagtgggttgtgagttctccgagatttctcgcagtcctccagcagatgatctttgtgattctgtgcctgatttaattggtctggtgaatcaacaagaaaacaatgacacttcagaaattcatggtcaagatgatcgtgcaggggccaatcaaatgttggaggatgagtctaatttggataactatgatctgaacaatgaggctgatgaacatgcacgggatgatacttcagtaaatcaagttcaagacgagaatgcagaggataatcacctaccagaggatgggcatggtttgatgaagtatgatatgaacattgaggctggtgagcctgcacatgataatcaccaaatgaacaatgcggaaatacatctaaatcatagtatggttgcacatatttcagataattgccatatgaacaatgagaaaatgcttctaaagcaaaatgtggacgagcaacagatggagaatgagcagatgcttatagatcaggtcactactgttcatgttttggatagtcaccatgtgaatcatgaacaattgctgctaggtcatagtgtggatgatcatgaccaaatggagccaaatcccatggctttgggtgttcataatttggataactactatctgagcagcaagcaagtactcctgaataatgatgcagaccaacatgcaggagatatacaccatttgaaggatgggcaaattattttagatgaggctgcagatggacaagctagagttaatgggcaaacaattcatgtaattgatctggaagaagattatgcacagcagtctgagagcaggaatacaggagaatatctagaatccacaagtggcacctcgcataaatacacggataatgttcttcaagagcatatgtgttctcaagactagcaaacctcaacttttcgtgacaatcttcagactaacacacaagcagcttcttcaactgccacaccagatttttgaaactggtgtagtgaaaaggtagctgtgaatgcagatgcacaggtgattcccatttctcagtgatgacgatgtcctgtactcctgtattatatttggattcaacaatatgccattagaagttatggatgtctatgacctgccgtcctctgagcttgggagatcctttgctgaactcgtcaggcagaggctgttgcttgcacgggagtaccagtatccatgtccacttcaatcgactctagtctaactgaagcgtgccgtacacatctgcagtaactcctaaggtattcgtggttatcagcttctttaaagcttttggacacgagctttaggatcttccaaacgacaaaaaaaaaaaacttccatgggccaaaagaaaaaaaccaaaaactttgtccccaaataaaggtcgttattatcagcttctttaaaccttttgaacatcagctttgggagttgggaccctccagaagactaaaaactttgtcccaaaataggtggattttgcctatggaatctgtcgttgcagttgacatcacagggaagccgtttgcatgaaagactgagctctggtagctttttccggcgtgatgaggccgaattttttgtattttagcccctaaaccgaagtaaatttacgtttagacctaaaaaaattttaaatgcagttttggaccctttgctcggcgccataggccgtggcaccgagctaacacagctcgacgccacagtctatggcgccgagcttcgtgacgtggcagcccgcgtggcacacctagctcgacgccacagatcttggcgccgagctagg

SEQ ID NO: 208234 - DNA, 4002 bp, Zea Mays
gttccttcgccactcgcaagtcgcaaccaaaccctcgcatacagccgcagcgccaaatctcgccgcctccggggctacaagcgcgccgccgccgcctccgctgacggggaccacggaaggacgcgccgacaccggatctccgaacgcacgccactgaactgacgcgggacttggtttgggtgctcgattgcgcctcccggaagagggagagcccccgccggatttaaccagacacaccgaacgcgcagctcctccgcgccgggggccgcagagaattcatgctgccgaggtcccgcattcggggccgtgacccgccgccgtcgggaggacgctaccgccgccgatctccggccccgccgtcaccgcgccaccagcgccgcccgcgtgacccgccctatccccagccgaagaggcgcagctccgagctgccgccgccgcggcgatacgacgagaatcccctccccagcggcttcgccgccgctgccgagaggcgttcgcgcggcgacatcctgctcgaggccggccgcctggccgctcactacttggtcgccgaaggcctcctccccgagcacgttctcctgtcaagggaggacccaaatcacaatcacagttaccgccccgagcctcccgttcccgttcctgccccggttcccgctcccgctccctccagctatgggaggaagagagacgaggacgacggccccaggtggcggcggagtggaagtggagccggggacctggaccgtggctcaaagtgggacgacaacagggaagccaagaggtcggggtgggacaggaggagccacagctttgacgagaggcgtaaatacaacgatggcggtgacgttgaccggggtggccgccggacacgcgactacaatgagctgaagagaccaccaatgtcaaggtcctattcgcataacgatcgccgggctttggctgatggcacagttgatcggaggaggagaagtagaagcaggagcaggacgaggggctactacactggcagcaggagagatccagatctgcgagcaggcactcgagatttggatcgcaccaaggtgacagactctggcgctgttcctgctgctggtggtgatggaggcatgcacaatgtggatgccaacgaaataccaaggcagccgaaggtgcctggttcagtggtggtttcggagacggatgacagcgctgttgaagctgtggctatcgaagataagcaaatggagtcagataccgctggactggaccatgctcaagacatgtctgaaggcgaggacagtgagtttgccgaagacatttctgaagacgaggatggtgagtttgcaggctctgacttgaatgatgaagatggtgatgaaatggataacacccagagccaactgtccgatgtgcatgttcatacatctgaatctgttgaggaacttgatcttagacagtctcagctcagcaatgctgaggagggaatggaaacatgcattgcacacgtctatgcatgcatggtagagccattggcagagaacaatgtttgctctgaaacaaggtatgaaatggaggaaccacaaaatggatctgaaactgctgttggtgatctttatagtgatgaacaagagcaaccattgacagagtataatggttgctctgaagtaaagtgtgagatggaggctgcacggagtgaatttgaaactggtgttgataatcttgatagagatgaacaagagcgactattggcagagaacaatagttgctctgaagtaaggtatggcatggaggctccacaatgtgaggttgaaactggtgttggtggtcttaatagagatgacaaagagcaaccattggtggtgaccaatgattactctgaattaaggtatgaaacaacagcttcacaaactgaagttgaaaccgtcgtcggtgatctcagtagggatgaacaagagctgccagcttggtacaaaatttttgatctcaacgtcattgaaactccagtgggttgtgagttctccgagatttctcgcagtcctccagcagatgatctttgtgattctgtgcctgatttaattggtctggtgaatcaacaagaaaacaatgacacttcagaaattcatggtcaagatgatcgtgcaggggccaatcaaatgttggaggatgagtctaatttggataactatgatctgaacaatgaggctgatgaacatgcacgggatgatacttcagtaaatcaagttcaagacgagaatgcagaggataatcacctaccagaggatgggcatggtttgatgaagtatgatatgaacattgaggctggtgagcctgcacatgataatcaccaaatgaacaatgcggaaatacatctaaatcatagtatggttgcacatatttcagataattgccatatgaacaatgagaaaatgcttctaaagcaaaatgtggacgagcaacagatggagaatgagcagatgcttatagatcaggtcactactgttcatgttttggatagtcaccatgtgaatcatgaacaattgctgctaggtcatagtgtggatgatcatgaccaaatggagccaaatcccatggctttgggtgttcataatttggataactactatctgagcagcaagcaagtactcctgaataatgatgcagaccaacatgcaggagatatacaccatttgaaggatgggcaaattattttagatgaggctgcagatggacaagctagagttaatgggcaaacaattcatgtaattgatctggaagaagattatgcacagcagtctgagagcaggaatacaggagaatatctagaatccacaagtggcacctcgcataaatacacggataatgttcttcaagagcatatgtgttctcaagactagcaaacctcaacttttcgtgacaatcttcagactaacacacaagcagcttcttcaactgccacaccagatttttgaaactggtgtagtgaaaaggtgattcccatttctcagtgatgacgatgtcctgtactcctgtattatatttggattcaacaatatgccattagaagttatggatgtctatgacctgccgtcctctgagcttgggagatcctttgctgaagtaagttagttagtcgactggtcactattctgtatattgtgcagtagtgtaatgccttttagatttcctagtgctcgcattttttttttcttcaaggctcctcgttaacaagttggttacctctgatccccgagatataaggtgcgatgtcagtatgtctcggtagctgaatagatcgttcttttggctagaaatgactcttgctctcctgcttttcaatggaattgtggagtgcacagagaattatggttatggatgcttcacgtgcagctcgtcaggcagaggctgttgcttgcacgggagtaccagtatccatgtccacttcaatcgactctagtctaactgaagcgtgccgtacacatctgcagtaactcctaaggtattcgtggttatcagcttctttaaagcttttggacacgagctttaggatcttccaaacgacaaaaaaaaaaaacttccatgggccaaaagaaaaaaaccaaaaactttgtccccaaataaaggtcgttattatcagcttctttaaaccttttgaacatcagctttgggagttgggaccctccagaagactaaaaactttgtcccaaaataggtggattttgcctatggaatctgtcgttgcagttgacatcacagggaagccgtttgcatgaaagactgagctctggtagctttttccggcgtgatgaggccgaattttttgtattttagcccctaaaccgaagtaaatttacgtttagacctaaaaaaattttaaatgcagttttggaccctttgctcggcgccataggccgtggcaccgagctaacacagctcgacgccacagtctatggcgccgagcttcgtgacgtggcagcccgcgtggcacacctagctcgacgccacagatcttggcgccgagctagg

SEQ ID NO: 208235 - DNA, 1320 bp, Zea Mays
agaaaactttgttgatgcctaacagcccaaaaaggttccaagtatgccactccctgggtggcggcactggttctggcatgggcacgctgctcatctccaagatccgggaggagtacccagaccgcatgatgctgaccttctccgtgttcccgtcgcccaaggtgtccgacaccgtcgtggagccctacaacgcgacgctgtccgtgcaccagctggtggagaacgccgacgagtgcatggtccttgacaacgaggcgctctatgatatttgcttccgcaccctcaagctcaccaacccttcatttggcgacctgaaccatctgatctcggcgaccatgagcggcgtgacgtgctgcctgcggttcccgggccagctgaactcggacctccgcaagctggcggtgaacctgatcccgttcccgcggctgcacttcttcatggtggggttcgccccgctgacgtcgcgcgggtcgcagcagtaccgcgcgctgacggtgccggagctgacgcagcagatgtgggacgccaagaacatgatgtgcgcggcggacccgcggcacgggcggtacctgacggcgtccgccatgttccggggcaagatgagcaccaaggaggtggacgagcagatgatcaacgtgcagaacaagaactcctcctacttcgtggagtggatccctaacaacgtcaagtccagcgtgtgcgacatcccgcccgtcgggctgtccatgtcctccaccttcgtgggcaactccacctccatccaggagatgttccgccgcgtgagcgagcagttcacggccatgttcaggcgcaaggccttcctgcattggtacaccagcgagggcatggacgagatggagttcaccgaagccgagagtaacatgaacgacctcgtcgccgaataccagcagtaccaagacgccacagccgaggagtacgacgaggaagagcaggacggcgaggaggagcacgcctgatcgatgcaacgggattcagagtcttcgctgctgtggtacatcaattgggactataagttcctacaatcctatactaccttaagcatatgtattcatgcacttccgtatttccgttgctgctgctagcttgtgtgtgtgtgtgtgtatctacaatcgtgtatgttagtgttttgtgaacttgtgatatgttgtccccgttgtccaggatttgtgcgtatgattattcatatgatgggattaattgcttgctctctgttttcttctagttatatattaggaatattcatttcattggaaggttgttttgcgtttcctcattttcgctcatgtgtaagtacatgtc

SEQ ID NO: 208236 - DNA, 2141 bp, Zea Mays
ctttcctcgtccttctcatcaatgtggcaacggaaaacccaaagaccctgataacttatccccaaattaaccggtagcgtaaagccggtcgatttccggaccccatattttcttctatcttcccagctgccgttgccggcggaagaagccaattgacgtgatccccgccgccaagcccaaccccgccgaccggagctgcatcctctccttctctctcccataccacgacgagacgatcccatcggcgcccgcgcggtcccttcgatccaagcaagctcccttgttcctagtataacctctaaatgattccatgggaactccaaacgaaatgatggcatactcttccctgtccaaaatggacaccagccagaaccacggagctgctctgtccaatgtagttgctggaaacaactatcctgttcaggattatctttatgagcaagcatccgaaccagacttcccagagtatgattcaagggatgacctgttcgctccaacacgagctagtccaaaagtcaatctaaatactgttctaggtggtctggtttcgattgttacaggtgtaaacaagagtgaggatgatgcatcgcagcatgaaagttttagcacagacatatcattccttagatctgacaagaatggtaatgtcaatgtgcacccttccgtctgtgttccaagtgccccaccactacttgaagcgaatgctttacaatatagtgcatacaaggaggtgttgctagcagatccaccagagtggttgccagatagctctgctaatgtgtgcctacagtgcaacttgcctttcacggctctgactcgtggaaggcaccattgtcggttctgtggaggtatattctgcaaaaactgttccaaaggaagatgtttgatgcccatgaaattcaggatccgtgatcctcagagagtttgtgatgcttgctatgagaggcttgatccacttcagggattattgatcaactacaatagtaactgcatgcagcaagcaaaacacgatgtcatggattggacaagcactagaagctggttgaacatgcctgttggtgtatcaatggagtatgagatatacaaggctacaaacacaatgaagaaatattgtcaggttgctagattaaaccctgagaagtccatcccatcatctattctcaagggggcgaagggacttgcaattctaacagttgccaaggcaggtgcagttcttacatacaaagttggcactggtcttgtggttgctcgcagatctgatggatcatggtctgctccctctgcaattttatctgttggcctgggatggggagtgcagattggaggagaactgacagacttcatcattgtgcttcatgaccgtaaagctgtcaaggctttcagcagtcgcattcatctttcacttggggcaggattgagtgctgcagcaggacccattggcagagcatttgaggcagacgttcgggccagtgaaaagggttctgggatatgctacacttacagctgcaccaaaggtgccttcgttggggtttcactggaagggaatgtggtgacaaccagaatggagaccaatctacgcttctacggtgatgcatacctgacggcaaccgatatcctgtttgggagggtggagcggccccgagctgcccagcccttgtactcagctctagatgatctgttctccaaaatggtttgctagcccatttagattggcgtgatactctgcattggtggcatgcagtcatgtatgtatataaacataaggtagcagcaaaaatcctaaacaggagatatggaagcggaaagaatgtacagcttttgatggatggtttcactactgatagcagtccatacatgtaaatattggcagaagaagatttaagggctgtttggttcgcacactactgatatcagtacgctgcagtgtgccactggtggactcatccatgcaatggaaaattttaatacatttgttagttcgtttgtggcttagattattcgatggggaagggggtatttcgctgcagtcccatgctgttgtagtagattctgttagtggaaggaacgctgcgatttttccccatactgtacctgttgtgcttactgttcacaaggatttctctatcaatagtactttcatg

SEQ ID NO: 208237 - DNA, 2028 bp, Zea Mays
ctttcctcgtccttctcatcaatgtggcaacggaaaacccaaagaccctgataacttatccccaaattaaccggtagcgtaaagccggtcgatttccggaccccatattttcttctatcttcccagctgccgttgccggcggaagaagccaattgacgtgatccccgccgccaagcccaaccccgccgaccggagctgcatcctctccttctctctcccataccacgacgagacgatcccatcggcgcccgcgcggtcccttcgatccaagcaagcgtagtcccttgttcctagtataacctctaaatgattccatgggaactccaaacgaaatgatggcatactcttccctgtccaaaatggacaccagccagaaccacggagctgctctgtccaatgtagttgctggaaacaactatcctgttcaggattatctttatgagcaagcatccgaaccagacttcccagagtatgattcaagggatgacctgttcgctccaacacgagctagtccaaaagtcaatctaaatactgttctaggtggtctggtttcgattgttacaggtgtaaacaagagtgaggatgatgcatcgcagcatgaaagttttagcacagacatatcattccttagatctgacaagaatggtaatgtcaatgtgcacccttccgtctgtgttccaagtgccccaccactacttgaagcgaatgctttacaatatagtgcatacaaggaggtgttgctagcagatccaccagagtggttgccagatagctctgctaatgtgtgcctacagtgcaacttgcctttcacggctctgactcgtggaaggcaccattgtcggttctgtggaggtatattctgcaaaaactgttccaaaggaagatgtttgatgcccatgaaattcaggatccgtgatcctcagagagtttgtgatgcttgctatgagaggcttgatccacttcagggattattgatcaactacaatagtaactgcatgcagcaagcaaaacacgatgtcatggattggacaagcactagaagctggttgaacatgcctgttggtgtatcaatggagtatgagatatacaaggctacaaacacaatgaagaaatattgtcaggttgctagattaaaccctgagaagtccatcccatcatctattctcaagggggcgaagggacttgcaattctaacagttgccaagattggaggagaactgacagacttcatcattgtgcttcatgaccgtaaagctgtcaaggctttcagcagtcgcattcatctttcacttggggcaggattgagtgctgcagcaggacccattggcagagcatttgaggcagacgttcgggccagtgaaaagggttctgggatatgctacacttacagctgcaccaaaggtgccttcgttggggtttcactggaagggaatgtggtgacaaccagaatggagaccaatctacgcttctacggtgatgcatacctgacggcaaccgatatcctgtttgggagggtggagcggccccgagctgcccagcccttgtactcagctctagatgatctgttctccaaaatggtttgctagcccatttagattggcgtgatactctgcattggtggcatgcagtcatgtatgtatataaacataaggtagcagcaaaaatcctaaacaggagatatggaagcggaaagaatgtacagcttttgatggatggtttcactactgatagcagtccatacatgtaaatattggcagaagaagatttaagggctgtttggttcgcacactactgatatcagtacgctgcagtgtgccactggtggactcatccatgcaatggaaaattttaatacatttgttagttcgtttgtggcttagattattcgatggggaagggggtatttcgctgcagtcccatgctgttgtagtagattctgttagtggaaggaacgctgcgatttttccccatactgtacctgttgtgcttactgttcacaaggatttctctatcaatagtactttcatg

SEQ ID NO: 208238 - DNA, 2856 bp, Zea Mays
ctcgctccaaatcgtcattaacaatgcattaggcagcgcgcgatctcaagccagccggcagcatcgacgccaactcctcttcccgagcaaacgccctgatgccaagttgccagtagcaggcggctccgtatagtagaaagagaagacgacgtgtgttttggcctccggaggagcaagccccccaaaaaaaacgagcagggagcggttaaaaagcaggcaaaaaaggggagacgccacgagcggaagacagacaggcaggcaagcgagaccaaggcgggggcggagcgcgagaggcgacgcgagaggcgagaagtggaggcggtgctgcggtggcatgccatggttataaaaagtaacggagcgcgacgagggtagaaagaggaaggcccgccgcttccccttcttcattcccgtcccacacacgccgccgccgccggtgcggctcgcttccgtcccccccggtccgcgcgggctgcctgcgggagcagggtggcagggcactccggcaaccacgtgggtggggaggcgacgacaccaccctatgctctgtcctcgcccgcaggattgcagcagcagtgaatttgggagcttgaagcattcatctgagacatggaaaaagtgatctgctgggcatatctccttcaacgcaagcagttctcgaaagaaactcttgattgctgtgtcttagctcgtgggaacactcctctctcctctctcgtgaactacacatagtgattatatgttcctctatgctcaacaacaagcaggctgatgcgatattttgctgaagttattatatttcagtctatgccagacatctacatgtagatggtgctcatataagtgggggttgatatatttgctgtgttcagcttacatctgttgcggccctagttagctatttgtcttttgtgtactatctgaggcaagagattgatcagctaggacttggcgaacacttgcctgtgttggctgttcatctgaagggggaaatttgcacgagacacctcggatattacaacaatggatagattcaagttgattaaggaagttggcgatgggactttcgggagtgtatggcgtgctataaataaacagaatggtgaagttgttgctgttaagaaaatgaagaaaaagtattattcttttgaggaatgtatgggtttgcgtgaagtaaagtctttgcggcgcatgaatcatcctaacattgtgaagctcaaagaggttatccgagaaaatgatatattatacttcataatggaatacatggagtgtaatctctaccaacttatgaaggataaggtcaagcctttctcggagtctgaagtccgcaactggtgctttcagatatttcaggctcttgcttacatgcatcagaggggctactttcatcgtgacctcaaacctgagaatctgttggttagcaaagatgtcataaagctagcagactttggtcttgcaagggaagtttcatctttgccgccatatacagaatatgtctcaactcgctggtatcgggcaccagaagtattgctccagtcatctgcttatgattctgcagttgatatgtgggcaatgggtgccataatggctgagttgttgacactccatcctctctttcctggaactagtgaagctgatgagattcacaagatatgcaatgtcatcggtagtccagatgagcaatcttggcctcaaggattgtcacttgcagaagcaatgaagtatcagttcccacagatcaaaggcagtcaactggccgaggtgatgacaacagccagtagcgatgcaattgacctcatctcatcactatgctcatgggatcctagcaagagaccaaaggccgcagaagtcctccagcataccttttttcagggttgtacatgtgttccactccctgtccgtccaaaagcttcatcacttcctagaacacctccatgtgttggatcaaaaggaaattcagagaacagtgtggctagaagattctcaactggaactctatctacaatgaaatctcatagcaatgcatccgcaaaattaaatggtttatctaagactggtgtacaaagaaaacttaatttggatcgtcagccatcccaaaagggtatgaagccaaccgagactagcaataaactaactacgaatcgggtaccagctcggaatagcccagggaatcctgtacttaggcattcacggagcttgcctgaaactggccgaggagcaatacagaaggtctcatcaattacagagaaactatcccaaatgtctgtgacctctagaacacggagcgctgtgaagcctgctgcccccatgatgaaggccggacatggcaagtcggactttcttgggaagtctgacgatatccctccagcaaagaggctgacaagaaaattggtcagctaaatgagggtatgtggagtgaaaattcgatcagctgcaggaggggtgttgtgtatagtgtgcagaaaccagtgtgcccgaagaggatagtcagcctgagcgtttgcccatcgatggttgtgcggatttgccatcaccacagtttcgctgcgtcgagacatattagaatgggtttgcaaattcctttgtgaagtgctagagcctgcatcaagccttccccacttccgggcggttgatctgcttttttcctgcgaaaagcttgcccccatgttttaataaacatgattgtgctattaatttggtttggtttgccttgcaatgttatcttgcaccaatatcgctgtcacaaactgtatgcacatttaacagcttgtaaatccttgagcccaacaagggatggacatttcacatttggtttgaatgcacatttaacgcagtgaggtgccaatttggcgc

SEQ ID NO: 208239 - DNA, 2299 bp, Zea Mays
aatggctcttacgtgatgctgtgttttgtgattgcagcagcagtgaatttgggagcttgaagcattcatctgagacatggaaaaagtgatctgctgggcatatctccttcaacgcaagcagttctcgaaagaaactcttgattgctgtgtcttagctcgtgggaacactcctctctcctctctcgtgaactacacatagtgattatatgttcctctatgctcaacaacaagcaggctgatgcgatattttgctgaagttattatatttcagtctatgccagacatctacatggttgatatatttgctgtgttcagcttacatctgttgcggccctagttagctatttgtcttttgtgtactatctgaggcaagagattgatcagctaggacttggcgaacacttgcctgtgttggctgttcatctgaagggggaaatttgcacgagacacctcggatattacaacaatggatagattcaagttgattaaggaagttggcgatgggactttcgggagtgtatggcgtgctataaataaacagaatggtgaagttgttgctgttaagaaaatgaagaaaaagtattattcttttgaggaatgtatgggtttgcgtgaagtaaagtctttgcggcgcatgaatcatcctaacattgtgaagctcaaagaggttatccgagaaaatgatatattatacttcataatggaatacatggagtgtaatctctaccaacttatgaaggataaggtcaagcctttctcggagtctgaagtccgcaactggtgctttcagatatttcaggctcttgcttacatgcatcagaggggctactttcatcgtgacctcaaacctgagaatctgttggttagcaaagatgtcataaagctagcagactttggtcttgcaagggaagtttcatctttgccgccatatacagaatatgtctcaactcgctggtatcgggcaccagaagtattgctccagtcatctgcttatgattctgcagttgatatgtgggcaatgggtgccataatggctgagttgttgacactccatcctctctttcctggaactagtgaagctgatgagattcacaagatatgcaatgtcatcggtagtccagatgagcaatcttggcctcaaggattgtcacttgcagaagcaatgaagtatcagttcccacagatcaaaggcagtcaactggccgaggtgatgacaacagccagtagcgatgcaattgacctcatctcatcactatgctcatgggatcctagcaagagaccaaaggccgcagaagtcctccagcataccttttttcagggttgtacatgtgttccactccctgtccgtccaaaagcttcatcacttcctagaacacctccatgtgttggatcaaaaggaaattcagagaacagtgtggctagaagattctcaactggaactctatctacaatgaaatctcatagcaatgcatccgcaaaattaaatggtttatctaagactggtgtacaaagaaaacttaatttggatcgtcagccatcccaaaagggtatgaagccaaccgagactagcaataaactaactacgaatcgggtaccagctcggaatagcccagggaatcctgtacttaggcattcacggagcttgcctgaaactggccgaggagcaatacagaaggtctcatcaattacagagaaactatcccaaatgtctgtgacctctagaacacggagcgctgtgaagcctgctgcccccatgatgaaggccggacatggcaagtcggactttcttgggaagtctgacgatatccctccagcaaagaggctgacaagaaaattggtcagctaaatgagggtatgtggagtgaaaattcgatcagctgcaggaggggtgttgtgtatagtgtgcagaaaccagtgtgcccgaagaggatagtcagcctgagcgtttgcccatcgatggttgtgcggatttgccatcaccacagtttcgctgcgtcgagacatattagaatgggtttgcaaattcctttgtgaagtgctagagcctgcatcaagccttccccacttccgggcggttgatctgcttttttcctgcgaaaagcttgcccccatgttttaataaacatgattgtgctattaatttggtttggtttgccttgcaatgttatcttgcaccaatatcgctgtcacaaactgtatgcacatttaacagcttgtaaatccttgagcccaacaagggatggacatttcacatttggtttgaatgcacatttaacgcagtgaggtgccaatttggcgc

SEQ ID NO: 208240 - DNA, 1164 bp, Zea Mays
gtaaagcacgacagtgaagaaaaccgtgtggcctcccaataaaaacgccaccccgccctccactcgccggagcccgaccgccgggatgcctcgagatttgcgaccagccgggatgcgcctgttcggcgtcaccatcgcgccggtgcctgaggcgaatcctccgggacgaaatccgagccccaacccacccgtggctgccagggaggacgtgatgcgcaagtgcaagagcatgggcaacctcgcggcccttggcgctggcctggacggtggaggaggatgcgcggacggcggagttgctggcgacgggtacctctccgatggcgggctgatgcagtcgtgcggaaagcggcggagggcgcaggagaggaagaaagctgttccttggactgaagaggagcatagaacatttcttgctggtcttgaaaagctagggaagggagattggaggggtatagcaaaaaaatttgttaccaccagaacaccaactcaagttgcaagtcatgctcagaaatattttcttagacaaactaatccaaataagaagcgcagatctagtctttttgacatgatgcccagagagctgtcaccaacaccaaactgccccgtattaccaccatccatggcaaaagtacatgacgtggtagctatgacgaaacaactccagaatagcaacttggaaggagcctcatcttccaatgcagctaatgtagtatctcaagtaggaagagatctccccccagttccgtcttttaaggcaacaaatatagattcaagtttcagcaaatttagccacatggagcgctactggagaactccctacccgtccagaccaattcctagagcccctgaagggacgtcttcatcaactcctgttgctgccagtacagctgttccagcctccgaagctaacctgactgcatatactagcacattcttgagccagcgagctgataccccatcattgcctccgaagggtgatcctcctccatcagaggatgatgatctggaactgactgtcgctccaccatcccaacagaatatgaccaatatgtcctcccagaatgcgctagatcatcagccacacgtcttccttccacctcccaacacccagcagcttcgacgaacaacaactcactatgcccagagcacggtgaaacaatcaag

SEQ ID NO: 208241 - DNA, 1084 bp, Zea Mays
cgacagtgaagaaaaccgtgtggcctcccaataaaaacgccaccccgccctccactcgccggagcccgaccgccgggatgcctcgagatttgcgaccagccgggatgcgcctgttcggcgtcaccatcgcgccggtgcctgaggcgaatcctccgggacgaaatccgagccccaacccacccgtggctgccagggaggacgtgatgcgcaagtgcaagagcatgggcaacctcgcggcccttggcgctggcctggacggtggaggaggatgcgcggacggcggagttgctggcgacgggtacctctccgatggcgggctgatgcagtcgtgcggaaagcggcggagggcgcaggagaggaagaaagctgttccttggactgaagaggagcatagaacatttcttgctggtcttgaaaagctagggaagggagattggaggggtatagcaaaaaaatttgttaccaccagaacaccaactcaagttgcaagtcatgctcagaaatattttcttagacaaactaatccaaataagaagcgcagatctagtctttttgacatgatgcccagagagctgtcaccaacaccaaactgccccgtattaccaccatccatggcaaaagtacatgacgtggtagctatgacgaaacaactccagaatagcaacttggaaggagcctcatcttccaatgcagctaatgtagtatctcaagtaggaagagatctccccccagttccgtcttttaaggcaacaaatatagattcaagtttcagcaaatttagccacatggagcgctactggagaactccctacccgtccagaccaattcctagagcccctgaagggacgtcttcatcaactcctgttgctgccagtacagctgttccagcctccgaagctaacctgactgcatatactagcacattcttgagccagcgagctgataccccatcattgcctccgaagggtgatcctcctccatcagaggatgatgatctggaactgactgtcgctccaccatcccaacagaatatgaccaatatgtcctcccagaatgcgtgggattcattcatgttatgttaacc

SEQ ID NO: 208242 - DNA, 1611 bp, Zea Mays
tcgcaccaaatccccttcctacaatctgcgcaatctgcccggtagaatccgtagttctaccaatttcattaataggagaagaaaaaaagcgggacataaacatccacacactgacccacacccatactgagacagctggagtgcgcacaagacacagagctgagagacagccaaaacagataaaaaaacaccacctggactaaacaactaagccattaagaatattactctgagctgtcaacaagactagccccttggcgccagcagaactccagcaccaaagctcattgccggctgagatcagggctgtagcaagatatggtgatttgccattgaacacagtcattcctttgccgccaaagaatccaatctcccaacacaataagagagttgagccctttctggagctcctttcccatggcgttaacacaattcttccaccagtcatcgaagataacatcagacggctgcggacaaagagcagtgagccccatctttggagaagaaagaaccagaactgcctgctgaaaacacagtttactaagatatgattaatcgtctcatcttcctgttcacaaaggggacaacagctcggtcgggagagatttctcttagccaatcgatccgatgtccagcattgattgtggatcacaagccagatgaagaaagtgaacttaggaggagcccaagtcttctagacacgatcaaaagcctcccactgcaaggatccttggaagatggctgcataagccgaggttgctaaatattttccggaactggacagcctccaaaagtgtctatctggcaatgccgggctgcagctgttccttggactgaagaggagcatagaacatttcttgctggtcttgaaaagctagggaagggagattggaggggtatagcaaaaaaatttgttaccaccagaacaccaactcaagttgcaagtcatgctcagaaatattttcttagacaaactaatccaaataagaagcgcagatctagtctttttgacatgatgcccagagagctgtcaccaacaccaaactgccccgtattaccaccatccatggcaaaagtacatgacgtggtagctatgacgaaacaactccagaatagcaacttggaaggagcctcatcttccaatgcagctaatgtagtatctcaagtaggaagagatctccccccagttccgtcttttaaggcaacaaatatagattcaagtttcagcaaatttagccacatggagcgctactggagaactccctacccgtccagaccaattcctagagcccctgaagggacgtcttcatcaactcctgttgctgccagtacagctgttccagcctccgaagctaacctgactgcatatactagcacattcttgagccagcgagctgataccccatcattgcctccgaagggtgatcctcctccatcagaggatgatgatctggaactgactgtcgctccaccatcccaacagaatatgaccaatatgtcctcccagaatgcgctagatcatcagccacacgtcttccttccacctcccaacacccagcagcttcgacgaacaacaactcactatgcccagagcacggtgaaacaatcaag

SEQ ID NO: 208243 - DNA, 1267 bp, Zea Mays
cgccacgccagtacttttcgcagccgtcgtgcaaagctctctccaagccctcgccctttcacgctcccttgagggctttgatgcgggtggagtccagcggcggcctcccactcccagagctggaaagacagcaggcgggcgccaagagacgccgccggcgggcacgggcggcggcggcggcggcggcaccccgaacgatggccgcgcccgccaccgccgtgcagcggctcttcgaggcgtgccgcgaggtcttcaccggagctggtccaggcgcggttccaccgccggccggcgtcgagaggatcaagtccgttctagatagtatcacagcagcagatgttcgtctaacatccagcatgccatatttccgacgtgttgacccctacggcactccaaaaatcacttacttgcacctatacaagtgcgaggctttctcgatcggcatcttttgtttgccatcgaggggtgtcattcctctccacaatcaccctggcatgactgtgttcagcaagcttttgtttggtgccatgcatataaaatcttatgactgggctgcttctcaacaagacacacctgatgttcagttgcaagcaggaccacgtttggcaaaggtgaaggttgatggcatcttgactgcacctcatgaaacggcggtactatatccagaagatggtggtaatatgcattgctttaccgcacagaatgcttgtgcagtgcttgatgtccttggccctccatatgatgatggcagcggaaggcactgccagtactacaatgtccgttcctctgcaatttctgttggctcaactatattgcctggaggtgacagatatgaatggctggaggagagcgagccatctcgagatttttatcttgttggatcaacatatatgggcccgaaaattttggaccactgaacttctatgcttgtgagataggatgtgcctatagctgttcggctgctagaaaagttgctgcacccacagcgtttcctgagaggaaaaaaaagcctactgctcacttcaacagttcaacagcatcgttacctgcctcttcagcagttcaacagcttttaacagatcagtatatgttggttttggaggaagtgattaggaagaagaaacgatggaccacaatgctacgcgccccacacggcctcacactcctcgtcactgccatccatgacccacccttcgatgcgttcaccagtatggactctagaggtggcaatgacccgatatccgatgagtagaacgttctttcctca

SEQ ID NO: 208244 - DNA, 1301 bp, Zea Mays
cggccaccaccttcgtctataaaaaatcttcggctactcctaagtttccccagctcaatcaacgcaagagcgccacgccagtacttttcgcagccgtcgtgcaaagctctctccaagccctcgccctttcacgctcccttgagggctttgatgcgggtggagtccagcggcggcctcccactcccagagctggaaagacagcaggcgggcgccaagagacgccgccggcgggcacgggcggcggcggcggcggcggcaccccgaacgatggccgcgcccgccaccgccgtgcagcggctcttcgaggcgtgccgcgaggtcttcaccggagctggtccaggcgcggttccaccgccggccggcgtcgagaggatcaagtccgttctagatagtatcacagcagcagatgttcgtctaacatccagcatgccatatttccgacgtgttgacccctacggcactccaaaaatcacttacttgcacctatacaagtgcgaggctttctcgatcggcatcttttgtttgccatcgaggggtgtcattcctctccacaatcaccctggcatgactgtgttcagcaagcttttgtttggtgccatgcatataaaatcttatgactgggctgcttctcaacaagacacacctgatgttcagttgcaagcaggaccacgtttggcaaaggtgaaggttgatggcatcttgactgcacctcatgaaacggcggtactatatccagaagatggtgtgcttgatgtccttggccctccatatgatgatggcagcggaaggcactgccagtactacaatgtccgttcctctgcaatttctgttgcaggctcaactatattgcctggaggtgacagatatgaatggctggaggagagcgagccatctcgagatttttatcttgttggatcaacatatatgggcccgaaaattttggaccactgaacttctatgcttgtgagataggatgtgcctatagctgttcggctgctagaaaagttgctgcacccacagcgtttcctgagaggaaaaaaaagcctactgctcacttcaacagttcaacagcatcgttacctgcctcttcagcagttcaacagcttttaacagatcagtatatgttggttttggaggaagtgattaggaagaagaaacgatggaccacaatgctacgcgccccacacggcctcacactcctcgtcactgccatccatgacccacccttcgatgcgttcaccagtatggactctagaggtggcaatgacccgatatccgatgagtagaacgttctttcctca

SEQ ID NO: 208245 - DNA, 3069 bp, Zea Mays
ctgactctctctgatacaataaacacaactcaaatcgcatactctatttcgggctaaattgccaaatctcgagatccatgatccatccgaaaccccgcctcgccgcctcctctcgctttgccgtttccgaccgccaatgctgaggcgagccgacgctaccgcccacccgaatcctcgccgctgagggtgctctaggattggagtgctctggttggttgcatagacgctcgccgccgcctctcccgtgccccggcggccggcaccggccccgaccgcgaggctccgtcgccggcgatggcgtcgccggccggcggcgagtctccagcgaagcccgtcctcctgcatggcgacctcgacctctggatcctagaggcgcgcctgctccccaacatggacatgttctccgagcaggtccgccgctgcctcgccgtatgccgcccgcccacctcctgcgggaccaaccacccgcctgccgccgcgcgcggcggcggcggccgccaacaccaccaccggaagatcatcaccagaggcccctacgtcacgctgtccgtctccggcgccgtcgtggcgcgcaccgccgtcatccccaactcccaggaccccgtctgggaggagcgttttgccgtgccgctcgcgcaccgcgccgccgagctcgagttccaggtcaaggataacgataccttcggcgcgcagctcatcggcaccgtcaccgtccccgccgactgcgttgtgtcgggcaccgaggccgaggattggttccccgtcaaaggcaccaacggcaagccgtacaaacccgacaccgcgctgcgcctccgcttcacattccaccccatcgccaacaacccggcctaccgccacggcatccctggcgaccctggccacaggggcatcggggagtcctactacccgctccgccacggtggccaagtgacgctgtaccaggacgcgcacatcagggaaggggacctgccagagattgagctcgacgacggcaagacgttccagcacaactcgtgctgggaggacatctgccacgccatcctggaggcgcaccacatgatatatatcgtcggctggtcggtgtatgataaggtgcgactcgtgcgcgaaccatcgccgtcgcggccattgcccgatggtggcgaccttacgcttggagacctgctcaagttcaagtcacaggaaggtgtcagagtgtgcctgctggtgtgggatgataaaacttcgcatgacaagttcttcatcaagacgggtggagttatggcaactcatgatgaagaaactcggaaattttttaaacattcctcagtcatctgtgttctctctcctcgatatgctagcaataagctgagcattttcaaacagcaggttgttgggactttgtttacacaccatcaaaagtgtgtgctggttgatacacaagccaggggaaacaagcgaaaagttacagctttcattgggggcctagatctttgtgatggtcgctatgacacacctaaacacaggcttttcaaagatcttgacacagtattccaaaatgattaccataaccctacattttcgtcaggtgcaaagggacccaggcaaccatggcatgatttacattgcaggattgatggccctgctgcctatgatgtcttgacaaattttgagcaaaggtggcgaaaggcaacaaaatggcgtggccgatttagaagagtatctcattggaaagacgacgctttaattaagctggaacgtatctcatggataataagcccttcacccaatgttccaaatgatcatcctagtctgtgggtttcaaaagaagaagatcgtgaaaattggcatgttcaggtattccgatcaattgactctggttccctaaaaggatttcctagtgattgcaaagaagcttcaaagcttgttagtcaacatttctattttctgacttctgatgacggagaatatactatttgaaaactgctatgattcaaattatttctgcagaatcttgtgtgccgaaagaatctggtgctgataatctgataccaatagaactggccctcaaaattgcaagtaagattagagcacaagaacgctttgcagtgtatgtagtgataccaatgtggcctgaaggagtccctactgcagcatctgttcaagaaattcttttctttcaggcccagacaatggagatgatgtatacaataattgcagatgagctcaagtcaatggacaataaggacatgcgccctgaagattacttgagcttcttttgtcttggaaaccgggaagaaccaccatctaatggcagcccagaatcagagaaatctacagataaaagtgcagtgggcttagctacaaaatatcgacggttcatgatctatgttcatgcaaaaggaatgattgtggatgatgaatatgtcattctgggttcagcaaacatcaaccagagatccctggctggttctagagatactgaaattgcaatgggtgcataccagcctcattatgcatggtctacaaagaatggacatcctgacggccaggtatacgggtacagaacgtccctgtgggcagagcaccttggaacgatcgatgaccgcttcaaggatccttcgagtttggagtgtgtaaggtttgtgaatcaaatcgctgtagagaactggcgaaggtatactgcagaagaaatgagtacattacaagggcacctcctcaagtacccagttaaggtggaggctgatggtaagatcagcccactgccagaccaagaatgctttcctgatgttggcggcaagattctgggagcttcaacttcacttcctgattcgctgaccatgtagcgtcattacataatttttttttcagagttgaactctgtaattgtctagatttggtgggattgtcgcagaacttatactactagtgaagtgcgcgtgccctgcgcgcgtgtagtgtaggctcatggagatccaaccacacaactaatataactatataaatttacatatataataagtgtaccaacctacatactgcatagtttctgttaccatttagttagttttgaatagagtacagaaggac

SEQ ID NO: 208246 - DNA, 3631 bp, Zea Mays
gccccttccccgggctacacgactgtgcctgcgccagaagacccgtatcgccttggggtaaatggtggtgctgtgcatgtgcccgtgttcatgtgcgtccttcctgcgtcggagctctggacgcgcgcgcccggtgctatctgctccggaaatgttcggtcgcggcagttcctgcgagctgtggccctccgcctcccgctgcgtcgttgaagcttctgctggattctgttctgacctgtctgaaggtcttttaggtatgctggcgctcgctcgcacgactgatgagtttgctctggtgcaggggggcggccggcgggtggaggcgaccaggcgaggactgctctgcggcggcaaagggtttcaaaatgctggcgtgcatcgcctgctcggccaaggacggcggggatcaggacggctcccgcgccgccacgccccacggaagggacgccggcaagtccctcacctcccagctcaaggacatggtgctcaagttctccggctccggcaggcagtacaaggccgcggcggcgagcccgtcgttccggggcaaccgcttccaccgcaacagccgcctggccgcgtacacgggcgtcattgacgactcgggcttcacgtcggacggggccaccgagggctacggctacatgaggacgacgacgcacgcgaccggcgccaccgcgggaaccaaggtcggccgtggcttcccgcagcacgtcaggagcccgagcgcgagctggataccgagcatcggggaggaggacgatgaggaggatgaagaggttgtcgtcgttgaagaggaccgcgtgccgcgggagtggacggcccaggtggagcccggcgtccagatcaccttcgtctccaccgccggcggcgctggcaacgacataaagcgaatccgcttcagccgcgacatgttcaacaagtgggaggcgcagcggtggtggggagagaactacgaccgcgtggtggagctctacaacgtgcagacgttcagccggcagcagggcgtctcgacgccgacgtcctccatcgacgatgccacgcagagagactcgtcgttctactcccgcgccggctcgacgagggacagcccggtgatcctgccgccgacagccgtgggcagggagcagccgatcgcccgcgccacctcgtgcagggccacggccgcggcggcttccacggcccgagccgcgtgcaacccatcgtccagtgcggtgccggacccgtcggaccacgtgtgggcgcaccacttcaacctgctcaactccgcgccggcgccggcaccggccgctccgcacctcgacccgtcgcgcgctaccacgtcgtccctggacgaggcgtccgtgtccgtgagcaacgcgagcgacctggaggccacggagtgggtggagcaggacgagcccggcgtgtccatcaccatccgcgagttcggcgatggcacccgcgagctccgccgcgtccgcttcagccgggagaggttcggcgaggagagggccaaggtgtggtgggaccagaacaggaaccgaatacacgcgcagtacctgtgacgtcggactcggagctagctgttgggtgtgcagtacacgcgttggatggaagccaagccaccaatccatggacaatagtagcgtagggctgagtcagtgatactattgcgactactgtctactagtgctagtttttacagggtgaacagaggtgaaagaggtccacggaatggagcctgtgtaaaacatgtttgctactactactgatctgggtttgtgtgttgatgaccaatgtattttttttcttgatgaactaatactgttttgtgttgatcgcctcagatgaacagtgctcacattttctaatcgcgggcacaaacaaatcacccacaagacaccaagcaagctaactttgaccatattggataacattcactttccaattacaaaagaaagcaagacaaaattcttcagtgttgcgttttttactagtgatgaggaaacgtttgccatcgttacaagacgtgcgccaaattggcacctcactgcgttaaatgtgcattcaaaccaaatgtgaaatgtccatcccttgttgggctcaaggatttacaagctgttaaatgtgcatacagtttgtgacagcgatattggtgcaagataacattgcaaggcaaaccaaaccaaattaatagcacaatcatgtttattaaaacatgggggcaagcttttcgcaggaaaaaagcagatcaaccgcccggaagtggggaaggcttgatgcaggctctagcacttcacaaaggaatttgcaaacccattctaatatgtctcgacgcagcgaaactgtggtgatggcaaatccgcacaaccatcgatgggcaaacgctcaggctgactatcctcttcgggcacactggtttctgcacactatacacaacacccctcctgcagctgatcgaattttcactccacataccctcatttagctgaccaattttcttgtcagcctctttgctggagggatatcgtcagacttcccaagaaagtccgacttgccatgtccggccttcatcatgggggcagcaggcttcacagcgctccgtgttctagaggtcacagacatttgggatagtttctctgtaattgatgagaccttctgtattgctcctcggccagtttcaggcaagctccgtgaatgcctaagtacaggattccctacaattccaaaggaaaaaaagttctaaaaaatcaaaacccatttcgtgcaaggagttgggcaatgcaaccctatataggaaacttgcctgggctattccgagctggtacccgattcgtagttagtttattgctagtctcggttggcttcatacccttttgggatggctgacgatccaaattaagttttctttgtacacctgtaatgttggtagcaaaatagacaatcaaactaaaccctataaatcttgcttgctccagcccaattaaaacagataagacacgcaccagtcttagataaaccatttaattttgcggatgcattgctatgagatttcattgtagatagagttccagttgagaatcttctagccacactgttctctgaatttccttttgatccaactaaaacaaatgaaccaagcacatgtaaaacaacaatatcctaaatgaattaggtacaaagcagaatactagtctgttaactaaccacatggaggtgttctaggaagtgatgaagcttttggacggacagggagtggaacacatgtacaaccctaaaagttggcaaccagaaaactgattatagttccaaggagacaataactgaaccttgccaataaaaatagagtagaaagaatatactattacctgaaaaaaggtatgctggaggacttctgcggcctttggtctcttgctaggatcccatgagcataaacttactgagatgaggtcaattgcatcgctactggctgttgtcatcacctcggccagttgactgcctttgatctgcatggatagaagaacacaccctcaacattagatcaaatattaaccagtcattcaacatgtatccacattcacaatgaggtggcaaaaggtacaacaattcatccttttcaggggagtacaactattggtaatcaagaaag

SEQ ID NO: 208247 - DNA, 4010 bp, Zea Mays
ggtctcgctcgatttcgggggcgcggatcagacggcggggagcgaatccggggcccagttcccgcacctgcctccctcaccctccactccaccctcctccactccatccacctctccctcccctgcgccgctgttgatctcggagcaacaaaaaaaaaagaacaaggggaagaaatctcctcccccgtgctgttgccgtctgtttggcctcgaccgcggaccgcccgctaccatccaaaaggcggcggcaggctgctctgcccactcggtgccgttgtcgtcgccccagccagcgggatcttgctgctccaccgccgcctgccgctgttttcctccattcagctcgcgcctgctccagatatctgacccgggaggcggcggcggcaggcaggcagggagccaacccgggagaagaaggccagggaagatctccgaccctttctttcttgggtccatccgggggggccgcggggcaatcaccattgtttcctgctgtcgccttttgatctggcgtggacacccttgcccggcaatgagtgttcatcacttgagctcatatcatcgtcagaggcaggcagcagtaagcagattccgctgttgctgagcattgtcgtcgtgggcgtggcaggccagttcgcgtggagacggggagggaacatctggtgtgcgtttgctaaccggggggcggccggcgggtggaggcgaccaggcgaggactgctctgcggcggcaaagggtttcaaaatgctggcgtgcatcgcctgctcggccaaggacggcggggatcaggacggctcccgcgccgccacgccccacggaagggacgccggcaagtccctcacctcccagctcaaggacatggtgctcaagttctccggctccggcaggcagtacaaggccgcggcggcgagcccgtcgttccggggcaaccgcttccaccgcaacagccgcctggccgcgtacacgggcgtcattgacgactcgggcttcacgtcggacggggccaccgagggctacggctacatgaggacgacgacgcacgcgaccggcgccaccgcgggaaccaaggtcggccgtggcttcccgcagcacgtcaggagcccgagcgcgagctggataccgagcatcggggaggaggacgatgaggaggatgaagaggttgtcgtcgttgaagaggaccgcgtgccgcgggagtggacggcccaggtggagcccggcgtccagatcaccttcgtctccaccgccggcggcgctggcaacgacataaagcgaatccgcttcagccgcgacatgttcaacaagtgggaggcgcagcggtggtggggagagaactacgaccgcgtggtggagctctacaacgtgcagacgttcagccggcagcagggcgtctcgacgccgacgtcctccatcgacgatgccacgcagagagactcgtcgttctactcccgcgccggctcgacgagggacagcccggtgatcctgccgccgacagccgtgggcagggagcagccgatcgcccgcgccacctcgtgcagggccacggccgcggcggcttccacggcccgagccgcgtgcaacccatcgtccagtgcggtgccggacccgtcggaccacgtgtgggcgcaccacttcaacctgctcaactccgcgccggcgccggcaccggccgctccgcacctcgacccgtcgcgcgctaccacgtcgtccctggacgaggcgtccgtgtccgtgagcaacgcgagcgacctggaggccacggagtgggtggagcaggacgagcccggcgtgtccatcaccatccgcgagttcggcgatggcacccgcgagctccgccgcgtccgcttcagccgggagaggttcggcgaggagagggccaaggtgtggtgggaccagaacaggaaccgaatacacgcgcagtacctgtgacgtcggactcggagctagctgttgggtgtgcagtacacgcgttggatggaagccaagccaccaatccatggacaatagtagcgtagggctgagtcagtgatactattgcgactactgtctactagtgctagtttttacagggtgaacagaggtgaaagaggtccacggaatggagcctgtgtaaaacatgtttgctactactactgatctgggtttgtgtgttgatgaccaatgtattttttttcttgatgaactaatactgttttgtgttgatcgcctcagatgaacagtgctcacattttctaatcgcgggcacaaacaaatcacccacaagacaccaagcaagctaactttgaccatattggataacattcactttccaattacaaaagaaagcaagacaaaattcttcagtgttgcgttttttactagtgatgaggaaacgtttgccatcgttacaagacgtgcgccaaattggcacctcactgcgttaaatgtgcattcaaaccaaatgtgaaatgtccatcccttgttgggctcaaggatttacaagctgttaaatgtgcatacagtttgtgacagcgatattggtgcaagataacattgcaaggcaaaccaaaccaaattaatagcacaatcatgtttattaaaacatgggggcaagcttttcgcaggaaaaaagcagatcaaccgcccggaagtggggaaggcttgatgcaggctctagcacttcacaaaggaatttgcaaacccattctaatatgtctcgacgcagcgaaactgtggtgatggcaaatccgcacaaccatcgatgggcaaacgctcaggctgactatcctcttcgggcacactggtttctgcacactatacacaacacccctcctgcagctgatcgaattttcactccacataccctcatttagctgaccaattttcttgtcagcctctttgctggagggatatcgtcagacttcccaagaaagtccgacttgccatgtccggccttcatcatgggggcagcaggcttcacagcgctccgtgttctagaggtcacagacatttgggatagtttctctgtaattgatgagaccttctgtattgctcctcggccagtttcaggcaagctccgtgaatgcctaagtacaggattccctacaattccaaaggaaaaaaagttctaaaaaatcaaaacccatttcgtgcaaggagttgggcaatgcaaccctatataggaaacttgcctgggctattccgagctggtacccgattcgtagttagtttattgctagtctcggttggcttcatacccttttgggatggctgacgatccaaattaagttttctttgtacacctgtaatgttggtagcaaaatagacaatcaaactaaaccctataaatcttgcttgctccagcccaattaaaacagataagacacgcaccagtcttagataaaccatttaattttgcggatgcattgctatgagatttcattgtagatagagttccagttgagaatcttctagccacactgttctctgaatttccttttgatccaactaaaacaaatgaaccaagcacatgtaaaacaacaatatcctaaatgaattaggtacaaagcagaatactagtctgttaactaaccacatggaggtgttctaggaagtgatgaagcttttggacggacagggagtggaacacatgtacaaccctaaaagttggcaaccagaaaactgattatagttccaaggagacaataactgaaccttgccaataaaaatagagtagaaagaatatactattacctgaaaaaaggtatgctggaggacttctgcggcctttggtctcttgctaggatcccatgagcataaacttactgagatgaggtcaattgcatcgctactggctgttgtcatcacctcggccagttgactgcctttgatctgcatggatagaagaacacaccctcaacattagatcaaatattaaccagtcattcaacatgtatccacattcacaatgaggtggcaaaaggtacaacaattcatccttttcaggggagtacaactattggtaatcaagaaag

SEQ ID NO: 208248 - DNA, 3903 bp, Zea Mays
gtggtctcgctcgatttcgggggcgcggatcagacggcggggagcgaatccggggcccagttcccgcacctgcctccctcaccctccactccaccctcctccactccatccacctctccctcccctgcgccgctgttgatctcggagcaacaaaaaaaaaagaacaaggggaagaaatctcctcccccgtgctgttgccgtctgtttggcctcgaccgcggaccgcccgctaccatccaaaaggcggcggcaggctgctctgcccactcggtgccgttgtcgtcgccccagccagcgggatcttgctgctccaccgccgcctgccgctgttttcctccattcagctcgcgcctgctccagatatctgacccgggaggcggcggcggcaggcaggcagggagccaacccgggagaagaaggccagggaaggtgttcatcacttgagctcatatcatcgtcagaggcaggcagcagtaagcagattccgctgttgctgagcattgtcgtcgtgggcgtggcaggccagttcgcgtggagacggggagggaacatctggtgtgcgtttgctaaccggggggcggccggcgggtggaggcgaccaggcgaggactgctctgcggcggcaaagggtttcaaaatgctggcgtgcatcgcctgctcggccaaggacggcggggatcaggacggctcccgcgccgccacgccccacggaagggacgccggcaagtccctcacctcccagctcaaggacatggtgctcaagttctccggctccggcaggcagtacaaggccgcggcggcgagcccgtcgttccggggcaaccgcttccaccgcaacagccgcctggccgcgtacacgggcgtcattgacgactcgggcttcacgtcggacggggccaccgagggctacggctacatgaggacgacgacgcacgcgaccggcgccaccgcgggaaccaaggtcggccgtggcttcccgcagcacgtcaggagcccgagcgcgagctggataccgagcatcggggaggaggacgatgaggaggatgaagaggttgtcgtcgttgaagaggaccgcgtgccgcgggagtggacggcccaggtggagcccggcgtccagatcaccttcgtctccaccgccggcggcgctggcaacgacataaagcgaatccgcttcagccgcgacatgttcaacaagtgggaggcgcagcggtggtggggagagaactacgaccgcgtggtggagctctacaacgtgcagacgttcagccggcagcagggcgtctcgacgccgacgtcctccatcgacgatgccacgcagagagactcgtcgttctactcccgcgccggctcgacgagggacagcccggtgatcctgccgccgacagccgtgggcagggagcagccgatcgcccgcgccacctcgtgcagggccacggccgcggcggcttccacggcccgagccgcgtgcaacccatcgtccagtgcggtgccggacccgtcggaccacgtgtgggcgcaccacttcaacctgctcaactccgcgccggcgccggcaccggccgctccgcacctcgacccgtcgcgcgctaccacgtcgtccctggacgaggcgtccgtgtccgtgagcaacgcgagcgacctggaggccacggagtgggtggagcaggacgagcccggcgtgtccatcaccatccgcgagttcggcgatggcacccgcgagctccgccgcgtccgcttcagccgggagaggttcggcgaggagagggccaaggtgtggtgggaccagaacaggaaccgaatacacgcgcagtacctgtgacgtcggactcggagctagctgttgggtgtgcagtacacgcgttggatggaagccaagccaccaatccatggacaatagtagcgtagggctgagtcagtgatactattgcgactactgtctactagtgctagtttttacagggtgaacagaggtgaaagaggtccacggaatggagcctgtgtaaaacatgtttgctactactactgatctgggtttgtgtgttgatgaccaatgtattttttttcttgatgaactaatactgttttgtgttgatcgcctcagatgaacagtgctcacattttctaatcgcgggcacaaacaaatcacccacaagacaccaagcaagctaactttgaccatattggataacattcactttccaattacaaaagaaagcaagacaaaattcttcagtgttgcgttttttactagtgatgaggaaacgtttgccatcgttacaagacgtgcgccaaattggcacctcactgcgttaaatgtgcattcaaaccaaatgtgaaatgtccatcccttgttgggctcaaggatttacaagctgttaaatgtgcatacagtttgtgacagcgatattggtgcaagataacattgcaaggcaaaccaaaccaaattaatagcacaatcatgtttattaaaacatgggggcaagcttttcgcaggaaaaaagcagatcaaccgcccggaagtggggaaggcttgatgcaggctctagcacttcacaaaggaatttgcaaacccattctaatatgtctcgacgcagcgaaactgtggtgatggcaaatccgcacaaccatcgatgggcaaacgctcaggctgactatcctcttcgggcacactggtttctgcacactatacacaacacccctcctgcagctgatcgaattttcactccacataccctcatttagctgaccaattttcttgtcagcctctttgctggagggatatcgtcagacttcccaagaaagtccgacttgccatgtccggccttcatcatgggggcagcaggcttcacagcgctccgtgttctagaggtcacagacatttgggatagtttctctgtaattgatgagaccttctgtattgctcctcggccagtttcaggcaagctccgtgaatgcctaagtacaggattccctacaattccaaaggaaaaaaagttctaaaaaatcaaaacccatttcgtgcaaggagttgggcaatgcaaccctatataggaaacttgcctgggctattccgagctggtacccgattcgtagttagtttattgctagtctcggttggcttcatacccttttgggatggctgacgatccaaattaagttttctttgtacacctgtaatgttggtagcaaaatagacaatcaaactaaaccctataaatcttgcttgctccagcccaattaaaacagataagacacgcaccagtcttagataaaccatttaattttgcggatgcattgctatgagatttcattgtagatagagttccagttgagaatcttctagccacactgttctctgaatttccttttgatccaactaaaacaaatgaaccaagcacatgtaaaacaacaatatcctaaatgaattaggtacaaagcagaatactagtctgttaactaaccacatggaggtgttctaggaagtgatgaagcttttggacggacagggagtggaacacatgtacaaccctaaaagttggcaaccagaaaactgattatagttccaaggagacaataactgaaccttgccaataaaaatagagtagaaagaatatactattacctgaaaaaaggtatgctggaggacttctgcggcctttggtctcttgctaggatcccatgagcataaacttactgagatgaggtcaattgcatcgctactggctgttgtcatcacctcggccagttgactgcctttgatctgcatggatagaagaacacaccctcaacattagatcaaatattaaccagtcattcaacatgtatccacattcacaatgaggtggcaaaaggtacaacaattcatccttttcaggggagtacaactattggtaatcaagaaag

SEQ ID NO: 208249 - DNA, 2439 bp, Zea Mays
tgaaccgtgagatttttttattgtactgcatgggatattagcacaaacagaggatgtgaccgagctgcagcctgtacctgatgcacatgtccctgttatgaaattcaagttccatggaatatctattgaccttctttatgccagtgtctccctcttagtagtaccagctgacttggatatctcccaaggatcagtgctttatgatgttgatgaagctactgtccgtagtcttaatgggtgcagagtagcagaccaaatcattagacttgttccaaattttgagaattttcgcacggcattaagatgtttgaagtactgggcaaaaaggagaggtgtttactctaatgttactggctttcttggtggtgtcaactgggctttactggttgcgcgtgtctgccagctctatcccaatgctgtgccaagtatgctggtctcacggttttttagagtttttacacaatggcagtggccaaacccggttatgctttgttctatagaagaggaagaacttggtttccctgtttgggatccacgcaaaaatcctcgagatagatgtcatcatatgcctattataacccctgcgtacccatgcatgaattcaagctataatgtttccacaagcacactgagggttatgttggaacaattccagtttggtaatagaatttgccaggaaattgaaatgaataagaccagctggcctgctctgtttgagccttttcaattttttgaagcatacaagaattatctacaggttgacatcattgctgaggatgatgaagaccttaggctttggaaaggatgggttgaatctcgattgcggcaactaactttgaagattgaacgtgatacatatggaatgctacagtgtcatccttacccacatgaatatgcagacccttctaggcagtgtgctcattgtgctttcttcatgggcttgtcaaggaaagaaggtgtgaaaatacaggaaggacaacagttcgatattcgaggaacggtggatgagttcaggcatgaaatcaacatgtatatgttctggaagcctgggatggagttagctgtttctcatgttcgtaggaagcaggtcccagcttatgtgtttccagagggttataaaagacctcgcccttcaagacatgtgaaccatcagtctgataaaaatgacactgaagatggcacagcgaccaggtctccagacagtcaactgaagagaaagcatgattctgttggaactgatgatatcaggtatgcaaagaggtcatcgaccagcccagttcatccgaaaaattcacctcaatctggaagcactggcgatgagactagatgtaacaaccaaataaaaagggctcctagcgatgcaagtggtggcagtccggcttcacctcaggcatcagagagaagcccagatactattctgtctgcccctaggtgcacgacaacaggagcagtgtgttctggtgatgcaattagtaagcatagtagtgttcctcttgttgagaactgcaccactccgactgtagcagtgtgcacaactttgaagcgcgtagctgagaaagttgtttcagagctagttggaagtgaaaggctggggagcaacaacagtgcggaattgttggagagtatggaaaaggaggatgtccttgctgaaaatgttcgttttggcgggaatggagttgcgcaaggtggccttccagaagagttagagattcgcaattacgggggtttctatgatgatggatgatgggagattatcggatatcatgtcttgcacaacggcatggcaaaaaaaaaacgacgaagaagattttgtggaaggccatggtcgaatgtcatgtcttgctggtacactctagatgagcatgaaccttaagttttcgtttttttttaacttgttgagcagctgactcttgtgtatgaactgagctgcagcgggcttccctgagttgacttgtttgggtctgagatgcttctgccatgttctaggtctagaatagaactagatgcggtggtgtgttctctaccctaagtccccttttgtgccctttccttctgtaatataagatctttgactgtttcttgtgtgtcttctggtccatagattttgcattgtctcctgttgcggtgcggatcgttctttactacccccgtccggtggtgctctacttcgagcatgatcggcagatgaactcctagagttgatatcactttgtgaatagaagggtctcaataaccagaaacacagctcaagctgtaggtagagatgtcaacgggacctgatacccgccaacccgtggggaattcccctattagggtacgagtatgggacgaaaattgtcttaatgggtatgaatatgagataaaatctccactcattgggtaaacgggtatgggtttgggaagcaataatccgaacctgattacccatgggtatttcat

SEQ ID NO: 208250 - DNA, 2820 bp, Zea Mays
gtactcttcacctttggctcataccgtcttggggttcatggacctggagctgatattgataccctctgtgttggaccttcatatgtgaaccgtgagaagatttttttattgtactgcatgggatattagcacaaacagaggatgtgaccgagctgcagcctgtacctgatgcacatgtccctgttatgaaattcaagttccatggaatatctattgaccttctttatgccagtgtctccctcttagtagtaccagctgacttggatatctcccaaggatcagtgctttatgatgttgatgaagctactgtccgtagtcttaatgggtgcagagtagcagaccaaatcattagacttgttccaaattttgagaattttcgcacggcattaagatgtttgaagtactgggcaaaaaggagaggtgtttactctaatgttactggctttcttggtggtgtcaactgggctttactggttgcgcgtgtctgccagctctatcccaatgctgtgccaagtatgctggtctcacggttttttagagtttttacacaatggcagtggccaaacccggttatgctttgttctatagaagaggaagaacttggtttccctgtttgggatccacgcaaaaatcctcgagatagatgtcatcatatgcctattataacccctgcgtacccatgcatgaattcaagctataatgtttccacaagcacactgagggttatgttggaacaattccagtttggtaatagaatttgccaggaaattgaaatgaataagaccagctggcctgctctgtttgagccttttcaattttttgaagcatacaagaattatctacaggttgacatcattgctgaggatgatgaagaccttaggctttggaaaggatgggttgaatctcgattgcggcaactaactttgaagattgaacgtgatacatatggaatgctacagtgtcatccttacccacatgaatatgcagacccttctaggcagtgtgctcattgtgctttcttcatgggcttgtcaaggaaagaaggtgtgaaaatacaggaaggacaacagttcgatattcgaggaacggtggatgagttcaggcatgaaatcaacatgtatatgttctggaagcctgggatggagttagctgtttctcatgttcgtaggaagcaggtcccagcttatgtgtttccagagggttataaaagacctcgcccttcaagacatgtgaaccatcagtctgataaaaatgacactgaagatggcacagcgaccaggtctccagacagtcaactgaagagaaagcatgattctgttggaactgatgatatcaggtatgcaaagaggtcatcgaccagcccagttcatccgaaaaattcacctcaatctggaagcactggcgatgagactagatgtaacaaccaaataaaaagggctcctagcgatgcaagtggtggcagtccggcttcacctcaggcatcagagagaagcccagatactattctgtctgcccctaggtgcacgacaacaggagcagtgtgttctggtgatgcaattagtaagcatagtagtgttcctcttgttgagaactgcaccactccgactgtagcagtgtgcacaactttgaagcgcgtagctgagaaagttgtttcagagctagttggaagtgaaaggctggggagcaacaacagtgcggaattgttggagagtatggaaaaggaggatgtccttgctgaaaatgttcgttttggcgggaatggagttgcgcaaggtggccttccagaagagttagagccaaacaataggattgaagcggtttcttgagctgatgcaggtatgaacaagtgtacattgtggaagtcgtcactgaggcatggtcttgaactcatcccttgtgcattcggtatctacattgccctgttttctttatactcggctgtttggtatttgtgtgctgctttatggcagggttagtggcatcaaccacacaagattggggaaaaaatggtgtagagatggataagttctacccccttgctggagggaatggtaagtagctcaactcacaagtttccttctggacacagattcgcaattacgggggtttctatgatgatggatgatgggagattatcggatatcatgtcttgcacaacggcatggcaaaaaaaaaacgacgaagaagattttgtggaaggccatggtcgaatgtcatgtcttgctggtacactctagatgagcatgaaccttaagttttcgtttttttttaacttgttgagcagctgactcttgtgtatgaactgagctgcagcgggcttccctgagttgacttgtttgggtctgagatgcttctgccatgttctaggtctagaatagaactagatgcggtggtgtgttctctaccctaagtccccttttgtgccctttccttctgtaatataagatctttgactgtttcttgtgtgtcttctggtccatagattttgcattgtctcctgttgcggtgcggatcgttctttactacccccgtccggtggtgctctacttcgagcatgatcggcagatgaactcctagagttgatatcactttgtgaatagaagggtctcaataaccagaaacacagctcaagctgtaggtagagatgtcaacgggacctgatacccgccaacccgtggggaattcccctattagggtacgagtatgggacgaaaattgtcttaatgggtatgaatatgagataaaatctccactcattgggtaaacgggtatgggtttgggaagcaataatccgaacctgattacccatgggtatttcat

SEQ ID NO: 208251 - DNA, 3303 bp, Zea Mays
aagaaatagacggacggatagcccacagaacgcacgcgctaccttttctctctctacgaccttccccttacctattcgccgtccctctctcctgctgccctccccccgccgccgccctacggcccaccccgccgacgcgccacctccgtatctctcttccccgcctacgcgggcggcggatctccggatccgcgcgggggagggagatctggattggatggtcctctccggccgcggctagtccggcctgatctgatccgacccgtcccggcggcgcagtccgggcaggttgtctgggaaatttcggactcgggcggtgttgatcccggggagaggtcgtgcctcgctcgatctccgcataaaagctgtgattttgtggcggcgcggctgcgagttaccgggattttcccagggtttccggcggccgatccgcgctagttacgctattctgttccgtcagggcggcctcgtgttgggggctcgtttatttgccgcgtcccggaggagggttttgtgttcttctgtcgttggctccatggccagcggctctgatgccccgaagcagtatggaataaccaagccgttgtcgttgctcggaccggtggaggccgacctccagaggacggaggagctagagaagttcttgctcgagtcgggtctctatgagagccctgacgaatctgctaggcgggaggaggtgctggggaagcttgaccagattgtaaaagactgggtaaaacaattgactagtcagagaggatacactgatcaaatggttgaagaggcaaatgctgtactcttcacctttggctcataccgtcttggggttcatggacctggagctgatattgataccctctgtgttggaccttcatatgtgaaccgtgaggaagatttttttattgtactgcatgggatattagcacaaacagaggatgtgaccgagctgcagcctgtacctgatgcacatgtccctgttatgaaattcaagttccatggaatatctattgaccttctttatgccagtgtctccctcttagtagtaccagctgacttggatatctcccaaggatcagtgctttatgatgttgatgaagctactgtccgtagtcttaatgggtgcagagtagcagaccaaatcattagacttgttccaaattttgagaattttcgcacggcattaagatgtttgaagtactgggcaaaaaggagaggtgtttactctaatgttactggctttcttggtggtgtcaactgggctttactggttgcgcgtgtctgccagctctatcccaatgctgtgccaagtatgctggtctcacggttttttagagtttttacacaatggcagtggccaaacccggttatgctttgttctatagaagaggaagaacttggtttccctgtttgggatccacgcaaaaatcctcgagatagatgtcatcatatgcctattataacccctgcgtacccatgcatgaattcaagctataatgtttccacaagcacactgagggttatgttggaacaattccagtttggtaatagaatttgccaggaaattgaaatgaataagaccagctggcctgctctgtttgagccttttcaattttttgaagcatacaagaattatctacaggttgacatcattgctgaggatgatgaagaccttaggctttggaaaggatgggttgaatctcgattgcggcaactaactttgaagattgaacgtgatacatatggaatgctacagtgtcatccttacccacatgaatatgcagacccttctaggcagtgtgctcattgtgctttcttcatgggcttgtcaaggaaagaaggtgtgaaaatacaggaaggacaacagttcgatattcgaggaacggtggatgagttcaggcatgaaatcaacatgtatatgttctggaagcctgggatggagttagctgtttctcatgttcgtaggaagcaggtcccagcttatgtgtttccagagggttataaaagacctcgcccttcaagacatgtgaaccatcagtctgataaaaatgacactgaagatggcacagcgaccaggtctccagacagtcaactgaagagaaagcatgattctgttggaactgatgatatcaggtatgcaaagaggtcatcgaccagcccagttcatccgaaaaattcacctcaatctggaagcactggcgatgagactagatgtaacaaccaaataaaaagggctcctagcgatgcaagtggtggcagtccggcttcacctcaggcatcagagagaagcccagatactattctgtctgcccctaggtgcacgacaacaggagcagtgtgttctggtgatgcaattagtaagcatagtagtgttcctcttgttgagaactgcaccactccgactgtagcagtgtgcacaactttgaagcgcgtagctgagaaagttgtttcagagctagttggaagtgaaaggctggggagcaacaacagtgcggaattgttggagagtatggaaaaggaggatgtccttgctgaaaatgttcgttttggcgggaatggagttgcgcaaggtggccttccagaagagttagagccaaacaataggattgaagcggtttcttgagctgatgcagggttagtggcatcaaccacacaagattggggaaaaaatggtgtagagatggataagttctacccccttgctggagggaatggtaagtagctcaactcacaagtttccttctggacacagattcgcaattacgggggtttctatgatgatggatgatgggagattatcggatatcatgtcttgcacaacggcatggcaaaaaaaaaacgacgaagaagattttgtggaaggccatggtcgaatgtcatgtcttgctgcgggcttccctgagttgacttgtttgggtctgagatgcttctgccatgttctaggtctagaatagaactagatgcggtgattttgcattgtctcctgttgcggtgcggatcgttctttactacccccgtccggtggtgctctacttcgagcatgatcggcagatgaactcctagagttgatatcactttgtgaatagaagggtctcaataaccagaaacacagctcaagctgtaggtagagatgtcaacgggacctgatacccgccaacccgtggggaattcccctattagggtacgagtatgggacgaaaattgtcttaatgggtatgaatatgagataaaatctccactcattgggtaaacgggtatgggtttgggaagcaataatccgaacctgattacccatgggtatttcat

SEQ ID NO: 208252 - DNA, 2059 bp, Zea Mays
agccttgtactttgtttgccaattctgcaaccgtgcctttttctctcctcccaatctcccattaccccagcggcccagcgtgcggagacgggagacgcgctccccagtccccacccccctctcgtgtcgtggcgacgactggggggctgtcgctgccgccctacgtcaggtggccaggtcgtattagggcacttcgccggcgacgagtaccacaaggcagtggacactttctctggtatcagaggatcaatgtccaattattatgatgactacgatgacattgacgggatggaggatgattatgatatggatgatcccattgatgacatggtagacgagcagcaagggattagggattctgatgtggaagataatgattatggacaaccaaatgataagatcccagatacttcatcagcagatgcaagaaaaggaagggacattcaaggaataccctgggagcagataaacataacccgtaaaaaatacagacagtccagattagaacagtacaaaaattatgagaatgtacctaactctggagaagaagctatgaaggattgcaaaccaacagagaaaggtgggatatactatgagtttagacgaaatactagatcggttaaatcaactattctacattttcagcttagaaatttggtatgggcaacgtccaagcacgacatctacctagtatctcattactcaattcgtcactggtcagcattgagtggtgtggatactgaacttatcaacgtccaaggacatgtggcaccaagggagcatgcaggaagtttattagaggggttttatcagactcaagttagtaccttgacagtcaaggacaatttactggtagctggtgggtttcaaggagagctgatctgtaaacaccttgatcaggaaggtattagtttttgctgtcgaacaacttatgatgataatgctattacaaatgcggttgagatatttaatacctctagtggcgccgttcacttcatggcatcaaataacgactctggtgtgagatactatgacatggagagattccagctattcaagcattttcagtttgaatggccagtgaatcatgcttcgttgagtcctgacagaaaggtggttgttattgtgggtgatgatcctgatggtctacttattgatgcaaactctggaaagacagttcattccataaaaggacatcgggactactcatttgcatcggcttggagccctgatgggcgaacatttgctaccggcaaccaagacaagacatgccgaatctgggacgtgaggaacctttcaaaatccgtccatgtgttgaggggtaaccttggagccatccggtccatccgcttcacctcggatggccagttcatgtccatggctgaacctgctgactttgtgcacatctacgacgtgaagagtgactacaacaaaaggcaggagctggacttctttggcgagatatccggcacatcgttcagcccagacactgacacgcttttcgttggtgtgtgggataggatgtatggcagcctgctacaatttggccgcctgtacaactactcgtatcttgactccctgttttgatgtggatccaaacgggtgttgaactgttgggttttggtgtacctcagtgctctgaatgttgtcagcataaattaggtggttatccctaatcaggatattaagttgcaaagataattgaattaataaatgttgtaccgtgcccgatgtgtatatgtaaaaagaaatgtatacatgtgcctattgagagaccgagttgagatgtgacttaggggttgtttgtttgggattataatctattcagattatataatctaatttatttgttttaggggttgtttgtttgggattataaatataatctaacttatttgtttgtttgagattagtctagcttgaaaagtatgtttgaccttgtgtgcataggattgaatacagtgtgtgtagtttcatgtagacgcaggtaatgtatgtttctgtcacgggactgaccggccgtggtaggaatgtgtgtcgaaggaaaatatcttttggc

SEQ ID NO: 208253 - DNA, 1536 bp, Zea Mays
acacacactcactcactcgtacgccgtcgcttcctgcggtacgcactctctgtccgctgcgttcctccagctagcaactggccatcggggctgctatagcagagtaagtggcgatggctccagctcatgataggctccgccgcctggtgctgctcctcgtcgttgccaccgcggcggcggctttgcttctggcgccgacgacggcggatgctgcgctgccgcgggtgcagcacacgcccaccaaggccgacgggtcgctcgccatcctcgtcgtcggcgactggggccgccgtggtggggcagaagctggacatcgacttcgtcatctccaccggcgacaacatctacgacgacggcatcgccaacaccagcgaccccctcttcaaggaatcgttctccaatatctacactgccaacagccttcagaagccttggtacctggtccttggtaaccatgactacacgggaaacgcgctcgcgcagctcgaccctgccattcgcaaagtggatagccggtacaccgccattgccaagtccttcattgtcaactcaggtcagcaaatgataatatggaacctcaaagtgtgcaagcatttcaaacgatatatatatttattctaaattaagaagaagaaaattaaagggttgtttggttcgctgtctaaattgccacactttgtctaacttttttttttgggtaaggttagttttcaattcgaactaataaccttagacaaagtgtggtaaaattagtcacgagccaaacaggctctaaatgtgtgcgtggatggtacttttgttttgaacaaattaaagggattgcggattttttcctcgtcgacacaacgccgttcattgtccactactggaacaacaccaagttcgattggagaggcgtcgctcctcgagacacctacatcgcgaatctcctcaaggacttgaagtgtgcactgacagcgtccaaggctccctggaagatcgtcgtgggtcaccaccccatcagcagcgcctgcgggcatgggaacaacactgagctggaggagttgcttctcccggtcctcaggtcgtcttcagctattaaccagcggcggcgggtccaaggcatgggctggcaagttcaagcccaccctcgacaaggtggagttcctctacgacggccaggggttcatgtcgatgcgcctgagcaggacggaggcccgcctcgcgttcttcgacgtcgctggcagcgtcctgcactgctggaccatgcatgcccaaaaattaacgacgacgacgactgctgctgcagctaggcactaaagctttgctgggtacgatgagttgatgatgcaattaattatttggttttgtcgtcttttcgtgcgtgagagggaagcaataataattaattgctgctgcttctgttgttgtgtgcacatgcatgtgagggtgtcaagtatgttcagcctcttgcaagataaaatctctcgtcttctgtggaataaactgggaaaaaagtttttttttgtaaagtatgcaggagtttcgcgtgtgctg

SEQ ID NO: 208254 - DNA, 1382 bp, Zea Mays
acacacactcactcactcgtacgccgtcgcttcctgcggtacgcactctctgtccgctgcgttcctccagctagcaactggccatcggggctgctatagcagagtaagtggcgatggctccagctcatgataggctccgccgcctggtgctgctcctcgtcgttgccaccgcggcggcggctttgcttctggcgccgacgacggcggatgctgcgctgccgcgggtgcagcacacgcccaccaaggccgacgggtcgctcgccatcctcgtcgtcggcgactggggccgccgtggacagttcaaccagaccttggttgcccagcagatgggcgtggtggggcagaagctggacatcgacttcgtcatctccaccggcgacaacatctacgacgacggcatcgccaacaccagcgaccccctcttcaaggaatcgttctccaatatctacactgccaacagccttcagaagccttggtacctggtccttggtaaccatgactacacgggaaacgcgctcgcgcagctcgaccctgccattcgcaaagtggatagccggtacaccgccattgccaagtccttcattgtcaactcagggattgcggattttttcctcgtcgacacaacgccgttcattgtccactactggaacaacaccaagttcgattggagaggcgtcgctcctcgagacacctacatcgcgaatctcctcaaggacttgaagtgtgcactgacagcgtccaaggctccctggaagatcgtcgtgggtcaccaccccatcagcagcgcctgcgggcatgggaacaacactgagctggaggagttgcttctcccggtcctgactacacacggggttgacatgtacttgaatggccatgaccactgcctgcagcgcgtcagcagcagagacagtcgtcttcagctattaaccagcggcggcgggtccaaggcatgggctggcaagttcaagcccaccctcgacaaggtggagttcctctacgacggccaggggttcatgtcgatgcgcctgagcaggacggaggcccgcctcgcgttcttcgacgtcgctggcagcgtcctgcactgctggaccatgcatgcccaaaaattaacgacgacgacgactgctgctgcagctaggcactaaagctttgctgggtacgatgagttgatgatgcaattaattatttggttttgtcgtcttttcgtgcgtgagagggaagcaataataattaattgctgctgcttctgttgttgtgtgcacatgcatgtgagggtgtcaagtatgttcagcctcttgcaagataaaatctctcgtcttctgtggaataaactgggaaaaaagtttttttttgtaaagtatgcaggagtttcgcgtgtgctg

SEQ ID NO: 208255 - DNA, 2386 bp, Zea Mays
ataagaatcagaagaaaaggacccgagcctagggttcggtctgcctcccacagccgccgctacgctttggctgcatcactcgctcctcttcggagcctccctttcgccggcggcgtaggaagagatggcagagcgtttgacccgtatcgccatcgtcagcgaggacaagtgcaagcccaagaagtgccgccaggagtgcaagaagagctgccccgtcgtcaagactgggaagctttgcattgaagtaacttcggcatcaaaactagctttcatttctgaggagctgtgcatcggttgtggtatctgtgtaaagaaatgtccatttgatgccattgaaatcatcaaccttccaaaagacttggaaaaggataccactcaccgatatgggcctaataccttcaagttgcacaggttgcctgtcccaaggcctggtcaggttttgggccttgttggaacaaacgggattggaaagtcgacagctcttaaagtgttggctggcaagctgaaacctaacttggggcgcttcaaaaacccacctgattggcaggaaattcttacatactttcgtgggtctgaacttcagaactacttcacacgcatattggaagataacctgaaggcaatcatcaaacctcagtatgttgaccacattccaaaagctgttcaagggaatgtaggacaagtacttgaacagaaggacgagagggatatgaaatctgaactgtgtgttgatcttgaattaaaccaagttattgaccgaaatgtaggagatctttctggtggtgagcttcagagatttgcaatagcagttgttgctgtgcaaaatgcagaaatctatatgttcgatgagccatcaagctaccttgatgtgaagcagaggctaaaagctgcacaagtcgttaggtccttgcttaggcctaacagctatgtcatcgttgtggaacatgatttgagtgtcttggattacttgtccgacttcatttgctgtttatatggcaagccaggtgcttatggtgtggttaccttgccattctctgtccgagagggtatcaatattttcttggctggatttgttccaacagaaaatcttcggttccgagatgaatctcttacatttaagattgcagagactcaagaaaatgctgaggagattgagacgtatcagcggtataagtaccctactatgagcaaaacacagggaaatttcaagcttactgttgttgagggtgaatttactgattcccagattgttgttatgcttggtgaaaacgggacagggaaaactacattcatcagaatgctggctgggttgttgaagccagacacggtggaaggaactgatattgaaattcctgaattcaatgtgtcgtacaagccccaaaagattagcccgaaattccagaataccgtgaggcatttgctgcatcagaaaattcgggattcctatatgcatccgcagtttgtgtctgatgtgatgaaaccactgcaaattgaacaactcatggaccaagaggttgttaatttatcaggtggagagctccaaagagttgctatatgcctctgccttggaaagcctgcagatatctatctgattgatgaaccaagtgcttatcttgattcggagcagcgtattgttgcctcaaaagttatcaagagattcattcttcacgcgaagaaaactgcatttattgttgagcatgatttcatcatggcaacatacttggctgacaaggtcattgtttatgaggggcgaccttctattgactgtactgccaacgcaccacagtctttagtatctgggatgaataaattcttatcgcatctcgacatcacttttagaagagacccaaccaactataggccacgtataaacaagttggaatcgacaaaggacagggaacagaagtcagccgggtcctactactacctcgatgactaatgaggaagtattcttcttggagagccatatgtcgcataatctttccagagcgtggaaaggagaagctactttgaagctaccactgcatcatggcatgtgacttgttgaataattggttgcaggagtagagtgcgccggttataacttataaagcagagcatgccgtgttgatactgagttttttgttggcttgacctatatgaagagaaggatcggtgttaaaatgagatttgcgagggggaactaatttctgtttttaagcaatactgtactgtcgttttgctatcaagtatatttgaccctcgattatatagattacattgaagtttttgggcaacaatgtgaaatcttgtgataaatctctgtgcttattggttatctgattgtaactcgtcctttgtaaactttgtttgaatgagcaagtgaactgattgtcgatagtttgtt

SEQ ID NO: 208256 - DNA, 1179 bp, Zea Mays
ctcctttatcttctagtgacgccgactccctgggatatttgctgcgcactcatctccctcagctagctcgaccgcctctctctggtctctagcgctgtggagctccttcctacgtgcgctagccgccaggtcgtcttcaacctccatccgtggagctcgcctctgccatggccgccctctgccctcctccctcaagccctagctgagtttttccatggtgccctggatgccagcccctttactcgatgcccctgctaggttcctggcatgttcgcccagaccgatgcctagctcccatggccgccctggatctccatggttgagttttctccctgcaggatccccccaaatagcgcctggtctttttcccttggtcgaaaacacctctgcacttaacccccctctgttgatggtcgacgtctcttcatccatggtacctaggtctccatccccatgcccctgcagcttgttctcaagccgccaaccatggagaaacttccggtgttggagggcgaagagctcgaagttctaaaggtaacgcccgccgggtgcttggtggaacgtctcaaccggaggttgttgtcgatctctcggattcgaggcgatttagttgtggtacgttaattgatcacgtgatgtggaagacaatagttggattaatctcaaagtgatgctgatgaataaaccagagaagtggatgatttgatcatgtaccaggatgggagatgctcaccaagtgatcgtcatctaacaacactgacttagtgttatcccaggcaagccccggtgcatttgccaccttccttgtgtttacaaaattttatcacttatatgctgcattaggtgataggagttgagtgattaaacacttgatgcattaccatccttgaaaggttgattaccacaccttgtcacccgttttataaaagctagagatgcttagtcttgctgatagattaagaaacatatttttgatctatgactcatgtttttacaaaaaaaataaaatgggcttgggacaatgaaggcatcaagacgttgataaattcattatccaggcatggcccctctgtcaggcgccaaatttttgaaatagtttaaaatgggaccagacgttgagcaggaaaggtcgtccgtctgtgtcgattaaggaccataccgattgttggcctgatgatc

SEQ ID NO: 208257 - DNA, 1098 bp, Zea Mays
ctcctttatcttctagtgacgccgactccctgggatatttgctgcgcactcatctccctcagctagctcgaccgcctctctctggtctctagcgctgtggagctccttcctacgtgcgctagccgccaggtcgtcttcaacctccatccgtggagctcgcctctgccatggccgccctctgccctcctccctcaagccctagctgagtttttccatggtgccctggatgccagcccctttactcgatgcccctgctaggttcctggcatgttcgcccagaccgatgcctagctcccatggccgccctggatctccatggttgagttttctccctgcaggatccccccaaatagcgcctggtctttttcccttggtcgaaaacacctctgcacttaacccccctctgttgatggtcgacgtctcttcatccatggtacctaggtctccatccccatgcccctgcagcttgttctcaagccgccaaccatggagaaacttccggtgttggagggcgaagagctcgaagttctaaaggtacgttaattgatcacgtgatgtggaagacaatagttggattaatctcaaagtgatgctgatgaataaaccagagaagtggatgatttgatcatgtaccaggatgggagatgctcaccaagtgatcgtcatctaacaacactgacttagtgttatcccaggcaagccccggtgcatttgccaccttccttgtgtttacaaaattttatcacttatatgctgcattaggtgataggagttgagtgattaaacacttgatgcattaccatccttgaaaggttgattaccacaccttgtcacccgttttataaaagctagagatgcttagtcttgctgatagattaagaaacatatttttgatctatgactcatgtttttacaaaaaaaataaaatgggcttgggacaatgaaggcatcaagacgttgataaattcattatccaggcatggcccctctgtcaggcgccaaatttttgaaatagtttaaaatgggaccagacgttgagcaggaaaggtcgtccgtctgtgtcgattaaggaccataccgattgttggcctgatgatc

SEQ ID NO: 208258 - DNA, 1811 bp, Zea Mays
cccccaccaactcctctctccccgcaatcccagctgcgtccgctcagatcgctcctcgcaatccatcatcgtgaatcgcgtccgcttcctcccgctctctccatccgcgaatcgtgtccgtggagtcttcgcaatccatcaccgcgaatcgcgtccgcccgcttcctccatctctctctagccgtgagaaaccgcgtccgcttcctcctgctctctccatctgcgaatcgcgtcctgcaatcccagccgcgagaaactgtgtccgcttcctccgctcattccctgctctctccatccacgaatcgtgtccgcttcctcgaatcacgtatgcttccctactccccaaggttttcttcgccctccgtcgggatccacagattccccatccaccctccgctcggatcgacagacgcaatccctgctctctcctcgccctccgcccggatcaccaggtcatacttatggcgtcgccaccacaaccaaagcagctggtgctcgctatgtcatccacggattcggacctggctgccttggacctccacaccggcgtggaggactcatccatggatctaggcccagctgcctgggacctccgcacccggtgtggaggacatttgcctccgccccttcgcttcccaccctcggtcgctcgcctcagttgtcgaccgcttcctcgccttcgctcaggcttttcccgctggccacaactctaggaccatccacatctactactgggacaaggtgtgttgggttgtggccactagccggcgtcagctaggaacaacaacctgtagtaggtgtcaattgaggcgacattgtgtcaggaagcagaagacatgcacgcaattggtgaatgacaactttgcatctgtgatttggcccaagaaaatttgttcttaacacttggtgggaataaaaagtaacagagagatagtgatggatgggcaggagaggcgagggtcgcctcaccgtagatggaacccacgaggcgcgcaaggagtggcgccggcgcgccttctctggctccttgctccgctccaatggcatcaatgtccatgtgccacatcatggagcggatgcagcacaattggctagtaccaagaagcagaagaagaaaacacctgggagcagtaatgccaaccatggtcatccaagacataagcgtcggcacgcagacaagtaaaacattgatcaaccatggtcattatttttttataactgatacaaccattattttccctatactatagatccatttcccctttaggtttgggaataatacaaaatattgttgtgtaagatagtgtttggctttccatggcattttgagttttcgacttgagtatttgattttgcatcgtgcagatcatggaagtttgaccatgttacctttcactgagtttgttgtctggtataggctccatcacctatcatcgccgaaccttattgtgtatctacagttctacacactagaatattgtgtttctgcccccaatttttttgattgatcttttagtgatatatatctctactactctatatgttcttagagtgggcgtccaccatctctcgtgaagcctgcccccgccggctctcctcgcgtccaaggaagattgatcttgtagattggctagatagagattttagatgatctgaatctaactgttttcactacattaagttctgaatctaaccgttttcactatattattgttgtttgccttcgcatttggtttcaaaaatgttggcgatatctgctgcgtttacatagcacacaagtttttgttgattattggtatactaagatattt

SEQ ID NO: 208259 - DNA, 1357 bp, Zea Mays
gtcatgagcaccactgacacgctggcccaactcgctttctgatctccaaaataaagggtaatccccgaggaaccgattcgaaacaatcaaatagctccaggactctaacccaaagaactgagcgagccaaatcgtcgaacagatggaagccatggacacggaaccgtcctcccctgcgccggcagcagccgtcaatctgcctcctccgccgtaccatcactgcccagctccagctgatgaggttgcagcgacgccgcagccgaagccgaagcaatcaaccgcggggccggggctgaggacaccctcgccgccgccgtcggttcaggtgtccgggtactctctacacgacctgctgctgctgtccccgccacccccgagctcacgccgccaccggtcgagtacgcgtggggcagctgggacgagcgtggacgagagcctggagattgttgcggtggcggggacgcccacgcctccaaggcgcaggcggcgcgggggcgcggagcagtgtgtgacgcccgttctggcgtccccgaggaatgcacgacgggcgagacggaggctggagaaggacgtcgaggcggttgaggacgccggcaggagggcccgcaggaggaagtccacaagggctgcgccgaaagctgcagcggctgccgacaaggcagaggcggcgctgaacgaggaggatataaccatggctgtggtcccggcttgtcctgctgctacctgcggtctctgggaaaggatcgttgaattggtgatgtggaggaatatggctaaatcagcactttggttcggatttggatcgatgttcttctcatgctcattgtcaagagacgtcaccttcagcccaatctcagctctctgtcacctcggcgttatgatcttaggcttagctttcttcaaagattctgttcctcagaggccgcaggtggagaatgagagaaggttccggttgactgaagaagacatgcttcgtgcttctcaagctgtgcttccgtttgcaaactccatgatatcgacggcgcaagtgattttctctggtgaaccttcaatgactctcaaagtattgcctttacttctgttcggtgctaaatatgggggccttgttacagtgtggaggcttttagctgcaggatttttcatcagttttacagtcccaaagctatatagctgttattcaagtcgtattcataaaagagttgagattttgagagatcaggctctagaagcgtggaagtcttgcccacgcaaaaaacttgttgcagctattatagtaacaatgttctggaacatgttcagtgtgaagacacgcgtcatggcaggattgcacgaccaaaatgttattggtgtagcgctg

SEQ ID NO: 208260 - DNA, 2030 bp, Zea Mays
atgggtataatgcgagtcgcggacgatgtggaggccaggttggtggtcggggcaggtggcggcggcgggaccgccaccaccacgacggagccgcttctccgccactgccacggcggccgcaaggaggaggacgaccaggggtctaagatccgggacagcccggaggcggagggggcgtccgactgcgggaggacggacggaggctcgctgcggatggtccttgtctccaccgccgtcgccgtctgcggctccttcgagttcggcacctgcctatatacggccttttcttcgtcactaccgtacttttccttctgttctgcgagttgtcgccatttgttttactaccgtcaatctgtcggctactctgcgccgacgcagtcagggattgtagaggaagtcgggctatctatctccgagtttgcaatttttggatctgtactgacagtcggagcaatggttggtgccgttactagtgggcgcttggctgattttctcggacgaaaaatgaccatgcggatatcagctactatttgtatattcggttggctctccatacatctggccaagagcgctatcatgctctactttgggagaaccttgctgggtttcagcactggagttctttcttatgtggtgcctgtgttcatagctgaaatagcgccaaagaatctccgcgggggtctcgcaacgtcaaaccagctcttgatctgttccggaagctcagctacctacatcataggagccctggttgcatggcgcaatttggtacttgttggtttagtgccttgtgtcctcttgctagctgggcttttcttcattccagagtcgccaagatggctggccaatgtcggaagggaaaaggaattccacgcctcattgcaaaagctgcgtggagaggatgctgacgtatcagaagaggcaattgagatcaaagagtatattgaatcactctatagccttccaaaggccaggcttcgagacttatttctgagcaaaaatatatatgcagtcattgtgggcgttggcttgatggtttttcagcaactcggagggataaatggtgttggcttctatgcaagttatatcttcagttctgctggattttctggaaaacttggaaccatcttgattggcattattcagattccaatcacattgtttggggccatactcatggataggagtggaagaagggttctcctgatggtctctgcatctggaacatttttgggctgcttcctcacaggagtatcattctatctgaaggcacaaggactgttctcagaatgggttcccacactggctctttccggcatactggtttacatcggggcatactcaattggaatgggtcctgtcccttgggttgtcatgtctgagatattctcaatcaacatgaaagcaactggtgggagcttggtgacccttgttagctggctgggctccttcgcgatttcttactcgttcagcttccttatggactggagctctgcaggtaccttcttcatgttctcttcagccagcttgatcactgtactcttcgtggcgaagctggtccctgaaaccaaaggaaggacactagaggagatccaggactcactaaacaccagaagatagtaatgaatttacttcacactacagaataattaattctaagatggaaaaatgggaatttacaggacacagcagaataattccaagatggaaaacgaatgtaccgtcagacctctgctcatcgatagatatgtatacaagaaacaatatatataattctcacgtcctcccgcttcccctccctttctctcccgcaccacctccgtgtaatacgtagtgtactgtgtaccctatgtaggttaaggaatgctgcagattcagattacgcattatgtaccgtgcccctccagattgtttgagcatgagcagcgacagaaccgacattatgtttatgtaccatgtccctctagatcaaccagcagtacattttttatattcaggatcaacatttatgtatcatgtttttttagggaaaa

SEQ ID NO: 208261 - DNA, 2148 bp, Zea Mays
ctctttcgcaccgactctcatgtggcccccgcgccgggcgtgttgtgtataaatacgtatcgcactgccccgtccactcatcgttagaggctcagagtcagaggctcagagcccagcccaggccggagaccactgtccactgcgtctgtctctgtcccgagctcccgatccatccatctgcatcgtgggaacaagaagaacaatgggtataatgcgagtcgcggacgatgtggaggccaggttggtggtcggggcaggtggcggcggcgggaccgccaccaccacgacggagccgcttctccgccactgccacggcggccgcaaggaggaggacgaccaggggtctaagatccgggacagcccggaggcggagggggcgtccgactgcgggaggacggacggaggctcgctgcggatggtccttgtctccaccgccgtcgccgtctgcggctccttcgagttcggcacctgcgtcggctactctgcgccgacgcagtcagggattgtagaggaagtcgggctatctatctccgagtttgcaatttttggatctgtactgacagtcggagcaatggttggtgccgttactagtgggcgcttggctgattttctcggacgaaaaatgaccatgcggatatcagctactatttgtatattcggttggctctccatacatctggccaagagcgctatcatgctctactttgggagaaccttgctgggtttcagcactggagttctttcttatgtggtgcctgtgttcatagctgaaatagcgccaaagaatctccgcgggggtctcgcaacgtcaaaccagctcttgatctgttccggaagctcagctacctacatcataggagccctggttgcatggcgcaatttggtacttgttggtttagtgccttgtgtcctcttgctagctgggcttttcttcattccagagtcgccaagatggctggccaatgtcggaagggaaaaggaattccacgcctcattgcaaaagctgcgtggagaggatgctgacgtatcagaagaggcaattgagatcaaagagtatattgaatcactctatagccttccaaaggccaggcttcgagacttatttctgagcaaaaatatatatgcagtcattgtgggcgttggcttgatggtttttcagcaactcggagggataaatggtgttggcttctatgcaagttatatcttcagttctgctggattttctggaaaacttggaaccatcttgattggcattattcagattccaatcacattgtttggggccatactcatggataggagtggaagaagggttctcctgatggtctctgcatctggaacatttttgggctgcttcctcacaggagtatcattctatctgaaggcacaaggactgttctcagaatgggttcccacactggctctttccggcatactggtttacatcggggcatactcaattggaatgggtcctgtcccttgggttgtcatgtctgagatattctcaatcaacatgaaagcaactggtgggagcttggtgacccttgttagctggctgggctccttcgcgatttcttactcgttcagcttccttatggactggagctctgcaggtaccttcttcatgttctcttcagccagcttgatcactgtactcttcgtggcgaagctggtccctgaaaccaaaggaaggacactagaggagatccaggactcactaaacaccagaagatagtaatgaatttacttcacactacagaataattaattctaagatggaaaaatgggaatttacaggacacagcagaataattccaagatggaaaacgaatgtaccgtcagacctctgctcatcgatagatatgtatacaagaaacaatatatataattctcacgtcctcccgcttcccctccctttctctcccgcaccacctccgtgtaatacgtagtgtactgtgtaccctatgtaggttaaggaatgctgcagattcagattacgcattatgtaccgtgcccctccagattgtttgagcatgagcagcgacagaaccgacattatgtttatgtaccatgtccctctagatcaaccagcagtacattttttatattcaggatcaacatttatgtatcatgtttttttagggaaaa

SEQ ID NO: 208262 - DNA, 1344 bp, Zea Mays
tataatttaggcaactactgcagttgctctaagaggcgctggcgcggatacagtcacaccttgtctcctcggctcctggctcctgttggacgccactcgccaccccactttccaaaccagaccacagccgaaaacccccgatcatgccgccgccggtcgaaccctacatcccttcgttcaccgccggcttgtccgcgcacgaggccgccgatgccgacaaagactacctctacttcctccgccacgtccgcctcgacggagacgcctacacggtcgtgattccgtccaaggacggcgcctcctgtcctccccagatcatcaggtacgaacaaccgcactccgatcacaatgccggggcccccgtcgcgggctctgaatgcgggagacaaagggcccatcccccgtcggaggagaactcttgggctacgggtgaggccgccccacacggcgtgaagcgcaaggttccaggcgcgagccccgccggcgaggtccgaagcggtgctgtccgtatggaagaggacaccccgacattggtggcgaagtccgcgtggtatgacttgcaacccgacatcgacgatgactaccgcttcttcctccagaatgctcgcgtggtgaatgacaaattggtgttcaagacggggaactgttcaataactatcggggaccatagtgatgctgaggagcacgacgacaccgaggaggaagagaaagaggaggaaggggaaggggaagaggatgatgaagaagaagcagacgaccttcctgcgtcagggcagtcgggggaggacggtatcggtatggaggaggccggtcctgtgtcagagacagaggacggtgttgactcggatttgccaattccaaaggtgaaggatgaagtggtgagcaaaaatgaagaggatgatgtggggcctggatcagatttgcatattactaacgatcaggtgtattgtgagacggagaaggtgaaagaaggaggagggaatacgttgaatgatctagccaggagaacaacagatttggatcctttggacaagaaggaagcaagctcaagcaagggacatctggccatgcctctcaatccttcggaattacaaggcgttatatggcccccacatatcaatgagaggccaaattcagtttttaaagagaagttgattgagtttctcatcaaaccatttacacaggaagaatatgataggtattttgctctggctagtgatcgcattccaatggtcaaagaacgaaggacccgtaatacggtggcatactatcactggacgcatgagatgagcaagtcatactttgataggtacccaggagctctgccttgcagaagcaagaaac

SEQ ID NO: 208263 - DNA, 2677 bp, Zea Mays
ctcggctcctggctcctgttggacgccactcgccaccccactttccaaaccagaccacagccgaaaacccccgatcatgccgccgccggtcgaaccctacatcccttcgttcaccgccggcttgtccgcgcacgaggccgccgatgccgacaaagactacctctacttcctccgccacgtccgcctcgacggagacgcctacacggtcgtgattccgtccaaggacggcgcctcctgtcctccccagatcatcaggtacgaacaaccgcactccgatcacaatgccggggcccccgtcgcgggctctgaatgcgggagacaaagggcccatcccccgtcggaggagaactcttgggctacgggtgaggccgccccacacggcgtgaagcgcaaggttccaggcgcgagccccgccggcgaggtccgaagcggtgctgtccgtatggaagaggacaccccgacattggtggcgaagtccgcgtggtatgacttgcaacccgacatcgacgatgactaccgcttcttcctccagaatgctcgcgtggtgaatgacaaattggtgttcaagacggggaactgttcaataactatcggggaccatagtgatgctgaggagcacgacgacaccgaggaggaagagaaagaggaggaaggggaaggggaagaggatgatgaagaagaagcagacgaccttcctgcgtcagggcagtcgggggaggacggtatcggtatggaggaggccggtcctgtgtcagagacagaggacggtgttgactcggatttgccaattccaaaggtctttgagctagtttagcaaaaaatcgtgctatttccgtttcttgtgaagttcgttctaaactcctgataccaaccctttctttgccttgtgacttttgtaaaggaaatttagatctataccattaaaagattacaactttagatgtatatcattgatatctcacttacacgtgggatccacataagtcaatgacatgtggatatctaaagttgtaatcttttaatggtatagatccaattattcctttttgtaacacgtcttgcttataaagggagaaaattggatttctgccattatgaagcttaggattcgctcaaatgccactatgtgaacacgcttcgctaaaaaaccattatgaatcatatgcttacagacaaaatgccatttagggggttatctgaaacataaacttcttttactaaactgactggatgcttgtgcccctggcgacataatcgctgtcgctcatggatcggtccggttccagctgccaggttttcttcaggctctgctctatgcggttgggttagggaaaggagcgatacccactgctgctgcggtgaattgggtgctgaaagatggcctcgggtaccttagcaagatcatgttgtccaaattcggacgccattttgatgttaaccccaaagggtggcgactgtttgctgattttctggagattctgactccagtgttccctcacctgtttgttccagttggggtggctgctggtgctggccgctcagcagcttctttgatacaggctaagacttactttagtattgattatcaatattctatagtctgcatttatggaaatctatgctcattatagcgcaacataggtgttctgccttgtgtatctcggtatcctcataattggtagccatatgaacatgagacttatgatatggccactagaagatgtatgactatctgaagattttcatagcatgtttatactttatactcacctgagcgacggcgattatggccaggggcacaagcgtccagtcagtttagtaaaagaagtttatgtttcaaataaccctctaaatggtattttgtctgtaagcatatgattgataatggtctcttagcgaagcgtgttcacataatgacatttgagcgaatcctaagtttcataatggcagaaatccaattttcttttgtaaaggtgaaggatgaagtggtgagcaaaaatgaagaggatgatgtggggcctggatcagatttgcatattactaacgatcaggtgtattgtgagacggagaaggtgaaagaaggaggagggaatacgttgaatgatctagccaggagaacaacagatttggatcctttggacaagaaggaagcaagctcaagcaagggacatctggccatgcctctcaatccttcggaattacaaggcgttatatggcccccacatatcaatgagaggccaaattcagtttttaaagagaagttgattgagtttctcatcaaaccatttacacaggaagaatatgataggtattttgctctggctagtgatcgcattccaatggtcaaagaacgaaggacccgtaatacggtggcatactatcactggacgcatgagatgagcaagtcatactttgataggtacccagatcttgctcagcaattcagtctccaacgcaataactatacaaatggcttggctcttttgcgtgggcttttcttctggttgcagaacattgagctagaagaccaattcagaccatggagcgatgaatttaaaaagtaccgagttgtcatggaatgtttgtagagggtttacccatactagccattactccatccagttcagaaagtcgtttggtaagttagcgcggtcgtctctgtgcaactctctgacct

SEQ ID NO: 208264 - DNA, 2651 bp, Zea Mays
ctcggctcctggctcctgttggacgccactcgccaccccactttccaaaccagaccacagccgaaaacccccgatcatgccgccgccggtcgaaccctacatcccttcgttcaccgccggcttgtccgcgcacgaggccgccgatgccgacaaagactacctctacttcctccgccacgtccgcctcgacggagacgcctacacggtcgtgattccgtccaaggacggcgcctcctgtcctccccagatcatcaggtacgaacaaccgcactccgatcacaatgccggggcccccgtcgcgggctctgaatgcgggagacaaagggcccatcccccgtcggaggagaactcttgggctacgggtgaggccgccccacacggcgtgaagcgcaaggttccaggcgcgagccccgccggcgaggtccgaagcggtgctgtccgtatggaagaggacaccccgacattggtggcgaagtccgcgtggtatgacttgcaacccgacatcgacgatgactaccgcttcttcctccagaatgctcgcgtggtgaatgacaaattggtgttcaagacggggaactgttcaataactatcggggaccatagtgatgctgaggagcacgacgacaccgaggaggaagagaaagaggaggaaggggaaggggaagaggatgatgaagaagaagcagacgaccttcctgcgtcagggcagtcgggggaggacggtatcggtatggaggaggccggtcctgtgtcagagacagaggacggtgttgactcggatttgccaattccaaaggtctttgagctagtttagcaaaaaatcgtgctatttccgtttcttgtgaagttcgttctaaactcctgataccaaccctttctttgccttgtgacttttgtaaaggaaatttagatctataccattaaaagattacaactttagatgtatatcattgatatctcacttacacgtgggatccacataagtcaatgacatgtggatatctaaagttgtaatcttttaatggtatagatccaattattcctttttgtaacacgtcttgcttataaagggagaaaattggatttctgccattatgaagcttaggattcgctcaaatgccactatgtgaacacgcttcgctaaaaaaccattatgaatcatatgcttacagacaaaatgccatttagggggttatctgaaacataaacttcttttactaaactgactggatgcttgtgcccctggcgacataatcgctgtcgctcatggatcggtccggttccagctgccaggttttcttcaggctctgctctatgcggttgggttagggaaaggagcgatacccactgctgctgcggtgaattgggtgctgaaagatggcctcgggtaccttagcaagatcatgttgtccaaattcggacgccattttgatgttaaccccaaagggtggcgactgtttgctgattttctggagattctgactccagtgttccctcacctgtttgttccagttggggtggctgctggtgctggccgctcagcagcttctttgatacaggctaagacttactttagtattgattatcaatattctatagtctgcatttatggaaatctatgctcattatagcgcaacataggtgttctgccttgtgtatctcggtatcctcataattggtagccatatgaacatgagacttatgatatggccactagaagatgtatgactatctgaagattttcatagcatgtttatactttatactcacctgagcgacggcgattatggccaggggcacaagcgtccagtcagtttagtaaaagaagtttatgtttcaaataaccctctaaatggtattttgtctgtaagcatatgattgataatggtctcttagcgaagcgtgttcacataatgacatttgagcgaatcctaagtttcataatggcagaaatccaattttcttttgtaaaggtgaaggatgaagtggtgagcaaaaatgaagaggatgatgtggggcctggatcagatttgcatattactaacgatcaggtgtattgtgagacggagaaggtgaaagaaggaggagggaatacgttgaatgatctagccaggagaacaacagatttggatcctttggacaagaaggaagcaagctcaagcaagggacatctggccatgcctctcaatccttcggaattacaaggcgttatatggcccccacatatcaatgagaggccaaattcagtttttaaagagaagttgattgagtttctcatcaaaccatttacacaggaagaatatgataggtattttgctctggctagtgatcgcattccaatggtcaaagaacgaaggacccgtaatacggtggcatactatcactggacgcatgagatgagcaagtcatactttgataggtacccagatcttgctcagcaattcagtctccaacgcaataactatacaaatggcttggctcttttgcgtgggcttttcttctggttgcagaccatggagcgatgaatttaaaaagtaccgagttgtcatggaatgtttgtagagggtttacccatactagccattactccatccagttcagaaagtcgtttggtaagttagcgcggtcgtctctgtgcaactctctgacct

SEQ ID NO: 208265 - DNA, 1305 bp, Zea Mays
ctcctggctcctgttggacgccactcgccaccccactttccaaaccagaccacagccgaaaacccccgatcatgccgccgccggtcgaaccctacatcccttcgttcaccgccggcttgtccgcgcacgaggccgccgatgccgacaaagactacctctacttcctccgccacgtccgcctcgacggagacgcctacacggtcgtgattccgtccaaggacggcgcctcctgtcctccccagatcatcaggtacgaacaaccgcactccgatcacaatgccggggcccccgtcgcgggctctgaatgcgggagacaaagggcccatcccccgtcggaggagaactcttgggctacgggtgaggccgccccacacggcgtgaagcgcaaggttccaggcgcgagccccgccggcgaggtccgaagcggtgctgtccgtatggaagaggacaccccgacattggtggcgaagtccgcgtggtatgacttgcaacccgacatcgacgatgactaccgcttcttcctccagaatgctcgcgtggtgaatgacaaattggtgttcaagacggggaactgttcaataactatcggggaccatagtgatgctgaggagcacgacgacaccgaggaggaagagaaagaggaggaaggggaaggggaagaggatgatgaagaagaagcagacgaccttcctgcgtcagggcagtcgggggaggacggtatcggtatggaggaggccggtcctgtgtcagagacagaggacggtgttgactcggatttgccaattccaaaggtgaaggatgaagtggtgagcaaaaatgaagaggatgatgtggggcctggatcagatttgcatattactaacgatcaggtgtattgtgagacggagaaggtgaaagaaggaggagggaatacgttgaatgatctagccaggagaacaacagatttggatcctttggacaagaaggaagcaagctcaagcaagggacatctggccatgcctctcaatccttcggaattacaaggcgttatatggcccccacatatcaatgagaggccaaattcagtttttaaagagaagttgattgagtttctcatcaaaccatttacacaggaagaatatgataggtattttgctctggctagtgatcgcattccaatggtcaaagaacgaaggacccgtaatacggtggcatactatcactggacgcatgagatgagcaagtcatactttgataggtacccagagtgcgcatattgtattcttcagagttctagtacctcatatgcttggaacttggagcact

SEQ ID NO: 208266 - DNA, 1937 bp, Zea Mays
ggctgcaacgctcccttcaccagccgcaggagcatcgccgctgctgctccactgcaacgccgccccttccgtctccttccgccaccgcaggcgttggcagcggccggctgctacacggcacgatggccgcgtcgcgcagctgttgctgccggtcgcgcgccgctggctgccggcagcagcgcctcccggagtcaatggcgcgcgcggaggcattgcggcgtcggggtcaggggcaggggcagtggctggggaggcgccgtacagaggcaacgaggggcaggggtcgctgtggatggtcttcctcgccacggcggtggtcgtgtgcggctccttcgagttcggcacctgtgtcgggtattctgcgccggctcaagctggaattgtgagcgacattgggttgtccaactccgagtatggtgtctttggatctgttttgacaattggagcaatgattggtgctgtgactagcggcagcctggcagacattcttggacgcaaaatgaccatgcgatttgcagcagttgtaggcatttttggctggcttactgtatattttgccaaggatgctatgatgctctatgctggaagagttttgctggggtattgtactggagttctttcctatgtggtgcctgtgtatatatctgaaatagcaccaaagggtatccgaggaggccttgcaacctcaaaccagttattcatctgttcagggtgttcggctgcttacattattggagcacttgtttcatggcgctgtttggttgtagtaggattgataccttgtgctgtcctacttgttgggcttttcttcattccagagtctccaaggtggctggccaacatagggaaagaaagagaatttcatgcttcattacaggagtttaggggggaagattctgacatttctgaagaggctactgagatcaaagttatttattctgaacatagcttccatttatcaaacaatgtagaccgatattcaaactaaacattctgtccaggattatataaaatcagttcgtcgattgcctaaggccaagattcaagatttatttcagagaaaaaatatgtatgcagtcacggtgggtgttggcctgatgatttttcagcaactgggaggaattaatgccttaggtttctatacaagctatattttttcctctgcaggtatccaagctagataaattttgtcctcttaaaaaacgaggtatctacagctctttctaaaaacttcaggattttctggaaaacttgggaccaccttgattggcgttattcagattccaatcacattctttggggcccttctgatggataggagtggaagaagagcccttcttttggcacaaggactgtgcacacagctggttcctactttggctctttgtggcatactggtatactatgcggcgtactcagttggaatgggcccagttccttgggttatcatgtcagagatattctcaatcgacatgaaagcaatcgccggagggtttgtaaccctggccagttggattggttcctttgcgatttcatactcattcaacttcctcatggattggaaccccgcaggcacattctttctgttctctgcagcgagcctggtcactgtgctgttcgtggcaaagctcgtgcctgaaactaaaggaagaacactagaagagatccaaacattgctcaaagccacatgagtggcttccattcgctcagtaggtaaagatccagttaaaaaaatgctgtaaatattcgcctcttgtaaattattgtgcatggcaggtgaatgatttcgcctcttgtcgattctcctatattttagtctctttgatatatgttatttaggacaaagatacggtctacaacatatgcttatcttcaactatttcattttctgagttttctctctgctactatacatcatcagtttcgacggttgtctt

SEQ ID NO: 208267 - DNA, 1892 bp, Zea Mays
cagacaccctctctgttccgccaggtatggctggattggctgcaacgctcccttcaccagccgcaggagcatcgccgctgctgctccactgcaacgccgccccttccgtctccttccgccaccgcaggcgttggcagcggccggctgctacacggcacgatggccgcgtcgcgcagctgttgctgccggtcgcgcgccgctggctgccggcagcagcgcctcccggagtcaatggcgcgcgcggaggcattgcggcgtcggggtcaggggcaggggcagtggctggggaggcgccgtacagaggcaacgaggggcaggggtcgctgtggatggtcttcctcgccacggcggtggtcgtgtgcggctccttcgagttcggcacctgtgtcgggtattctgcgccggctcaagctggaattgtgagcgacattgggttgtccaactccgagtatggtgtctttggatctgttttgacaattggagcaatgattggtgctgtgactagcggcagcctggcagacattcttggacgcaaaatgaccatgcgatttgcagcagttgtaggcatttttggctggcttactgtatattttgccaaggatgctatgatgctctatgctggaagagttttgctggggtattgtactggagttctttcctatgtggtgcctgtgtatatatctgaaatagcaccaaagggtatccgaggaggccttgcaacctcaaaccagttattcatctgttcagggtgttcggctgcttacattattggagcacttgtttcatggcgctgtttggttgtagtaggattgataccttgtgctgtcctacttgttgggcttttcttcattccagagtctccaaggtggctggccaacatagggaaagaaagagaatttcatgcttcattacaggagtttaggggggaagattctgacatttctgaagaggctactgagatcaaagattatataaaatcagttcgtcgattgcctaaggccaagattcaagatttatttcagagaaaaaatatgtatgcagtcacggtgggtgttggcctgatgatttttcagcaactgggaggaattaatgccttaggtttctatacaagctatattttttcctctgcaggattttctggaaaacttgggaccaccttgattggcgttattcagattccaatcacattctttggggcccttctgatggataggagtggaagaagagcccttcttttggtctcttcatctggaacatttcttggctgctttctgactggactatcattctattttaaggcacaaggactgtgcacacagctggttcctactttggctctttgtggcatactggtatactatgcggcgtactcagttggaatgggcccagttccttgggttatcatgtcagagatattctcaatcgacatgaaagcaatcgccggagggtttgtaaccctggccagttggattggttcctttgcgatttcatactcattcaacttcctcatggattggaaccccgcaggcacattctttctgttctctgcagcgagcctggtcactgtgctgttcgtggcaaagctcgtgcctgaaactaaaggaagaacactagaagagatccaaacattgctcaaagccacatgagtggcttccattcgctcagtaggtaaagatccagttaaaaaaatgctgtaaatattcgcctcttgtaaattattgtgcatggcaggtgaatgatttcgcctcttgtcgattctcctatattttagtctctttgatatatgttatttaggacaaagatacggtctacaacatatgcttatcttcaactatttcattttctgagttttctctctgctactatacatcatcagtttcgacggttgtctt

SEQ ID NO: 208268 - DNA, 1207 bp, Zea Mays
cccttatccacacacacaaaaaagtacgcgacacaagccacgctctccgcttgtggctaagctgctgcacgcgcggaacgacaaaaatccagcactagccaaagcacaggcgaagaagcaggcgagaggccaccacaaacatggcgaccacggcgtttctacccccggccaagctgccgctgcaggggcgtcggttcgctagccccaaaacggcgggacgtatcagcgtcagggtccctccggcgcgagcgcagcaagagcagcaggtgaaggaggaggaggccgaggtggcgagcgtgccgccgccacaggacgcggagaagcaggcgaggaagggggacgcgcagtccctgccgcggcagcctttggcggagagcaagaacatgagccgcgagtacggcgggcagtggctgagcagcaccacgcggcacgtccgcatctacgctgcgtacatcgacccggtgaccaacgcgttcgaccagacgcagatggacaagctgacgctcatgctcgacccccaggacgagttcgcctggaccgacgaggcctgccagatggtcttcaacgagttccaggacctcgtcgatcactacgagggggctgagctgtcggagtacacacttcggttgatcgggtcagaccttgagcactacatccgcaaactgctgtacgacggggtgatcaagtacaacatgaggtccagagtcctcaatttcagcatgggcaagcctcgcatcaagttcaacagcaaccagataccagaaaagatatagaatgtacttatccaacgcccttaaaagaatggtttctctccattcgattaccgagcaagatgtatactctgcagtcccagatacgatccagagcattccagaattcatattacgcagatgcaaagccatacaccgattctgttggcagaattttgtcacccctgcacagtaataaccacataacgagagtctgggcaaaataagggtttgctcgagtttagataccccttctgtttctagggcactcgaattgggttacagtacacaataccatagtttctgctaatagatacgtatcaccgaataccacatgaggtcagagagttgcacagagacgaccgcgctaacttaccaaacgactttctgaactggatggagtaatggctagtatggactgatcatgctgagctacataggcaaactgactgtctcca

SEQ ID NO: 208269 - DNA, 612 bp, Zea Mays
cccttatccacacacacaaaaaagtacgcgacacaagccacgctctccgcttgtggctaagctgctgcacgcgcggaacgacaaaaatccagcactagccaaagcacaggcgaagaagcaggcgagaggccaccacaaacatggcgaccacggcgtttctacccccggccaagctgccgctgcaggggcgtcggttcgctagccccaaaacggcgggacgtatcagcgtcagggtccctccggcgcgagcgcagcaagagcagcaggtgaaggaggaggaggccgaggtggcgagcgtgccgccgccacaggacgcggagaagcaggcgaggaagggggacgcgcagtccctgccgcggcagcctttggcggagagcaagaacatgagccgcgagtacggcgggcagtggctgagcagcaccacgcggcacgtccgcatctacgctgcgtacatcgacccggtgaccaacgcgttcgaccagacgcagatggacaagctgacgctcatgctcgacccccaggacgagttcgcctggaccgacgaggcctgccagatggtcttcaacgagttccaggacctcgtcgatcactacgagctgagctcgtttctgc

SEQ ID NO: 208270 - DNA, 2639 bp, Zea Mays
cttgctcgtcgcaccgctactattctaattttcaagagccatactccgatagttttctcttcttggtttcggcaaagggaacgaaggcttacctcaaaggtaacccatggagaaagaagagcagcaggccaatgattataccgacgaggacactgattacactgatgatgaggaggaggactacaacgacgacgaggactacactccagagcccgagacggcgtccaaacgccagaagcgccacaccctggagcagattcgggaactcagagctgcataccaacggtgtgaccacccagatgcgccgacacgccgcgcgctcggcgcaaagattggcctggagggcaggcaggtgcagtactggttccagaaccaacgctcccagacgcaggcgaaggccctggcgcagaacaacagggtggtccagcaggagaacgccgcgctgatggccgagaacgcgtcgctccggcacgccatactgaccgggtcctgcctcgcatgcggcggcgcgacgacggcggcggcgcccgccgagctgccgccggagagcaggcgcctggtggcggagaacgcgcggctcaggggcgagtacgcgcgcgccaccgcgctgctcaaccagatcctgctctcggcgccggcgcccccaggcccagcagcagcggcagtcgtcgtctcctccagctccgtcgcccgccccgtggccgaccgcgccgctcggctccgcggccacgcggaggccgccatggaccagttcctgctgctcgccaccaagggggagccgctgtggctgcccaccacccccgacggggaggcgctcaactaccagctggggtacaagcacaagaaagcactcccggtgcaccacgggctctgcccggacgagttcgtcatggaggcctccagggccactggcgtcgtcagagcctctgccacctacctcgtcgccacgcttacagacgcgaggcgctggtccgagatgttccccagcgtcgtggcgagtgtgaccgccaggagggacgcagccatctccggcggcgttttcggctcgcatattcagctgatgaacgcggagctgcaggtgcattcgccgcgtctgctcaaccgcagcatcaacttcttgaggtacaccaagcgggtggcggaggggcggtgggcggtgatggacgtgtccgtggacggcatccttggaccgccaggcagccgcgtcgctgacgccgccgccgccgctgccgctgcaaacggcgtcactcttgtgccggcatggtacacgggctgcaggctgctgccgtccggctgcctcgttgaggacatgcgcaatggctactgcaaggtcacatgggttgtccacgcggagtacgacgagaccaccgtgccaacgatgttcaggccactgttccgctctgggaaggctctcggcgcgcaccgttggctcgcgtcgctgcagaggcagtgcgagttcctcgctgtcctgcactccagccaggtctccagaggcggcgacaacacagcagccgccatttcgtcgatggggaagagaggggtcctggagctggcccagcgcatggtggcggatttctactcggctgtgtctggtcccgtcacccagccgtcgagcagcatcgacgagtggtacggcagcgccggcgccggcgccaggaggaccgacaccgccgtgcgcatggtgacctcgaagaaagccggcaccgtggccgaccttgtgctgagcgccagcaccacggtttggctgccgaacactccgccgcagctcgtgttccgttacctccgcgacgaccagcgccgtggcgagtgggacgccttcttcgccagtagcgcagcggtgacggagctctgctctgtgcccacgggccatctcaatggcaacgctgtctccgtcctctactccaatgttaccgatggaaccgaccgcaagaagacgctgatcctgcaggaggcgtgcacggacgcgtcctgctccatggtggtctacgctccggtcgaagaggattccatgcgcgcggtcatgaacggtggcgaccacgcctccgtcttcctgttgccgtcggggttcgccgtccttccggacggccacggcagggctcgccacgccccgagctcctcctccagcacacccgtcggctgcgacgacaccactgctgggtccctgctcaccgtggcatgtcaggcgctggtgcccggctcatccccgtctgacaaccgcgctgccccaggggccttcgacgacgttggcaagctgctctgtcgtgcactggagaagatcaaggctgccgtcaagaccgacatcgtcaccccagcttgatgcagaagggcgaggcagaagagtcgggcacaatgtcgaacaataatgcttctaccatttgatatttgtcgacaaaataatgacgtttagactcagttatcagcggggcagtaccccatcgtcgttctcgttttcaccgtttttccccccgcgtttgtcatggatttatgtcggtttaataatgtttatatgttaggatggtttgtcatgatgttttcttgtagtgattgggttgttagtacttgttgcttaaaaatttcagtttttctttagtgtgtgcttgtcatttttttcgatcttaacttgtttgatgatattttgc

SEQ ID NO: 208271 - DNA, 2647 bp, Zea Mays
ctcgtcgcaccgctactattctaattttcaagagccatactccgatagttttctcttcttggtttcggcaaagggaacgaaggcttacctcaaagtactactacaaggtaacccatggagaaagaagagcagcaggccaatgattataccgacgaggacactgattacactgatgatgaggaggaggactacaacgacgacgaggactacactccagagcccgagacggcgtccaaacgccagaagcgccacaccctggagcagattcgggaactcagagctgcataccaacggtgtgaccacccagatgcgccgacacgccgcgcgctcggcgcaaagattggcctggagggcaggcaggtgcagtactggttccagaaccaacgctcccagacgcaggcgaaggccctggcgcagaacaacagggtggtccagcaggagaacgccgcgctgatggccgagaacgcgtcgctccggcacgccatactgaccgggtcctgcctcgcatgcggcggcgcgacgacggcggcggcgcccgccgagctgccgccggagagcaggcgcctggtggcggagaacgcgcggctcaggggcgagtacgcgcgcgccaccgcgctgctcaaccagatcctgctctcggcgccggcgcccccaggcccagcagcagcggcagtcgtcgtctcctccagctccgtcgcccgccccgtggccgaccgcgccgctcggctccgcggccacgcggaggccgccatggaccagttcctgctgctcgccaccaagggggagccgctgtggctgcccaccacccccgacggggaggcgctcaactaccagctggggtacaagcacaagaaagcactcccggtgcaccacgggctctgcccggacgagttcgtcatggaggcctccagggccactggcgtcgtcagagcctctgccacctacctcgtcgccacgcttacagacgcgaggcgctggtccgagatgttccccagcgtcgtggcgagtgtgaccgccaggagggacgcagccatctccggcggcgttttcggctcgcatattcagctgatgaacgcggagctgcaggtgcattcgccgcgtctgctcaaccgcagcatcaacttcttgaggtacaccaagcgggtggcggaggggcggtgggcggtgatggacgtgtccgtggacggcatccttggaccgccaggcagccgcgtcgctgacgccgccgccgccgctgccgctgcaaacggcgtcactcttgtgccggcatggtacacgggctgcaggctgctgccgtccggctgcctcgttgaggacatgcgcaatggctactgcaaggtcacatgggttgtccacgcggagtacgacgagaccaccgtgccaacgatgttcaggccactgttccgctctgggaaggctctcggcgcgcaccgttggctcgcgtcgctgcagaggcagtgcgagttcctcgctgtcctgcactccagccaggtctccagaggcggcgacaacacagcagccgccatttcgtcgatggggaagagaggggtcctggagctggcccagcgcatggtggcggatttctactcggctgtgtctggtcccgtcacccagccgtcgagcagcatcgacgagtggtacggcagcgccggcgccggcgccaggaggaccgacaccgccgtgcgcatggtgacctcgaagaaagccggcaccgtggccgaccttgtgctgagcgccagcaccacggtttggctgccgaacactccgccgcagctcgtgttccgttacctccgcgacgaccagcgccgtggcgagtgggacgccttcttcgccagtagcgcagcggtgacggagctctgctctgtgcccacgggccatctcaatggcaacgctgtctccgtcctctactccaatgttaccgatggaaccgaccgcaagaagacgctgatcctgcaggaggcgtgcacggacgcgtcctgctccatggtggtctacgctccggtcgaagaggattccatgcgcgcggtcatgaacggtggcgaccacgcctccgtcttcctgttgccgtcggggttcgccgtccttccggacggccacggcagggctcgccacgccccgagctcctcctccagcacacccgtcggctgcgacgacaccactgctgggtccctgctcaccgtggcatgtcaggcgctggtgcccggctcatccccgtctgacaaccgcgctgccccaggggccttcgacgacgttggcaagctgctctgtcgtgcactggagaagatcaaggctgccgtcaagaccgacatcgtcaccccagcttgatgcagaagggcgaggcagaagagtcgggcacaatgtcgaacaataatgcttctaccatttgatatttgtcgacaaaataatgacgtttagactcagttatcagcggggcagtaccccatcgtcgttctcgttttcaccgtttttccccccgcgtttgtcatggatttatgtcggtttaataatgtttatatgttaggatggtttgtcatgatgttttcttgtagtgattgggttgttagtacttgttgcttaaaaatttcagtttttctttagtgtgtgcttgtcatttttttcgatcttaacttgtttgatgatattttgc

SEQ ID NO: 208272 - DNA, 3225 bp, Zea Mays
ctcacactctgctcatctctgcttcgaacgttcacggagacacgaggctggaggctgcagcgctaaccctagccggcgtcggcggtggcggccagcgggaggggagctgccaaacgcctaaccctaacggctgcaggcggctgggcgcaaggcatccgtggccagcgtgccgcgcgcacgagcggacagttgcggcggcaggggcgcagggcgcgacctcggcgcggtgggcgcgggcgcaccgctgagcaggctgtagggggaggtgggattggattttttttgacgtggaagttggaatactcaagttggaaattctgctcctccactgccgccgccgctcgccacgtgctcgggtctagactcgtcggtttattcgccaggtcttcgttgtgcccttcgccggcgaccagcacgcaccagttactgggtcacgcatgtcgtctgctgctgcggtggacgagatggagctggacggcattgagcggcaccgggataaggagaggagggagaggcataggagggaggagaaggatcacaatggcagtggaagaagggacagggagaaagagaaggacgaccggagaagggacaaggatgatggcaagcatagggatagggatagagatagggagagagacagggataaggatagcaagtacagagaccgggataaggagccagagcgtgaacgtaaccgtgaccgtgaccggggcaaagatcgggagcgggaaccagatcggcagcgtgacaaggaccgtagcaaagaccgggataaagaagcagagcgtgataaggaaagggagcggagggacagggataaggagagaagccgcaatagagacaaggacaaggataggacgcagagggaggatagggatcacgagaagtcaagggtgaagggtcgtggagaagacgaagcagatttatccaagggcgacaagggggttcagaagcagagagttgatgcctcaggggatgctgagcagcccgcagcagatgagctcagagagcgcattgcaagggcaaaggaggaaagattgaaggagaaaaaggaaggagggatactggatggtaatgacggggcttctgagatactgtcttgggtgggaaagagtcgtaaacttgatgaaaaaagacaagctgaaaaggagaaagcattacgtcttgcacgagcactggaagaacaggataatatcttggcagaaaatggcgatgacgatgatgacgataaagaggaagatacacaagtgggagatcacttatctggtgtcaaggtgcttcatggccttgataaggttttggaaggtggtgcagttgtcatgactctcaaagatcagagtattcttgccaatggggatatcaatgaagacgctgacatgcttgagaacattgagattggtgagcagaaacaaagagatgaagcttataaggcttcaaagaagaaaggaacttatgatgacaagttcaacaatgattcatcgtcaaaaaagtcgatactgtcacattatgatgaccaaatggaagatgagggcgtgacccttgatgaaggtggacgtttcactggtgaagcagaaaagaagctggaagagcttcggaaaaggattgaaggtggttatgttcagaaaaagacagaagaccttacttccaccacaaagatatcaacagactattttacccctgatgaaatgcttaaatttaaaaaaccaaagaaaaagaaatccctgaggaagaaggagaagctggatctggatgcacttgaggcagaagcaattgcttctggattgggggccgctgatcgtgggtcgaggaatgatggaaagagacagtctgctagggaggaagaacaagcggctgatgctgaaaagagaagcagtggttatcaaactgccattgcaaaggctgaagaggcatcaagagcattgcgcggggagaaaactgcacctgctaaaccagctgaagaacttgttttcggtgatgattatgaagatctgcagaaatctctagagcaagcaagaaagttggccctaaggaagcaggaagaggcttcagcttctggtcctcgttccatagtcgaactggctactgcaaccaagagccaagaggaaacagaagccacagaaggagattcagaacagaataaggaacacgcaagccagaagacgatgtgtttatggatgaagatgatgatgccatgccttcagataatgttgcaaaagatgacactaatgggttggcagagatggaagaggatgctctgacagaaataccagccaaggtcgaagaggatgaagtcaaaccagatgaggttatacatgaagttgcagtaggaaagggtttagctggtgctttaaagattcttaaggagcgaggaagcctcaacgagggaacagattggggaggcagaacaacagacaagaaaaagagcaagcttataggtgtcgaggatggacctaaagacattcgcattgaaagaatagatgaatttggcagagtgatgacacctaaggaggcattccgtcatctttcgcacaagtttcatggcaaggggcctggtaaaatgaaacaagaaaaacgccagaagaaatatcatgatgagctgaaaaccaagcatatgaaatcttctgacacaccattattggccgcggaaaagatgagagaggctcaatctcgtaatcaaacaccatacctcattttaagtggcaatgcaaaaacaggtcaaacaagtgatagcggcggctatgctaccttggagacagagcaacctgggagcctaacgcccatgcttggggacaaaaaggtcgagcattttttgggcatcaaacgaagtgccaagcctggaagcttacctcctccagtcccaaagaaaccgaagaactgaacctggtggtagcactcagccaacgaagcaggctacaacgcatttactgtgagcagcaatcagcccacaagcttccacggctcaaccccccgccgccgcactagaaatgcaatatcctctgtatttcttctaagctgattacactaacattctggcatgttcgatggggttttgtaattcagtgatatacgtgtgcatccttgatctgccttgaacatgtaagtgatggaactaaatattgttctaacgacacaccgtttccgtttgaataaagtgtagttatgatgtgacggtttaaggttaaagcagctgtgttcaagagctacattcgttctgaaaatggt

SEQ ID NO: 208273 - DNA, 2962 bp, Zea Mays
ctcacactctgctcatctctgcttcgaacgttcacggagacacgaggctggaggctgcagcgctaaccctagccggcgtcggcggtggcggccagcgggaggggagctgccaaacgcctaaccctaacggctgcaggcggctgggcgcaaggcatccgtggccagcgtgccgcgcgcacgagcggacagttgcggcggcaggggcgcagggcgcgacctcggcgcggtgggcgcgggcgcaccgctgagcaggctgtagggggaggtgggattggattttttttgacgtggaagttggaatactcaagttggaaattctgctcctccactgccgccgccgctcgccacgtgctcgggtctagactcgtcggtttattcgccaggtcttcgttgtgcccttcgccggcgaccagcacgcaccagatcggcagcgtgacaaggaccgtagcaaagaccgggataaagaagcagagcgtgataaggaaagggagcggagggacagggataaggagagaagccgcaatagagacaaggacaaggataggacgcagagggaggatagggatcacgagaagtcaagggtgaagggtcgtggagaagacgaagcagatttatccaagggcgacaagggggttcagaagcagagagttgatgcctcaggggatgctgagcagcccgcagcagatgagctcagagagcgcattgcaagggcaaaggaggaaagattgaaggagaaaaaggaaggagggatactggatggtaatgacggggcttctgagatactgtcttgggtgggaaagagtcgtaaacttgatgaaaaaagacaagctgaaaaggagaaagcattacgtcttgcacgagcactggaagaacaggataatatcttggcagaaaatggcgatgacgatgatgacgataaagaggaagatacacaagtgggagatcacttatctggtgtcaaggtgcttcatggccttgataaggttttggaaggtggtgcagttgtcatgactctcaaagatcagagtattcttgccaatggggatatcaatgaagacgctgacatgcttgagaacattgagattggtgagcagaaacaaagagatgaagcttataaggcttcaaagaagaaaggaacttatgatgacaagttcaacaatgattcatcgtcaaaaaagtcgatactgtcacattatgatgaccaaatggaagatgagggcgtgacccttgatgaaggtggacgtttcactggtgaagcagaaaagaagctggaagagcttcggaaaaggattgaaggtggttatgttcagaaaaagacagaagaccttacttccaccacaaagatatcaacagactattttacccctgatgaaatgcttaaatttaaaaaaccaaagaaaaagaaatccctgaggaagaaggagaagctggatctggatgcacttgaggcagaagcaattgcttctggattgggggccgctgatcgtgggtcgaggaatgatggaaagagacagtctgctagggaggaagaacaagcggctgatgctgaaaagagaagcagtggttatcaaactgccattgcaaaggctgaagaggcatcaagagcattgcgcggggagaaaactgcacctgctaaaccagctgaagaacttgttttcggtgatgattatgaagatctgcagaaatctctagagcaagcaagaaagttggccctaaggaagcaggaagaggcttcagcttctggtcctcgttccatagtcgaactggctactgcaaccaagagccaagaggaaacagaagccacagaaggagattcagaacagaataaggttgttatcacagagatggaggaatttgtgtggggactgcaattgaatcaaggaacacgcaagccagaagacgatgtgtttatggatgaagatgatgatgccatgccttcagataatgttgcaaaagatgacactaatgggttggcagagatggaagaggatgctctgacagaaataccagccaaggtcgaagaggatgaagtcaaaccagatgaggttatacatgaagttgcagtaggaaagggtttagctggtgctttaaagattcttaaggagcgaggaagcctcaacgagggaacagattggggaggcagaacaacagacaagaaaaagagcaagcttataggtgtcgaggatggacctaaagacattcgcattgaaagaatagatgaatttggcagagtgatgacacctaaggaggcattccgtcatctttcgcacaagtttcatggcaaggggcctggtaaaatgaaacaagaaaaacgccagaagaaatatcatgatgagctgaaaaccaagcatatgaaatcttctgacacaccattattggccgcggaaaagatgagagaggctcaatctcgtaatcaaacaccatacctcattttaagtggcaatgcaaaaacaggtcaaacaagtgatagcggcggctatgctaccttggagacagagcaacctgggagcctaacgcccatgcttggggacaaaaaggtcgagcattttttgggcatcaaacgaagtgccaagcctggaagcttacctcctccagtcccaaagaaaccgaagaactgaacctggtggtagcactcagccaacgaagcaggctacaacgcatttactgtgagcagcaatcagcccacaagcttccacggctcaaccccccgccgccgcactagaaatgcaatatcctctgtatttcttctaagctgattacactaacattctggcatgttcgatggggttttgtaattcagtgatatacgtgtgcatccttgatctgccttgaacatgtaagtgatggaactaaatattgttctaacgacacaccgtttccgtttgaataaagtgtagttatgatgtgacggtttaaggttaaagcagctgtgttcaagagctacattcgttctgaaaatggt

SEQ ID NO: 208274 - DNA, 2994 bp, Zea Mays
cgcttgacctcttcacttcctgccgcgcgaaaccgagcacccgaaccctagcttaatctatttaggtacgaaaccgagcaccagaaccctagcttaatctatttaggtacgaaaccgagcaccagaaccctaacttttggttactgggtcacgcatgtcgtctgctgctgcggtggacgagatggagctggacggcattgagcggcaccgggataaggagaggagggagaggcataggagggaggagaaggatcacaatggcagtggaagaagggacagggagaaagagaaggacgaccggagaagggacaaggatgatggcaagcatagggatagggatagagatagggagagagacagggataaggatagcaagtacagagaccgggataaggagccagagcgtgaacgtaaccgtgaccgtgaccggggcaaagatcgggagcgggaaccagatcggcagcgtgacaaggaccgtagcaaagaccgggataaagaagcagagcgtgataaggaaagggagcggagggacagggataaggagagaagccgcaatagagacaaggacaaggataggacgcagagggaggatagggatcacgagaagtcaagggtgaagggtcgtggagaagacgaagcagatttatccaagggcgacaagggggttcagaagcagagagttgatgcctcaggggatgctgagcagcccgcagcagatgagctcagagagcgcattgcaagggcaaaggaggaaagattgaaggagaaaaaggaaggagggatactggatggtaatgacggggcttctgagatactgtcttgggtgggaaagagtcgtaaacttgatgaaaaaagacaagctgaaaaggagaaagcattacgtcttgcacgagcactggaagaacaggataatatcttggcagaaaatggcgatgacgatgatgacgataaagaggaagatacacaagtgggagatcacttatctggtgtcaaggtgcttcatggccttgataaggttttggaaggtggtgcagttgtcatgactctcaaagatcagagtattcttgccaatggggatatcaatgaagacgctgacatgcttgagaacattgagattggtgagcagaaacaaagagatgaagcttataaggcttcaaagaagaaaggaacttatgatgacaagttcaacaatgattcatcgtcaaaaaagtcgatactgtcacattatgatgaccaaatggaagatgagggcgtgacccttgatgaaggtggacgtttcactggtgaagcagaaaagaagctggaagagcttcggaaaaggattgaaggtggttatgttcagaaaaagacagaagaccttacttccaccacaaagatatcaacagactattttacccctgatgaaatgcttaaatttaaaaaaccaaagaaaaagaaatccctgaggaagaaggagaagctggatctggatgcacttgaggcagaagcaattgcttctggattgggggccgctgatcgtgggtcgaggaatgatggaaagagacagtctgctagggaggaagaacaagcggctgatgctgaaaagagaagcagtggttatcaaactgccattgcaaaggctgaagaggcatcaagagcattgcgcggggagaaaactgcacctgctaaaccagctgaagaacttgttttcggtgatgattatgaagatctgcagaaatctctagagcaagcaagaaagttggccctaaggaagcaggaagaggcttcagcttctggtcctcgttccatagtcgaactggctactgcaaccaagagccaagaggaaacagaagccacagaaggagattcagaacagaataaggttgttatcacagagatggaggaatttgtgtggggactgcaattgaatcaaggaacacgcaagccagaagacgatgtgtttatggatgaagatgatgatgccatgccttcagataatgttgcaaaagatgacactaatgggttggcagagatggaagaggatgctctgacagaaataccagccaaggtcgaagaggatgaagtcaaaccagatgaggttatacatgaagttgcagtaggaaagggtttagctggtgctttaaagattcttaaggagcgaggaagcctcaacgagggaacagattggggaggcagaacaacagacaagaaaaagagcaagcttataggtgtcgaggatggacctaaagacattcgcattgaaagaatagatgaatttggcagagtgatgacacctaaggaggcattccgtcatctttcgcacaagtttcatggcaaggggcctggtaaaatgaaacaagaaaaacgccagaagaaatatcatgatgagctgaaaaccaagcatatgaaatcttctgacacaccattattggccgcggaaaagatgagagaggctcaatctcgtaatcaaacaccatacctcattttaagtggcaatgcaaaaacaggtcaaacaagtgatagcggcggctatgctaccttggagacagagcaacctgggagcctaacgcccatgcttggggacaaaaaggtcgagcattttttgggcatcaaacgaagtgccaagcctggaagcttacctcctccagtcccaaagaaaccgaagaactgaacctggtggtagcactcagccaacgaagcaggctacaacgcatttactgtgagcagcaatcagcccacaagcttccacggctcaaccccccgccgccgcactagaaatgcaatatcctctgtatttcttctaagctgattacactaacattctggcatgttcgatggggttttgtaattcagtgatatacgtgtgcatccttgatctgccttgaacatgtaagtgatggaactaaatattgttctaacgacacaccgtttccgtttgaataaagtgtagttatgatgtgacggtttaaggttaaagcagctgtgttcaagagctacattcgttctgaaaatggt

SEQ ID NO: 208275 - DNA, 2405 bp, Zea Mays
cctttggtagtggtgacatgctacaactaattagccttaaatgccatgtatttaaatatggatggaatatctgttaaagggcaaaggaggaaagattgaaggagaaaaaggaaggagggatactggatggtaatgacggggcttctgagatactgtcttgggtgggaaagagtcgtaaacttgatgaaaaaagacaagctgaaaaggagaaagcattacgtcttgcacgagcactggaagaacaggataatatcttggcagaaaatggcgatgacgatgatgacgataaagaggaagatacacaagtgggagatcacttatctggtgtcaaggtgcttcatggccttgataaggttttggaaggtggtgcagttgtcatgactctcaaagatcagagtattcttgccaatggggatatcaatgaagacgctgacatgcttgagaacattgagattggtgagcagaaacaaagagatgaagcttataaggcttcaaagaagaaaggaacttatgatgacaagttcaacaatgattcatcgtcaaaaaagtcgatactgtcacattatgatgaccaaatggaagatgaggtaaacattctgtttagcttcatttgcttgcatttcgagatattttgtaattgtattctctttaacttatcagggcgtgacccttgatgaaggtggacgtttcactggtgaagcagaaaagaagctggaagagcttcggaaaaggattgaaggtggttatgttcagaaaaagacagaagaccttacttccaccacaaagatatcaacagactattttacccctgatgaaatgcttaaatttaaaaaaccaaagaaaaagaaatccctgaggaagaaggagaagctggatctggatgcacttgaggcagaagcaattgcttctggattgggggccgctgatcgtgggtcgaggaatgatggaaagagacagtctgctagggaggaagaacaagcggctgatgctgaaaagagaagcagtggttatcaaactgccattgcaaaggctgaagaggcatcaagagcattgcgcggggagaaaactgcacctgctaaaccagctgaagaacttgttttcggtgatgattatgaagatctgcagaaatctctagagcaagcaagaaagttggccctaaggaagcaggaagaggcttcagcttctggtcctcgttccatagtcgaactggctactgcaaccaagagccaagaggaaacagaagccacagaaggagattcagaacagaataaggttgttatcacagagatggaggaatttgtgtggggactgcaattgaatcaaggaacacgcaagccagaagacgatgtgtttatggatgaagatgatgatgccatgccttcagataatgttgcaaaagatgacactaatgggttggcagagatggaagaggatgctctgacagaaataccagccaaggtcgaagaggatgaagtcaaaccagatgaggttatacatgaagttgcagtaggaaagggtttagctggtgctttaaagattcttaaggagcgaggaagcctcaacgagggaacagattggggaggcagaacaacagacaagaaaaagagcaagcttataggtgtcgaggatggacctaaagacattcgcattgaaagaatagatgaatttggcagagtgatgacacctaaggaggcattccgtcatctttcgcacaagtttcatggcaaggggcctggtaaaatgaaacaagaaaaacgccagaagaaatatcatgatgagctgaaaaccaagcatatgaaatcttctgacacaccattattggccgcggaaaagatgagagaggctcaatctcgtaatcaaacaccatacctcattttaagtggcaatgcaaaaacaggtcaaacaagtgatagcggcggctatgctaccttggagacagagcaacctgggagcctaacgcccatgcttggggacaaaaaggtcgagcattttttgggcatcaaacgaagtgccaagcctggaagcttacctcctccagtcccaaagaaaccgaagaactgaacctggtggtagcactcagccaacgaagcaggctacaacgcatttactgtgagcagcaatcagcccacaagcttccacggctcaaccccccgccgccgcactagaaatgcaatatcctctgtatttcttctaagctgattacactaacattctggcatgttcgatggggttttgtaattcagtgatatacgtgtgcatccttgatctgccttgaacatgtaagtgatggaactaaatattgttctaacgacacaccgtttccgtttgaataaagtgtagttatgatgtgacggtttaaggttaaagcagctgtgttcaagagctacattcgttctgaaaatggt

SEQ ID NO: 208276 - DNA, 2711 bp, Zea Mays
cccagccgcatcagcgccaccagcctcattcgtcctcctcgccccatccgcatccgccgccagcagccgaatgcctcacaggccgacctcccgccccatccgcatccgccacatgccacacatgtccaacaccgccagcctcatccgggagccgtgagcaacctcccactccccaccaacgcgccttcgcctcacctcgcgatgcccgagacctgcaatagtcaccgccttcccctgagcggctgagatgcagctccacgcccgtctgcgtccccccaccgcaagagccacgttgtgcctgccgccagccccgacacctccagatgttgcctctatccatcatccgagcttgccgcccccgcccccaaacccagaccccctgcaatcgcgaggaaggggaggacgctgttgcgcgtcgctaagcatcttcgcgcccctcagtgctgctaaggagccctatctatccctgatggcgccccaaccctttgttgaagttgatcttttgaattatggtgtgatagaaggtgatgaatcatgtaaacatttttctgaactaaaagtcttacctccatggatgatcaaagatggcacgaatcttaaaaaggaacaaagaggagagaaaattgagtcacaaaaacttgaaaaatatgaagccagagatgacaagaaacatgactcgaaatatgatcaaagtgtataggaagaatacataaatgcatattatgaggctttgaggaaaaaattggaagaggaagaagcaaaaaagcagaatgtagcatgaaggcaagatttttgtccctgatgctcaaagggaacgccaagttggtaagaaatacaagcacgatgatgatggtgaaggcattgaataggaagagcatcaacctacagttgtaggtaattttgcttactcggatcttttaggttcaaccattttagtttctatattctataactgaaatgcacgtgttcataaaatttgaaattctgcgtatgttaagtttttcccaacctatcttcaaactatataagaattattatctaatataaatagtacattgacaataatgtacacagaaatccatgtatttaatgtgtggacatggtatcatcatgtctgactaaccctttttattttaattgaatgaagttcgtacatgtatgtgaggtattttttattttctttctactataagccttgcttagatactgatctaagagcatctccaagggacaaaccaaaaatcctggaggttctcacatgaatacggtttagataagggataaaccgaggaaaaccacataaaggctgcctcgaacctatgatttggtgacccagtgaaacaaacatctctcactactgcactaggcctgaaattgtttacgagcatcccaagggtcttacttaaattcactctctaaattttaatttgcgagccattttcataaaaatatgtttttataggttttttaccttctaacaatttttatgtatcttgtacgcactctagagaaccaacccactctctattctttatttactgtatgttatttaggtctgctaagcaaaaaattgatattcttcctcaatcttttaccatgtttagataattttggggggttttaggataaagtttgtgaagggcttcacttttttgtttgtaattagcatttaactcaaaagtttcccttgaaattcaagttgattttgagaagtatgaagggatgattgagttcatggagaaggtggtaatacaattgattctatggagctcactggaggagcactaccttttgttagttgcctgcaagaatgtctttggaatccgatctgcttcatggtgcatcttatcctcgattgagtacatggaagaaggttgtgtcaacatggattgtgtcactctcatcgaggactaccataacaagattgaatttgaactcaataagatctatgatggaatcctcaagctctttgcttcccaccttcccccctcactaacagttccaaagtccaaggtcttctacctcaagatgaagggtgattactacagttcaattcatgtgtatcaggtaccttgcggagtttgaaacttgatataggagaaaagatgcagccaagaataccatggtggcacacaaaattgctcggttaatttgcttatccttaaattcacggttctcgtattaaatttgctggctaggacattaacctttttatatgtacaatcgatcatttaattgatgtgtttctaaatgaaccaaacaatgagtggcatgctggcacttgaggggatcagtggcgacaataagaggagggttagcattgccctgcagatactcatgaggcctcgactgctcttcctagacgagcccaccaatggtcttaacaggtacgcgcttgcttctgtttcatgcctatcatatgggtgcgatgcccaagtcacaactgatgcaaccaagaaaacacgcaaaaatgtggagtgcttcggcgttcttcatggcagatgttgcgggggctgtcagctagtaaaattttagagttttatgatcctcatagcctagcatctaaacaaagtattcaaacaataaggtagaccaagcatttgcctctatatggtcaaactaatccacttttccatcaacataggtcctaacgtaaccataacccacaaaaaaaacccttatgacgaacctctacactaaactcaacattg

SEQ ID NO: 208277 - DNA, 3375 bp, Zea Mays
cccagccgcatcagcgccaccagcctcattcgtcctcctcgccccatccgcatccgccgccagcagccgaatgcctcacaggccgacctcccgccccatccgcatccgccacatgccacacatgtccaacaccgccagcctcatccgggagccgtgagcaacctcccactccccaccaacgcgccttcgcctcacctcgcgatgcccgagacctgcaatagtcaccgccttcccctgagcggctgagatgcagctccacgcccgtctgcgtccccccaccgcaagagccacgttgtgcctgccgccagccccgacacctccagatgttgcctctatccatcatccgagcttgccgcccccgcccccaaacccagaccccctgcaatcgcgaggaaggggaggacgctgttgcgcgtcgctaagcatcttcgcgcccctcagtgctgctaaggagccctatctatccctgatggcgccccaaccctttgtaatatctccacctcggccatgggcattgcaaccctcgattcaatctctcctcttcgatctcagtatttaagaatttgaatgagatttaggagcaattgaagccattggacattggttgcacaacttgataaagtgaataatctgcttgcgtctgagtttgggagtctataaacatggggaagagcaaatattggtgcctttgtaattggtgaccctgctacaactatttttttctatgaattcacaagggcaatatggtacaccaatgccatacattggacagacaacaataagacttccatataccttcttggttgtatatcttacatatttatcccaaaatgaacttttaaatcatattaatccattatctgcacataagttctcttcacttccctactacccatcaaaaaaagaaaaacgccttgaattgaattagaagttttcacatttgtaccttttgataaatgatattatggtatctccataaaaaagttctcactaatgcatttatttgtttaacatggagtcaccacaaatgtgcttatcttgttgcactttacattataggcatacctttccttgtacagtgagatatctatttcatttttcaggttgaagttgatcttttgaattatggtgtgatagaaggtgatgaatcatgtaaacatttttctgaactaaaagtcttacctccatggatgatcaaagatggcacgaatcttaaaaaggaacaaagaggagagaaaattgagtcacaaaaacttgaaaaatatgaagccagagatgacaagaaacatgactcgaaatatgatcaaagtgtataggaagaatacataaatgcatattatgaggctttgaggaaaaaattggaagaggaagaagcaaaaaagcagaatgtagcatgaaggcaagatttttgtccctgatgctcaaagggaacgccaagttggtaagaaatacaagcacgatgatgatggtgaaggcattgaataggaagagcatcaacctacagttgtagcatttaactcaaaagtttcccttgaaattcaagttgattttgagaagtatgaagggatgattgagttcatggagaaggtggtaatacaattgattctatggagctcactggaggagcactaccttttgttagttgcctgcaagaatgtctttggaatccgatctgcttcatggtgcatcttatcctcgattgagtacatggaagaaggttgtgtcaacatggattgtgtcactctcatcgaggactaccataacaagattgaatttgaactcaataagatctatgatggaatcctcaagctctttgcttcccaccttcccccctcactaacagttccaaagtccaaggtcttctacctcaagatgaagggtgattactacaggtaccttgcggagtttgaaacttgatataggagaaaagatgcagccaagaataccatggtggcacacaaaattgctcggttaatttgcttatccttaaattcacggttctcgtattaaatttgctggctaggacattaacctttttatatgtacaatcgatcatttaattgatgtgtttctaaatgaaccaaacaatgagtggcatgctggcacttgaggggatcagtggcgacaataagaggagggttagcattgccctgcagatactcatgaggcctcgactgctcttcctagacgagcccaccaatggtcttaacaggcaacataacttctggcaagacacctcttaactgggatttaaggtcaagcattgctctagctgcagcccgtggtgttgagtacatccactcaacgagttcaacggcttcccacggtaacatcaagtcatccaatgtcctcctgggcgaatcgtatcaagcacacgtatcagacaatggccttaccgctcttgttggtccatcgtcttcaccgtctcgcgccactggataccgtgcacccgaggttattgatccccggagggtttcccagaaggcagacgtgtacagcttcggtgttctgttgcttgagctggtcacaggcaaggcccccagccaggccgctctcaacgacgagggcgtcaacctgcccagatgggtgcagtcagttagtcgctccgaatggggttcggaggtgttcgatattgagctcatgagacacgaggctggcgaggagccgatggctcagcttgtgctgcttgctctggactgcgtagcgcaagtcccagaggcccggccctcaatggggcatgttgttacgcggatagaggagatcaggaagtcaagcttgaccacaaacatggaggaagaagttgatgatcaatcttccaaggctgaatccgaggtgccgaccaatccgttcgcttcttgatctcagtcgacctaaaagagaatcagctataactctagcctgcatccaatcgatcttagaccgagtcgactctttttttcatcttttagcgtacatgatttaacgggtaacttgattgtcaaaagtagcacgggtgcacggcatccggtgctgctgagtttgaccggtggcggtgtgcttagggaccagttctaaagtgattgctaaattgctgtgctcattctagccttgattagtgctgctgctgctgtcattcagctacccatgtgtaattactgagccccatgtagtgtttggaatttctttttggctggatcagtctctcgtttgatctgctcaagttgcttgccgatatgtttgtcgtggggggcattctttttggggaagtctggtggtctactgtcaacaacgactggtgctacggtggcagctgctcgatggcggcgttgtcatcagtccgcgaaataccttaataccaccttatgagccgtactagcggtggtatgtgaatatgtt

SEQ ID NO: 208278 - DNA, 1860 bp, Zea Mays
attcgtcctcctcgccccatccgcatccgccgccagcagccgaatgcctcacaggccgacctcccgccccatccgcatccgccacatgccacacatgtccaacaccgccagcctcatccgggagccgtgagcaacctcccactccccaccaacgcgccttcgcctcacctcgcgatgcccgagacctgcaatagtcaccgccttcccctgagcggctgagatgcagctccacgcccgtctgcgtccccccaccgcaagagccacgttgtgcctgccgccagccccgacacctccagatgttgcctctatccatcatccgagcttgccgcccccgcccccaaacccagaccccctgcaatcgcgaggaaggggaggacgctgttgcgcgtcgctaagcatcttcgcgcccctcagtgctgctaaggagccctatctatccctgatggcgccccaaccctttgttgaagttgatcttttgaattatggtgtgatagaaggtgatgaatcatgtaaacatttttctgaactaaaagtcttacctccatggatgatcaaagatggcacgaatcttaaaaaggaacaaagaggagagaaaattgagtcacaaaaacttgaaaaatatgaagccagagatgacaagaaacatgactcgaaatatgatcaaagtgtataggaagaatacataaatgcatattatgaggctttgaggaaaaaattggaagaggaagaagcaaaaaagcagaatgtagcatgaaggcaagatttttgtccctgatgctcaaagggaacgccaagttggtaagaaatacaagcacgatgatgatggtgaaggcattgaataggaagagcatcaacctacagttgtagttgattttgagaagtatgaagggatgattgagttcatggagaaggtggtaatacaattgattctatggagctcactggaggagcactaccttttgttagttgcctgcaagaatgtctttggaatccgatctgcttcatggtgcatcttatcctcgattgagtacatggaagaaggttgtgtcaacatggattgtgtcactctcatcgaggactaccataacaagattgaatttgaactcaataagatctatgatggaatcctcaagctctttgcttcccaccttcccccctcactaacagttccaaagtccaaggtcttctacctcaagatgaagggtgattactacaggtaccttgcggagtttgaaacttgatataggagaaaagatgcagccaagaataccatggtggcacacaaaattgctcggttaatttgcttatccttaaattcacggttctcgtattaaatttgctggctaggacattaacctttttatatgtacaatcgatcatttaattgatgtgtttctaaatgaaccaaacaatgagtggcatgctggcacttgaggggatcagtggcgacaataagaggagggttagcattgccctgcagatactcatgaggcctcgactgctcttcctagacgagcccaccaatggtcttaacaggtacgcgcttgcttctgtttcatgcctatcatatgggtgcgatgcccaagtcacaactgatgcaaccaagaaaacacgcaaaaatgtggagtgcttcggcgttcttcatggcagatgttgcgggggctgtcagctagtaaaattttagagttttatgatcctcatagcctagcatctaaacaaagtattcaaacaataaggtagaccaagcatttgcctctatatggtcaaactaatccacttttccatcaacataggtcctaacgtaaccataacccacaaaaaaaacccttatgacgaacctctacactaaactcaacattg

SEQ ID NO: 208279 - DNA, 3321 bp, Zea Mays
cctcacaggccgacctcccgccccatccgcatccgccacatgccacacatgtccaacaccgccagcctcatccgggagccgtgagcaacctcccactccccaccaacgcgccttcgcctcacctcgcgatgcccgagacctgcaatagtcaccgccttcccctgagcggctgagatgcagctccacgcccgtctgcgtccccccaccgcaagagccacgttgtgcctgccgccagccccgacacctccagatgttgcctctatccatcatccgagcttgccgcccccgcccccaaacccagaccccctgcaatcgcgaggaaggggaggacgctgttgcgcgtcgctaagcatcttcgcgcccctcagtgctgctaaggagccctatctatccctgatggcgccccaaccctttgtaatatctccacctcggccatgggcattgcaaccctcgattcaatctctcctcttcgatctcagtatttaagaatttgaatgagatttaggagcaattgaagccattggacattggttgcacaacttgataaagtgaataatctgcttgcgtctgagtttgggagtctataaacatggggaagagcaaatattggtgcctttgtaattggtgaccctgctacaactatttttttctatgaattcacaagggcaatatggtacaccaatgccatacattggacagacaacaataagacttccatataccttcttggttgtatatcttacatatttatcccaaaatgaacttttaaatcatattaatccattatctgcacataagttctcttcacttccctactacccatcaaaaaaagaaaaacgccttgaattgaattagaagttttcacatttgtaccttttgataaatgatattatggtatctccataaaaaagttctcactaatgcatttatttgtttaacatggagtcaccacaaatgtgcttatcttgttgcactttacattataggcatacctttccttgtacagtgagatatctatttcatttttcaggttgaagttgatcttttgaattatggtgtgatagaaggtgatgaatcatgtaaacatttttctgaactaaaagtcttacctccatggatgatcaaagatggcacgaatcttaaaaaggaacaaagaggagagaaaattgagtcacaaaaacttgaaaaatatgaagccagagatgacaagaaacatgactcgaaatatgatcaaagtgtataggaagaatacataaatgcatattatgaggctttgaggaaaaaattggaagaggaagaagcaaaaaagcagaatgtagcatgaaggcaagatttttgtccctgatgctcaaagggaacgccaagttggtaagaaatacaagcacgatgatgatggtgaaggcattgaataggaagagcatcaacctacagttgtagcatttaactcaaaagtttcccttgaaattcaagttgattttgagaagtatgaagggatgattgagttcatggagaaggtggtaatacaattgattctatggagctcactggaggagcactaccttttgttagttgcctgcaagaatgtctttggaatccgatctgcttcatggtgcatcttatcctcgattgagtacatggaagaaggttgtgtcaacatggattgtgtcactctcatcgaggactaccataacaagattgaatttgaactcaataagatctatgatggaatcctcaagctctttgcttcccaccttcccccctcactaacagttccaaagtccaaggtcttctacctcaagatgaagggtgattactacagttcaattcatgtgtatcaggtaccttgcggagtttgaaacttgatataggagaaaagatgcagccaagaataccatggtggcacacaaaattgctcggttaatttgcttatccttaaattcacggttctcgtattaaatttgctggctaggacattaacctttttatatgtacaatcgatcatttaattgatgtgtttctaaatgaaccaaacaatgagtggcatgctggcacttgaggggatcagtggcgacaataagaggagggttagcattgccctgcagatactcatgaggcctcgactgctcttcctagacgagcccaccaatggtcttaacaggcaacataacttctggcaagacacctcttaactgggatttaaggtcaagcattgctctagctgcagcccgtggtgttgagtacatccactcaacgagttcaacggcttcccacggtaacatcaagtcatccaatgtcctcctgggcgaatcgtatcaagcacacgtatcagacaatggccttaccgctcttgttggtccatcgtcttcaccgtctcgcgccactggataccgtgcacccgaggttattgatccccggagggtttcccagaaggcagacgtgtacagcttcggtgttctgttgcttgagctggtcacaggcaaggcccccagccaggccgctctcaacgacgagggcgtcaacctgcccagatgggtgcagtcagttagtcgctccgaatggggttcggaggtgttcgatattgagctcatgagacacgaggctggcgaggagccgatggctcagcttgtgctgcttgctctggactgcgtagcgcaagtcccagaggcccggccctcaatggggcatgttgttacgcggatagaggagatcaggaagtcaagcttgaccacaaacatggaggaagaagttgatgatcaatcttccaaggctgaatccgaggtgccgaccaatccgttcgcttcttgatctcagtcgacctaaaagagaatcagctataactctagcctgcatccaatcgatcttagaccgagtcgactctttttttcatcttttagcgtacatgatttaacgggtaacttgattgtcaaaagtagcacgggtgcacggcatccggtgctgctgagtttgaccggtggcggtgtgcttagggaccagttctaaagtgattgctaaattgctgtgctcattctagccttgattagtgctgctgctgctgtcattcagctacccatgtgtaattactgagccccatgtagtgtttggaatttctttttggctggatcagtctctcgtttgatctgctcaagttgcttgccgatatgtttgtcgtggggggcattctttttggggaagtctggtggtctactgtcaacaacgactggtgctacggtggcagctgctcgatggcggcgttgtcatcagtccgcgaaataccttaataccaccttatgagccgtactagcggtggtatgtgaatatgtt

SEQ ID NO: 208280 - DNA, 1779 bp, Zea Mays
cgccacatgccacacatgtccaacaccgccagcctcatccgggagccgtgagcaacctcccactccccaccaacgcgccttcgcctcacctcgcgatgcccgagacctgcaatagtcaccgccttcccctgagcggctgagatgcagctccacgcccgtctgcgtccccccaccgcaagagccacgttgtgcctgccgccagccccgacacctccagatgttgcctctatccatcatccgagcttgccgcccccgcccccaaacccagaccccctgcaatcgcgaggaaggggaggacgctgttgcgcgtcgctaagcatcttcgcgcccctcagtgctgctaaggagccctatctatccctgatggcgccccaaccctttgttgaagttgatcttttgaattatggtgtgatagaaggtgatgaatcatgtaaacatttttctgaactaaaagtcttacctccatggatgatcaaagatggcacgaatcttaaaaaggaacaaagaggagagaaaattgagtcacaaaaacttgaaaaatatgaagccagagatgacaagaaacatgactcgaaatatgatcaaagtgtataggaagaatacataaatgcatattatgaggctttgaggaaaaaattggaagaggaagaagcaaaaaagcagaatgtagcatgaaggcaagatttttgtccctgatgctcaaagggaacgccaagttggtaagaaatacaagcacgatgatgatggtgaaggcattgaataggaagagcatcaacctacagttgtagggatgattgagttcatggagaaggtggtaatacaattgattctatggagctcactggaggagcactaccttttgttagttgcctgcaagaatgtctttggaatccgatctgcttcatggtgcatcttatcctcgattgagtacatggaagaaggttgtgtcaacatggattgtgtcactctcatcgaggactaccataacaagattgaatttgaactcaataagatctatgatggaatcctcaagctctttgcttcccaccttcccccctcactaacagttccaaagtccaaggtcttctacctcaagatgaagggtgattactacagttcaattcatgtgtatcaggtaccttgcggagtttgaaacttgatataggagaaaagatgcagccaagaataccatggtggcacacaaaattgctcggttaatttgcttatccttaaattcacggttctcgtattaaatttgctggctaggacattaacctttttatatgtacaatcgatcatttaattgatgtgtttctaaatgaaccaaacaatgagtggcatgctggcacttgaggggatcagtggcgacaataagaggagggttagcattgccctgcagatactcatgaggcctcgactgctcttcctagacgagcccaccaatggtcttaacaggtacgcgcttgcttctgtttcatgcctatcatatgggtgcgatgcccaagtcacaactgatgcaaccaagaaaacacgcaaaaatgtggagtgcttcggcgttcttcatggcagatgttgcgggggctgtcagctagtaaaattttagagttttatgatcctcatagcctagcatctaaacaaagtattcaaacaataaggtagaccaagcatttgcctctatatggtcaaactaatccacttttccatcaacataggtcctaacgtaaccataacccacaaaaaaaacccttatgacgaacctctacactaaactcaacattg

SEQ ID NO: 208281 - DNA, 947 bp, Zea Mays
ggggccaatcacttgtgttctgactggtctgaccacattcgtgagaaggatggcatctgggctgtgcttgcatggctttcaattattgctttcaagaataaggacaaccttggaggagataagcttgtcactgttgaagatattgtccgtcagcactgggccacatatggtcgccattactacacacgctatgactatgagaatgttgatgcaggggctgctaaggagcttatggcaaacctagtaagcatgcagtcatcactttctgatgttaacaagttggtcaaggagatccggtctgatgtttctgaagtagttgcagctgacgagtttgagtacaaggatcctgttgatggctctgtgtccaagcaccagggcatccgatacctctttggagatggttcacgactggtgttccgcctctctggaaccggttctgttggtgccaccatccgtgtctacatcgagcagtacgagagggactcctctaagaccggcagggattcacaggacgcccttgctccgctggttgatgttgcgctcaagctctccaagatgcaagagtacactggacgctctgcccccaccgtcatcacataaattttgaagagtgttttagaatgagttgaggcgcttacacaaactttcattccggcctcttgttccatagtttttcttgcatgttacatctcaccgatgaataaaatgtatgtatcagacttgtctcgtttttttgcccatccaagcagcaaattagccgctggcacagcatgcggtaataatcttgtcacagtgctgtaattgggagcgtttttcttgttagaagtgtttctggtttgtttgagcatttgcggatcgatttttctttctgaagagtatataaacattttactcacctgtatacactgtcgcagtgtcactaatgttctgatggctgtttagactat

SEQ ID NO: 208282 - DNA, 1663 bp, Zea Mays
gctaactatttactcaccgtttattttaacagcttcagtggacccgaaggcccctttgatgtggatgtttttgactctagtgtagattacataaagttaatgaagacaatttttgacttcgaagcaataaaaaagctgctgacctccccaaagtttacattctgttatgatgcactccatggtgttgcgggagcttatgccaaacacatctttgtggaagagcttggtgctgatgaaagctcactgttgaattgtgtcccgaaagtaatgagttcttctattgtcacaaatatctacttataatgtggctaggtattaattcatcacttatatttttgcaggaggactttggaggtggtcatccggatcctaaccttacctatgcaaaagagttggttgaacgcatgggtcttggaaagtcatcctcaaatgttgagcctcctgaatttggtgctgcagctgatggagatgctgaccgcaacatgattcttggtaaaagattctttgtgacaccgtcggactctgttgccattatcgcagccaatgctgttcaatcaattccttactttgcttctggcctgaagggagttgccaggagcatgccaacatctgctgcccttgatgttgttgcaaagaatttgaaccttaagttctttgaggtgcctactggatggaagttttttgggaatttgatggatgctggaatgtgctcaatctgtggtgaagaaagctttggcactgggtctgaccacattcgtgagaaggatggcatctgggctgtgcttgcatggctttcaattattgctttcaagaataaggacaaccttggaggagataagcttgtcactgttgaagatattgtccgtcagcactgggccacatatggtcgccattactacacacgctatgactatgagaatgttgatgcaggggctgctaaggagcttatggcaaacctagtaagcatgcagtcatcactttctgatgttaacaagttggtcaaggagatccggtctgatgtttctgaagtagttgcagctgacgagtttgagtacaaggatcctgttgatggctctgtgtccaagcaccagggcatccgatacctctttggagatggttcacgactggtgttccgcctctctggaaccggttctgttggtgccaccatccgtgtctacatcgagcagtacgagagggactcctctaagaccggcagggattcacaggacgcccttgctccgctggttgatgttgcgctcaagctctccaagatgcaagagtacactggacgctctgcccccaccgtcatcacataaattttgaagagtgttttagaatgagttgaggcgcttacacaaactttcattccggcctcttgttccatagtttttcttgcatgttacatctcaccgatgaataaaatgtatgtatcagacttgtctcgtttttttgcccatccaagcagcaaattagccgctggcacagcatgcggtaataatcttgtcacagtgctgtaattgggagcgtttttcttgttagaagtgtttctggtttgtttgagcatttgcggatcgatttttctttctgaagagtatataaacattttactcacctgtatacactgtcgcagtgtcactaatgttctgatggctgtttagactat

SEQ ID NO: 208283 - DNA, 3232 bp, Zea Mays
cacgattctggcatcgcgcgattcctcctccatcccgcgtaggccggcgagatccacggacggatgcccccgcccgcgattcccctccccgcgcccgcagccgccgctgccgtcctcgcgcccgtagccgaggacagccgccgcacccgttcttccctgcattcaagtcgtcgccccactgcagccgcatccaaggcgtcctccattccatccatggctccatccagggcatccctgccctcaccgattcttcccttcagccgcgcccacaactcccctttccatgtcctcgcgtcttccattacagccgcatccaaggcgtcacccccttccatccatggcagcccgcgcaagattcttccctgcagccgcgcccacaaatcacgcgaattccccttccatggcgtcgccccttccatccatggcagtcgcgcaccctctgcgcccttccatccatggacgcggctccctacgcgccgcgattcttcccatacgctccctccgtgctgtttgcggctgccaatcctctccctccgcgccgcgattcttcccatcctctcgcggctgccttcccccattagtgtaggcgtccactctccctccctccgcacaccacatctgcgcactccgcgtccacaaccgtcgtcggtgctctctctaagtgtggcaccactgcgtgctccaggcacatcatcggtgtgtcgctgccggtgacgaagaaggagccccgctcccaccggccggtgtgccgccactccgcatccgtgcccagcgctggtgttccacgttgcgaagggaatctcaaataacaaaatttgtcgattttaagtttcttcatcaaccagtagtttgttgttttggctagcgaggggtgcgaagaaggaagggatttgcgcttggttgacccggaccggatggcaggacaccgtcgggggttcgctacaacgcagcgacggcttccgcagcttctcaagccaagggggtctttgcatatcattaaagtttggggtgacctactaaacaaaaatgcactccgcaggacgttggctaaggaggattatggcataataattgagactatgtttaggcggttcagaagacaaggtaccagcgagaggaaatcatatggctgcaccaagccaccaaaaaaattagttactgtagtgaagaactttcattcatctgggcactaaatgtatattagattggcagctgttattctgtaacatattatcacgttttttcttttccctaagattgcagtagcaactatagtcatgtgaaatcaaatctgagtttagagaaaaaaaaattctaaacttctgttctctatcatgtgtgaagataacttcctcatgatatctcatatatcttttcaaatggttagccagctatttcaagtattaaatgatccagaagttgagaaaacatagattgatttcctagagacataaaaacagtacctaaatgcatatcaaggcttagcagcaagacataaaaaactcaaagttaggcccctcaacaatagcatcgactgggcaagcctcttggtagaacccacagtaaacgcatttggtcatgtcaatatcatatctgtgaagagataaaaacaaaataagatcatattaaagtttaattactaaacacagtgagtagctagagcagtaggcgcgtgttgcacgcctacagtagcatgcgtctggtatcagacgataaaagtgtagctaaaccaaaattgattatctttcctattctctacttcatttattaatttgctcttgctttgatgaactgtaatgcttgctactgtttcttggtatttcctccttttggtttggtcatctgtctgattttctattgattctttttaaaaatcaccattctttttttgtaataacatacgtatatgatggatgaatgtaccatacgaatggccaagttcttttgagtagtaatgaacaaactgtttgtttttgttttcctcttcattcctgatcagatgtccaaggttccgaactgctctgtctgagcaacaggggggcaagaaacattaaaaagaagcgagaaacattataagaacacacacctgacttgggtcaggaattgcatgaatctaaaaggcaaaatgcacaagagattgctgagggattgcagtttcacaagtcatagaccaaatgacaacttatcatgatgatgtattattcgatagagatgtagggaaagaaaaatattgttactgtattgtatattattttttgggagcggatgggaaggaaaactcgttccttcctttgtactcattattcagattgtcaacctgttttaaatgttttacaaacagaaagtacacctaaagcactaaaacaactgaactccacactatagcaagatttgaaaaaatacagatgagacaaaaattccactggcaaggacatacctgaaggactgagaagatcacagagaggaaggtgattttgttgggcctaacaactaagttggatggatgaagttgtgcatgagatcttcatttttcccaatactaattagtgaactgtactttagtgtggaaactaagactgcatcagttacatggtagtttggttttcttcttgttttatgtctccttaatttttcagcttatgttttgtctctaaatttattttagattataaaaatgaatgtatgtctatcttaaagactgaagtggtactatcatggcttgctgcaattataatgatgatctgagttaaacctctatactttggataaacattagatcactaagctaactgtgacccagtcagagttttaaaatgggcatttcggcactggagtaagggcttgtatgtttggaattatttgcccagattatataaactggagctacaggcaagcaactgctaggaccggtgattttggtaggataagataattgtttttggagtagaaggcaatacatttttgtatcatctatagatataaaatagaaagaaaatatatcttttttcaggtatatgctggtacatgctttggccttaaagagattttttcatgtgtatcgtttggatctgtttttgtagttatcatacaacagcactgcataataaggtttcggatttcaacaatgcagcaatatgatacctatgctgactggaaagcatatattttaaattttatatctctactactccttaagatgataaggagggcgtccacaccctcaccacggctc

SEQ ID NO: 208284 - DNA, 2363 bp, Zea Mays
gtccatgtgccgtgccgtgccgacgccgctcgctgcctcgctcctccgtgcattcaatcagactcggtgatcttccagccgcccgccaagaacaaaccgacgcggcgtggctgacactcgtcgacccatcccaatagaaaaatcggaaccgtccaagcccgcctcctataaactaaccaacgaccaaccttcctcagcccggcccgggtggcagaggcagtccccagattcattctcttctcgctgcacgccgcactgcgccagcgtcagcatgggcggctgcggcctcggacgcggccgccgcaccgcctgcctgctgctgctcctcccgccgcttctcctgttcgccgtggccgatgccgccgcctcggggaaggagaagcagggggtgtccggtaagctgcggttccggcgggagagcgggacgttcaaggtggtgcaggtggcggacatgcactacgcggacggccggagcacggcctgcgaggacgtgctcccttcccaggtggccggctgcaccgacctcaacaccaccgccttcctctaccgcgtcttccgcgccgaggaccccgacctcgtcgtcttcacaggtgataacatctatggtgctgattcaactgatgcagccaagtctatggatgcagcaattgctccagccattgacatgaaactgccttgggctgctgtgatcgggaaccatgaccaagagggtacgctatcgcgtgagggtgtgatgcgtcaccttgtgggcatgaaaaacacccttgcaagcttcaatccggaaggaattgaaattgatggttacggaaattacaatttggaagtttccggggttgaagggacatccatggatgaaaaatcagtgctcaacctgtatttcctggacagcggtgactattccactgtgccgtcaatcaatggttatggttggatcaaggcttcacagcaagtctggttccaacaaacatcttcaagtctacaggcaaagtatatgaataagaacccgaaacagaaggaaccagcacctggccttgtatttttccacattccactaccagagttcagcagttttacggcatccaatttcacaggagtaaagcaggagggtatcagctcagcatcaattaactctgggttctttgcctccatggtggaggctggagatgtgagagctgcctttgtgggacatgatcacattaatgacttctgtgggaagctcagtggtattcagctctgctatgctggtggatttggttaccatgcctatgggaaagctgggtggtcaagaagagcgagggtactgtctgtgcaacttgagaaaacagacagcggtgaatggcgaggagtcaagtccatcaagacatggaagaggcttgatgataaacatctgagcacaattgactctgaggttctctggaacagaggctctaatggtaaaacactctcctatgcctggatacgatacttaactcaaacctgccatagtaactgtagagtaggaggtggcttcggtgaatgattctcgtaaaaggggggaaaatatctaggacaagtgatatgatgtttgatatatggtttatttctcgatgacatgaagttattcttttctatgcaacaactaatctatgaattgccttgacagggaggcgcgggaaaaatcctgatggtagttaacttttgatgcagacaggaatggtgctccataagggatctctacatcggtgtgtattgttggatggccagtttactatagaatcagaaatatgcagaagtgtgtacatgggggagaaggtcaaatacagacacatacacgcaggtttctgctgttgcatttttccatgttattagaaaataagtaatcaaaattcagtgctgctgtcaattattgcaggtggtctcatagactcgtatatagtgtggtcaaaggaaaacgagaatgcaatgtcattgtagtctcatctctcgtgtattgttaaactcggtcggaaagagaaagactgtccttccaatattatattaaaaaaagaccgaaacatggtttctgtcaagaaaatccttgaaccctagtgcccattactagcaggctgtcaccatgtaacccaggagcaggcaaagcacaacaagtggatttttttaaccatgttagaaattcgtcctcgagggaatcgaatcgaagacctagaggggttactcggaagttttaaccattacactagaggccctttcacttatctcatgtattgttactagcaccgtctagctgcaactgaaacctcagagctgccacaatatcatttttcatatatactgaatgttcttatgcaaatttgcaatcaattaagaagctgataagtaaaaacaat

SEQ ID NO: 208285 - DNA, 7814 bp, Zea Mays
ccgccatggcttcgaggcggacgcagaggcgacggtgggatcgtgccaacgaagcacaacaatgggtggcacgcagcggccgccgacgggcgatgacgcgcctccatgaacggccatgagcgctgacgcttctctcgcctcctccaccaacaacggattctccacaaacggccctggatccgttcgtcgctgctctcttatctgctcttccatccaagcatgtatgcccacccccaatcggaccatcgctggcctcctgcagctaggccgccatcacctccttcaagaaagaaaagccaacgttcccatagtctgcctccagaactcccttgatgaaaggactgccaagttctactgtaattttgtcttgtgtcctatcaaattaattctgctttttgcaggattttcagtgaactcctataatattcattggctgtcgtctctgccattggcgtgcacatacgtgtacagttgggggtcgagcagccagctgctggacgaggatggatggatcggaggatgcatgcatggatcgagcagcggggtgtccaaatcgcgcgcctgtgagcggctcacaggatacgcatcaccggcggggcgttgtgccatgacaaagctccagggcctaacctcatctctcctgtcgcaggacgaccactccatctgtcgtcctccttcatctgtcctatttgtttctctgtttgaacagctaagttttgtggaccttgctggttctgagagggtgaaaaaatctggttcagcaggaaagcaattgaaagaagcgcaaggaaagcaattgaaagaagcgcaaagtataaataaatctctttctgctttggctgatgttattggttctttatcttctgatggacaacatataccttaccggaaccataagttaacaatgcttatgagtgattatctaatgtggattgtctacaaaaaaaaggtactatactttaatcatccgtttgtcttttcattatgattatataatgtggattgcctgcaaaaaaaaggtactatactttaatcagccgtttgtcttttcattattccaatctttattttaataggttgcatttccggtttttattcagtaccaacaaaaccattggagtacctgcgttctattcataacgtgtgaatatggaaattcacaacgattatatggtgaactcatgtttctttttctaatgcaaggaaaactataaagtcttcatttttcactttcttgtcagtatttacgaacaaacaaccattactaacgaatataaaaatgtattgttgtgttctacaaatgcttaccaacagtttgaacaattaaggtcaatgttttttgtatttttcttagaaattgtttctgttattgattagttaatgtctataatactttgatggttatgtcttcatccatattaatttgtttgatattattgaatacgaatgaattagtactatttctaataagactcgattatctaatgcgtgtttattaatacttttaagcttaatagtttaatcccaactgcatgtatggtttttcttttggaaaactaaaaataaaataaaatgattggtagttgtggtagcgaagaggaaatgtataatttaatcccaactgcatgtatactttaacgtgtgtcagtggaagggttctagcagggattctcttcccttccgccgaaaatcaccgaggatctattcagggtggaactaactcacatcgaggtttgctcgagctcgctcagcacatagctgaacaaggtccggacgaccgctgttatctgcgtacactggtccaaattatctgcactgaccagaagaggctcatctacgacacgaggacgatgaaggagtgcaacattcagatatttttagatattttacggccagttcagatcagacaagaaagggtcatctagcaaaggttatcgggatgtcaatctttttgtcaaacaagtagatgggaaaaatgttactgattcagagaaattgagattttgacttggagaaggcccagcttgacctaaggcatggctacaacagggctgagatgaagttcaatgtgaatcgtgttgataacatggaatcagtttttaaagaaaatctttgtattctcattttaattttatatgcagcccctcaaatcaactttggaacccaaatggtcaagcctttggacggagcaaagggttttatcctcctatataagaagttcaaatggataaacaataaaggcaatgtcaaattttcatgggattctttggacatagcttcactgccattaacaacaccatttgtaattgcatattctacaaaaaagtggctgagggacccaggagttgtggggcgtcacagataatcggcatggaatttagtagtttataacagtgcctgaaggagctaggatttatgaatcattctccaccaccttgaggtactcaccggagccagaatttatgaatcgttgtccaccatctcgaggtattcaccatgttactttttccttttcaacactaaataattgtttgcttaaatgtcaatattatttagctattcctttgaaatttactaatctatattgaatagagacttgggtggctccatcgctagctttgatggcaatggttatacaagtaataagtttaaagacagagcagttcggaaccttggacatctgatcaggaatgaagaggaaaacaaaaacaaacagtttgttcattactactcaaaagaacttggccattcgtatgccatatgatttcctctcgctggtacctgtcattgaaggagctggaggatcaataactgattggagaggggacaagctctattggcctgttactgcagaatcacaatccacaagtataatcttcatccctctttaaaattcatgaagccctttttgatgtcttcaagtcctttctatgtttccttagctccagagtggccctctggtttcagtaatttcataggttaattgtgccaaactgcattatggcaaaaacttgccctatgtcacttcaatcgtgcactccttgctttttaatcaacaaagttttagttcatctcattctgcactattgatttttttgtaggttttaacgtggtagcagttggggatgcccgtgtccacaaagaggcccttgatgcgttgcagtggcgctagcgtgctctttagataagcattatactaataaccaactatttagacatttacatgtgatatttgtatgaccaataataagctttacctgtatgcttgttggttggcctcaacctttgcactaataatagacagcttggttgtaaactaccaagcagtggcttgctgtttgcaccaagcagatattatgtcttgggaacgctaaatgtgtgaggtattaccttagtgtgagcttcccttgcacccagcaattcagctccattgtgcagtgcttggggatgcttaatcgagagtttgattgttgttgcttccatggctttctgggtgctgcaccatagctgaattgcgaactatgatttccagccttgaactttggatcgaagtctagggtcagtctgggctttaggcgatgacgttttctggcttcagatgcccaagggtcattgagccatgtctccaatcgtccaatggttataaaaaaagaataggtacacatatatattgtttgttttcatggtattataatgttttcaaattaaattctttttttgcatgcgtggcatttattctgcataatattttttctatggatttaacttgtgagtcattttcataaaccaacaccaaggatgaatccatgtttgttactcggaaaccttgaacaaacaccactaatagaaggcgctcgcaatggcgtcgctcatcgacgacgagaagaagcttggcgactgccagttcgacatctggaagcagttctacgtggctgcatgcgccactatagacgacaagctccggcgccgctgtcgcttggacacagtccaaagcggctgcaccgtgctgtccatcatcaagtagggggacctcatggtcggcgccaacgccgccgactcccgggttgttctggacaccgcatccgacaacggtgccatcacgccgtccaactcatcgtccacctgaagcccaatctgccacgtaagtcgctactgaccggccataaattcttatgcgctaggacgacgtccgttgctgacgttgtgtgagcgttctcgaacatgatgtatgcagaggggtagcgcatccagtggtgcaacgaccaggtgtactacctcgctgatgagtccgggtgcacttcgtctggcagcctagccaagagctgtctgtactcgctatgtcgcgcgcgttcgacgactactatatcaaggactgtggcgtcatctcggcgccggaggtgacgcagatgatgaccgacaacaatgaccagttagtcatccttgtcgtagttggggtagtttttgtgctggtctgcctttaattctcttcataaacacacacatttgtctttttgtttaagcaagcgcgtatgttggtgtgtgcctgatgactgacaatgtacgagggaacttcttctggcaggtgtgggacgtgctctccaacgacgagaccatgcaaatcttgacatatattgaagtctgcatagtactgatgattgcaatgtagtggtgaaataactagattaaaataacaaatttatgtatggctaggatcataaatggattatgaaactttttcttataacattataatacacattttgtatataagttatcgtggtattatatgttcccgttgcaacgcacgggcactcacctagtataaaaactaagcatggatcgttataaagcaaaacttagtgagagatgtgtttgcaaggcgtaaatacatgttgtaccttgtcttctgaaccgcctaaacatagtctcaattattatgccataatcctccttagccaacgtcctgcggagtgcatttttgtttagtaggtcaccccaaactttaatgatatgcaaagaccccctacaacattgattttgttaagaataggttagtaatatttagatttgaatatataaatacaattactgaaatatacctagcatccattataacaatctttctgaaagggccccacattgtgcgatgaattgtatccaagtggactacaatagccataatgtctataaaaataacaatttataaatggattaatactgaattttgtgtaaacgatattttaataatattaagagatcgatatattcttaccgactaaagtcctgtttggcaattcgacaatatcagcaaggttcaagaatatttgttttgggaatggcgccacttgaattggaacaatgtatggctccacgatagtttgttggttgagatacaattccatgggactatttagatgtcgaaaattaaattcacccggatgaagaccaaactttacattatgcatcttgtaaacatgcttttcatggagcaaattgtcgaaatgtttgactgtctgatacaaatatgttatgacctcgatcttggctccctaaatgtatttcagtaggagaagagtcgatggtatgaagatcgtgtaaccttaaaaatgaaacttaaagaattgttggcttacattgatgtcagataaaacgaaatgttgtctgtcacgaaaacgtggttcaatcgggaatttaacttctacccgagcgacaatactgtatttccgcggtagcccataataaaaatcttcatcacggtagtcgtcaaacaacctgaagctatattaaatatacgacttaataacggtcataactttgatagacaaatttgtgtaaatatatttatataataacttacattggcatccgttttaggcggtccgctacggctttttcacggttcaatacgaccggttccatcaaaaccttgtagcctttaacataaatttaaatttaaatttaaatggaacacatgtcttctggtaataaattatttttaataatgatcaaagaatactttggagaaactaataatatatgagtgtttttatatatatatatggatttttttagttctgatttgggattggatttccaaaactttagtttggacacagatactttgagaagcattaaaactcgaaacactattgtcatgatcagttttggttcataagattggaaaaataaagttccctaaaataccatgacataaatgagaatatattgctaatagctacacaccggttcttttttctgtttcacagaagcagccggagatccatcagtagtgctcgctttaaggagtctgtaacttcctaatcaaatataacttgatatgtgcgccatttgttggtgttgaccaccattggtagaatgttgtttttggctgcgcgttcttgttagatgagactgtaacttcctatgcatgggtatttaaatcattcttggagtcaatgggagggcgatcgccaaaatcaatattcactgatcaggatgaagctattatgcaggcagtcaaacaaattttccctaatacgcaacattgtttttcctactggcatattctgaagaatgcacaatctcatttaggctcactaaatacgtctcaagcatttgaaattatgtttaccaagtgtatgcaaggatctgactcggaaacaattagtttgagaattgttaagttaacaaatcagatgtattttagttacgatggtttcttgattttgtctgttgttctttatatattgaagcagcacagaccatggtgtcagcagcacagatcctggaactgtctaaagactacagggcaaaattttaactacagaaacctgacagcacaaggatatctgatgacagtgataagagggctggaaaacatggcttggatcagaacagaagcattttccaccgataagttgaagtgtgactggaggaaggaaccctaccttccaagttaaagatggagaggttggtcagcaagatgcaggtcatcagagtgcaaactttatagacataggaccaggttttcctactattaaagtgggaaaaccaggatacatattatggactcgcactactgataaactgaaaggtgtaacaggtgctgatttttgcccaggatcaagttctagggaggccaaaggggaattgatcactaacaaggtcattgcaggacctacaagccctctgtgtgtttttcctcgaaggcatgtgcaccatagaaaaaaggttggtatgcaatggatgtatttccccctctaacatagccaagacaaatgtaaaagttaatgaaaaacaggaaatgtgctcttaaagtacttcttatggcggtgatgctgcttacactaaacatgaaattgtggatttattactggaatctgttgagctgtcttataggcttgattagtattgatgaactttgccactcatgtgttgggcatcttgtagcagtttcctgtgaagccgaactccttctcatgcaaaaggaatgagacacaacaaaaactgaactacttctgccgagattttatttggagacgagcagcaaaataaggccttcgactctacagagagaatgtctaatgcctccccacgcacaattttatctaaaaattagcatcaaccgatatataccggaagaatgcatatataaactttataccccaataaaaaaccccacaacacacaagctcattgtattacttaacatatgtcatatataaaagttatattaggggaagcattgaaaagaagttagttcattttatgtttgagcgacaaattcactaacatatcacaggctactaaagaac

SEQ ID NO: 208286 - DNA, 1909 bp, Zea Mays
cttcgaggcggacgcagaggcgacggtgggatcgtgccaacgaagcacaacaatgggtggcacgcagcggccgccgacgggcgatgacgcgcctccatgaacggccatgagcgctgacgcttctctcgcctcctccaccaacaacggattctccacaaacggccctggatccgttcgtcgctgctctcttatctgctcttccatccaagcatgtatgcccacccccaatcggaccatcgctggcctcctgcagctaggccgccatcacctccttcaagattcattggctgtcgtctctgccattggcgtgcacatacgtgtacagttgggggtcgagcagccagctgctggacgaggatggatggatcggaggatgcatgcatggatcgagcagcggggtgtccaaatcgcgcgcctgtgagcggctcacaggatacgcatcaccggcggggcgttgtgccatgacaaagctccagggcctaacctcatctctcctgtcgcaggacgctaagttttgtggaccttgctggttctgagagggtgaaaaaatctggttcagcaggaaagcaattgaaagaagcgcaaggaaagcaattgaaagaagcgcaaagtataaataaatctctttctgctttggctgatgttattggttctttatcttctgatggacaacatataccttaccggaaccataagttaacaatgcttatgagtgattatctaatgtggattgtctacaaaaaaaaggaaaactataaagtcttcatttttcactttcttgtcagtatttacgaacaaacaaccattactaacgaatataaaaatgtattgttgtgttctacaaatgcttaccaacagtttgaacaattaaggtcaatgttttttgtatttttcttagaaattgtttctgttattgattagttaatgtctataatactttgatggttatgtcttcatccatattaatttgtttgatattattgaatacgaatgaattagtactatttctaataagactcgattatctaatgcgtgtttattaatacttttaagcttaatagtttaatcccaactgcatgtatggtttttcttttggaaaactaaaaataaaataaaatgattggtagttgtggtagcgaagaggaaatgtataatttaatcccaactgcatgtatactttaacgtgtgtcagtggaagggttctagcagggattctcttcccttccgccgaaaatcaccgaggatctattcagggtggaactaactcacatcgaggtttgctcgagctcgctcagcacatagctgaacaaggtccggacgaccgctgttatctgcgtacactggtccaaattatctgcactgaccagaagaggctcatctacgacacgaggacgatgaaggagtgcaacattcagatatttttagatattttacggccagttcagatcagacaagaaagggtcatctagcaaaggttatcgggatgtcaatctttttgtcaaacaagtagatgggaaaaatgttactgattcagagaaattgagattttgacttggagaaggcccagcttgacctaaggcatggctacaacagggctgagatgaagttcaatgtgaatcgtgttgataacatggaatcagtttttaaagaaaatctttgtattctcattttaattttatatgcagcccctcaaatcaactttggaacccaaatggtcaagcctttggacggagcaaagggttttatcctcctatataagaagttcaaatggataaacaataaaggcaatgtcaaattttcatgggattctttggacatagcttcactgccattaacaacaccatttgtaattgcatattctacaaaaaagtggctgagggacccaggagttgtggggcgtcacagataa

SEQ ID NO: 208287 - DNA, 7207 bp, Zea Mays
cagcggccgccgacgggcgatgacgcgcctccatgaacggccatgagcgctgacgcttctctcgcctcctccaccaacaacggattctccacaaacggccctggatccgttcgtcgctgctctcttatctgctcttccatccaagcatgtatgcccacccccaatcggaccatcgctggcctcctgcagctaggccgccatcacctccttcaagattcattggctgtcgtctctgccattggcgtgcacatacgtgtacagttgggggtcgagcagccagctgctggacgaggatggatggatcggaggatgcatgcatggatcgagcagcggggtgtccaaatcgcgcgcctgtgagcggctcacaggatacgcatcaccggcggggcgttgtgccatgacaaagctccagggcctaacctcatctctcctgtcgcaggacgaccactccatctgtcgtcctccttcatctgtcctatttgtttctctgtttgaacagctaagttttgtggaccttgctggttctgagagggtgaaaaaatctggttcagcaggaaagcaattgaaagaagcgcaaggaaagcaattgaaagaagcgcaaagtataaataaatctctttctgctttggctgatgttattggttctttatcttctgatggacaacatataccttaccggaaccataagttaacaatgcttatgagtgattatctaatgtggattgtctacaaaaaaaaggtactatactttaatcatccgtttgtcttttcattatgattatataatgtggattgcctgcaaaaaaaaggtactatactttaatcagccgtttgtcttttcattattccaatctttattttaataggttgcatttccggtttttattcagtaccaacaaaaccattggagtacctgcgttctattcataacgtgtgaatatggaaattcacaacgattatatggtgaactcatgtttctttttctaatgcaaggaaaactataaagtcttcatttttcactttcttgtcagtatttacgaacaaacaaccattactaacgaatataaaaatgtattgttgtgttctacaaatgcttaccaacagtttgaacaattaaggtcaatgttttttgtatttttcttagaaattgtttctgttattgattagttaatgtctataatactttgatggttatgtcttcatccatattaatttgtttgatattattgaatacgaatgaattagtactatttctaataagactcgattatctaatgcgtgtttattaatacttttaagcttaatagtttaatcccaactgcatgtatggtttttcttttggaaaactaaaaataaaataaaatgattggtagttgtggtagcgaagaggaaatgtataatttaatcccaactgcatgtatactttaacgtgtgtcagtggaagggttctagcagggattctcttcccttccgccgaaaatcaccgaggatctattcagggtggaactaactcacatcgaggtttgctcgagctcgctcagcacatagctgaacaaggtccggacgaccgctgttatctgcgtacactggtccaaattatctgcactgaccagaagaggctcatctacgacacgaggacgatgaaggagtgcaacattcagatatttttagatattttacggccagttcagatcagacaagaaagggtcatctagcaaaggttatcgggatgtcaatctttttgtcaaacaagtagatgggaaaaatgttactgattcagagaaattgagattttgacttggagaaggcccagcttgacctaaggcatggctacaacagggctgagatgaagttcaatgtgaatcgtgttgataacatggtgatctaggcaatctttctattggatatgcttaacaaggacatcaattccttctccatgagagtcagcccctcaaatcaactttggaacccaaatggtcaagcctttggacggagcaaaggtaatcgattaaagcggcttcacaacaggttttatcctcctatataagaagttcaaatggataaacaataaaggcagtgagttcaatcacctttagaagatcaatgtttactttgctggtggctgagggacccaggagttgtggggcgtcacagataatcggcatggaatttagtagtttataacagtgcctgaaggagctaggatttatgaatcattctccaccaccttgaggtactcaccggagccagaatttatgaatcgttgtccaccatctcgagacagagcagttcggaaccttggacatctgatcaggaatgaagaggaaaacaaaaacaaacagtttgttcattactactcaaaagaacttggccattcgtatgccatatgatttcctctcgctggtacctgtcattgaaggagctggaggatcaataactgattggagaggggacaagctctattggcctgttactgcagaatcacaatccacaagttttaacgtggtagcagttggggatgcccgtgtccacaaagaggcccttgatgcgttgcagtggcgctagcgtgctctttagataagcattatactaataaccaactatttagacatttacatgtgatatttgtatgaccaataataagctttacctgtatgcttgttggttggcctcaacctttgcactaataatagacagcttggttgtaaactaccaagcagtggcttgctgtttgcaccaagcagatattatgtcttgggaacgctaaatgtgtgaggtattaccttagtgtgagcttcccttgcacccagcaattcagctccattgtgcagtgcttggggatgcttaatcgagagtttgattgttgttgcttccatggctttctgggtgctgcaccatagctgaattgcgaactatgatttccagccttgaactttggatcgaagtctagggtcagtctgggctttaggcgatgacgttttctggcttcagatgcccaagggtcattgagccatgtctccaatcgtccaatggttataaaaaaagaataggtacacatatatattgtttgttttcatggtattataatgttttcaaattaaattctttttttgcatgcgtggcatttattctgcataatattttttctatggatttaacttgtgagtcattttcataaaccaacaccaaggatgaatccatgtttgttactcggaaaccttgaacaaacaccactaatagaaggcgctcgcaatggcgtcgctcatcgacgacgagaagaagcttggcgactgccagttcgacatctggaagcagttctacgtggctgcatgcgccactatagacgacaagctccggcgccgctgtcgcttggacacagtccaaagcggctgcaccgtgctgtccatcatcaagtagggggacctcatggtcggcgccaacgccgccgactcccgggttgttctggacaccgcatccgacaacggtgccatcacgccgtccaactcatcgtccacctgaagcccaatctgccacgtaagtcgctactgaccggccataaattcttatgcgctaggacgacgtccgttgctgacgttgtgtgagcgttctcgaacatgatgtatgcagaggggtagcgcatccagtggtgcaacgaccaggtgtactacctcgctgatgagtccgggtgcacttcgtctggcagcctagccaagagctgtctgtactcgctatgtcgcgcgcgttcgacgactactatatcaaggactgtggcgtcatctcggcgccggaggtgacgcagatgatgaccgacaacaatgaccagttagtcatccttgtcgtagttggggtagtttttgtgctggtctgcctttaattctcttcataaacacacacatttgtctttttgtttaagcaagcgcgtatgttggtgtgtgcctgatgactgacaatgtacgagggaacttcttctggcaggtgtgggacgtgctctccaacgacgagaccatgcaaatcttgacatatattgaagtctgcatagtactgatgattgcaatgtagtggtgaaataactagattaaaataacaaatttatgtatggctaggatcataaatggattatgaaactttttcttataacattataatacacattttgtatataagttatcgtggtattatatgttcccgttgcaacgcacgggcactcacctagtataaaaactaagcatggatcgttataaagcaaaacttagtgagagatgtgtttgcaaggcgtaaatacatgttgtaccttgtcttctgaaccgcctaaacatagtctcaattattatgccataatcctccttagccaacgtcctgcggagtgcatttttgtttagtaggtcaccccaaactttaatgatatgcaaagaccccctacaacattgattttgttaagaataggttagtaatatttagatttgaatatataaatacaattactgaaatatacctagcatccattataacaatctttctgaaagggccccacattgtgcgatgaattgtatccaagtggactacaatagccataatgtctataaaaataacaatttataaatggattaatactgaattttgtgtaaacgatattttaataatattaagagatcgatatattcttaccgactaaagtcctgtttggcaattcgacaatatcagcaaggttcaagaatatttgttttgggaatggcgccacttgaattggaacaatgtatggctccacgatagtttgttggttgagatacaattccatgggactatttagatgtcgaaaattaaattcacccggatgaagaccaaactttacattatgcatcttgtaaacatgcttttcatggagcaaattgtcgaaatgtttgactgtctgatacaaatatgttatgacctcgatcttggctccctaaatgtatttcagtaggagaagagtcgatggtatgaagatcgtgtaaccttaaaaatgaaacttaaagaattgttggcttacattgatgtcagataaaacgaaatgttgtctgtcacgaaaacgtggttcaatcgggaatttaacttctacccgagcgacaatactgtatttccgcggtagcccataataaaaatcttcatcacggtagtcgtcaaacaacctgaagctatattaaatatacgacttaataacggtcataactttgatagacaaatttgtgtaaatatatttatataataacttacattggcatccgttttaggcggtccgctacggctttttcacggttcaatacgaccggttccatcaaaaccttgtagcctttaacataaatttaaatttaaatttaaatggaacacatgtcttctggtaataaattatttttaataatgatcaaagaatactttggagaaactaataatatatgagtgtttttatatatatatatggatttttttagttctgatttgggattggatttccaaaactttagtttggacacagatactttgagaagcattaaaactcgaaacactattgtcatgatcagttttggttcataagattggaaaaataaagttccctaaaataccatgacataaatgagaatatattgctaatagctacacaccggttcttttttctgtttcacagaagcagccggagatccatcagtagtgctcgctttaaggagtctgtaacttcctaatcaaatataacttgatatgtgcgccatttgttggtgttgaccaccattggtagaatgttgtttttggctgcgcgttcttgttagatgagactgtaacttcctatgcatgggtatttaaatcattcttggagtcaatgggagggcgatcgccaaaatcaatattcactgatcaggatgaagctattatgcaggcagtcaaacaaattttccctaatacgcaacattgtttttcctactggcatattctgaagaatgcacaatctcatttaggctcactaaatacgtctcaagcatttgaaattatgtttaccaagtgtatgcaaggatctgactcggaaacaattagtttgagaattgttaagttaacaaatcagatgtattttagttacgatggtttcttgattttgtctgttgttctttatatattgaagcagcacagaccatggtgtcagcagcacagatcctggaactgtctaaagactacagggcaaaattttaactacagaaacctgacagcacaaggatatctgatgacagtgataagagggctggaaaacatggcttggatcagaacagaagcattttccaccgataagttgaagtgtgactggaggaaggaaccctaccttccaagttaaagatggagaggttggtcagcaagatgcaggtcatcagagtgcaaactttatagacataggaccaggttttcctactattaaagtgggaaaaccaggatacatattatggactcgcactactgataaactgaaaggtgtaacaggtgctgatttttgcccaggatcaagttctagggaggccaaaggggaattgatcactaacaaggtcattgcaggacctacaagccctctgtgtgtttttcctcgaaggcatgtgcaccatagaaaaaaggttggtatgcaatggatgtatttccccctctaacatagccaagacaaatgtaaaagttaatgaaaaacaggaaatgtgctcttaaagtacttcttatggcggtgatgctgcttacactaaacatgaaattgtggatttattactggaatctgttgagctgtcttataggcttgattagtattgatgaactttgccactcatgtgttgggcatcttgtagcagtttcctgtgaagccgaactccttctcatgcaaaaggaatgagacacaacaaaaactgaactacttctgccgagattttatttggagacgagcagcaaaataaggccttcgactctacagagagaatgtctaatgcctccccacgcacaattttatctaaaaattagcatcaaccgatatataccggaagaatgcatatataaactttataccccaataaaaaaccccacaacacacaagctcattgtattacttaacatatgtcatatataaaagttatattaggggaagcattgaaaagaagttagttcattttatgtttgagcgacaaattcactaacatatcacaggctactaaagaac

SEQ ID NO: 208288 - DNA, 6463 bp, Zea Mays
gtataaataaatctctttctgctttggctgatgttattggtgctttatcttctgatggacaacatataccttaccggaaccataatgcttatgagtgattatctaatgtggattgtctgcaaaaaagctaagttttgtggaccttggtggttctgagaggggtgaaaaaatctggttccgcaggaaagcaattgaaagaagcgcaaagtataaataaatctctttctgctttggctgatgttattggttctttatcttctgatggacaacatataccttaccggaaccataagttaacaatgcttatgagtgattatctaatgtggattgtctacaaaaaaaaggtactatactttaatcatccgtttgtcttttcattatgattatataatgtggattgcctgcaaaaaaaaggtactatactttaatcagccgtttgtcttttcattattccaatctttattttaataggttgcatttccggtttttattcagtaccaacaaaaccattggagtacctgcgttctattcataacgtgtgaatatggaaattcacaacgattatatggtgaactcatgtttctttttctaatgcaaggaaaactataaagtcttcatttttcactttcttgtcagtatttacgaacaaacaaccattactaacgaatataaaaatgtattgttgtgttctacaaatgcttaccaacagtttgaacaattaagtggaagggttctagcagggattctcttcccttccgccgaaaatcaccgaggatctattcagggtggaactaactcacatcgaggtttgctcgagctcgctcagcacatagctgaacaaggtccggacgaccgctgttatctgcgtacactggtccaaattatctgcactgaccagaagaggctcatctacgacacgaggacgatgaaggagtgcaacattcagatatttttagatattttacggccagttcagatcagacaagaaagggtcatctagcaaaggttatcgggatgtcaatctttttgtcaaacaagtagatgggaaaaatgttactgattcagagaaattgagattttgacttggagaaggcccagcttgacctaaggcatggctacaacagggctgagatgaagttcaatgtgaatcgtgttgataacatggtgatctaggcaatctttctattggatatgcttaacaaggacatcaattccttctccatgagagtcagcccctcaaatcaactttggaacccaaatggtcaagcctttggacggagcaaaggtaatcgattaaagcggcttcacaacagtggctgagggacccaggagttgtggggcgtcacagataatcggcatggaatttagtagtttataacagtgcctgaaggagctaggatttatgaatcattctccaccaccttgaggtactcaccggagccagaatttatgaatcgttgtccaccatctcgagagacttgggtggctccatcgctagctttgatggcaatggttatacaagtaataagtttaaagacagagcagttcggaaccttggacatctgatcaggaatgaagaggaaaacaaaaacaaacagtttgttcattactactcaaaagaacttggccattcgtatgccatatgatttcctctcgctggtacctgtcattgaaggagctggaggatcaataactgattggagaggggacaagctctattggcctgttactgcagaatcacaatccacaagttttaacgtggtagcagttggggatgcccgtgtccacaaagaggcccttgatgcgttgcagtggcgctagcgtgctctttagataagcattatactaataaccaactatttagacatttacatgtgatatttgtatgaccaataataagctttacctgtatgcttgttggttggcctcaacctttgcactaataatagacagcttggttgtaaactaccaagcagtggcttgctgtttgcaccaagcagatattatgtcttgggaacgctaaatgtgtgaggtattaccttagtgtgagcttcccttgcacccagcaattcagctccattgtgcagtgcttggggatgcttaatcgagagtttgattgttgttgcttccatggctttctgggtgctgcaccatagctgaattgcgaactatgatttccagccttgaactttggatcgaagtctagggtcagtctgggctttaggcgatgacgttttctggcttcagatgcccaagggtcattgagccatgtctccaatcgtccaatggttataaaaaaagaataggtacacatatatattgtttgttttcatggtattataatgttttcaaattaaattctttttttgcatgcgtggcatttattctgcataatattttttctatggatttaacttgtgagtcattttcataaaccaacaccaaggatgaatccatgtttgttactcggaaaccttgaacaaacaccactaatagaaggcgctcgcaatggcgtcgctcatcgacgacgagaagaagcttggcgactgccagttcgacatctggaagcagttctacgtggctgcatgcgccactatagacgacaagctccggcgccgctgtcgcttggacacagtccaaagcggctgcaccgtgctgtccatcatcaagtagggggacctcatggtcggcgccaacgccgccgactcccgggttgttctggacaccgcatccgacaacggtgccatcacgccgtccaactcatcgtccacctgaagcccaatctgccacgtaagtcgctactgaccggccataaattcttatgcgctaggacgacgtccgttgctgacgttgtgtgagcgttctcgaacatgatgtatgcagaggggtagcgcatccagtggtgcaacgaccaggtgtactacctcgctgatgagtccgggtgcacttcgtctggcagcctagccaagagctgtctgtactcgctatgtcgcgcgcgttcgacgactactatatcaaggactgtggcgtcatctcggcgccggaggtgacgcagatgatgaccgacaacaatgaccagttagtcatccttgtcgtagttggggtagtttttgtgctggtctgcctttaattctcttcataaacacacacatttgtctttttgtttaagcaagcgcgtatgttggtgtgtgcctgatgactgacaatgtacgagggaacttcttctggcaggtgtgggacgtgctctccaacgacgagaccatgcaaatcttgacatatattgaagtctgcatagtactgatgattgcaatgtagtggtgaaataactagattaaaataacaaatttatgtatggctaggatcataaatggattatgaaactttttcttataacattataatacacattttgtatataagttatcgtggtattatatgttcccgttgcaacgcacgggcactcacctagtataaaaactaagcatggatcgttataaagcaaaacttagtgagagatgtgtttgcaaggcgtaaatacatgttgtaccttgtcttctgaaccgcctaaacatagtctcaattattatgccataatcctccttagccaacgtcctgcggagtgcatttttgtttagtaggtcaccccaaactttaatgatatgcaaagaccccctacaacattgattttgttaagaataggttagtaatatttagatttgaatatataaatacaattactgaaatatacctagcatccattataacaatctttctgaaagggccccacattgtgcgatgaattgtatccaagtggactacaatagccataatgtctataaaaataacaatttataaatggattaatactgaattttgtgtaaacgatattttaataatattaagagatcgatatattcttaccgactaaagtcctgtttggcaattcgacaatatcagcaaggttcaagaatatttgttttgggaatggcgccacttgaattggaacaatgtatggctccacgatagtttgttggttgagatacaattccatgggactatttagatgtcgaaaattaaattcacccggatgaagaccaaactttacattatgcatcttgtaaacatgcttttcatggagcaaattgtcgaaatgtttgactgtctgatacaaatatgttatgacctcgatcttggctccctaaatgtatttcagtaggagaagagtcgatggtatgaagatcgtgtaaccttaaaaatgaaacttaaagaattgttggcttacattgatgtcagataaaacgaaatgttgtctgtcacgaaaacgtggttcaatcgggaatttaacttctacccgagcgacaatactgtatttccgcggtagcccataataaaaatcttcatcacggtagtcgtcaaacaacctgaagctatattaaatatacgacttaataacggtcataactttgatagacaaatttgtgtaaatatatttatataataacttacattggcatccgttttaggcggtccgctacggctttttcacggttcaatacgaccggttccatcaaaaccttgtagcctttaacataaatttaaatttaaatttaaatggaacacatgtcttctggtaataaattatttttaataatgatcaaagaatactttggagaaactaataatatatgagtgtttttatatatatatatggatttttttagttctgatttgggattggatttccaaaactttagtttggacacagatactttgagaagcattaaaactcgaaacactattgtcatgatcagttttggttcataagattggaaaaataaagttccctaaaataccatgacataaatgagaatatattgctaatagctacacaccggttcttttttctgtttcacagaagcagccggagatccatcagtagtgctcgctttaaggagtctgtaacttcctaatcaaatataacttgatatgtgcgccatttgttggtgttgaccaccattggtagaatgttgtttttggctgcgcgttcttgttagatgagactgtaacttcctatgcatgggtatttaaatcattcttggagtcaatgggagggcgatcgccaaaatcaatattcactgatcaggatgaagctattatgcaggcagtcaaacaaattttccctaatacgcaacattgtttttcctactggcatattctgaagaatgcacaatctcatttaggctcactaaatacgtctcaagcatttgaaattatgtttaccaagtgtatgcaaggatctgactcggaaacaattagtttgagaattgttaagttaacaaatcagatgtattttagttacgatggtttcttgattttgtctgttgttctttatatattgaagcagcacagaccatggtgtcagcagcacagatcctggaactgtctaaagactacagggcaaaattttaactacagaaacctgacagcacaaggatatctgatgacagtgataagagggctggaaaacatggcttggatcagaacagaagcattttccaccgataagttgaagtgtgactggaggaaggaaccctaccttccaagttaaagatggagaggttggtcagcaagatgcaggtcatcagagtgcaaactttatagacataggaccaggttttcctactattaaagtgggaaaaccaggatacatattatggactcgcactactgataaactgaaaggtgtaacaggtgctgatttttgcccaggatcaagttctagggaggccaaaggggaattgatcactaacaaggtcattgcaggacctacaagccctctgtgtgtttttcctcgaaggcatgtgcaccatagaaaaaaggttggtatgcaatggatgtatttccccctctaacatagccaagacaaatgtaaaagttaatgaaaaacaggaaatgtgctcttaaagtacttcttatggcggtgatgctgcttacactaaacatgaaattgtggatttattactggaatctgttgagctgtcttataggcttgattagtattgatgaactttgccactcatgtgttgggcatcttgtagcagtttcctgtgaagccgaactccttctcatgcaaaaggaatgagacacaacaaaaactgaactacttctgccgagattttatttggagacgagcagcaaaataaggccttcgactctacagagagaatgtctaatgcctccccacgcacaattttatctaaaaattagcatcaaccgatatataccggaagaatgcatatataaactttataccccaataaaaaaccccacaacacacaagctcattgtattacttaacatatgtcatatataaaagttatattaggggaagcattgaaaagaagttagttcattttatgtttgagcgacaaattcactaacatatcacaggctactaaagaac

SEQ ID NO: 208289 - DNA, 1928 bp, Zea Mays
gaggagaacactggggaactagtggagtaacaaagtaacccattggtcgagatcacttcgccgccgccgctttcgagatctccgggtggagcaagcgagcaaaggcagcagccatgtcgctccgcgtgctgaaccctaacgccgaggtgctcaacaagtcggcagcgctgcacatgaacatcaacgccgccaagggcctccaggacgtgctcaagaccaacctcggccccaagggcaccatcaagatgcttgtgggtggagctggtgacctgaagctgacgaaggatgggaacaccctcttgaaggaactcatccaagattcttggttgatggttttgatgttgctaagagagcgtgtcttgattttctcgataagttcaagacgccagtcgttactggtgaagaacctgacagagataccttaaaaatggtagcaagaacaacacttaggacaaagttgtatgaagggttggctgatcagttgactgatattgttgtgaatgcagttctgtgcattcgcaaaccagatgaaccaattgatctatttatggtggaaataatgcacatgcgccacaaatttgatgttgacacccgtctggttgagggtctggtcctggaccacggttctcgtcaccctgacatgaagcgcagggcagagaattgttacatcttgacctgcaatgtctcattagaatatgagaaaagtgaaatcaatgcaggatttttttactcaaacgcagaacaaagagagaaaatggttgctgcagagagacgccaagttgatgaacgtgtcaaacagattattgaattgaaaaataaggtttgtgctggaggcgataaaaactttgtggtgatcaatcagaagggcattgaccctccatctctggacctccttgctagagcggggattattgctcttcgaagagcaaagaggagaaatatggagaggcttgtgctagcatgtggtggtgaagctgtcaattcagttgatgagttgactgaagattgtctaggctgggctggtcttgtctatgagcatgttcttggagaagaaaagtacacatttgtggagaatgtgaaaaatcctcgctcttgtactatactgattaaaggacctaatgaccataccattgcacaaatcaaggatgctgtccgtgatggtctaagatctgttaagaacacagttgaggatgaagcagttgtgctgggtgctggtgcttttgaggttgctgcaaagaagcatcttatcgacaatgtgaagaaaaccgtcaaaggacgagcacaacttggggtggaggcgtttgcggaagctcttcttgttatacccaagactttggctgagaactctggtttagatactcaagatgtgattgtttctctccagaatgagcatgaccgtggattagttgtggggttgaaccatcactctggggatccgattgatccccagatggaaggcatcttcgacaactactctgtgaagcgccagatcatcaattctggacccatcattgcatcccagttgctgcttgtggatgaagtgatcagggcaggccgcaacatgaggaaaccgacttagatttttgtcgccacctagccgagacttatttgttctaccttttgttttggttttgtgcctagtagtgatctggatgatacgtttgacttgagttggtcccatttcacgaagcaggtcgcattcgctttttttttttgggattactgcgtgcttccattttaacatgggattttagttttatcgatggttttaacatcctcctatgaggaaacaaagcctctagagagacgaggttgccttcccgaagttagtgccaccaaacttgctgcatggaacatgaagaagcaatgtttataacaatgttattatcaagtaatccgatgtgatggataaaatattggtactggcg

SEQ ID NO: 208290 - DNA, 1054 bp, Zea Mays
cccaaatttattttcaaccctgaatggatttagattattgctcttcgaagagcaaagaggagaaatatggagaggcttgtgctagcatgtggtggtgaagctgtcaattcagttgatgagttgactgaagattgtctaggctgggctggtcttgtctatgagcatgttcttggagaagaaaagtacacatttgtggagaatgtgaaaaatcctcgctcttgtactatactgattaaaggacctaatgaccataccattgcacaaatcaaggatgctgtccgtgatggtctaagatctgttaagaacacagttgaggatgaagcagttgtgctgggtgctggtgcttttgaggttgctgcaaagaagcatcttatcgacaatgtgaagaaaaccgtcaaaggacgagcacaacttggggtggaggcgtttgcggaagctcttcttgttatacccaagactttggctgagaactctggtttagatactcaagatgtgattgtttctctccagaatgagcatgaccgtggattagttgtggggttgaaccatcactctggggatccgattgatccccagatggaaggcatcttcgacaactactctgtgaagcgccagatcatcaattctggacccatcattgcatcccagttgctgcttgtggatgaagtgatcagggcaggccgcaacatgaggaaaccgacttagatttttgtcgccacctagccgagacttatttgttctaccttttgttttggttttgtgcctagtagtgatctggatgatacgtttgacttgagttggtcccatttcacgaagcaggtcgcattcgctttttttttttgggattactgcgtgcttccattttaacatgggattttagttttatcgatggttttaacatcctcctatgaggaaacaaagcctctagagagacgaggttgccttcccgaagttagtgccaccaaacttgctgcatggaacatgaagaagcaatgtttataacaatgttattatcaagtaatccgatgtgatggataaaatattggtactggcg

SEQ ID NO: 208291 - DNA, 990 bp, Zea Mays
ctttgttcatggcatggctttgagctgttagttaatagagattgctgagaagcacaactttttgatcttcgaagaccgcaagtttgctgacattggaaatacagtaaccatgcaatatgaaggaggaatattccgcatattggattgggccgatattgttaatgcgcatatagtacctggacctggaatcgtagatggcttgaagctgaagggtttgcctaaaggaagagggctacttctgctcgctgagatgagctctgccggcaaccttgcccatggagattacactgctgctgccgtaaagattgctgagcaacattctgattttgtgatgggatttatatcagtaaatcctgagtcttggtcagtaaaaccatcaagccctgcatttatccatgccacgcctggagttcagatggtcgcaggaggagatgatcttgggcaacaatacaacactcccgaatctgtgataaactacaggggcagtgacataatcatagttggccgtgggattataaaggcgagcgatcctatgaagaaggcgtgggagtaccgcttgcaagggtggcaggcatacaagaacagcttgctatgaaggaaggggggcgccatgagcatccccaagtataagggcgaatccagtcagtttggcgaaataagcgcatgcggaaaggttttcctgcagttgagtcaggacctaattgacatcagattcactgcagaggagactcatgccccatcatcgtttctgttacaataatttcctctcggtttaccctgttcttgctggttgagttaggcacgttgtgatgcctgtgcgcggttaaatcgtcttactgccatgccacttgaggtttggactcttgagcaagcaattttatcgatgccgagaattgtatgactctacgtgcttagtgctacttccgtcactgtgtgttggcgcggcaagctccgccagcgtcaaccactcagtgtgcagctgactgcgat

SEQ ID NO: 208292 - DNA, 2804 bp, Zea Mays
gttcatgggacgattttcttgtggtcaatgacttttggtgttttcatttgcatcaagtgttcaggagctcatagaagtcttggagtacacatatccaaggtggtttcggtgaagctagacgagtgggcagatgaacaggttgatattttagctgattcaggtgggaatgctgcagtaaacatgatatatgaagcatttgtgcccgaaaactacgcgaagccaaggcaagattgttcagcggaggagcgcaatgattttattaggagaaaatacgaggctcaacaatttttgactaacccccagctttcatgtcctccacgacgcaacgagaaacataatcaccaacagcatagtactagttcaagtcgacatggtttaggccattcattcaggaacagctggaggagaaaagagcacgaggccaaatcaacaaagaaaacaatcgaggtgggcatggtagagtttgtcggattgattaagatcgacatcataagaggcacaaatctagctatccgtgatgtcatgtcgagtgatccttacgttatcattaacctaggacaccagacaatgaaaacgaaagtggtaaagagcagtctaaatcctgtatggaatgaaaggctcatgctttcgatacccgacccagtgccgctgcttaaactgcaagtctacgacaaggacacgttcaccactgacgaccggatgggggaggccgagatcaacatccagccactggttgctgcagccaaagcccacgagacctctgctatcgcagataccgcgcagctcaacaaatggctggcgaaagatggcatctggatcccgagggacagcgccatctccatcgtcaacggcaaggtgaagcaggtggtgaatgccaggctccagaacgtcgagcgcggccagcttgagatggagctcgaccatctgaaccgatgcaaatacttattgggaatgacgattctgtgctgtatacttgccatggacgccgcggcgctggagtcgctcatcctggacctccacgccatcgaggtcgtgaagctgggctccttcacgctcaagtccggcatcaaatcgcccatctacctcgacctccgcgcgctcgtctcccacccgcgcctgctctccgccgtcgcctcgctccttcacgcgctcccggccacgcgcccctacggcctcgtctgcggtgtcccctacaccgcgctccccatcgccgccgtcctctccgtcgaccgctcaatccccatgctcatgcgccgcaaggaggtcaaggcccacggcaccgccaagtccatcgagggctccttcagccccggggacaccgtcctcatcatcgaggacctcgtcaccagtggcgcctccgtgctcgagaccgccgccccgctccgcgccgaggggctcgtcgtcgccgacgccgtagtcgtcgtcgaccgcgagcagggtggcagggagaacctcgccgctaatgggatcacgctgcactcgctcatgaccctcacggaggtgctggccgtgctgctcaagcacgggaaggtgaccgaggagaaggcgcaggaggtgaggcagttcctcgacgccaacaggaaggtggcggtgcctggggcagcacctgttacacccagggtgctcagaaagacattttcggagagggcgaatcttgccaccaaccctatggggaagaagctcttcgagctgatggagaccaagcagaccaacctgtgtgttgccgctgatgtcgggacaacaaaggaactccttgagctggctgacaaggtcggccctcaaatttgtatgttgaaaacccatgtggatatattatctgattttaccccagattttggctctaagctccgctcgattgctgagaagcacaactttttgatcttcgaagaccgcaagtttgctgacattggaaatacagtaaccatgcaatatgaaggaggaatattccgcatattggattgggccgatattgttaatgcgcatatagtacctggacctggaatcgtagatggcttgaagctgaagggtttgcctaaaggaagagggctacttctgctcgctgagatgagctctgccggcaaccttgcccatggagattacactgctgctgccgtaaagattgctgagcaacattctgattttgtgatgggatttatatcagtaaatcctgagtcttggtcagtaaaaccatcaagccctgcatttatccatgccacgcctggagttcagatggtcgcaggaggagatgatcttgggcaacaatacaacactcccgaatctgtgataaactacaggggcagtgacataatcatagttggccgtgggattataaaggcgagcgatcctatgaagaaggcgtgggagtaccgcttgcaagggtggcaggcatacaagaacagcttgctatgaaggaaggggggcgccatgagcatccccaagtataagggcgaatccagtcagtttggcgaaataagcgcatgcggaaaggttttcctgcagttgagtcaggacctaattgacatcagattcactgcagaggagactcatgccccatcatcgtttctgttacaataatttcctctcggtttaccctgttcttgctggttgagttaggcacgttgtgatgcctgtgcgcggttaaatcgtcttactgccatgccacttgaggtttggactcttgagcaagcaattttatcgatgccgagaattgtatgactctacgtgcttagtgctacttccgtcactgtgtgttggcgcggcaagctccgccagcgtcaaccactcagtgtgcagctgactgcgat

SEQ ID NO: 208293 - DNA, 4082 bp, Zea Mays
agaggacgattcacccgatgtaatacgcgattgttccaaccaagattcgaaggagaggcgacgcacggcctgactgtgcatcacatcgatgccttgcaccacatcgatgccttgcacctgtctctcatcacccccgtcctcggtggctggtgcggcgatcccttctccatccacagcgccgagagaggtctcaatggtgaggtctgccatcacgcacacaaacagtgggaagacctagaggcggcgggctgccatggtgaggtctgccgtctgccatcagcccatcacgcaggacgaataggaagaccatcagttgtgcgatcagcgtagggcgcctggttcggtccggtccggtccactgggccatcgggggcaaatcacaatgaaccagagagtgcaggagatacggcgggagggggtttatgtaaaattgctgctggacgttggatgaggaagggatggtccagattaaaagtgctcacatgtgcacgggagcgccatgagcacgggacacgatccctttttttttctcctcaaatctgaatcctgccaaaatacccgcagcccagctccgattccaacgaccaccgctccttcctcgccccagcctagcagcgcaggcgcggcgcagcgcaggccctgcgccgccctccgcgcacgtccaggtatccttcgaccgcaaccgcgcgcgcctctctccctcctcctgccgcaacacgtcctcctcgacgtcgtcgcctccgcccccaagaagtcgtacgtgatcgctccggacctccgtcgtttccttggatggatcggacgccattgttcatccggccggtctgcctccgttttgctcgctgaccgcccgcgctgagcccgcccgcccgctccctggcacgaggacgatgtagaggagcgcaagaacgggaggcggcgttggggacgacggggacgagatggaggggcgcaatcccgtgcagagattcgttgatagcccaaagccatacaacagaaggaaagcgcgcggtatgcaaacaaggatggattcgagtgaccacggcgaccgccaaggtccgagagcctgtgaagaattgccaggcaagatggataacgaccgtgccgatcgtcaacgcttgaaagcctgcgaattcccagccaagatggacaacaaccatgccgatcgtcaagtttcgaaagcctgcgaatcgaaaggcaatgcctgtgaattgccaggcaagatggataatgaccaccccgtccgtcaaggtttgaaagcccgtggactactgcaacctaagtcggatgctagtgaagatggcgtatgcgaaggtttgaaagcttgtggattgacagccaacaagatggatgctactgaccaatgcgaccacaaaggctccaaagtatgtagggtggtgacaaccaagacggatactagtgaccaaggcgattgtcaaaccttcaaagtatgtgggatagcagccaagatggatgttaacgaccatgccgatcaccaaggctccaaagccagtggaatgccaaccaagacagatgctaatgatcaatgcagcaaccaaggtccctttaagacagctgagaggttagatcatcttctgaaccaaccagcaaacagatactgtgctgattgtggtgctccagatccaaaatgggtgtcaatgacttttggtgttttcatttgcatcaagtgttcaggagctcatagaagtcttggagtacacatatccaaggtggtttcggtgaagctagacgagtgggcagatgaacaggttgatattttagctgattcaggtgggaatgctgcagtaaacatgatatatgaagcatttgtgcccgaaaactacgcgaagccaaggcaagattgttcagcggaggagcgcaatgattttattaggagaaaatacgaggctcaacaatttttgactaacccccagctttcatgtcctccacgacgcaacgagaaacataatcaccaacagcatagtactagttcaagtcgacatggtttaggccattcattcaggaacagctggaggagaaaagagcacgaggccaaatcaacaaagaaaacaatcgaggtgggcatggtagagtttgtcggattgattaagatcgacatcataagaggcacaaatctagctatccgtgatgtcatgtcgagtgatccttacgttatcattaacctaggacaccagacaatgaaaacgaaagtggtaaagagcagtctaaatcctgtatggaatgaaaggctcatgctttcgatacccgacccagtgccgctgcttaaactgcaagtctacgacaaggacacgttcaccactgacgaccggatgggggaggccgagatcaacatccagccactggttgctgcagccaaagcccacgagacctctgctatcgcagataccgcgcagctcaacaaatggctggcgaaagatggcatctggatcccgagggacagcgccatctccatcgtcaacggcaaggtgaagcaggtggtgaatgccaggctccagaacgtcgagcgcggccagcttgagatggagctcgaccatctgaaccgatgcaaatacttattgggaatgacgattctgtgctgtatacttgccatggacgccgcggcgctggagtcgctcatcctggacctccacgccatcgaggtcgtgaagctgggctccttcacgctcaagtccggcatcaaatcgcccatctacctcgacctccgcgcgctcgtctcccacccgcgcctgctctccgccgtcgcctcgctccttcacgcgctcccggccacgcgcccctacggcctcgtctgcggtgtcccctacaccgcgctccccatcgccgccgtcctctccgtcgaccgctcaatccccatgctcatcacctgttacacccagggtgctcagaaagacattttcggagagggcgaatcttgccaccaaccctatggggaagaagctcttcgagctgatggagaccaagcagaccaacctgtgtgttgccgctgatgtcgggacaacaaaggaactccttgagctggctgacaaggtcggccctcaaatttgtatgttgaaaacccatgtggatatattatctgattttaccccagattttggctctaagctccgctcgattgctgagaagcacaactttttgatcttcgaagaccgcaagtttgctgacattggaaatacagtaaccatgcaatatgaaggaggaatattccgcatattggattgggccgatattgttaatgcgcatatagtacctggacctggaatcgtagatggcttgaagctgaagggtttgcctaaaggaagagggctacttctgctcgctgagatgagctctgccggcaaccttgcccatggagattacactgctgctgccgtaaagattgctgagcaacattctgattttgtgatgggatttatatcagtaaatcctgagtcttggtcagtaaaaccatcaagccctgcatttatccatgccacgcctggagttcagatggtcgcaggaggagatgatcttgggcaacaatacaacactcccgaatctgtgataaactacaggggcagtgacataatcatagttggccgtgggattataaaggcgagcgatcctatgaagaaggcgtgggagtaccgcttgcaagggtggcaggcatacaagaacagcttgctatgaaggaaggggggcgccatgagcatccccaagtataagggcgaatccagtcagtttggcgaaataagcgcatgcggaaaggttttcctgcagttgagtcaggacctaattgacatcagattcactgcagaggagactcatgccccatcatcgtttctgttacaataatttcctctcggtttaccctgttcttgctggttgagttaggcacgttgtgatgcctgtgcgcggttaaatcgtcttactgccatgccacttgaggtttggactcttgagcaagcaattttatcgatgccgagaattgtatgactctacgtgcttagtgctacttccgtcactgtgtgttggcgcggcaagctccgccagcgtcaaccactcagtgtgcagctgactgcgat

SEQ ID NO: 208294 - DNA, 1734 bp, Zea Mays
ctgggtataagtgcaaaagtgactctcccttgcatgggacgaccgcattctctttcctctctctcgcagtctcgcctcgcccaacccagtccctcgcgcgcgctctctctcctgcaaggaccgccagggaaggatattacacaatgtcacttgctgtacctgtgacactaaagactactcagagcggtgagaatgaaagacttgaatacgccgtgtcagctatgcaaggataccgtttaaatatggaggatgctcatgcaattgtcctgaatcttgatgctgcaactggcacatcattctttggtgtttatgatggccatggaggacctgctgtttcaaagtattgtgcgagacacctacacgctgagcttcgccgacatgaaagttttcgggataatctccagactgcaattgagagaacgttcttaaggatggatgagatgatgagagacaggagggcagggagggaattatctgggtacggtggtaatgacaattggaaagcatatagaaaggctatcaacatgagtctatttctacccttctgtcagaagccagcttatcaggggccagtaatggatggatgtaccgcgtgtgtggttctcattagagacaaccgaatcattgtgggaaatgctggtgattctcgttgtgtactctcaaggaataatcaggcgattgatctatccaccgattttaaaccaaaccttccagacgaaagacaaagaatagaagctgcaggacatgtggtaacttttagcgagagaggaaatgtgcatcgtattgatgatggaattgcggtttcgagatcacttggtgacctaatgtacaaggataataatgatttaggtcccgtacaacaagcaattactgcctttcctgaagttcgcactgaagagataactcaagatgaccagtttcttattatagcatgtgatggaatctgggattgcctaacaagccagcaagcagttgattttataaggatatactcatttgctgacgtagggctggcgtccatctgcgaggccctccttgctcactgcgtggcacaacctagagggagggacaacatgactgtcatactggttcggttcaagacgccaggcgcttgccaagttagggccagcaacgtaccgccaccgccgatccgccaagatgctgctgcgagccaagctgctgggagccaagctgctgctgcgagccaagccgctgggagccaagctgctgccggccactagaacttccgcaccgcccacccccagctgggtttatgatggcaatgttcaccctcgccccacacgcggacccaagaccagaagcccccagagctccaagagcctcagagctttgagttcgttttttgtcaggaaaagatgaggttgcttaccctggttctttcacgtggtgtgcatcttatccccccgtagactttgggttcattttaccaggacaagataaacttgattttgttttgcgtaggatgatttcctgtgagaagagtagcttgtcgttctaggcactgacgatggagtttttttttcccctgtgagtcatatgtttggattaccacatcaatattcttgttttccgcggtttggaggatacgtatttgctctgccttaacatcgaatgcttcacatacatcagattgcaataccttacaatgtgcttgtcattgcatatttgtttcaagttttgttcttgaaagcttgattggaactgagagtgcac

SEQ ID NO: 208295 - DNA, 2908 bp, Zea Mays
ggcttctttactctctaaattttcttttttttaaaaaaaaatattgttctttggcgtacgctggtgcgcctctcctccccgcctcggcatcgacgcgatttgcgtgcccgacatgtcggactcgccggtggagctgccgagccggctcgccgtactgcccttccgcaacaaggtgctgctccccggtgccatcgtgcggattcgctgcaccaaccccagtagtgtgaagctggtggagcaagaactctggcagaaggaagagaaaggcctgatcggggtacttcctgtgcgggactcggaggcaacagctgttggctctttgctgtctcctggtgtgggcagtgattcaggtgaaggaggcagtaaggttggcggttctgcagtagagtcatcaaagcaggacacaaaaaatgggaaggagcccattcactggcacagcaagggagttgctgccagagctttacacctttccagaggggtggagaagccaagtggaagggttacatacattgttgttcttgaaggtctttgtaggttcagcgttcaggaactaagtgcaagaggaccataccatgtcgcccgtgtttcacgccttgacatgacaaagactggcagagcaagacccagatcttatcgctctttctaggcagtttaaagctactgccatggaactaatttctgttctagaacagaagcagaagacggttggtagaacaaaggtgcttcttgatacagttcctgtttacaggctagctgatatttttgttgctagctttgagataagttttgaggagcagctttcgatgctggattcagttcacttgaaagttagactctcaaaggcaactgaacttgtagacagacacctgcagtccattcttgtagctgagaaaataacacaaaaggttgaggggcagctatcaaagtcgcaaaaagaatttctactgcgccagcagatgagggccataaaagaagaacttggtgataacgatgatgacgaagatgatgttgctgctctggaaagaaagatgcagaatgcaggaatgcctgctaatatttggaagcatgctcaaagggaaatgaggcgcctacgaaagatgcaacctcagcaacctggttatagtagctctcgagcctacttggaacttcttgctgaccttccttggcaaaaggtcagtgaagaaagggagcttgaccttagagttgcgaaagagagccttgaccaggatcattatggactaacaaaagttaagcaaaggattattgagtatttggctgttcgtaagcttaaacctgatgccaggggtccagtgctgtgttttgttggaccacctggtgttgggaagacatctttggcctcctccatagcaaaggccctgaacagaaaattcataagaatctctcttggtggtgtaaaggatgaagctgatattaggggccaccgaaggacatacattggaagcatgccagggagacttattgatggactaaaggctatggtcaaactggtcatcgagaggtacacgagagaagctggtgtgcgcaatcttgagcggaacctagctgcattggctcgtgcagctgctgttaaggtcgcagagcaagttaaaactcttagacttggcaaggaaatacaaccaattactacaacccttcttgattcaaggcttgctgatggcggtgaagttgaaatggaagttattcctatggagcatgatatatcaaacacttatgaaaatccatctcctatgattgttgatgaggctatgctagaaaaagtacttgggcctcctagatttgatgacagagaagctgcagatcgtgtagcaagcccaggagtctcagttggccttgtctggacttcggttggtggggaagttcagtttgtggaggctacagccatggtgggtaagggtgacttgcatttgactgggcagcttggtgatgttattaaggagtcagcgcagctagctttgacatgggtgagagcaagagctgctgacctcaatttgtcacctacttctgatatcaacttattggagagccgtgatatccacatacattttcctgctggtgctgtgccaaaggatggcccttctgcaggtgtgacattggtaacggcactggtgtcgctttttagtaacagaaaagtcagagcagatactgctatgactggcgagatgactctaaggggccttgtattgccagttggtggtgttaaggacaaggtacttgcggcacatcgttatggaatcaagagagtaattttacctgaaaggaacttgaaggacttatcagaggttccattaccaattctctccgacatggagattctgcttgtgaagcgcatcgaggaagtactcgaccatgctttcgaaggccgatgcccacttagatcacgctccaagttgtagcacccaagtcgcgtttggtatggatgtttgcttgagaggatcatcgtcacagtaccacgaatggtcaacagtgtgagagtaagagcctagctctcttgccagcacaggtcttggcacgcccttttcggtttggcttcgcgtctggaatgtgtatacaggattactggtcagaattctgagaataacgagaagattctctgctgggatagtgggattccctgcatatttatgtgaaaccagctgtcggtatttatgcacagatgcaacagcaacacaaatctggtaggaacactggtgggtttctgtcgataatttgagtgtatatgtaatattatgtaatctattccagggaaacatagttaaaccgaggttgtgaaagccaaagagattgagaaatatcatacgtactttagggttgggtgacttgttacaaaatgtgcatattcacatttcttcaataaacaaccgaaaatgcaaacatttgctcgttaatt

SEQ ID NO: 208296 - DNA, 1432 bp, Zea Mays
cgacagacatgggcctacccaacaaagaatttaccagcccagcagcagtcactctcggcccaagcctttttttggatggccgcgtatatcacggcccaaagatttcgttagtcggatcggatcagcggctgctgcgcttcagttgccgccggcggcatgagggtggtggtgacgggcgcgacggggtacctgggaggccgcctgtgcgcggcgctggccggcgcgggccacgccgtgcgcgcgctcgtccgccactccagcgacgtctccggcctgccccgcgacatcgagatgacctacggcgacgtcaccgacgccgagtccctcgccgtggccttcgacggctgcgacgtcgtgttccacgtcgccgcggccgttgagccgtggttgcccgacccctccgttttcttcaaagttaatgtaggtggacttgagaatgtgttgaaggctgtcaagagaacaccaactgtgaagaagataatctacacatcttctttctttgcaattggtccaactgatggttatgttgcagatgagacacagatgcatcgagggaaggaattttgtactgaatatgagaaatcgaagtttcttgcagatagaatcgcactgcaggcagcagcagataaggtgccaatcaccattgtctacccagctaatagagaggtttaatgggcgcttgcctggttacataggagatgggtatgatagagaatcgttctgccatgttgatgatgttgttaacgggcacatagcagctatggagaagggcagagtgggccaacggtatctcctcactggtgaaaacatgtcgttcgtgctgatttttaacatggttgctaatatcacaaacacaagggctcccatgttccacgtacctctctggttgattgaagcgtatgggtggatttcagtttttgtttctcgcatcactggaaaactcccacttatcagttaccctactgtgcgtgttctgagacatcagtgggcatactcgtgtgacaaagcaaagatggagctgggctataccccaagaaacttgaccgaaggtttgtcggagatgctcctgtggctcaaggaagaaaaactaatcaagttttagcgttctctactacacaccacatcacatatttaatgtacaccgatacattggggatgtgctggggattttgaagtgtatatgcttcggcattgcatcacgtcgtattatgctagaggaaatctaagatgttgacgtgtgatactgatgttggcaacaaagagagaaattatgcattatttttacatcaatgtatttagttcgaggctttgcaggctgtaattgtataactagttgcttgaattgaaacataggtaattcaaatttcaaaggcgtgcccaagacaatcaaactattctgctgggcgtttgcgatgcatatacaagagatctt

SEQ ID NO: 208297 - DNA, 1949 bp, Zea Mays
acccgtacgtgcggtcagagagctatctggggtggcattggagttggagccggcctgacagcaccagagagagggttgccgacatgggagaagcggcagaccgcgagcggccgccgtggcgctgcacggtagccgtgcaggccgcgctctgcctcgcgctctacgcggccttcagcctcggcgagccgcagctcatcccgcggggcggggtggacgcactcgggcggggcgcgcgcggcggcggcgtcgccttcctcagcgtcgctggcggcgcgcgcggacccatcgaccaggagaggctcctgaggcagatggagaccacagcaaagctttatgaagtcaagttcgtgctggatgttactcaactgggagcggatgatccactctggcaaaatggttccatgtacttccaggctctgaacatcccgtggtactccacttcatcacatgggcggacggttggtaactttttgaagaaagtgaagatgccctacgatcaggttctagatattattggtctgggcacatggcctctgcaggataagcacttcttacaagggacaaattaaatggttggatcgattactagcactcactgaaagcaattggtaagtgcttactagcacttgtccctgtgtttgtgcaaactctttgtattgttattggatatgctagtttttttagataatgggaattgaaagttcccgacttttgtctcaaagagactacagccgatttattacaaactcagacaacataatatagagctgagaaacgaaactagagacaaagcctaaatgcagatccccatccatgatgtctaaaaatatgcatcaccaattcttccaaactacaacatgccttgtttaaagagatgcactgagttagcgggactgagttagcattgtatagtttagtattgaagaatgaaggtaccttgagaaactttaaacatccataagaaatagtaaaataaccctgtttagttgaatttatgccttcatgctgcatatggagatttatgcatgtgttactgtctgtaaccataatgctcacattctttttgttttaaaaaaggaaaatagttgttggatataatccattacttgtttgcaatgggaaagaaacaacaaagctcgatgtgccatttcaacatatttttgcaaaatatgaagtggtaacttctgtcctcttcattgatcgccttttttcctttaaattaatgattgctagtacttagttccctctatacatatagaatgcatacataagcatgggcgggtcttgtggctacttccatcgagacaactcgatactgtacattggacaccccaggagccctggtggtgcccaaacaagtgtagatggttttttcttgcacagagttagacccctcgagatggagtcaatgttgataaatgtagaaggcaagctagttcagagatctgatgttcagcagcatggaacgggagccatgtgaacctcacaactttcagtttctgttccattatgtcgtagcgccgaacaaaggcgtgacataatgttgtgttgtattgtattcattcagtttaaaaaaagctgcattagatttttgtcattttgcctgtttcaacatgtttgagtttgtaggtagtctttatcattatttacaaacatacaagagttcactatcacatgcagagtgctgcccaagcagggacgagaagttagttaatacattacttttctttatctgctggttctgtgccagttgatctctcaaccgatacagtccgattttgtttcagaaattttagatgatggttgcaaggctgtaactatcgttttgatgattcctacggcccactacatttcattttatcttttacaaaaactaaattcagaactcagaaagatacggttggtggtatagcagtttctttggagacttgctgactgacaaagagtct

SEQ ID NO: 208298 - DNA, 1597 bp, Zea Mays
ctcccgttcacaaaaaaagaagaagaaggacatggggtggtgactctggctccaaaaggccaaaatttgagcaggatggagcaggggatattgttattgagccacacttaactgaggccaagcctgtccggatagaccaagaatcatcatcatcatctaatagggatgctgaggcaagcacatctactagcatgaagcctgttaaaactgaagaaccagtagcagatcttcttcccaaagaattgaatgatatgacaattagtgacgataaagctgatgaccataatgataaggaaggtgaaggtgttactcttgatgggaatggagccgagacaggacagataattgtgacaacaataggaggtcataatgggaagccaaagcagaaggtctcatacatggcggaacgggttgttggtactggttcgtttggtatagttttccaggcaaaatgcttggaaactggtgagacggtggcgataaaaaaggtgttacaagataagcgctacaagaatagagagctccagactatgcagttgcttgaccacccaaatgtagttcagctgaagcatcacttcttttcaacaactcaaaggggagaagtttacctcaacctagtacttgaattcgtatctgagacagtttatcgtgttgccaaatactacaaccggatgaaccagcgtgtacccatattatatgttaagttatatgcatatcagatgtgccgtgcccttgcttacatccatcgtgttgtcggtgtgtgtcaccgtgatattaaacctcaaaatctactggtcaatcctcatacacatcaacttaagatttgcgattttgggagcgctaaaaaattgggctcctgaactaatatttggagctacggagtataccactgcaatcgatatctggtctgttggctgtgtagtggctgagcttctgattggtcagcctttgtttcctggtgaaagtggtgttgatcaactggtggaaatcataaagattttgggtactccaacaagagaggaaatcaggtgcatgaatccaaattattctgaattcaagttccctcagataaaagcccatccatggcacaagctttttggtaagcgcatgccacctgaagctgttgatctcgtgtcaaggctacttcagtactcaccaaacctgcgctgcactgctgttgatgcttgtgcccatccattctttgatgagctgcgggaccccaaggtctgcttgccaagtggacgaccgctgccagcgctgttcgacttcacagcagccgaactcgaagggctcccaatcgagcttgtccatcggatcgttcctgaacacatgaggaagtgaaccggtggtggacgtgctggagagatccctgtttcgtgagggcatgctatggaggagcgatgtagctagcgaacgccttgctagatgtaaagagggctgaaagttccttgattgggcgtgtcaccaaggttcatgctgaacaagagaattcagagtgctgtgctgtgcttgcttcgttagctggagatcaacaggatgtcagttttgatctgcttgcgcgtggtttcttttttttttttacgtcatcaacgacact

SEQ ID NO: 208299 - DNA, 2022 bp, Zea Mays
aaccctccccttcctccgcctcccattcccaaaattttcaccgcacgccctctcgctctcctcggctaaccgcgacgacgacccccgaagcttcgcgaagcttcctgggcctccccccgcggccgcccctccctagatcgccgcctctggcagcggcgaggctgcatcgcgagggcggtggaggctggaggagccgggccacggggtcgacgaaggcgagactagggtttgggtttggtgtccagctgcatcggtcggcgccctgtgagggagaaggatgcatatgatgcggcggctcaagagcatcgcctccggccgctcgtccgtctccgatccgggtggtgactctggctccaaaaggccaaaatttgagcaggatggagcaggggatattgttattgagccacacttaactgaggccaagcctgtccggatagaccaagaatcatcatcatcatctaatagggatgctgaggcaagcacatctactagcatgaagcctgttaaaactgaagaaccagtagcagatcttcttcccaaagaattgaatgatatgacaattagtgacgataaagctgatgaccataatgataaggaaggtgaaggtgttactcttgatgggaatggagccgagacaggacagataattgtgacaacaataggaggtcataatgggaagccaaagcagaaggtctcatacatggcggaacgggttgttggtactggttcgtttggtatagttttccaggcaaaatgcttggaaactggtgagacggtggcgataaaaaaggtgttacaagataagcgctacaagaatagagagctccagactatgcagttgcttgaccacccaaatgtagttcagctgaagcatcacttcttttcaacaactcaaaggggagaagtttacctcaacctagtacttgaattcgtatctgagacagtttatcgtgttgccaaatactacaaccggatgaaccagcgtgtacccatattatatgttaagttatatgcatatcagatgtgccgtgcccttgcttacatccatcgtgttgtcggtgtgtgtcaccgtgatattaaacctcaaaatctactggtcaatcctcatacacatcaacttaagatttgcgattttgggagcgctaaaaaattgggctcctgaactaatatttggagctacggagtataccactgcaatcgatatctggtctgttggctgtgtagtggctgagcttctgattggtcagcctttgtttcctggtgaaagtggtgttgatcaactggtggaaatcataaagattttgggtactccaacaagagaggaaatcaggtgcatgaatccaaattattctgaattcaagttccctcagataaaagcccatccatggcacaagctttttggtaagcgcatgccacctgaagctgttgatctcgtgtcaaggctacttcagtactcaccaaacctgcgctgcactgctgttgatgcttgtgcccatccattctttgatgagctgcgggaccccaaggtctgcttgccaagtggacgaccgctgccagcgctgttcgacttcacagcagccgaactcgaagggctcccaatcgagcttgtccatcggatcgttcctgaacacatgaggaagtgaaccggtggtggacgtgctggagagatccctgtttcgtgagggcatgctatggaggagcgatgtagctagcgaacgccttgctagatgtaaagagggctgaaagttccttgattgggcgtgtcaccaaggtgaccctagagggcaggcaaaccttacgtttgcttgttgcccatggtggaaatcggcttgtacctttcgcaatcgcatcttgtgtatcgacgatgacttaggggctgctgttgtattgtcaggttcatgctgaacaagagaattcagagtgctgtgctgtgcttgcttcgttagctggagatcaacaggatgtcagttttgatctgcttgcgcgtggtttcttttttttttttacgtcatcaacgacact

SEQ ID NO: 208300 - DNA, 1946 bp, Zea Mays
aaccctccccttcctccgcctcccattcccaaaattttcaccgcacgccctctcgctctcctcggctaaccgcgacgacgacccccgaagcttcgcgaagcttcctgggcctccccccgcggccgcccctccctagatcgccgcctctggcagcggcgaggctgcatcgcgagggcggtggaggctggaggagccgggccacggggtcgacgaaggcgagactagggtttgggtttggtgtccagctgcatcggtcggcgccctgtgagggagaaggatgcatatgatgcggcggctcaagagcatcgcctccggccgctcgtccgtctccgatccgggtggtgactctggctccaaaaggccaaaatttgagcaggatggagcaggggatattgttattgagccacacttaactgaggccaagcctgtccggatagaccaagaatcatcatcatcatctaatagggatgctgaggcaagcacatctactagcatgaagcctgttaaaactgaagaaccagtagcagatcttcttcccaaagaattgaatgatatgacaattagtgacgataaagctgatgaccataatgataaggaaggtgaaggtgttactcttgatgggaatggagccgagacaggacagataattgtgacaacaataggaggtcataatgggaagccaaagcagaaggtctcatacatggcggaacgggttgttggtactggttcgtttggtatagttttccaggcaaaatgcttggaaactggtgagacggtggcgataaaaaaggtgttacaagataagcgctacaagaatagagagctccagactatgcagttgcttgaccacccaaatgtagttcagctgaagcatcacttcttttcaacaactcaaaggggagaagtttacctcaacctagtacttgaattcgtatctgagacagtttatcgtgttgccaaatactacaaccggatgaaccagcgtgtacccatattatatgttaagttatatgcatatcagatgtgccgtgcccttgcttacatccatcgtgttgtcggtgtgtgtcaccgtgatattaaacctcaaaatctactggtcaatcctcatacacatcaacttaagatttgcgattttgggagcgctaaaaaattggtccctggtgagcctaacatatcgtacatttgctcgcggtattatagggctcctgaactaatatttggagctacggagtataccactgcaatcgatatctggtctgttggctgtgtagtggctgagcttctgattggtcagcctttgtttcctggtgaaagtggtgttgatcaactggtggaaatcataaagattttgggtactccaacaagagaggaaatcaggtgcatgaatccaaattattctgaattcaagttccctcagataaaagcccatccatggcacaagctttttggtaagcgcatgccacctgaagctgttgatctcgtgtcaaggctacttcagtactcaccaaacctgcgctgcactgctgttgatgcttgtgcccatccattctttgatgagctgcgggaccccaaggtctgcttgccaagtggacgaccgctgccagcgctgttcgacttcacagcagccgaactcgaagggctcccaatcgagcttgtccatcggatcgttcctgaacacatgaggaagtgaaccggtggtggacgtgctggagagatccctgtttcgtgagggcatgctatggaggagcgatgtagctagcgaacgccttgctagatgtaaagagggctgaaagttccttgattgggcgtgtcaccaaggttcatgctgaacaagagaattcagagtgctgtgctgtgcttgcttcgttagctggagatcaacaggatgtcagttttgatctgcttgcgcgtggtttcttttttttttttacgtcatcaacgacact

SEQ ID NO: 208301 - DNA, 2790 bp, Zea Mays
cagcaagatgtgagaaaatagagaaataaatagatccccactgccaactaaaccctaaggaaaaattcgccgactgccatcaaattttatactcattccttagcagtcatcaaattttatactcattccttacatgccactgagtggtatatatataacttttttgtgtgtattatatgtagggccagtggcacacaagtaatgagtacattttttgatggcatacatggaattgctcctaaacccaacacaaagttgtccacaggatgtgcatacctcaaaatatgcagtcgccgcgagatggattcatgtcggtgtcgtccaggaagattccggcggataatcaccacttctagacgacattgacgaggctggacgtttggtggagagattcgacatcttgccagcgaatgttttgtgccttgaaatcgagggagtggagaggaacgacggagacatgatcgtgaaatcaaggggggtgaagaggacctgcggaggcatgaaggaaatgtctggcatggggacggagaaaaccagtggattgggagctcacatcgcctgtgaatgttttgtgccgtggatgggtctttcttcgcgcttggaactgaacagaaaatctactcaaagtttcacagattggtatgagctgatcacccctggttgtgtagttccttctgcaatgatttactgcactcactgtgctgattactgcccctccataaaggaccctgacaaaggatacatatgttgtggtacatgtgggaaggttcttgatcaggaggtatacactgatgagcctacttttgttaaggataacacaggacagagtcgcttagctggaagtattcttgcaagcattgagtctggatattcgatttctcatcaaagaaccttagacaaaggtagggatgagattaggcagattgtcaataacttacatgtcagcggtggagaaactgtcgttagcaaggcttatcgcttctatgagctagctgtcgaccgtaattttaccaggggccgtagaacaagccatgttgcagctgcttgcctttacattgcctgcaggcaaagtaagaaggcttatcttcttattgatttctctgattatctccaaataagtgtttacgtgctaggtgctgtttttctccagctctgccaagttttgctactcgcggatcatccagttgttcagaaacttgtagatcccagccttttcatccatcgctttaccaaatgtttgctgggaagaagagataatgctgtctcagacacagctttttctcgagaagtctcagacacagctttacgcattgtagctagcatgaagagagattggatgcagactgggaggaaaccaagtggattatgtggtgcagcattatacattgctgcactctctcatgggtgtaattacaccaaggcagatattgtctctgttgtgcatgtgtgtgaggccactctaacgaagcgattgatagagtttgaaaatacggattctggcagcttaacgattgaagaatttctagcaacagctgatgaatataatgaagcgtctgtttcaaaatattcgcctaagtctggggaaatcctttgcaaacacaagggtaaagattttgagcattttgcccatggactttgtgaaaaatgcttcaataagttcactaaactgtcgggtggactagaaggtggtgctaaccctccagcattccaacgagctgaaaacaaaagacttgaagctgctaaaagggctgaagaagctgctgcagttaaggaggcagcgctggaagaatctctttgcgacacacagaattctgagattgagagtaccacaactcctaaaaaggctttaagcggggataaatcttcaacaattggatctgggggactcataaatgactctgtgccaccgaaggatcctgaagagggaggtgaaaattgtgaaggcaatgctgatccagaaagcctttctgacatcgacgatgtagaggttgattggtaccttcacaatgaggaagaaacacaatataaaaagattatctgggaggaaatgaacaaagagtaccttgaggaacaagcagccaaggaagctttggcagctgaattggcagctagagggattgttgtggaagagggaaagaaaaaacggaaacgtaacgaagacaccaagagctcgacgcctgctgacacaccggcagaagccacatacaacatgctgaaacggaagggacttggttccaagatcaatgagggagctgttggcgaattatacaagactaaagatgaagttgagagcgcgagtaggaaagaagagatggagttcgacgcactgtttgggccggacaacgctgatggcgagacggtcgatgatggtggttacggctatgggggctgcggcgatggtggcgcggaagcctacaatggcattgatgacgattttgatttctaggaggatgtgttatgtgtagcagcatttgcagctgaccagcacgggctagattcttcatctgtgcgttatagtttatagttagtttcatttttcttttgttaggggagtttgaccaaatcattatggagctattggatagtgcacttagttttggttgtataataatgttgggaactaggttctgcatgggcgtcgtaactgtcgcaagccctatgtggtcaagcgcctataccatgggcatttgttgtacatcccacctccaaaagattgcaagtggtgatgtaacattttgtattagcaataaaggacacaagaatgcattcatttgaaactttgaaaatctc

SEQ ID NO: 208302 - DNA, 2247 bp, Zea Mays
atgatcgtgaaatcaaggggggtgaagaggacctgcggaggcatgaaggaaatgtctggcatggggacggagaaaaccagtggattgggagctcacatcgcctgtgaatgttttgtgccgtggatgggtctttcttcgcgcttggaactgaacagaaaatctactcaaagtttcacagattggtatgagctgatcacccctggttgtgtagttccttctgcaatgatttactgcactcactgtgctgattactgcccctccataaaggaccctgacaaaggatacatatgttgtggtacatgtgggaaggttcttgatcaggaggtatacactgatgagcctacttttgttaaggataacacaggacagagtcgcttagctggaagtattcttgcaagcattgagtctggatattcgatttctcatcaaagaaccttagacaaagctagctgtcgaccgtaattttaccaggggccgtagaacaagccatgttgcagctgcttgcctttacattgcctgcaggcaaagtaagaaggcttatcttcttattgatttctctgattatctccaaataagtgtttacgtgctaggtgctgtttttctccagctctgccaagttttgctactcgcggatcatccagttgttcagaaacttgtagatcccagccttttcatccatcgctttaccaaatgtttgctgggaagaagagataatgctgtctcagacacagctttttctcgagaagtctcagacacagctttacgcattgtagctagcatgaagagagattggatgcagactgggaggaaaccaagtggattatgtggtgcagcattatacattgctgcactctctcatgggtgtaattacaccaaggcagatattgtctctgttgtgcatgtgtgtgaggccactctaacgaagcgattgatagagtttgaaaatacggattctggcagcttaacgattgaagaatttctagcaacagctgatgaatataatgaagcgtctgtttcaaaatattcgcctaagtctggggaaatcctttgcaaacacaagggtaaagattttgagcattttgcccatggactttgtgaaaaatgcttcaataagttcactaaactgtcgggtggactagaaggtggtgctaaccctccagcattccaacgagctgaaaacaaaagacttgaagctgctaaaagggctgaagaagctgctgcagttaaggaggcagcgctggaagaatctctttgcgacacacagaattctgagattgagagtaccacaactcctaaaaaggctttaagcggggataaatcttcaacaattggatctgggggactcataaatgactctgtgccaccgaaggatcctgaagagggaggtgaaaattgtgaaggcaatgctgatccagaaagcctttctgacatcgacgatgtagaggttgattggtaccttcacaatgaggaagaaacacaatataaaaagattatctgggaggaaatgaacaaagagtaccttgaggaacaagcagccaaggaagctttggcagctgaattggcagctagagggattgttgtggaagagggaaagaaaaaacggaaacgtaacgaagacaccaagagctcgacgcctgctgacacaccggcagaagccacatacaacatgctgaaacggaagggacttggttccaagatcaatgagggagctgttggcgaattatacaagactaaagatgaagttgagagcgcgagtaggaaagaagagatggagttcgacgcactgtttgggccggacaacgctgatggcgagacggtcgatgatggtggttacggctatgggggctgcggcgatggtggcgcggaagcctacaatggcattgatgacgattttgatttctaggaggatgtgttatgtgtagcagcatttgcagctgaccagcacgggctagattcttcatctgtgcgttatagtttatagttagtttcatttttcttttgttaggggagtttgaccaaatcattatggagctattggatagtgcacttagttttggttgtataataatgttgggaactaggttctgcatgggcgtcgtaactgtcgcaagccctatgtggtcaagcgcctataccatgggcatttgttgtacatcccacctccaaaagattgcaagtggtgatgtaacattttgtattagcaataaaggacacaagaatgcattcatttgaaactttgaaaatctc

SEQ ID NO: 208303 - DNA, 2502 bp, Zea Mays
gcgggtgtgggaggttggacaggagacgtttttttttccaccgtcgccgccgcccctgcttgccgctgcgcgcccccgcctcctacgcaggtcgtctgctccgaagccggtggccgaagctcgcgtcgccctctccctcaccggattcatcgtccgagccctcgctagagctcgtgacctcgccgtcgccggagccctcactctcactggattcgtgtcctcgccggagctcgcgctaacctgctcgaccacacctcgccgcccgcggccatctcacacccactccgcgcgaccgcggtcctctcctcacctatcggtcgttcctgccctcgcgaggaagacgacgcctcaagctatcctccctccctctcgatctgatccggagtggctcacgttttcctattcctcgccagcggcagaggcggcaaccctcgatccgtgtcaatcctctattagatgttgtggtacatgtgggaaggttcttgatcaggaggtatacactgatgagcctacttttgttaaggataacacaggacagagtcgcttagctggaagtattcttgcaagcattgagtctggatattcgatttctcatcaaagaaccttagacaaaggtagggatgagattaggcagattgtcaataacttacatgtcagcggtggagaaactgtcgttagcaaggcttatcgcttctatgagctagctgtcgaccgtaattttaccaggggccgtagaacaagccatgttgcagctgcttgcctttacattgcctgcaggcaaagtaagaaggcttatcttcttattgatttctctgattatctccaaataagtgtttacgtgctaggtgctgtttttctccagctctgccaagttttgctactcgcggatcatccagttgttcagaaacttgtagatcccagccttttcatccatcgctttaccaaatgtttgctgggaagaagagataatgctgtctcagacacagctttttctcgagaagtctcagacacagctttacgcattgtagctagcatgaagagagattggatgcagactgggaggaaaccaagtggattatgtggtgcagcattatacattgctgcactctctcatgggtgtaattacaccaaggcagatattgtctctgttgtgcatgtgtgtgaggccactctaacgaagcgattgatagagtttgaaaatacggattctggcagcttaacgattgaagaatttctagcaacagctgatgaatataatgaagcgtctgtttcaaaatattcgcctaagtctggggaaatcctttgcaaacacaagggtaaagattttgagcattttgcccatggactttgtgaaaaatgcttcaataagttcactaaactgtcgggtggactagaaggtggtgctaaccctccagcattccaacgagctgaaaacaaaagacttgaagctgctaaaagggctgaagaagctgctgcagttaaggaggcagcgctggaagaatctctttgcgacacacagaattctgagattgagagtaccacaactcctaaaaaggctttaagcggggataaatcttcaacaattggatctgggggactcataaatgactctgtgccaccgaaggatcctgaagagggaggtgaaaattgtgaaggcaatgctgatccagaaagcctttctgacatcgacgatgtagaggttgattggtaccttcacaatgaggaagaaacacaatataaaaagattatctgggaggaaatgaacaaagagtaccttgaggaacaagcagccaaggaagctttggcagctgaattggcagctagagggattgttgtggaagagggaaagaaaaaacggaaacgtaacgaagacaccaagagctcgacgcctgctgacacaccggcagaagccacatacaacatgctgaaacggaagggacttggttccaagatcaatgagggagctgttggcgaattatacaagactaaagatgaagttgagagcgcgagtaggaaagaagagatggagttcgacgcactgtttgggccggacaacgctgatggcgagacggtcgatgatggtggttacggctatgggggctgcggcgatggtggcgcggaagcctacaatggcattgatgacgattttgatttctaggaggatgtgttatgtgtagcagcatttgcagctgaccagcacgggctagattcttcatctgtgcgttatagtttatagttagtttcatttttcttttgttaggggagtttgaccaaatcattatggagctattggatagtgcacttagttttggttgtataataatgttgggaactaggttctgcatgggcgtcgtaactgtcgcaagccctatgtggtcaagcgcctataccatgggcatttgttgtacatcccacctccaaaagattgcaagtggtgatgtaacattttgtattagcaataaaggacacaagaatgcattcatttgaaactttgaaaatctc

SEQ ID NO: 208304 - DNA, 2357 bp, Zea Mays
gcgggtgtgggaggttggacaggagacgtttttttttccaccgtcgccgccgcccctgcttgccgctgcgcgcccccgcctcctacgcaggtcgtctgctccgaagccggtggccgaagctcgcgtcgccctctccctcaccggattcatcgtccgagccctcgctagagctcgtgacctcgccgtcgccggagccctcactctcactggattcgtgtcctcgccggagctcgcgctaacctgctcgaccacacctcgccgcccgcggccatctcacacccactccgcgcgaccgcggtcctctcctcacctatcggtcgttcctgccctcgcgaggaagacgacgcctcaagctatcctccctccctctcgatctgatccggagtggctcacgttttcctattcctcgccagcggcagaggcggcaaccctcgatccgtgtcaatcctctattagtttcacagattggtatgagctgatcacccctggttgtgtagttccttctgcaatgatttactgcactcactgtgctgattactgcccctccataaaggaccctgacaaaggatacatatgttgtggtacatgtgggaaggttcttgatcaggaggtatacactgatgagcctacttttgttaaggataacacaggacagagtcgcttagctggaagtattcttgcaagcattgagtctggatattcgatttctcatcaaagaaccttagacaaaggtagggatgagattaggcagattgtcaataacttacatgtcagcggtggagaaactgtcgttagcaaggcttatcgcttctatgagctagctgtcgaccgtaattttaccaggggccgtagaacaagccatgttgcagctgcttgcctttacattgcctgcaggcaaagtaagaaggcttatcttcttattgatttctctgattatctccaaataagtgtttacgtgctaggtgctgtttttctccagctctgccaagttttgctactcgcggatcatccagttgttcagaaacttgtagatcccagccttttcatccatcgctttaccaaatgtttgctgggaagaagagataatgctgtctcagacacagctttttctcgagaagtctcagacacagctttacgcattgtagctagcatgaagagagattggatgcagactgggaggaaaccaagtggattatgtggtgcagcattatacattgctgcactctctcatgggtgtaattacaccaaggcagatattgtctctgttgtgcatgtgtgtgaggccactctaacgaagcgattgatagagtttgaaaatacggattctggcagcttaacggctttaagcggggataaatcttcaacaattggatctgggggactcataaatgactctgtgccaccgaaggatcctgaagagggaggtgaaaattgtgaaggcaatgctgatccagaaagcctttctgacatcgacgatgtagaggttgattggtaccttcacaatgaggaagaaacacaatataaaaagattatctgggaggaaatgaacaaagagtaccttgaggtaagtaacactatggtcacattttttcatcttgaccagagaatgctactacctgcatttttattttacaggaacaagcagccaaggaagctttggcagctgaattggcagctagagggattgttgtggaagagggaaagaaaaaacggaaacgtaacgaagacaccaagagctcgacgcctgctgacacaccggcagaagccacatacaacatgctgaaacggaagggacttggttccaagatcaatgagggagctgttggcgaattatacaagactaaagatgaagttgagagcgcgagtaggaaagaagagatggagttcgacgcactgtttgggccggacaacgctgatggcgagacggtcgatgatggtggttacggctatgggggctgcggcgatggtggcgcggaagcctacaatggcattgatgacgattttgatttctaggaggatgtgttatgtgtagcagcatttgcagctgaccagcacgggctagattcttcatctgtgcgttatagtttatagttagtttcatttttcttttgttaggggagtttgaccaaatcattatggagctattggatagtgcacttagttttggttgtataataatgttgggaactaggttctgcatgggcgtcgtaactgtcgcaagccctatgtggtcaagcgcctataccatgggcatttgttgtacatcccacctccaaaagattgcaagtggtgatgtaacattttgtattagcaataaaggacacaagaatgcattcatttgaaactttgaaaatctc

SEQ ID NO: 208305 - DNA, 2608 bp, Zea Mays
gcgggtgtgggaggttggacaggagacgtttttttttccaccgtcgccgccgcccctgcttgccgctgcgcgcccccgcctcctacgcaggtcgtctgctccgaagccggtggccgaagctcgcgtcgccctctccctcaccggattcatcgtccgagccctcgctagagctcgtgacctcgccgtcgccggagccctcactctcactggattcgtgtcctcgccggagctcgcgctaacctgctcgaccacacctcgccgcccgcggccatctcacacccactccgcgcgaccgcggtcctctcctcacctatcggtcgttcctgccctcgcgaggaagacgacgcctcaagctatcctccctccctctcgatctgatccggagtggctcacgttttcctattcctcgccagcggcagaggcggcaaccctcgatccgtgtcaatcctctattagtttcacagattggtatgagctgatcacccctggttgtgtagttccttctgcaatgatttactgcactcactgtgctgattactgcccctccataaaggaccctgacaaaggatacatatgttgtggtacatgtgggaaggttcttgatcaggaggtatacactgatgagcctacttttgttaaggataacacaggacagagtcgcttagctggaagtattcttgcaagcattgagtctggatattcgatttctcatcaaagaaccttagacaaaggtagggatgagattaggcagattgtcaataacttacatgtcagcggtggagaaactgtcgttagcaaggcttatcgcttctatgagctagctgtcgaccgtaattttaccaggggccgtagaacaagccatgttgcagctgcttgcctttacattgcctgcaggcaaagtaagaaggcttatcttcttattgatttctctgattatctccaaataagtgtttacgtgctaggtgctgtttttctccagctctgccaagttttgctactcgcggatcatccagttgttcagaaacttgtagatcccagccttttcatccatcgctttaccaaatgtttgctgggaagaagagataatgctgtctcagacacagctttttctcgagaagtctcagacacagctttacgcattgtagctagcatgaagagagattggatgcagactgggaggaaaccaagtggattatgtggtgcagcattatacattgctgcactctctcatgggtgtaattacaccaaggcagatattgtctctgttgtgcatgtgtgtgaggccactctaacgaagcgattgatagagtttgaaaatacggattctggcagcttaacgattgaagaatttctagcaacagctgatgaatataatgaagcgtctgtttcaaaatattcgcctaagtctggggaaatcctttgcaaacacaaggactagactacatttgcttttgacacttagtctgattgcccagttcactaaactgtcgggtggactagaaggtggtgctaaccctccagcattccaacgagctgaaaacaaaagacttgaagctgctaaaagggctgaagaagctgctgcagttaaggaggcagcgctggaagaatctctttgcgacacacagaattctgagattgagagtaccacaactcctaaaaaggctttaagcggggataaatcttcaacaattggatctgggggactcataaatgactctgtgccaccgaaggatcctgaagagggaggtgaaaattgtgaaggcaatgctgatccagaaagcctttctgacatcgacgatgtagaggttgattggtaccttcacaatgaggaagaaacacaatataaaaagattatctgggaggaaatgaacaaagagtaccttgaggaacaagcagccaaggaagctttggcagctgaattggcagctagagggattgttgtggaagagggaaagaaaaaacggaaacgtaacgaagacaccaagagctcgacgcctgctgacacaccggcagaagccacatacaacatgctgaaacggaagggacttggttccaagatcaatgagggagctgttggcgaattatacaagactaaagatgaagttgagagcgcgagtaggaaagaagagatggagttcgacgcactgtttgggccggacaacgctgatggcgagacggtcgatgatggtggttacggctatgggggctgcggcgatggtggcgcggaagcctacaatggcattgatgacgattttgatttctaggaggatgtgttatgtgtagcagcatttgcagctgaccagcacgggctagattcttcatctgtgcgttatagtttatagttagtttcatttttcttttgttaggggagtttgaccaaatcattatggagctattggatagtgcacttagttttggttgtataataatgttgggaactaggttctgcatgggcgtcgtaactgtcgcaagccctatgtggtcaagcgcctataccatgggcatttgttgtacatcccacctccaaaagattgcaagtggtgatgtaacattttgtattagcaataaaggacacaagaatgcattcatttgaaactttgaaaatctc

SEQ ID NO: 208306 - DNA, 1613 bp, Zea Mays
gtttatcagaacatcctaagcgtgctattctgtttgttgcaactaacgagatccttatgtttgctgggaagaagagataatgctgtctcagacacagctttttctcgagaagtctcagacacagctttacgcattgtagctagcatgaagagagattggatgcagactgggaggaaaccaagtggattatgtggtgcagcattatacattgctgcactctctcatgggtgtaattacaccaaggcagatattgtctctgttgtgcatgtgtgtgaggccactctaacgaagcgattgatagagtttgaaaatacggattctggcagcttaacgattgaagaatttctagcaacagctgatgaatataatgaagcgtctgtttcaaaatattcgcctaagtctggggaaatcctttgcaaacacaagggtaaagattttgagcattttgcccatggactttgtgaaaaatgcttcaataagttcactaaactgtcgggtggactagaaggtggtgctaaccctccagcattccaacgagctgaaaacaaaagacttgaagctgctaaaagggctgaagaagctgctgcagttaaggaggcagcgctggaagaatctctttgcgacacacagaattctgagattgagagtaccacaactcctaaaaaggctttaagcggggataaatcttcaacaattggatctgggggactcataaatgactctgtgccaccgaaggatcctgaagagggaggtgaaaattgtgaaggcaatgctgatccagaaagcctttctgacatcgacgatgtagaggttgattggtaccttcacaatgaggaagaaacacaatataaaaagattatctgggaggaaatgaacaaagagtaccttgaggaacaagcagccaaggaagctttggcagctgaattggcagctagagggattgttgtggaagagggaaagaaaaaacggaaacgtaacgaagacaccaagagctcgacgcctgctgacacaccggcagaagccacatacaacatgctgaaacggaagggacttggttccaagatcaatgagggagctgttggcgaattatacaagactaaagatgaagttgagagcgcgagtaggaaagaagagatggagttcgacgcactgtttgggccggacaacgctgatggcgagacggtcgatgatggtggttacggctatgggggctgcggcgatggtggcgcggaagcctacaatggcattgatgacgattttgatttctaggaggatgtgttatgtgtagcagcatttgcagctgaccagcacgggctagattcttcatctgtgcgttatagtttatagttagtttcatttttcttttgttaggggagtttgaccaaatcattatggagctattggatagtgcacttagttttggttgtataataatgttgggaactaggttctgcatgggcgtcgtaactgtcgcaagccctatgtggtcaagcgcctataccatgggcatttgttgtacatcccacctccaaaagattgcaagtggtgatgtaacattttgtattagcaataaaggacacaagaatgcattcatttgaaactttgaaaatctc

SEQ ID NO: 208307 - DNA, 1387 bp, Zea Mays
ctcgaacttattcaacggcctattatgtctctgttgtgcatgtgtgtgaggccactctaacgaagcgattgatagagtttgaaaatacggattctggcagcttaacgattgaagaatttctagcaacagctgatgaatataatgaagcgtctgtttcaaaatattcgcctaagtctggggaaatcctttgcaaacacaagggtaaagattttgagcattttgcccatggactttgtgaaaaatgcttcaataagttcactaaactgtcgggtggactagaaggtggtgctaaccctccagcattccaacgagctgaaaacaaaagacttgaagctgctaaaagggctgaagaagctgctgcagttaaggaggcagcgctggaagaatctctttgcgacacacagaattctgagattgagagtaccacaactcctaaaaaggctttaagcggggataaatcttcaacaattggatctgggggactcataaatgactctgtgccaccgaaggatcctgaagagggaggtgaaaattgtgaaggcaatgctgatccagaaagcctttctgacatcgacgatgtagaggttgattggtaccttcacaatgaggaagaaacacaatataaaaagattatctgggaggaaatgaacaaagagtaccttgaggaacaagcagccaaggaagctttggcagctgaattggcagctagagggattgttgtggaagagggaaagaaaaaacggaaacgtaacgaagacaccaagagctcgacgcctgctgacacaccggcagaagccacatacaacatgctgaaacggaagggacttggttccaagatcaatgagggagctgttggcgaattatacaagactaaagatgaagttgagagcgcgagtaggaaagaagagatggagttcgacgcactgtttgggccggacaacgctgatggcgagacggtcgatgatggtggttacggctatgggggctgcggcgatggtggcgcggaagcctacaatggcattgatgacgattttgatttctaggaggatgtgttatgtgtagcagcatttgcagctgaccagcacgggctagattcttcatctgtgcgttatagtttatagttagtttcatttttcttttgttaggggagtttgaccaaatcattatggagctattggatagtgcacttagttttggttgtataataatgttgggaactaggttctgcatgggcgtcgtaactgtcgcaagccctatgtggtcaagcgcctataccatgggcatttgttgtacatcccacctccaaaagattgcaagtggtgatgtaacattttgtattagcaataaaggacacaagaatgcattcatttgaaactttgaaaatctc

SEQ ID NO: 208308 - DNA, 682 bp, Zea Mays
caagtttaacaagataaggttaaggttaagcgaaacggaaacgtaacgaagacaccaagagctcgacgcctgctgacacaccggcagaagccacatacaacatgctgaaacggaagggacttggttccaagatcaatgagggagctgttggcgaattatacaagactaaagatgaagttgagagcgcgagtaggaaagaagagatggagttcgacgcactgtttgggccggacaacgctgatggcgagacggtcgatgatggtggttacggctatgggggctgcggcgatggtggcgcggaagcctacaatggcattgatgacgattttgatttctaggaggatgtgttatgtgtagcagcatttgcagctgaccagcacgggctagattcttcatctgtgcgttatagtttatagttagtttcatttttcttttgttaggggagtttgaccaaatcattatggagctattggatagtgcacttagttttggttgtataataatgttgggaactaggttctgcatgggcgtcgtaactgtcgcaagccctatgtggtcaagcgcctataccatgggcatttgttgtacatcccacctccaaaagattgcaagtggtgatgtaacattttgtattagcaataaaggacacaagaatgcattcatttgaaactttgaaaatctc

SEQ ID NO: 208309 - DNA, 3837 bp, Zea Mays
tccagcttttcttttgcgcagccaccctctggcttgccgttaatttctttcccgtttcactcctcgcgtttttacacttggcccccaatccaatccccgccaggccgccatgccgacgccggtgcccgccgcgcgccagtgcctctccccgcccgccgtcacggccctcgacgccgccgtcgcctccgcgcgccgacgggcccacgcgcagaccacctcccttcacctcatcgcctcgctcctcgcccccaccgccgcgccgctgctccgcgacgcgctcgcccgcgcccgcagcgccgcctactccccgcgcctccagctcaaggcgctcgacctctgcttcgccgtctccctcgaccgcctcccgtccacccccacctccgcctccacccccacctcacacgagccccccgtcgccaactccctcatggccgccatcaagcgctcgcaggccaaccagcgccggaacccggacacgttccacttctatcaccatcaggcggcgcccacctcccccaacgccatcaaggtcgacctctcccaccttgtcctcgccatcctcgacgacccgctcgtcagccgcgtcttcgccgacgcgggattccgcagcaacgagatcaaggtcgccatcctccgccccgcgccgcccgtcccgctgctcggccgcctccccacgcgcgcgcgcccgccgccgctcttcctctgcagctttgccgccgcggacgacgccgacgtcccctcgcccgcgcccgccctcgcgggggccgcaccgggggaggacaactgccgccgcatcaccgacatcctcgcccgcggacgcaaccccatgctcgtcggcgtcggggccgcctccgcagccgcagatttcgccaaggcgtccccgtaccgcatcgtccccatcggccccgcctctgccaataatcaggcggcaccgacgacgcccacctctggccttatcttcagcatcggtgatctcaaggacctggtgcccgacgaggccgacctgcaggacgcggctcgccgggtggtggcggaggtcacgcgcctgctcgagacgcacagacctgctgcccgccaaacccaaacggtctgggtcatgggctggtccgccacctacgagacctacctcgccttcctttccaagttcccactcgtcgacaaggactgggaactccagctgctgccgatcaccgccgtgcgcgacgccggccctgcagcgggactcgtgcctcctcctccagctccagccaccacggtcgctgccttgtccatgcctgccactacaagcttcgcggagtcatttgttccttttggaggtcttttgtgcgatacctatgaagcaaatagtctcacaacaaatttctgccctcaggctctacgatgtcaacattgcaacgatagatatgagcaagaagttgcctctatcattagaggaagtggcgttacagctgatgctcaccaagaaggtctaccttctctgttgcagaatggcggcatgatgggttctaacaatgagtttgatgcagtcaagtttttcttcagtgcaggttagagatgatcaaatggtattgagtacaaaaatattgaatctagagaagaagtggaatgagtactgtgtacgtctccatcaaggttgcaatagaatcaacagagatccttgccagttatttccacatcacattggtgttcgagttgacagggaaagatgtgcaaatccaaaccaaagcgcacagacaattgcacttcagagggatattattaaaccttgtgcattgtcttctccatacaccaatataactgcaaagagtatttcagcaccagaccaaataaatgcagaccttgtactaaaccttcaagtgaggcagtcgaggagtaatgaaccccttcaaagtggggttgtgccattccaacatatcaactcatcaaattataacaaacccgaagaatcatctgctgcacctgtgacaactgatttagtgttggccacccctcgtggatcttccttcaaggattcaagtagtgccctgtgtaaacgtgtagaggacattgaagagacaatccagctgatgcctaacaaggttgacgatctgaatcttaaacctcctcacttgtctatacaaccttacacttgctccaagagttcctcatcaaattgggagcaaacatcacctagtgctctgcattcaacatctttaggaggcacttctgcctttggccaatggcagaggccttcaccgctcgcaacacaaagttttgatttgagcaattacaagctacttatggaacacctgtttaaggttgttgggaggcaggaggaagcattgagtgctatttgtgcatccattgtgcggtgcaggtcgatggagaggcgtcgtggtgcaaacaaaaagaacgacatatggtttagtttttatggccctgacagcattgccaagcggagagttggtgtggcacttgctgagctaatgcatggtagctcagggaacttgatatatctggacctaagcctcaatgattggggtaaccctagtttcagaggaaagcgtgccaccgactgtatctttgaagagctgagaaagaagcggcgatcggttatcttccttgacaatattgacaaagccgattgccttgttcaggagagcctgattcatgcaatggagactggtaggtacaaggacttgcatgggggacgagtgactgatcttaatgactcgattgtggtgttgtctacaagaatgatccaaggatgccaggatgcttctcttggggtggaagagggcaatgctttttcagaagaaaaggctgtggcagctcgtgggcatcaactgaagatcatagttgagccgggcacaaccaacatcggtggaggcaacgttgtagtttcgtcaaggcattccttgggaagcagtgaagcctcaagttattccagtaagcggaagctccacatctctgatgggcaagaaaagacagaagaatcggcaagcacttcaaagcgactgcatagaacatcaagcatcccattcgacttgaacctcccaggcgacgatgaggaagcccatgatgatggtgatgatgacaagagcagtggcagccacgaaaactatctagagggatctgtcggaaacctcttgcgttgggtggatggttcaatcaatttcaagccatttgactttggcaagctttgtgaggacatcctgcaggagttcagcaatactaccagcaaaattctgggcaccagggggtgcaggctggagatcgacgctggggctatggagcaggtagtggcagcggcatgggcatccgattcgcatgagaatgagaagaggcctgtgcggacgtgggtggagcaggtgtttggcaggagccttgagcaggtcaagatgaggtgtgagaatctgagcagctgtaccctgagactggtttcctgtgaggtgaaagaagatggttttggagctttgcttccctcgagaataattctggattggtgatggtgatatgtgtcgtttgcattattgctgctagctatctagctgtaagtattggttagttagctgacaccacccaccgtactgtagcatatataggttcatatcattatttggtggcttcaaaataatgtaattaagctggagtatgtacgtacggtagtctagcaattaaactactcgttcaagtccatgacctggggatggatggctgtatttattgttgctcctgcgtgtatatatatatttgtaagaccgacgtgatggccttttcatgtggaattccatatactgatgtcatttaactgtctgtgcaagacaattgcataattcacaagtatggaaagcaaaa

SEQ ID NO: 208310 - DNA, 1584 bp, Zea Mays
cgtgacagacttaatagggtataaaagggatgaacattgagaatctgaatataaacgggaactagactttactaaggggaaataagggatggcgtctaaaaacaggggcaaataaaggattaactcaaaagaaaatggtcttgcggtcttgctctccttcctcgtggtcggcggccggtgcagctgtagccacgcgcgcctcggcaaaccctccgcctcctcgcccatcctcccctccatcccgtcccagccgcagggccatggactctgctgccggcgcaggccgccaccgcgttcgaatcgcagtcgtcggcgacgtgcacaatgattgggcccttgaggaagattcaaaggcgcttcgatttcttcagccggatttagtgctttttacaggcgattatggaaatgagaatgttgaacttgtcagaagcatttcagatcttcagttaccaaaggcggcaattcttggcaatcatgattgctggcacacacatcaattctcagagaagaaggtcgatcgtgttcggcttcagctcgcaagccttggtgagcagcatgttggatacaaatgtttggacttcccatcaattaagctgagcgttgttggtggacggccattttcttgtgggggtgataggctacttagaccaaggcttctctcaaaatggttgttatggtgtcaatgatatggctggaagtgcaaagaagatatacgatgctgctgcaggtgcaccagagggacattctgttgtattgcttgcacataatggaccaacaggtctaggttcaagaatggatgatatctgtgggcgggattgggtacctggtggcggtgaccatggcgatccagatcttgagcgagccatctccgatttgcaaagggaagccagagtttccatcccgctggtcgtttttgggcacatgcacaagagcctggcctacgggagaggcttgaggaagatgatcgcctttggagccaaccacatcatatatctgaacggagcagttgtgcctagagtgaaatttgcccaaacaactcctgggcacgagcaaaatcaacccgaaggatcgggatccagagctccaacgttgcgcgcgttcaccattgccgatctctatgaagggcgtgtggagaagatctctgaggtctgggtactggtgagtggcgccaggaccgaggtcgaggaggaaatcgtcttgtacaagcatcctcgagagcagcatatgtgatggttatgagaccattatcttaccaaaaaaagatgtggagttgtgagacgaaaatgtgactgttgtgaatgccgtaaatgtgggggcgatgctgaagttgtgtgttataaagtgccttgtattccaactgaaaggagcacttcattatagagagcctgttacggcttctacctctggcactctgtgactgttattagtaagtaataattgtagctgattgacggaagagagatcttttgaaaaagaaaaatgtgtctccattctaaggatggattcgggtgtctggagatccgaattatttgtattcggataaagtgctaatatagatatccgtattcatattcgattttaata

SEQ ID NO: 208311 - DNA, 1773 bp, Zea Mays
ctgggttcgggagccttttactggagcagatagtcgccttggttcgggagccttggaatcagccacggctggaggctgtctggctcaagaccaacttcgagctgtaggttaacctggtaaaccaattaccttgaagctgaactgtgccgttgaagccaaaatttattacgataaaattttgatcctttcatttgttggacattggatcaactggtgctgttatacatagaaaggagttcattgtaatttctcatctatatttagtggtgccataatcatttttccactggtgttcggcaataatgtcggagagcgagttagcagtaataaaaccagaggcgttaaagacttatatctggcttcagtgctttgatggttccattcagcaagtggaggaggaggttgcaatgttctgccccatgatatgtcgtgaaattgtgaaaaatggcacagggtcgtccaaaaatcatgctattgcgctccctgaaagagttaatccagccagtttgagtttgattcttgactactgccggtttcatcaggttactgggcgctcaaacaaggagcggaagtcctttgatgaaaaatttgttaggatagaaacagaaagactctgcgaattgacttctgcagctgacagtctacagctaaagccacttgttgatcttactagtcgagctcttgctcgaattattgaaggaaagacacctgaggaaatccgtgacattttccacttaccagatgacttaacagaggaagagaagttggagcccctaaaaaatgtaaatgatgatcctaggattcgcctattgaaccggttgtacgcgaagaagcggaaagagctccaggagcgccagaagctgaaggatgtacaagtacaaaaggaggaaaaagatgagagatctttggatgagttactttgttttattaatggggatggaggttcaggaggtggggaaagtagtaccaagagtaagaaaaagaataaaagaaggaaggatcatgctaagaaccccgcaaaagctgactctgagtctgtaaatgtggagggagctgcttgtgtggttccgtgcaaagtggatagcagtaatgtttctagacttccatgccaaagtccagatatgcaagatgatgtcgagtacccctttgaagatgctgacctcgatgatggacttgatcctgcaatgaaagaagagcttgatagagaagttgaggactttgcgaggaggttgaattcagtttggagcgagtcacatattggtggtaatggttctgtgcagagatttcctgggtttaatcacaggtgagtgttaagctggcaagatctgaaggcagaagctgaggagatttgtgggcatacagcttggaagggattaaaggccaaacaggccaccttggctcctgtgtgttgtaaaaccttgataactcaggaaccaagcatgcagaaatgcgcaagttcccttggccattttcctgggaaggaggccacctagttgggatgacccttttttttctttgggaagggagggttagaggtctgtcttgactcaattttttgttccttaactgctgtgttgccagttttcctgaataggggaagagaggagtgttgcctgttagctctgttacagatgtccatggaattctgttgtaacactgtattgtggtgcacatagaaatgtgattccctgtattgccgatgtttggctggtttgttgaccgtaccttattattactgagcaaagaggcgtctggacagctgttgggactaaa

SEQ ID NO: 208312 - DNA, 1202 bp, Zea Mays
aaggacgtgggcatcctcaccatgatcatctacttcctgtccaattgcgtcatccaggaaaggctgccaagccaggaggccaaactggctccgcttcttgcaagagctaacctcgtcattgccagggatattgagtgggcaaacatcatgtttgcttttgagcaggagagcaggtatatcataatggacccactctttccacaatctccagtaggttttattcgagagaaaagcaacatcatctttagacagctactcagaacaagacggccatttgttgcagaaataactgatgctatgggtaacgagatatttaaggttcgccggccattttggtggatcaacagctcaatttatgtagaagtgaatgataaggagataggtgtagtccacaggcgttggcacctttggcggagaatttatgacttgtacttagggaatatgcaatttgcagttgttgagaatccaggattctggaactggacctttaacctggtggatgaagatgataaaatgttggctcagattgatcgtaattggaggggcctcggctttgagctcttcacggatgctggccagtatgctatccggtttggtgatgaggggcaaagccacaagtttgctcccgcagaagatgtcgaagaactgcatgttgttcgccagctgactttgcctgaaagggcagtggctcttgctctcgcgatttccttggacagtgattacttctctagaagaggtggctggggacttccgtttctgatagccacagagtagacaaatgaaccaccctcgcccacactcaaggaaaaaactttttttggggctctcaatttcccaagagtgcaagtgtatgatatgagtggcttttagaattgctaaaactcaatcattactacgccattgtcacattagttggtaaacaggatgttgttgatgaaagggatgacttttgcttcatcggtgcccagtcggtgtcccagtcttgatcagcttgaacggatgtgttgcctttgcctcagcggtgcccagcaacgacgtgtccgatctcgtttacacaaaacgtgtcgttggaataataatgacaagtttcactaataatttggctatcactttatcaagccgtggggatggatttcgcccttctagatagcgagaaaagagttcgcccttttatgtagaaattaatatgacataactatcgg

SEQ ID NO: 208313 - DNA, 1534 bp, Zea Mays
ccaaatacttgctcatgtatttcattgtccatcctcgttagacttctgacagagacactgtagctggactgtacattgataaattgctaagccacatcagcggccatcacacacacggtcgacgccatctcctgattcgtcttcgtctagaacgtcagaattcaccaaatcagccctcgcgtttctcccttcccccggctcccggcgtctctgcgctgcggccgtacggcgatgcggtggctatcgaggctgctctctcaagccgtcgccgccaggagggcctccgcggcggcgaggtccaacactagtctcgtcaagggaggatcccacgggttcgctagtggcggcagggatgggtcaccggaggtgcctcgggagtggttgcggaagctgtgggtagacgagctgaagaagcagaaggaagccgcgaggagatggggcgtcggctcatcattagaggttgcaggagcgaccgaggaggcaccgtcaaggagctatcagtacgaatacagcggctctaaccccgtggaggccaaactggctccgcttcttgcaagagctaacctcgtcattgccagggatattgagtgggcaaacatcatgtttgcttttgagcaggagagcaggtatatcataatggacccactctttccacaatctccagtaggttttattcgagagaaaagcaacatcatctttagacagctactcagaacaagacggccatttgttgcagaaataactgatgctatgggtaacgagatatttaaggttcgccggccattttggtggatcaacagctcaatttatgtagaagtgaatgataaggagataggtgtagtccacaggcgttggcacctttggcggagaatttatgacttgtacttaggctcttcacggatgctggccagtatgctatccggtttggtgatgaggggcaaagccacaagtttgctcccgcagaagatgtcgaagaactgcatgttgttcgccagctgactttgcctgaaagggcagtggctcttgctctcgcgatttccttggacagtgattacttctctagaagaggtggctggggacttccgtttctgatagccacagagtagacaaatgaaccaccctcgcccacactcaaggaaaaaactttttttggggctctcaatttcccaagagtgcaagtgtatgatatgagtggcttttagaattgctaaaactcaatcattactacgccattgtcacattagttggtaaacaggatgttgttgatgaaagggatgacttttgcttcatcggtgcccagtcggtgtcccagtcttgatcagcttgaacggatgtgttgcctttgcctcagcggtgcccagcaacgacgtgtccgatctcgtttacacaaaacgtgtcgttggaataataatgacaagtttcactaataatttggctatcactttatcaagccgtggggatggatttcgcccttctagatagcgagaaaagagttcgcccttttatgtagaaattaatatgacataactatcgg

SEQ ID NO: 208314 - DNA, 885 bp, Zea Mays
cgccatctcctgattcgtcttcgtctagaacgtcagaattcaccaaatcagccctcgcgtttctcccttcccccggctcccggcgtctctgcgctgcggccgtacggcgatgcggtggctatcgaggctgctctctcaagccgtcgccgccaggagggcctccgcggcggcgaggtccaacactagtctcgtcaagggaggatcccacgggttcgctagtggcggcagggatgggtcaccggaggtgcctcgggagtggttgcggaagctgtgggtagacgagctgaagaagcagaaggaagccgcgaggagatggggcgtcggctcatcattagaggttgcaggagcgaccgaggaggcaccgtcaaggagctatcagtacgaatacagcggctctaaccccgtggaggccaaactggctccgcttcttgcaagagctaacctcgtcattgccagggatattgagtgggcaaacatcatgtttgcttttgagcaggagagcaggtatatcataatggacccactctttccacaatctccagtaggttttattcgagagaaaagcaacatcatctttagacagaaataactgatgctatgggtaacgagatatttaaggttcgccggccattttggtggatcaacagctcaatttatgtagaagtgaatgataaggagataggtgtagtccacaggcgttggcacctttggcggagaatttatgacttgtacttagggaatatgcaatttgcagttgttgagaatccaggattctggaactggacctttaacctggtggatgaagatgataaaatgttggctcagattgatcgtaattggaggggcctcggctttgagaatgatatacattgccttgttcttgtg

SEQ ID NO: 208315 - DNA, 1510 bp, Zea Mays
ctcctgattcgtcttcgtctagaacgtcagaattcaccaaatcagccctcgcgtttctcccttcccccggctcccggcgtctctgcgctgcggccgtacggcgatgcggtggctatcgaggctgctctctcaagccgtcgccgccaggagggcctccgcggcggcgaggtccaacactagtctcgtcaagggaggatcccacgggttcgctagtggcggcagggatgggtcaccggaggtgcctcgggagtggttgcggaagctgtgggtagacgagctgaagaagcagaaggaagccgcgaggagatggggcgtcggctcatcattagaggttgcaggagcgaccgaggaggcaccgtcaaggagctatcagtacgaatacagcggctctaaccccgtggaggccaaactggctccgcttcttgcaagagctaacctcgtcattgccagggatattgagtgggcaaacatcatgtttgcttttgagcaggagagcaggtatatcataatggacccactctttccacaatctccagtaggttttattcgagagaaaagcaacatcatctttagacagctactcagaacaagacggccatttgttgcagaaataactgatgctatgggttcgccggccattttggtggatcaacagctcaatttatgtagaagtgaatgataaggagataggtgtagtccacaggcgttggcacctttggcggagaatttatgacttgtacttagggaatatgcaatttgcagttgttgagaatccaggattctggaactggacctttaacctggtggatgaagatgataaaatgttggctcagattgatcgtaattggaggggcctcggctttgagctcttcacggatgctggccagtatgctatccggtttggtgatgaggggcaaagccacaagtttgctcccgcagaagatgtcgaagaactgcatgttgttcgccagctgactttgcctgaaagggcagtggctcttgctctcgcgatttccttggacagtgattacttctctagaagaggtggctggggacttccgtttctgatagccacagagtagacaaatgaaccaccctcgcccacactcaaggaaaaaactttttttggggctctcaatttcccaagagtgcaagtgtatgatatgagtggcttttagaattgctaaaactcaatcattactacgccattgtcacattagttggtaaacaggatgttgttgatgaaagggatgacttttgcttcatcggtgcccagtcggtgtcccagtcttgatcagcttgaacggatgtgttgcctttgcctcagcggtgcccagcaacgacgtgtccgatctcgtttacacaaaacgtgtcgttggaataataatgacaagtttcactaataatttggctatcactttatcaagccgtggggatggatttcgcccttctagatagcgagaaaagagttcgcccttttatgtagaaattaatatgacataactatcgg

SEQ ID NO: 208316 - DNA, 1007 bp, Zea Mays
gtttggttcacatattggtaacgtaatgggtaaccaataagtcaataatgttacatcatgtttgtttaagtccaaccgtaatcatatatcacactaaaaatggataccgtccattcaaacttgttaccgctggtactcgaatgtgaatcattattattactatttatgttacatttcgtgaaccaaacaacacttaaagtgtaatgcattcccattctgtaatttcagatgctgttctgtatcgtgttatctcggtttggccatctttttaactatgatctgtagatgttgatattgcaacacatatagttgttgaagatgacggaccaaaaagaagcatactttacatagagaccgccgaccggcctggcctacttcttgagataatcaagatcatcgcggacacaaatattgatgtggaatcagctgagattgatactgaaggtttggttgcgaaggacaagtttcatgtaagttacagaggtggaaaactaaacagctccttatctcaggcgctgaccaattgcctgcgttattacctccgaaggcctgagacagatgaagacagctattgattgttgtgtttgtcgaaccttcctatagtgcattagaatcagaaactttggcttcagttccttcgctatgggccccttgtactgctgcaaatggagttttccattgtagctgataaagtgccgacaaggtgcatccatatgtgcataggtggcactgaatcggggctcactggaccagtttgatattgtagtaatatatatacagctgggagcaacataatttaggtttcgatcatcattatcccatttgattcctgttataagggatcacattggaaaaccctcacatgattgatgttgtctgtattctgtaagttggtgcaatccatttgcatgtaaaactcagctgcgtactgtggcgttctatgtagtggaataaataaaagagcattacgaaatcaccgagcagcttgctcctgctttccaatcaga

SEQ ID NO: 208317 - DNA, 2040 bp, Zea Mays
ctcgttcccaaatctgcaagcttttaagaaaaaaacattccacccaccaaccaaactgtcaagtggtcaccagctaggtttccctttcccttccgtggcccacggctccgcgtcctcctccgcagtcggccgttcgaaccccgactactgacgccgtgttgactcgcttgcgacaaccaactgactcaagcagaaacgcacgtcctcccgtggccatggccgcggcggcgcgccgcgcgatccccctcgtcctgatcttcctcgtctcggcgcccttgtacgcggccgatgcgtcagcggcagcggcgggggccggggcgaactcgtcgtcgttcctgctcgcggcggagcagacgcagcggaaggacccgctcgatgggctgaggtactacaccggcgggtggaacatcagcgacgagcactactgggcctccgtcggcttcaccgcggcgccggtgttcgcggcggcggctgtctggttcgtcgtgttcggcattgggctgttcatcgccggctgctgcttctgctgctgcccgggcgccggcgacgcgtactcgcgcgcgtgcctgtgcgtctcgctcgtgctcctcctcgtcgccacggccgcggcagctgtcggctgcgccgtgctgtacgacgggcagggcaggttccacggcagcacggtggcgacggtggactacgtggtgcggcagtcgggcgacacggtggccaacctgcagcgcttcacgggcttcctggagaccgccaaggccgccggcgtggggcccgtcgcgctgcccgacgacgtcaaggggaggatcgacgacgtcgtgcgcaaggtgggcgcggcctccgacgagctcgccgcccgcacggccagcaacgccgccaagatccgcgccgccctggagacagtaaggaaggttctgatagttgttgcggcggcgatgctaatcctcgcttttcttggccttgtgttctcgctgtgtgggttggaatcgattgtctacgtgttggtgttcctggggtggatcctggttgcagggacgcttgtactgtgcggtactttcctcctcctgcacaagtagcgtggtggacgacacgtgcgtggcgatgggcgagtgggtgcagcacccgcaggcgcgcacggcgctggacgacatcctgccgtgcgtcgacacggccgcggccaaggaggcgctgaaccggagcaaggaggtgaactaccagctggtggccgtgctcaacgccgcgctcaccaacgtctccaaccgcgacttcccgccgcaggtcccgccgccgctcaactacaaccagtcgggcccgcccgtgccgctgctctgcagcccctacgcggcggacctccgcgaccgcgcgtgcgcgccgggcgaggtgcccctcgacgccaccacgccgcggcaggcgtggcagcgatacgtgtgccgtggcgtctccgcggacgccgggtcgggggccgaggtgtgcacgtccccggggcgcgtcacgccgtccatgtacgcgcagctcaccggcgcggccgacgtcagctacgggctgtaccactacggccccgccctggtggcgctggcggactgcaccttcgtcagggagacgttccggtccatcggcgacgaccactgcccgggcctcagccggtacagcggccaggtgttccggggcttgctcgccgccgccgtcgccgtgctgctggcagtgctgctctgggtcgtgcactcgcgggagcgccggcggcggagcgaggccatggagatcctgtgtctggcctcgtcgccctacaagtatcctctggaggagagggcgtttctcaagagccccgcgaggccgtacatgtaatttaaactgacttaaacaccgtccgacaaaatggggcgtattatacctggtagacattggtgttctcatatgtgctaaatttggagagagaaaaaatatatggcggatgaactgctatcacagacaacaaaagcaagaaagatgaaacataactagactaaactagaggctccatcggaccctcctgatgccgtgggcctcaac

SEQ ID NO: 208318 - DNA, 1184 bp, Zea Mays
tcttccacttcccgaatcccgatccatccgcatagcactgagggcggcggccgcttcctctcctccgcggccgaggtcgctcccccgcccgccgcctcttgcccgcggccgatctcttccctccgctcgcagcgtcgcagcccgtaacgagaccgcgctcggttgagcaccacctggggcccagcgccccagcgtcctcgtgaccacctcggcgcggcatccgccctctgcagccccggtgtctccgcgaccggctccggtgcgtccggaacgcagctccacaggagcatcattatttatagaatacgatctactttatagctgatgacaatgtctgcttctactgctgcaattcgtactgcgaatacaaatggaaaccatgcaagtgtggcctatgatagatcaagtgctccaaaggatttccaggtccgtggatggtaccaaggaccacatgatgattcagaaaaggattcaaatgtgatgtctactttaggagagttctcttatgaccttgacaagagcaatgctcagaccttccaactagagagaaccgctcaatcacgtgttgtcaacatggttcagcttgatatctcctcaaaccatgggaacttggaacttacatgcatctatcgcttcagggtgcatggcagaaagcccgtctcccccagcactggaggatgaagccctgagctgtgacatgcgtgccaaagcgcgacaacattcttgcagcatttctgcctataggagctttggttcagcggttagcggttagtcggagcatttcagccagcgccgctgcaccagtgttgataatgttgattctattctcgcacattgttgtgaacagctcggaaataccttgcgaggtttccttaagctgttcctagtttggcatcaagttcgcctgttttctctgctcctcctcccctcctgttaagactgcagcttagtattccgtttgaaattggtcgtctcatttcaccaggactcgctcttaaaaagaagactttgccattatatggcctactcagctagggaggaaaagaaggggaatgctggggccaactgccaagctagttatgcacttatatctaatctattgatttgaatatgagagcatgccaagctagttatgcacttatatctaatctattgatttgaatatgagagcacgcaagttcttc

SEQ ID NO: 208319 - DNA, 4637 bp, Zea Mays
gaacgggatggaagcagaaaagtgacggcaagtaaatgacgagtttgacggactcacggtcttctcttcaccggcggtcaagctaagcctagtgctgttctgtggatgtaacggtgctgtaaaagggtttataaaccccataggaggtcagccagctgagtatccagtttaaagttcagagttcaatctcacagcaccaagcaaaaaggaagcagatcaagggtagccgagcgagcagaggttgtcaattacgtgtcttaatgagtctctggaagcagccgtcgaaactcgccatggttgtagtactgctgctgctgctatgtcatgcagtggacaaagtccattgctcgacgcaccataacaacagccaagattttcattctctgctagagttcaagaagggcatcaccagtgatccgcacggagccttgagcaattggaaccccagcatccacttctgccattggcatggtgtgaactgcagttccacgcgaccatatcgagtcacggagctcaacctcaccggccaaaacttggctggccaaatcagctcctctgttggaaacctgaccttccttcatacccttgatcttagcaacaatagcttcattggccccctacctcttcttaacaagctccgaaacctggacttactctttctgggaagcaaccatttggaggatgttattctagattggcttacaaactgttccaacttagtctacctagatctctctaaaaaccatctcacgggtcatattcctccgaacatagcctttcttaaaaagctagaaggtatcaacctttatggtaattatctcagtggggtcatccctccaaccttaagaaacctctccacactattgttagttgatctttcaaacaatcaactaaatggaagcattcctaatgaagtttggcaaataccgaacatacaaatggtaaatctagcaataaataacctatcaggtggaatcccagatactttcactaacttatcttctcttatgatattaggccttgaccacaatatgctgggcggcacattgccatcaaacattggtgatgtgctccctcatctgcaaggactatacttaggaagcaacttattttttggtacaattccaacttccctaggcaatgcttcaaatctagaagtcgtagacctaccaaacaaccttttcagtggcacaatcccaagttcttttggaaacctttcaaagttgcagattctaaaccttgaggtaaacatgcttgaagcaagacatatgtctcataatcatctacacggacctataccaaattcgattgctaatctgtccactagtcttcaacaactattcatgggttggaataacctttcaggaatagttcccccaactattggaaaacttagtggcttaactaaattatcactagaaaacaacaacctcataggtaccattaaggaatgggtcagaaagatgacaaatctacaagttttaacactacaatcaaacaacttcatagggaaaattccaccttgaattggcaatcttacacagttggcacgtttctctgtagctagtaacaatttcttcggttctatatatgggtgacaatgggctctaacttttacaatataagatttaaggattggatcggattaggatcgggtcctattactattcatttttgaactaaaatttatttagggccctaccattttgtgaagaagcatttggatcgtgatccattaccacccctagttctataccatctaacttctgtgatcctaaattaatgacaaagttagaccttagccataacaatttctaagggagcatacctgttccctaaatcttacttagaactcatctcgctaaatctttcatcaaacaaatttagtggcgaaattcctaaaactttatgaagacttgaacaactaaaggacaatcaaatggaccacaacattcttactagaaacattccgtccacattcagcagtctacacagcttgaacttgttcaatctttcccataacaatttatctggtcgaatgccaaattttctaagtggtctaaatcttagtaaactagacctaccgtacaataataatttccaaggagaaagatcaagaactggtctatttgataatcctacagtcatatcgctagatggaatctgggattgtgtggaggagccatggttttgcatatgcctccttgccatgttgcttcaagaatagtagggagtgcaacattattgatcaaaaatattgatcccaatatttgggttcatgtctctcgtattgcaggtgtagttttactcctagaaaagaggacatcaagaagagcatatagatcagagcaatcttattatgagcattttgagaaagttacctataacgacttagctcaagcaacacatgacttcttagaatccaacctgattgggagaggaagttatggttcggtgtatcaagggaagctgaaggaaggcagaatggaagtggcagtaaatttttttgacctagagatcagaggagcaggaagaagcttcttgtcggagtgtgaagcattgagaagcattcaacactggaatattcttcccatcatagtttcttgttcaatagtagataatgtacgaaatgttttcatagatttaatttatgagtacatgcctaatgggagcttggacacatggctacatcacaaaggcgacgaggaggctacaaaatgtcatggcttgactcaaagtataagcatagctgttaatatagctgatgcattggattatttgcaccatgattgtggacagcaaactatttgttgcgacttgaaacctagcaatatccttctagattgtgacatgaatgctcttttgggagattttgaaattgcacgtttgtatcatgattccgagtcaaaatggacagagtatgggggaggtggtcatgcatcaacgtctggggatgtttatagttttggaatagtgttgttggagattttgacgagcagaagcccaatagatccaacgttcaaggacggctagggcatcatcaactttgttgagaataactttccgaatcaagtatttcaagtcattgactctgacctcctagaagaatgcaggaactcaactcaaggaaataatttggtacaagaaaatgagatctaccaatgcttggttgatctactgcaagtcacactttcgtttctctattcattaccatctgaatgatcgaacatgaagaaagtagccagcagaatgcatgcaatcaaaacatcacatattgggtggaagcacatgtaacaagagcaagggtgttccctaaattatacagtaacatacttaggatgggtcatagtcgaaaatgaccagtggcatggtggtacaggcagttagtaccgaccgggctggttccaatgctggttagttcgatcgactagtcagtagggctaccgaccagtcgacccggttgatatcgtccgcattggaacaaaatcggtcggtaccatcccgtacgctggtaacctagtcgatatcgaccctgaccggtcgatacttactgtctattgccatgtggcagttcctgactatttcacaccattttgaatttcaaaaaaataaataaataaagcttttttaaaaatctataatatggcatataaatagaggagtgtttgagttcattcacaccccactctccaaatcgcttttaacactttatattgcactcctctcactatagtttcactccactaaagcatcattgccatgtctttctcgagctcgagcattgggacgaccgaggacaaggtactcgatatgctccaccagactatattggatgcaatgataaagcttgcttctgggtgattaacgggaagaaggtgaaagacacaacttcggagctacatcgactaggattgtgaagccgcctacgattgattgattcaagactactttgatgacccatgtgtcgggtatggtaattaggggtacctagattacacctctaaaacatgcttaacccctaaaaacatcattagggtacgtcccccgaggtcaaaggatcacaagccacgcttcgcctgaggcctccctcatgggtctccgcaaactccgccttgccagagcctttcctcggacggggtgtgttctcgggagaatccttgtcccggccgaggtcccctcaccctagaacagcgatcttcacctcgcccgagcccgcctcgggtaacagagacaaaccctgggcaagactcaaccaaagtctgtcggggacagccacattcaatgcgcctacctaacccacgcaggcctataggtgtataggagcaacaagaccgcagtcctatcaaagattcaccaactatgattacacatgtgaccactgttcatgcatgtcgtctgcaaactcctgatgggacatacaatatgacaaaggtacagacggtggcgcacatcttcgtatttgttaacggtgcagacggtggatgtaacggtgctgtaaaaagggtttgtaaaccccataggaggtcagctagctgagcatctagtttaaagttgagagtttaatctcacagcaccaagcaaaaggaagcagattgaaagggaattaggcttacacctagttccttaataattttggt

SEQ ID NO: 208320 - DNA, 2234 bp, Zea Mays
ccacaacggaccacctaaccaaacaaggccacattgggtgcacgggaggaggcctgggctgccacaacccacaaggaggccagggaccaatcacagacagtcatcttctcccgttcacgtaacgtgcactagggtttatggtttagggcgaccgccgccgtcctacgtccagcggccaggttttcttctggccctctgcgctgactacaacccaccacctccgggttaggttttggatttggagacatggcggaagtggtggacaagctcaaggactacgatatcaagaaggagggagaagcagagatcctcctgcacaagaagaactccgtcttctttaatcccgtgcaggttcacaacagagacatgtccattgctgttttaaggacctttgttgccaagcgtaaggaagaacatgaagcgctggtggacaagaggaatacatcacataaaaaaaataaacaaagtgaaacatccagtcaaaatggagaggatgcgtcaactggccagcaagatgaaatggatgttgtttgtgaaaaggagctgaataaagctgaagatcaaattgatgatctgtcgaaagaagcaacagaaccttcttggaaagtaaccagagagcttaagccaccacttgttcttgaggctttggctgctactgggttgcggtctctccggtatgcccgtgaagttgagggcttaggaaaggtagttgctctggacaatgataaagcttctattgaagattgcaaacgaaacataaagttcaatggtgcttccgctactagtaaggtggaagcttacttggttgatgctcgaattcacatgctgacgcatccaaaagaatttgatgtgctgtacaggctgttgctgatggtggtctattgatgtgcactgccactgatttggcagttctttgtggtaccaatggagaagtttgttacgcgaagtatggttcattcccaaccaagggcaagtattgccatgaaatggctttgagaattctccttgccagtattgagagccatgctaatcggtacaagcgatatattgtgcctgttctctctgttttcatggatttttatatccgtgtttttgttcgagtattcacttctgcaagtgaaataaagaatacacctcttaaactttcttacatatatcagtgtgttggctgtgattctttccatcttcaatgtcttgcaaggactgttcagaagaagaataatggtgtgaagcatgcacctgctattggacctgttgttcctcaggagtgcagtgactgtggaaagaaatttaatgtaggtggaccaatatggtcagctcctattcatgaccaagactgggtactttctactttgacaggtgttaagtcaatgaaggatagataccctgcatatgataaaataacttcagttctaaatactatgtcagaggagttacatgacgttccattgtttttcagtctccataacatagcaggcactgttaagtgcacatctccatctttggttatgtttcggtctgcagttctaaatgcagggtatcggatctcaagcacccatgttaacccacttgggattaaatctgatgccccttgggatgttatttgggacatcatgcggtgctgggtgaagaatcatcctattaaggaacagccacgtgactcacctggcacggtgatcctttcaaaatcgccaaagctagaagcaaatttttcaagagcagttgctgccctcagcaaggctcagacaaataagattaaacgattccttccaaaccccgaacggcactggggtccgaaggtcagagcagggcggaagatcacgagcaaacatgtctctctgttgggccctgacgctatcaagggtgctgtgaacggtggtgactgccagaaagaaggaaacggtgctgagccagatagtacagcctcagaacccgaggggatcaaagacgttgaggatgagccctcaaacaaacgccaaaaaaccagcgacggcgaaccagcaagcgaaccttgatttgtttgtcaatctttcgcgtctccattgtgttgtgcctgtgcttttcttgtttgtaggtggtcgatggttatttataccacctgttggattttgaacgaacaaattgtggcaggtttttattaaacttttgttgcatgtgtgatgctcctcctagtcacagagggaaaagacctattaaagcataatatatagtatagctttctgcaatgtcgagac

SEQ ID NO: 208321 - DNA, 2218 bp, Zea Mays
gcctgggctgccacaacccacaaggaggccagggaccaatcacagacagtcatcttctcccgttcacgtaacgtgcactagggtttatggtttagggcgaccgccgccgtcctacgtccagcggccaggttttcttctggccctctgcgctgactacaacccaccacctccgggttaggttttggatttggagacatggcggaagtggtggacaagctcaaggactacgatatcaagaaggagggagaagcagagatcctcctgcacaagaagaactccgtcttctttaatcccgtgcagagacatgtccattgctgttttaaggacctttgttgccaagcgtaaggaagaacatgaagcgctggtggacaagaggaatacatcacataaaaaaaataaacaaagtgaaacatccagtcaaaatggagaggatgcgtcaactggccagcaagatgaaatggatgttgtttgtgaaaaggagctgaataaagctgaagatcaaattgatgatctgtcgaaagaagcaacagaaccttcttggaaagtaaccagagagcttaagccaccacttgttcttgaggctttggctgctactgggttgcggtctctccggtatgcccgtgaagttgagggcttaggaaaggtagttgctctggacaatgataaagcttctattgaagattgcaaacgaaacataaagttcaatggtgcttccgctactagtaaggtggaagcttacttggttgatgctcgaattcacatgctgacgcatccaaaagaatttgatgtggttgatcttgacccttatggatcaccatctatatttctcgactcagctgtacaggctgttgctgatggtggtctattgatgtgcactgccactgatttggcagttctttgtggtaccaatggagaagtttgttacgcgaagtatggttcattcccaaccaagggcaagtattgccatgaaatggctttgagaattctccttgccagtattgagagccatgctaatcggtacaagcgatatattgtgcctgttctctctgttttcatggatttttatatccgtgtttttgttcgagtattcacttctgcaagtgaaataaagaatacacctcttaaactttcttacatatatcagtgtgttggctgtgattctttccatcttcaatgtcttgcaaggactgttcagaagaagaataatggtgtgaagcatgcacctgctattggacctgttgttcctcaggagtgcagtgactgtggaaagaaatttaatgtaggtggaccaatatggtcagctcctattcatgaccaagactgggtactttctactttgacaggtgttaagtcaatgaaggatagataccctgcatatgataaaataacttcagttctaaatactatgtcagaggagttacatgacgttccattgtttttcagtctccataacatagcaggcactgttaagtgcacatctccatctttggttatgtttcggtctgcagttctaaatgcagggtatcggatctcaagcacccatgttaacccacttgggattaaatctgatgccccttgggatgttatttgggacatcatgcggtgctgggtgaagaatcatcctattaaggaacagccacgtgactcacctggcacggtgatcctttcaaaatcgccaaagctagaagcaaatttttcaagagcagttgctgccctcagcaaggctcagacaaataagattaaacgattccttccaaaccccgaacggcactggggtccgaaggtcagagcagggcggaagatcacgagcaaacatgtctctctgttgggccctgacgctatcaagggtgctgtgaacggtggtgactgccagaaagaaggaaacggtgctgagccagatagtacagcctcagaacccgaggggatcaaagacgttgaggatgagccctcaaacaaacgccaaaaaaccagcgacggcgaaccagcaagcgaaccttgatttgtttgtcaatctttcgcgtctccattgtgttgtgcctgtgcttttcttgtttgtaggtggtcgatggttatttataccacctgttggattttgaacgaacaaattgtggcaggtttttattaaacttttgttgcatgtgtgatgctcctcctagtcacagagggaaaagacctattaaagcataatatatagtatagctttctgcaatgtcgagac

SEQ ID NO: 208322 - DNA, 1715 bp, Zea Mays
caaagtcctgcattggctctcattgaaccaaaagctttgcactggaatagatgagaaatctgtgggttcctccttccagcttgtgtttgcaccaattgatgagcatttcccagatgatgctccattgatttcttctggctttcgtgtcataccacttgatgtgaaaacagatggtgtatcctctggtaggacgctagatttggcatctagtcttgatgtgggctctgctgcaccccaagcctcaggggaatctccagatgactgcagtttgagatctgtgctgacaatcgcctttcaattcccgtatgagatgcaccttcaggacagcgttgcagcaatggcccgtcaatatgttcgtagtgtcatttctgctgtgcaaagagtgtcgatggctatatctccctcccaatctggtctaaatgctgggcataggatgctttctggcttccctgaagctgccacacttgctagatgggtttgccagagttatcactaccatctaggtatggaattacttaatcaatcagatggagctggtgaagcattgttgaaaatgctctggcatcatccagatgctgttctgtgctgctcctttaaggagaaacctatgtttacgtttgcaaacaaggcagggctggacatgttagaaacatctcttgttgccctgcaagacctgacgctagacaagatcttcgacgagtcaggaaggaaagcactattctcagacatctcgaaactaatggaacagggctacgcgtacctgccgtcaggcgtgtgcatgtcaggaatgggccgccatgtttctttcgaccaagctgtagcgtggaaggtgctcggcgaggatagcaacatccactgcctggcgttctgcttcgtcaactggtccttcgtgtgactgacgcccaacccgtcgggtggttatggcgagctgaccctttttttgtatggaaaatcatcagctgtgacaaaaggcatatgttgcatgcactagttgaagaaactggtccaaatgctttttttgtttgtcattccattcagatgttgctaggtgtggagtggaaatggggcaatagtgtcacggttacacatgacccagcattaaccaaacaaccgcgtcgccagtttctttctattcgatcagggagatgcattttctggcaaaaatctcctatttttttgttgcaaatttggtctatgtatatggaactgctgctggacgccgagaaagcaagacatatgcggaaactcactatggctcgaggaaaatatatgcctacactgtcttcagaaaacataatgcagtaatgcttttcgaacccaaagcacacttgacacaaagctggagcacatgtaaagaggcacgccagatgagcaggtagggtctctcgcaaggctgatgccaacaattaaaccgacgacccttcacaacaaaatcacgattctttgttctcatcctgctccagttgaggctccttctctgcagcctcctcaaatgtctctccttggacaagctcagggacgtcgtcatcatcctgtgcagctgcttcagcaccaggtacctgcctctggaaaatctcagccagcttcttaaggttgtccaggttatcagggcctgaagaggaggaggaagctaaggtttgtcaggaagctgaggcaaataatcagagtgaagtctgcaaaacgatgcgaaaagtgccatacccagttggttgata

SEQ ID NO: 208323 - DNA, 1700 bp, Zea Mays
gccatcaaagtcctgcattggctctcattgaaccaaaagctttgcactggaatagatgagaaatctgtgggttcctccttccagcttgtgtttgcaccaattgatgagcatttcccagatgatgctccattgatttcttctggctttcgtgtcataccacttgatgtgaaaacagacgctagatttggcatctagtcttgatgtgggctctgctgcaccccaagcctcaggggaatctccagatgactgcagtttgagatctgtgctgacaatcgcctttcaattcccgtatgagatgcaccttcaggacagcgttgcagcaatggcccgtcaatatgttcgtagtgtcatttctgctgtgcaaagagtgtcgatggctatatctccctcccaatctggtctaaatgctgggcataggatgctttctggcttccctgaagctgccacacttgctagatgggtttgccagagttatcactaccatctaggtatggaattacttaatcaatcagatggagctggtgaagcattgttgaaaatgctctggcatcatccagatgctgttctgtgctgctcctttaaggagaaacctatgtttacgtttgcaaacaaggcagggctggacatgttagaaacatctcttgttgccctgcaagacctgacgctagacaagatcttcgacgagtcaggaaggaaagcactattctcagacatctcgaaactaatggaacagggctacgcgtacctgccgtcaggcgtgtgcatgtcaggaatgggccgccatgtttctttcgaccaagctgtagcgtggaaggtgctcggcgaggatagcaacatccactgcctggcgttctgcttcgtcaactggtccttcgtgtgactgacgcccaacccgtcgggtggttatggcgagctgaccctttttttgtatggaaaatcatcagctgtgacaaaaggcatatgttgcatgcactagttgaagaaactggtccaaatgctttttttgtttgtcattccattcagatgttgctaggtgtggagtggaaatggggcaatagtgtcacggttacacatgacccagcattaaccaaacaaccgcgtcgccagtttctttctattcgatcagggagatgcattttctggcaaaaatctcctatttttttgttgcaaatttggtctatgtatatggaactgctgctggacgccgagaaagcaagacatatgcggaaactcactatggctcgaggaaaatatatgcctacactgtcttcagaaaacataatgcagtaatgcttttcgaacccaaagcacacttgacacaaagctggagcacatgtaaagaggcacgccagatgagcaggtagggtctctcgcaaggctgatgccaacaattaaaccgacgacccttcacaacaaaatcacgattctttgttctcatcctgctccagttgaggctccttctctgcagcctcctcaaatgtctctccttggacaagctcagggacgtcgtcatcatcctgtgcagctgcttcagcaccaggtacctgcctctggaaaatctcagccagcttcttaaggttgtccaggttatcagggcctgaagaggaggaggaagctaaggtttgtcaggaagctgaggcaaataatcagagtgaagtctgcaaaacgatgcgaaaagtgccatacccagttggttgata

SEQ ID NO: 208324 - DNA, 2072 bp, Zea Mays
ttccatctattcttttgttttcaagtcctgcattgcctctctttttttctcggaaaacgcaggagggctgcacatcattatattaagtagagggggaaaagaaagtccaagcggacagatacaagcatcctagccccccttaaggcggccaaaaacacaaaaacagaaactgatccatcacaatagaaacacggccacacactacccgctaaaacattcctgccaagctaagggctgttgctaggcctaaactttccagattcttggccccagccatcacccaacatgctagctcatcaagcagggatctctgcactttgccaatggtaggagattcaccatcaaagacagcctggtttctttgccatcaaagtcctgcattggctctcattgaaccaaaagctttgcactggaatagatgagaaatctgtgggttcctccttccagcttgtgtttgcaccaattgatgagcatttcccagatgatgctccattgatttcttctggctttcgtgtcataccacttgatgtgaaaacagatggtgtatcctctggtaggacgctagatttggcatctagtcttgatgtgggctctgctgcaccccaagcctcaggggaatctccagatgactgcagtttgagatctgtgctgacaatcgcctttcaattcccgtatgagatgcaccttcaggacagcgttgcagcaatggcccgtcaatatgttcgtagtgtcatttctgctgtgcaaagagtgtcgatggctatatctccctcccaatctggtctaaatgctgggcataggatgctttctggcttccctgaagctgccacacttgctagatgggtttgccagagttatcagtatggaattacttaatcaatcagatggagctggtgaagcattgttgaaaatgctctggcatcatccagatgctgttctgtgctgctcctttaaggagaaacctatgtttacgtttgcaaacaaggcagggctggacatgttagaaacatctcttgttgccctgcaagacctgacgctagacaagatcttcgacgagtcaggaaggaaagcactattctcagacatctcgaaactaatggaacagggctacgcgtacctgccgtcaggcgtgtgcatgtcaggaatgggccgccatgtttctttcgaccaagctgtagcgtggaaggtgctcggcgaggatagcaacatccactgcctggcgttctgcttcgtcaactggtccttcgtgtgactgacgcccaacccgtcgggtggttatggcgagctgaccctttttttgtatggaaaatcatcagctgtgacaaaaggcatatgttgcatgcactagttgaagaaactggtccaaatgctttttttgtttgtcattccattcagatgttgctaggtgtggagtggaaatggggcaatagtgtcacggttacacatgacccagcattaaccaaacaaccgcgtcgccagtttctttctattcgatcagggagatgcattttctggcaaaaatctcctatttttttgttgcaaatttggtctatgtatatggaactgctgctggacgccgagaaagcaagacatatgcggaaactcactatggctcgaggaaaatatatgcctacactgtcttcagaaaacataatgcagtaatgcttttcgaacccaaagcacacttgacacaaagctggagcacatgtaaagaggcacgccagatgagcaggtagggtctctcgcaaggctgatgccaacaattaaaccgacgacccttcacaacaaaatcacgattctttgttctcatcctgctccagttgaggctccttctctgcagcctcctcaaatgtctctccttggacaagctcagggacgtcgtcatcatcctgtgcagctgcttcagcaccaggtacctgcctctggaaaatctcagccagcttcttaaggttgtccaggttatcagggcctgaagaggaggaggaagctaaggtttgtcaggaagctgaggcaaataatcagagtgaagtctgcaaaacgatgcgaaaagtgccatacccagttggttgata

SEQ ID NO: 208325 - DNA, 3567 bp, Zea Mays
ctcggaagttgttcccccgcttttgttggatcctcgcgggctggaggtcgaagcgcgagcggagagctaagagcaacaaggcgacgagatttgtgtggctacgattttgcgttgccgacggaacatgggaacaatggttgcagcggtggcgttgcgagggggaagcagcgatagcggaggatttgataaggttcccgggatggactcgggaaaatacgtgcgctacaccccggagcaagttgaggtgctcgagcggctctacatagattgccccaagccaagctcctcacggcggcagcaactgctgcgcgagtgtcctatactctccaacattgagccaaagcagatcaaggtctggttccagaaccggaggtgccgcgataagcagcggaaggagtcttcgcggcttcaggctgtgaacagaaagttgacggcaatgaacaagcttctaatggaagagaatgagcggcttcagaagcaagtctctcagttggttcatgaaaacgcgcacatgcggcagcagctgcagaatacttcattggccaatgacacaagctgtgaatcaaatgtcactacccctccaaaccctataagggacgcaagtaacccttctggactccttgcgattgcagaggagaccttcacagagttcctctcaaaggctactgggacagctattgattgggtccagatgcctgggatgaaggttatatgtcaactctcaatccctgttctttggcttaagttacattttttttccagaaaactgctaggtgctaactacattctgttttctgaagcctggtccggattcagttggtatcgtggccatttcgcatggttgccgtggcgttgctgcccgcgcctgtggtttggtgaatctagaaccaacaaaaggcatagagatcttgaaagatcgtccctcttggttccgtgattgccgaagtcttgaagtgtttacaaggtttccagctggaaatgggggaacaattgaacttatttacatgcagatgtatgccccaacaactttagtccctgcacgtgatttttggacactacgatacacgacaacaatggaagatggcagccttgtggtctgtgagagatccttgagtggttctggtggtggtccaaatgcagcctctacacaacaatttgttagggctgagatgcttccaagtgggtatttagttcgcccatgcgaaggtggaggatcaattgtgcatatagtggaccatctagatctcgaagcatggagtgttcctgaagtgcttcgaccactgtatgagtcttctagagttgttgctcagaaaatgactactgtggcactgcgccaccttagacaaattgctcaagaaacaagtggagaagtagtgtacgccttgggaaggcaacctgcagtcctacggacctttagtcaaagactaagcagggggtttaatgatgccattagcggtttcaatgatgatggctggtctgtaatggggggagatggcattgaagacgttgttattgcttgcaactcaaccaagaaaattaggaataccagcaatgctgggattacatttggagccccaggaggcattatttgtgcgaaggcatccatgttactgcagagcgtcccaccggcagtactggtacgatttctgagggagcatagatctgaatgggctgattacaatattgatgcgtatttggcttcatcattgaagaccagtgcgtgctcacttcctgggttgcgacccatgagattttctgaggggcagatgatcatgccacttgctcacacagttgagaacgaggagattcttgaagttgtccgccttgaaggtcagcctcttactcatgatgaagctcttctttcaagggacatccaccttctccagctttgcactggaatagatgagaaatctgtgggttcctccttccagcttgtgtttgcaccaattgatgagcatttcccagatgatgctccattgatttcttctggctttcgtgtcataccacttgatgtgaaaacagatggtgtatcctctggtaggacgctagatttggcatctagtcttgatgtgggctctgctgcaccccaagcctcaggggaatctccagatgactgcagtttgagatctgtgctgacaatcgcctttcaattcccgtatgagatgcaccttcaggacagcgttgcagcaatggcccgtcaatatgttcgtagtgtcatttctgctgtgcaaagagtgtcgatggctatatctccctcccaatctggtctaaatgctgggcataggatgctttctggcttccctgaagctgccacacttgctagatgggtttgccagagttatcactaccatctaggtatggaattacttaatcaatcagatggagctggtgaagcattgttgaaaatgctctggcatcatccagatgctgttctgtgctgctcctttaaggagaaacctatgtttacgtttgcaaacaaggcagggctggacatgttagaaacatctcttgttgccctgcaagacctgacgctagacaagatcttcgacgagtcaggaaggaaagcactattctcagacatctcgaaactaatggaacagggctacgcgtacctgccgtcaggcgtgtgcatgtcaggaatgggccgccatgtttctttcgaccaagctgtagcgtggaaggtgctcggcgaggatagcaacatccactgcctggcgttctgcttcgtcaactggtccttcgtgtgactgacgcccaacccgtcgggtggttatggcgagctgaccctttttttgtatggaaaatcatcagctgtgacaaaaggcatatgttgcatgcactagttgaagaaactggtccaaatgctttttttgtttgtcattccattcagatgttgctaggtgtggagtggaaatggggcaatagtgtcacggttacacatgacccagcattaaccaaacaaccgcgtcgccagtttctttctattcgatcagggagatgcattttctggcaaaaatctcctatttttttgttgcaaatttggtctatgtatatggaactgctgctggacgccgagaaagcaagacatatgcggaaactcactatggctcgaggaaaatatatgcctacactgtcttcagaaaacataatgcagtaatgcttttcgaacccaaagcacacttgacacaaagctggagcacatgtaaagaggcacgccagatgagcaggtagggtctctcgcaaggctgatgccaacaattaaaccgacgacccttcacaacaaaatcacgattctttgttctcatcctgctccagttgaggctccttctctgcagcctcctcaaatgtctctccttggacaagctcagggacgtcgtcatcatcctgtgcagctgcttcagcaccaggtacctgcctctggaaaatctcagccagcttcttaaggttgtccaggttatcagggcctgaagaggaggaggaagctaaggtttgtcaggaagctgaggcaaataatcagagtgaagtctgcaaaacgatgcgaaaagtgccatacccagttggttgata

SEQ ID NO: 208326 - DNA, 513 bp, Zea Mays
atcaccatttgatgatatattccaggatgagtgaggatggagaagtaaatgccaatcatttgctactggggatatggtcagatgacgagtcagctggtcataaaatcctgtattcgctcggatttgacgatgtgaaagccagtttactggccaaaacggctgacgaggaggctgcaatgagtcctagatagcaaagggagcacctaatctgttattcaacttacaagagatgtgttagggtcaacttacaagcgattgccatgccggtgcctgtaaaaacgttgcggtttgtttgccacggtgaatgcttgtgttcctttctcagctggatttgtgatcagctcatagaaaaagaaaaaaaacttgtagggtccagtgggcctgacgagcccttcaaattttttgttcaatttgcagcctgaatcctaacaggcgagaatttcatgtgaactgtgatattacacagaactcttagtttctagagactaattttagtccttccattttatttca

SEQ ID NO: 208327 - DNA, 1124 bp, Zea Mays
aaacaccttccgtcccctggccattctgtcacactactcagccagcccgctctatctctttcctctatccaagccagaaaggtagaaaccccccggaaacaatttccggccatggcgaccgcagcccaccaggttgccgccaccttcctctcgttcctttcctcctccactcaccacctcgccccttcctccgtctccctcgggacaacctctgtcctacccgtctcccttcgggccgctggcacacgtggcccacggctcgcctaccgcctccggggccgccgcgtcggtgccgccgtcgcccagctccccaccgcatccagaggtagtttctggggagaagaagatcagatggtcatcaagggctgtgcggtcttttgcgatggcagagctggaggcccggaagatgaggtaccctacgacaggcactgaggggctcctcatgggcattcttgttgaaggaactagtggtgcagcaaaacttttgcgggctaatggaatcacacttctcaaagtgcgtgaggaggcagcgaatgtgcttgggaaatcagaaatgttttactttagtcccatgcatccaccattgacagaagctgcacagcgagcccttgattgggctgtcaatgaaaaattgaaatcaggtgaggatggagaagtaaatgccaatcatttgctactggggatatggtcagatgacgagtcagctggtcataaaatcctgtattcgctcggatttgacgatgtgaaagccagtttactggccaaaacggctgacgaggaggctgcaatgagtcctagatagcaaagggagcacctaatctgttattcaacttacaagagatgtgttagggtcaacttacaagcgattgccatgccggtgcctgtaaaaacgttgcggtttgtttgccacggtgaatgcttgtgttcctttctcagctggatttgtgatcagctcatagaaaaagaaaaaaaacttgtagggtccagtgggcctgacgagcccttcaaattttttgttcaatttgcagcctgaatcctaacaggcgagaatttcatgtgaactgtgatattacacagaactcttagtttctagagactaattttagtccttccattttatttca

SEQ ID NO: 208328 - DNA, 2150 bp, Zea Mays
cgccaagtccacgagcgccaagcggataataaagcgtcccccacctccacctcctcctccaacgacaacctccacctcgccttcaactcctccacgctcccgtcctctccacctctcgctcccacctcccccgccgtcaccaccaccaccacagcctctcccccgcaacgcgttccttcccggtgcatgaaaccctaaacctataccccactcccctccccgagccatcctctccccccgcggcgatggccaaggcgctgctctactcctccctcctccccgggctgccccgcgctgtcgggagcagccggagcgctgccgcgaggctgctgctgctcccgcctctccggctgcggcgcggccggcgcgccgcctccgcgtgcgcggtgagggcgggcctgcacgggctcgactccgtcggcgggccccacctccaggccgcgctggagcgcgccgaggcggcgctctacacgctcgccgacgcagcggtagccgcggcggacgccgccgcgggcgcgggggacgacgccggccaagctgcggcggcggtccagaagaacggcggctggttcggcttcatctccgaggccctcgaggtcgttctcaaggtgctcaaggatggtctctcagcagttcatgtgccgtactcctacggatttgccatcattcttcttactatcattgttaaggctgcgacattgcctttaaccaaaaagcaggtggaatcaactatggcaatgcagaatttacagccgcagcttaaagcaatccagcagagatatgcgggcaaccaggaaaggatacagctagagactgctcggttatacaggcaagctggtgtcaaccctttagcaggatgttttccaacattggcaacaatacctgtatggattggtctttaccaggcactttcaaatgtagcaaatgagaaggatttttctggattccatcactgggtggtcctacaacaattgcagctcggcaaagtggtgctgggatttcgtggctcttcccatttgtggatggccatcctccgctaggctggtatgacacgatatgctaccttgtattgcctgtgctacttgttgcttctcaatatgtctctatggagatcatgaagccacctcagagtgatgacccgtcacagaagaacacactcctcgttttgaaatttcttccatttatgattggctatttctctttgtcagtgccatcaggattgtctatttattggttcacaaacaatgtcctcagcacagcacagcaggtttggttgcggaaaatgggaggagccaagcctgtagtgagtgagggggataggaggataattacagcaggacgagcaaaacgctctaatgctcaaccagctggagaaaggtttaggcagctaaaagaagaggagagcatgagaaaagtcaacaaagcactcgctgcaggagactcaaatgcatcgtcatcaacgtatgacatggaggatgaagagtcggatgacgagaccacagaagagggagggcccgtggaggaagcatccagtactggcagtgacaagaagcctccaagttactcagggaagaagggcaaaagatccaagaggaagcgcatggtgcagtgatcgtcacagctcaatcggatgcgattttcgccacaactggttgattcagttgaccagttaggtgccgcagtggatcacggagacagttttggcggtctgctggagccctatatttggggtgcagacaaaatgaacagcttccggggtcacaggtatttgctgctaagcttatgcaaatggaggtagctgagtatatatgctaggcctgagggtgagtgatggaccggagaacaggagtcgggtacgcgtgcaagcagagagacagggtctgtagaagtagataaggtgtaatctctcgtcaagctgggttccagaatctggattgtcctcaccattcgtatgcattgcattgtatttgctttcctcttgtaacctaatgaaccactgttttggagggtatgatcgcgcaagctgacaaccatccagtcgtatacaaatgagttcgaattcgtcttgtcagaactcgttaagagaatgaacttgcgcgagattttttgcatcgcatcgcatgtgctgtttacagaggcgcagaataatc

SEQ ID NO: 208329 - DNA, 1893 bp, Zea Mays
aacgacaacctccacctcgccttcaactcctccacgctcccgtcctctccacctctcgctcccacctcccccgccgtcaccaccaccaccacagcctctcccccgcaacgcgttccttcccggtgcatgaaaccctaaacctataccccactcccctccccgagccatcctctccccccgcggcgatggccaaggcgctgctctactcctccctcctccccgggctgccccgcgctgtcgggagcagccggagcgctgccgcgaggctgctgctgctcccgcctctccggctgcggcgctctacacgctcgccgacgcagcggtagccgcggcggacgccgccgcgggcgcgggggacgacgccggccaagctgcggcggcggtccagaagaacggcggctggttcggcttcatctccgaggccctcgaggtcgttctcaaggtgctcaaggatggtctctcagcagttcatgtgccgtactcctacggatttgccatcattcttcttactatcattgttaaggctgcgacattgcctttaaccaaaaagcaggtggaatcaactatggcaatgcagaatttacagccgcagcttaaagcaatccagcagagatatgcgggcaaccaggaaaggatacagctagagactgctcggttatacaggcaagctggtgtcaaccctttagcaggatgttttccaacattggcaacaatacctgtatggattggtctttaccaggcactttcaaatgtagcaaatgaggggctattgacagaaggatttttctggattccatcactgggtggtcctacaacaattgcagctcggcaaagtggtgctgggatttcgtggctcttcccatttgtggatggccatcctccgctaggctggtatgacacgatatgctaccttgtattgcctgtgctacttgttgcttctcaatatgtctctatggagatcatgaagccacctcaggttcacaaacaatgtcctcagcacagcacagcaggtttggttgcggaaaatgggaggagccaagcctgtagtgagtgagggggataggaggataattacagcaggacgagcaaaacgctctaatgctcaaccagctggagaaaggtttaggcagctaaaagaagaggagagcatgagaaaagtcaacaaagcactcgctgcaggagactcaaatgcatcgtcatcaacgtatgacatggaggatgaagagtcggatgacgagaccacagaagagggagggcccgtggaggaagcatccagtactggcagtgacaagaagcctccaagttactcagggaagaagggcaaaagatccaagaggaagcgcatggtgcagtgatcgtcacagctcaatcggatgcgattttcgccacaactggttgattcagttgaccagttaggtgccgcagtggatcacggagacagttttggcggtctgctggagccctatatttggggtgcagacaaaatgaacagcttccggggtcacaggtatttgctgctaagcttatgcaaatggaggtagctgagtatatatgctaggcctgagggtgagtgatggaccggagaacaggagtcgggtacgcgtgcaagcagagagacagggtctgtagaagtagataaggtgtaatctctcgtcaagctgggttccagaatctggattgtcctcaccattcgtatgcattgcattgtatttgctttcctcttgtaacctaatgaaccactgttttggagggtatgatcgcgcaagctgacaaccatccagtcgtatacaaatgagttcgaattcgtcttgtcagaactcgttaagagaatgaacttgcgcgagattttttgcatcgcatcgcatgtgctgtttacagaggcgcagaataatc

SEQ ID NO: 208330 - DNA, 1971 bp, Zea Mays
aacgacaacctccacctcgccttcaactcctccacgctcccgtcctctccacctctcgctcccacctcccccgccgtcaccaccaccaccacagcctctcccccgcaacgcgttccttcccggtgcatgaaaccctaaacctataccccactcccctccccgagccatcctctccccccgcggcgatggccaaggcgctgctctactcctccctcctccccgggctgccccgcgctgtcgggagcagccggagcgctgccgcgaggctgctgctgctcccgcctctccggctgcggcgctctacacgctcgccgacgcagcggtagccgcggcggacgccgccgcgggcgcgggggacgacgccggccaagctgcggcggcggtccagaagaacggcggctggttcggcttcatctccgaggccctcgaggtcgttctcaaggtgctcaaggatggtctctcagcagttcatgtgccgtactcctacggatttgccatcattcttcttactatcattgttaaggctgcgacattgcctttaaccaaaaagcaggtggaatcaactatggcaatgcagaatttacagccgcagcttaaagcaatccagcagagatatgcgggcaaccaggaaaggatacagctagagactgctcggttatacaggatgttttccaacattggcaacaatacctgtatggattggtctttaccaggcactttcaaatgtagcaaatgaggggctattgacagaaggatttttctggattccatcactgggtggtcctacaacaattgcagctcggcaaagtggtgctgggatttcgtggctcttcccatttgtggatggccatcctccgctaggctggtatgacacgatatgctaccttgtattgcctgtgctacttgttgcttctcaatatgtctctatggagatcatgaagccacctcagagtgatgacccgtcacagaagaacacactcctcgttttgaaatttcttccatttatgattggctatttctctttgtcagtgccatcaggattgtctatttattggttcacaaacaatgtcctcagcacagcacagcaggtttggttgcggaaaatgggaggagccaagcctgtagtgagtgagggggataggaggataattacagcaggacgagcaaaacgctctaatgctcaaccagctggagaaaggtttaggcagctaaaagaagaggagagcatgagaaaagtcaacaaagcactcgctgcaggagactcaaatgcatcgtcatcaacgtatgacatggaggatgaagagtcggatgacgagaccacagaagagggagggcccgtggaggaagcatccagtactggcagtgacaagaagcctccaagttactcagggaagaagggcaaaagatccaagaggaagcgcatggtgcagtgatcgtcacagctcaatcggatgcgattttcgccacaactggttgattcagttgaccagttaggtgccgcagtggatcacggagacagttttggcggtctgctggagccctatatttggggtgcagacaaaatgaacagcttccggggtcacaggtatttgctgctaagcttatgcaaatggaggtagctgagtatatatgctaggcctgagggtgagtgatggaccggagaacaggagtcgggtacgcgtgcaagcagagagacagggtctgtagaagtagataaggtgtaatctctcgtcaagctgggttccagaatctggattgtcctcaccattcgtatgcattgcattgtatttgctttcctcttgtaacctaatgaaccactgttttggagggtatgatcgcgcaagctgacaaccatccagtcgtatacaaatgagttcgaattcgtcttgtcagaactcgttaagagaatgaacttgcgcgagattttttgcatcgcatcgcatgtgctgtttacagaggcgcagaataatc

SEQ ID NO: 208331 - DNA, 1947 bp, Zea Mays
aacgacaacctccacctcgccttcaactcctccacgctcccgtcctctccacctctcgctcccacctcccccgccgtcaccaccaccaccacagcctctcccccgcaacgcgttccttcccggtgcatgaaaccctaaacctataccccactcccctccccgagccatcctctccccccgcggcgatggccaaggcgctgctctactcctccctcctccccgggctgccccgcgctgtcgggagcagccggagcgctgccgcgaggctgctgctgctcccgcctctccggctgcggcgctctacacgctcgccgacgcagcggtagccgcggcggacgccgccgcgggcgcgggggacgacgccggccaagctgcggcggcggtccagaagaacggcggctggttcggcttcatctccgaggccctcgaggtcgttctcaaggtgctcaaggatggtctctcagcagttcatgtgccgtactcctacggatttgccatcattcttcttactatcattgttaaggctgcgacattgcctttaaccaaaaagcaggtggaatcaactatggcaatgcagaatttacagccgcagcttaaagcaatccagcagagatatgcgggcaaccaggaaaggatacagctagagactgctcggttatacaggcaagctggtgtcaaccctttagcaggcactttcaaatgtagcaaatgaggggctattgacagaaggatttttctggattccatcactgggtggtcctacaacaattgcagctcggcaaagtggtgctgggatttcgtggctcttcccatttgtggatggccatcctccgctaggctggtatgacacgatatgctaccttgtattgcctgtgctacttgttgcttctcaatatgtctctatggagatcatgaagccacctcagagtgatgacccgtcacagaagaacacactcctcgttttgaaatttcttccatttatgattggctatttctctttgtcagtgccatcaggattgtctatttattggttcacaaacaatgtcctcagcacagcacagcaggtttggttgcggaaaatgggaggagccaagcctgtagtgagtgagggggataggaggataattacagcaggacgagcaaaacgctctaatgctcaaccagctggagaaaggtttaggcagctaaaagaagaggagagcatgagaaaagtcaacaaagcactcgctgcaggagactcaaatgcatcgtcatcaacgtatgacatggaggatgaagagtcggatgacgagaccacagaagagggagggcccgtggaggaagcatccagtactggcagtgacaagaagcctccaagttactcagggaagaagggcaaaagatccaagaggaagcgcatggtgcagtgatcgtcacagctcaatcggatgcgattttcgccacaactggttgattcagttgaccagttaggtgccgcagtggatcacggagacagttttggcggtctgctggagccctatatttggggtgcagacaaaatgaacagcttccggggtcacaggtatttgctgctaagcttatgcaaatggaggtagctgagtatatatgctaggcctgagggtgagtgatggaccggagaacaggagtcgggtacgcgtgcaagcagagagacagggtctgtagaagtagataaggtgtaatctctcgtcaagctgggttccagaatctggattgtcctcaccattcgtatgcattgcattgtatttgctttcctcttgtaacctaatgaaccactgttttggagggtatgatcgcgcaagctgacaaccatccagtcgtatacaaatgagttcgaattcgtcttgtcagaactcgttaagagaatgaacttgcgcgagattttttgcatcgcatcgcatgtgctgtttacagaggcgcagaataatc

SEQ ID NO: 208332 - DNA, 1294 bp, Zea Mays
gtaaaatactgatgatctttaacaggtaacggtttgtaaactatggcgtcaagttggagagactttcaggccaccaaagacctgcacgactgtttcttggtcatttcgaattttctatgagaaggcacttcttgaatacgaaaaacacaaggtccggactggtcagcttcagataccaccgcctggtttaccacagcctagtggtgctgaccgtgaggtggttgtaaatcaatcatcttctgccagagttagaagggatgctgcagcgcgtgctatgcagggttggcatgctcaccgccttctcacaaatggcacttatggggataacattttgaaggacaaagatacaatgccacttccaaatcgtgataaaaacctaagctttggggtgctcaagagaaagaaagcatctagtccagagtatgctctcaagtcgtcccgctcaaaaacaaataagtcacaggaagattctatggtcgttgacgttggagaaccagccgactgggtgaagatcaatgtgcggcagactaaagattgctttgaagtttatgcactagttccgggacttctaagagaggaggtgcatgttcaatcagatcctgctggacgtctggttatcacaggggatccagagcagcctgataatccttgggggatcactccgttcaagaaggtggtcaacttgccatcaagaatcgatcctcaccaaacatccgctgttgtcacgcttcatggtcagctattcgtgcgtgcaccatttggtcatcctgatatgtagatatgaaatcctgtttacttcagttttgttgactggcgatgcctcgtcatcagtgatattccttgatattactagggtttatgtcaattctgttgaggaaataggattttgtttgagcagatacatgatgtcaagctgacttagctgaaccgttctgtggttggatgctgattgctgctgttgccatctgttatcaccttgtttattactccctccgttcttttttatttgttgtggtttagtttaaaaatgaactagaggacgataaatatttgagaacggaggtagtattatagtagtggccataaagttagctgattcatgcatgtattccagtttcatggtgagattttatagagaaaggagatgttgttcgtagtagggctaatttgacattatgattacttattgttctttattatttttcttctgtattataaatgcctctctgggtcactccaggcgccttaatgttgcatttttgtgcataacgccggttcctatggtttatgaagc

SEQ ID NO: 208333 - DNA, 1940 bp, Zea Mays
agacccgtcccactccaactccaggccatctccctacgcctcagacctcggtgcaaacctgccgcgaaaatagcagccgcccgttcgctctcccactcctcccgcgatgagcgacccgcggggccacgccgccggtcccgaccgtgacggggacgacccgctcgccgaggacgccaacagcgaggaagcgtggcagacgcccgagaaagagccggttgctgtgtcgaaagaggcggctgcgcggggtggggacacgaccccggacgccgaaccggagagcgatgacggagagggaggagtgggctccccggatcagatggagcccaatgcggacggggagcgcgcaccgcccgtggccgcggctgaggacccggaggggattgttggcagcgcaaaggtggagacgaacggcgaggacgccatcagccttgacgccgacggggaggaggaggacgacgatgatgacggagacgaggaggaggaggaggaggacgacgacgacgacgactccacccctgatgcgtctccgagggccgaggtgaaggtggagggcgaaagctccacggggatgacccagagtggcgccggccaccgcgtggaggtggaaccggaccccttcctcgacggtgatgactctgggacggaggaggagcaaggtgcgttcatggcggagctggagcgcttccatagggagcacagtctcgagttcaagccgcccaagttctacggcaagggcctcaactgcctcaagttatggaggcaggtcgcccacctgggaggccacgagcaggtaacggtttgtaaactatggcgtcaagttggagagactttcaggccaccaaagacctgcacgactgtttcttggtcatttcgaattttctatgagaaggcacttcttgaatacgaaaaacacaaggtccggactggtcagcttcagataccaccgcctggtttaccacagcctagtggtgctgaccgtgaggtggttgtaaatcaatcatcttctgccagagttagaagggatgctgcagcgcgtgctatgcagggttggcatgctcaccgccttctcacaaatggcacttatggggataacattttgaaggacaaagatacaatgccacttccaaatcgtgataaaaacctaagctttggggtgctcaagagaaagaaagcatctagtccagagtatgctctcaagtcgtcccgctcaaaaacaaataagtcacaggaagattctatggtcgttgacgttggagaaccagccgactgggtgaagatcaatgtgcggcagactaaagattgctttgaagtttatgcactagttccgggacttctaagagaggaggtgcatgttcaatcagatcctgctggacgtctggttatcacaggggatccagagcagcctgataatccttgggggatcactccgttcaagaaggtggtcaacttgccatcaagaatcgatcctcaccaaacatccgctgttgtcacgcttcatgggtttatgtcaattctgttgaggaaataggattttgtttgagcagatacatgatgtcaagctgacttagctgaaccgttctgtggttggatgctgattgctgctgttgccatctgttatcaccttgtttattactccctccgttcttttttatttgttgtggtttagtttaaaaatgaactagaggacgataaatatttgagaacggaggtagtattatagtagtggccataaagttagctgattcatgcatgtattccagtttcatggtgagattttatagagaaaggagatgttgttcgtagtagggctaatttgacattatgattacttattgttctttattatttttcttctgtattataaatgcctctctgggtcactccaggcgccttaatgttgcatttttgtgcataacgccggttcctatggtttatgaagc

SEQ ID NO: 208334 - DNA, 1448 bp, Zea Mays
gagagaggctcgatggcgatcaggatgccggcgctcatcttccgccgccgggcggccgccgcagctccaaagccgatacaacagtacctcgctggtctatccaccgcagtggagcacgttattccagaagataacggtcacattgccggtggggaggagaacaagaagcggtgggtggagcttcctcccttcgcaccactcgacgccaacgccaccgctcgagctatctctcggggagatggtggggaaggagcatgctccaatgccacggctatcaggtgaagaagaatctggtgactgctgatacctcttcaacagacagtattactctgcaactccggttgagaagggtttcagcaaaagatgaacttgtgcctggtgatattctctttctacctgttaacattcaagaatcttctgttaccgagaagaccaagaaatttggtaacaagaatgagattgattttctacgtgaccttgaaatctacaaggatagagccatcattgtgctcaacaaaccacctggaatgccagtacaagtccacaggcttgatagggattgcagtggcgtccttgttctgggaagaactcaatttagcgcttcccttatgcatgctatatttcgtgagaaaactgctgatgctttaggtgatggtactcaacaagtactgcaaagaaaatatgttgcacttgttattggaagacctaggcatcccaagggtttattgtcagcaccacttgcgaaggttgtattacaagatggcaggtcagagcgtctgactgtttgcgctggttcaaatactgcttctgttcaagatgctttgacagagtaccgtgtgattgagtcttttcctcaagggtacacttggttagaactattccctcgaactggaaggaagcatcagctccgagtccattgtgcggaggttctgggaacacccatcgttggggattacaagtatggacgccaagcacaccagaactggatgcctctccccatgccacaaacaatcgacaaggaaatgctgaagaagaggaagcttccctttggtcttactttgggcggtggaagcgtagctgagcagcagcctcagctgcatctacactgcaagcagatgatccttcctgacatctcagcagctatgcaacagctgcggtcttcagatgctgaccacgatttctctgatctggagaagctgagctttgtcgcgccattgccattgcacatgcagttaagctggaagattttgttgtccgtaggcaagtagtgttgtcatttcttctttaggcatgcttgcttgctgtgctgtaataactttataactgcgaggtttgcgttaagacgtcgtagaaagcttaatttgggctgttggagcagcggacctctaatgaggtgaaagatgacatcacactcagaaacgatgttgataaatattttattgtttttt

SEQ ID NO: 208335 - DNA, 1119 bp, Zea Mays
gagagaggctcgatggcgatcaggatgccggcgctcatcttccgccgccgggcggccgccgcagctccaaagccgatacaacagtacctcgctggtctatccaccgcagtggagcacgttattccagaagataacggtcacattgccggtggggaggagaacaagaagcggtgggtggagcttcctcccttcgcaccactcgacgccaacgccaccgctcgagctatctctcggggagatggtggggaaggagcatgctccaatgccacggctatcaggtgggtccgacactgctgcccacacgtaccagcgtcgctggtccagaagctgttccgcctccgcaaggtgaagaagaatctggtgactgctgatacctcttcaacagacagtattactctgcaactccggttgagaagggttgtattacaagatggcaggtcagagcgtctgactgtttgcgctggttcaaatactgcttctgttcaagatgctttgacagagtaccgtgtgattgagtcttttcctcaagggtacacttggttagaactattccctcgaactggaaggaagcatcagctccgagtccattgtgcggaggttctgggaacacccatcgttggggattacaagtatggacgccaagcacaccagaactggatgcctctccccatgccacaaacaatcgacaaggaaatgctgaagaagaggaagcttccctttggtcttactttgggcggtggaagcgtagctgagcagcagcctcagctgcatctacactgcaagcagatgatccttcctgacatctcagcagctatgcaacagctgcggtcttcagatgctgaccacgatttctctgatctggagaagctgagctttgtcgcgccattgccattgcacatgcagttaagctggaagattttgttgtccgtaggcaagtagtgttgtcatttcttctttaggcatgcttgcttgctgtgctgtaataactttataactgcgaggtttgcgttaagacgtcgtagaaagcttaatttgggctgttggagcagcggacctctaatgaggtgaaagatgacatcacactcagaaacgatgttgataaatattttattgtttttt

SEQ ID NO: 208336 - DNA, 1523 bp, Zea Mays
gaaaggccgagagaggctcgatggcgatcaggatgccggcgctcatcttccgccgccgggcggccgccgcagctccaaagccgatacaacagtacctcgctggtctatccaccgcagtggagcacgttattccagaagataacggtcacattgccggtggggaggagaacaagaagcggtgggtggagcttcctcccttcgcaccactcgacgccaacgccaccgctcgagctatctctcggggagatggtggggaaggagcatgctccaatgccacggctatcaggtgggtccgacactgctgcccacacgtaccagcgtcgctggtccagaagctgttccgcctccgcaaggtgaagaagaatctggtgactgctgatacctcttcaacagacagtattactctgcaactccggttgagaagggtttcagcaaaagatgaacttgtgcctggtgatattctctttctacctgttaacattcaagaatcttctgttaccgagaagaccaagaaatttggtaacaagaatgagattgattttctacgtgaccttgaaatctacaaggatagagccatcattgtgctcaacaaaccacctggaatgccagtacaagtccacaggcttgatagggattgcagtggcgtccttgttctgggaagaactcaatttagcgcttcccttatgcatgctatatttcgtgagaaaactgctgatgctttaggtgatggtactcaacaagtactgcaaagaaaatatgttgcacttgttattggaagacctaggcatcccaagggtttattgtcagcaccacttgcgaaggttgtattacaagatggcaggtcagagcgtctgactgtttgcgctggttcaaatactgcttctgttcaagatgctttgacagagtaccgtgtgattgagtcttttcctcaagggtacacttggttagaactattccctcgaactggaaggaagcatcagctccgagtccattgtgcggaggttctgggaacacccatcgttggggattacaagtatggacgccaagcacaccagaactggatgcctctccccatgccacaaacaatcgacaaggaaatgctgaagaagaggaagcttccctttggtcttactttgggcggtggaagcgtagctgagcagcagcctcagctgcatctacactgcaagcagatgatccttcctgacatctcagcagctatgcaacagctgcggtcttcagatgctgaccacgatttctctgatctggagaagctgagctttgtcgcgccattgccattgcacatgcagttaagctggaagattttgttgtccgtaggcaagtagtgttgtcatttcttctttaggcatgcttgcttgctgtgctgtaataactttataactgcgaggtttgcgttaagacgtcgtagaaagcttaatttgggctgttggagcagcggacctctaatgaggtgaaagatgacatcacactcagaaacgatgttgataaatattttattgtttttt

SEQ ID NO: 208337 - DNA, 1416 bp, Zea Mays
cttggttcgacgcagcctctctgcaaaagaggcagggccacaaaggaagggtcaaagagggggttgagaaatcaagagacaggtcaaggagccgtagtccaaggccaagagacagagatgatagaaggcgaagtcgcagcaggagcaggagcagagaaaggcatgtccatgatagagatagggactatcgtcgtcggagcagaagtagaagccgaagtatgagttcaagccctgaccacaaaagtcatcgtagagcaagagatgatgttaagcgcaagagcagaagcaagagtagaagcaggagcaggagtagaagccgctcataccacagttcttcacctgcccggcgcagtgctagtcctcccaagagcccaccgccacagaggagccccactcctgaaaagcatgccaatggaaaagattcacctctgtcacgcagtgtatctccatcaccgaagcgtgcaagctcccgcagcccaggcagcgatagcaaggaataaagcttgttgatctggtgatgcttaaagagcagtcttcccatgggattgcagaacgttgagaaggctgtttgaacatgatggcagtagcaatctgcaatcaaccgctatccaagttatctgttcgtgagaggggttgctgtttaccggtagaatggtattgctcgggaccgactatggtggatgatgtcttgctgttagtctttgtcattggtgttgatatggggatgacacagctgatgatgtgacggtgctgatattgtatcgatattgatgctgatgctgcttacagtgaccatcttgatgcagtctatatttttgttcaagaggttctgaatcaaatcatgaaattccagatggatctcatgattggtaagaaaacttgtacaataatgccttacatgctatgttggttcttacccctaccctactttggcaaatgctttgcatcagttctagttggaacaaggtgcagactggcagagatgctgaggggtgtgtgtactcatagtaacaatggtactcgtcgtcgtcgtaatatggctaataatctctacgggaatggaggtatcagttatgattagcgtgggtcctgttgatcatgtggtggtgaaccaatttattttggtccttctctatcatattgttttattattctgctagtgttgagtgactcgaatcagatgctctagatttattcattctcctaagcaccagtaatgaaatccatgaagacaatgcctctgtaccaaggctcaatattaacatgtcatctctgtctggaaatgtatttgtgaaatatggtttgtacggtacctgcccatttcgtttgtagtagagcacttgactataatatcagtacgtttaagatgtttggtgtgttaatgaaggtatgcaatagatgattaactagtactcc

SEQ ID NO: 208338 - DNA, 3211 bp, Zea Mays
catcattgaaagcctccaaattccgggtgctgatcttcgtccggctgatcgcgttcacgctgttcgtaatctggcgcatctcgcaccgcaacccggacgcgctgtggctgtgggtgacgtcgatcgcgggcgagttctggttcggcttctcgtggctgctggaccagctgccgaagctgaacccgatcaaccgcgtgccggacctggcggcgctgcggcagcggttcgaccgcgcgggcgggggcgccggcggagggacgtcgctgctgccggggctggacgtgttcgtgacgacggcggacccgttcaaggagccgatcctgagcacggccaactccgtgctgtccatcctggccgccgactaccccgtggagcgcaacacgtgctacctctccgacgactccgggatgctgctcacctacgaggccatggcggaggccgccaagttcgccaccgtctgggtgcccttctgccgcaagcacggcatcgagccgcgcggccccgagagctacttcgacctcaagtcccacccttacatgggccgctcccaggaggacttcgtcaacgaccgccgccgcgtgcgcaaggactacgacgagttcaaggcgcgcatcaacggcctcgaccacgacatcaagcagaggtccgacgcgtacaacgccgccagggggctcaaggacggcgagcccagggcaacctggatggccgacggcacccagtgggagggcacatgggttgagccctccgagaaccaccgcaagggagaccacgccggcatcgtactggtgcttctgaaccacccgagccacagccgtcagctcggcccgccggcgagcgcggacaacccgctggacttgagcatggtggacgtgcggctcccgatgctggtgtacgtgtcccgcgagaagcggcccgggcacaaccaccagaagaaggccggcgccatgaacgcgctgacccggtgctccgcggtgctgtccaactcgcccttcatcctcaacctggactgcgaccactacatcaacaactcgcaggcgctgcgcgcgggcatctgcttcatgctcggccgcgacagcgacacggtggccttcgtgcagttcccgcagcgcttcgagggcgtggaccccacggacctgtacgccaaccacaaccgcatcttcttcgacggcacgctcagggcgctggacggcatgcagggccccatctacgtgggcacgggctgcctgttccgccgcatcacgctctacggcttcctgcccatgcccaagaagtcgtacggcaagtcggacgcgttcgcggacaccatcccgatggcgtcgcacccgtcgccgttcgcggccgcctcggccgcctccgtcgtggcggacgaggcgaccatcgccgaggccgtggcggtgtgcgcggcggcgtacgagaagaagaccgggtggggcagcgacatcgggtgggtgtacggcacggtgacggaggacgtggtgacggggtaccggatgcacatcaaggggtggcggtcccgctactgctccatctacccgcacgccttcatcggcaccgcccccatcaacctgacggagcggctgttccaggtgctccgctggtcgacgggttccctggagatcttcttctcccggaacaacccgctgttcgggagcacgttcctgcacccgctgcagcgcgtggcgtacatcaacatcacgacgtacccgttcacggccatcttcctcatcttctacacgacggtgccggcgctgtcgttcgtgacggggcacttcatcgtgcagcggcccaccaccatgttctacgtgtacctggccatcgtgctgggcacgctgctgatcctggccgtcctggaggtgaagtgggcgggcgtgacggtgttcgagtggttcaggaacgggcagttctggatgacggccagctgctccgcgtacctggccgcggtgtgccaggtgctggtgaaggtggtgttcaggcgggacatctcgttcaagctgacgtcgaagcagcccgcgggggacgagaagaaggacccctacgcagacctgtacgtggtgcgctggacctggctcatggtgacgcccatcatcatcatcctcgtcaacatcatcggctccgccgtggccttcgccaaggtgctggacggcgagtggacgcactggctcaaggtggccggcggcgtcttcttcaacttctgggtgctcttccacctctaccctttcgccaagggcatcctggggaggcacggcaagacccccgtggtggtgctcgtctggtgggccttcaccttcgtcatcaccgccgtgctgtacatcaacatcccccacatccacgggccaggcggcaagcacggcggcgcgatcggaaggcacggcggcgacgcacaccaccatggcaagaagttcgacggctactacctctggccgtgaagcgccgagcagccagcatcgtcatgcatgcacatataccgcctgccctgatggtgacgatggtgagccgccaaggtgaagactgaagagtacgttcccgttcatccatccatcgtctccttagtactgctgcccggtgattagtcgatgaagagtgaaggtgaaggctacccacacacacacatttggtcgacgtacccgccaaaatttgaattttttttcttcccccttcttccttctcattcttttttcttttagttttgtccagaaatcgaaaggtgtgttgatttgatttagtttttttaattaccgtgccccgtggtaattaattatgtacgtacttatatatatatacattacgccgaagaggaaggagcactttgtataagagaggaatggggaacgtacttatgggtggggggccggggtgtcagcgtctgcctgtctgtactgtacatggcttagaggagtcacatgcagagagggagggccctggctttggggtggtattcttttggtacatggatcaagaataaattgaatttcattcttgttgtttggaaaagaggtgtacaccctcctccctcctggactctggttcctgtggagagtatgtatctttattattactgatgtaccacctgtgtgttgtcggtactgtaattggatagtaagtactacactgatctgctggtctaatcaatgttgttgttttatatggataataataatgattagtaagtcaatggtgaacatgagcttgctgtccattactccattgcgtg

SEQ ID NO: 208339 - DNA, 760 bp, Zea Mays
atacaggccattttgccgtttccggcgcgcgcctctgaacaaacccgaaagcccccctcatcgccattcctcttcctgccatggcgatcctctttactcctcccctcccaccaccaccgcccctcccaactacaccacaccgcaccggcaccaccaccaaccgagcggctccaggctcctgctcaggaaggggagaagaggcgagccttccttgggaagtcgcaggaggagagaaggggaacaaagatggggcgcggcaagatcgagatcaagcggatcgagaactccaccaaccgccaggtgaccttctccaagcgccgcaacgggatcctcaagaaggcgcgggagatcagcgtgctctgcgacgccgaggtcggcgtcgtcgtcttctccagcgccggcaagctttacgactactgctccccgaagacatcgctatcaaaaatcctggagaagtaccagaccaactctggaaagatactgtggggtgagaagcacaagagccttagtgcagagattgaccgtataaagaaagagaacgacaccatgcagatcgagctcaggcacctgaaaggtgaagatctaaactcgctgcaacccaaagacctgatcatgatcgaggaggcacttgataatggactgacgaacctgaatgagaaactgatggagcactgggaaaggcgtgtgacaaacactaagatgatggaagacgagaacaaattgctggccttcaaactcacatacagttttcagagaccaa

SEQ ID NO: 208340 - DNA, 761 bp, Zea Mays
tccaatccttgaccaactctggcgactccttcactcctccctgaccaactccagcgggcgactcctctctgatcaagaagacaagaactcaagaagatgagtaccacatctgaagccagacaacaaccatgagtctcgcttgtcttgtatgccatggcatgagcagcccctcgcactctcttagaagctactcggtgtcaagctcagaggaggaaagccggtgtggagctgttgttgcctgcttagctcgaagagtaacaccagctggaacctctactagcgttgggacatcgaaagtgaccccctttccacccgtggtgagtgatcaagttggtacagagggcgctcctcgacttcaacgcagccgtgctgtgtccagggaccttgttagagactggaacttcgacgaagtaatcgtcgcaaattagagtagccctcaacagtcgtcagctggactctgtgctctacttatcaggcaggagattccttcattcgatgtaaaattttcatagtagacgtctggaagtccatgccaatacttgatgaggaaatgctcgagagggatggtacctttcaggagcaatatttggactgttgcagttatatgtggtcacgtacctgtgtaggtaggataaatgttttgagtgtgttttcctaattttcagacgtgtataagttgtcatgtacctttatgtatattatgaatgaatccaacttcagatctcgatctaatattcaaacggaagtaatattttggtgta

SEQ ID NO: 208341 - DNA, 586 bp, Zea Mays
ataatgatagaaggtcgtagcacaaccttaaatgaggtgccgccgtcgccgccgatgatgctgaacggacgtgccgcgtccccatccagaaccatccctgctcaacaccttctccgttgctcaccatggcgtcgtagttgttgccggacccattgccaccagatagtcacggcctcttcgtaacttcactccgttcatgttcgtcgccgctcgtgccaccctcccgcggctccctcatcacccatcgttgctggttctgcccgctgttgctggagatcgtgaccatggaactcacgtcgtcgtcctagcgctcctcgcgatgttgctgctccagggcgtcatcctcatgtcaacggtggagggccttgtgtggatcatgcaagaagctccacaagttcctcatcaagaagatcaggcaaactggttggagggatcttatcagaaatgtagcggcggactactcatctctttggagagcggaaacagccttactttccaacttgataagcgaggttacaagtcacctgaagattatcctggtacctggaatctcatgtctcaggcaagttgtgcccttgaccactta

SEQ ID NO: 208342 - DNA, 630 bp, Zea Mays
ataatgatagaaggtcgtagcacaaccttaaatgaggtgccgccgtcgccgccgatgatgctgaacggacgtgccgcgtccccatccagaaccatccctgctcaacaccttctccgttgctcaccatggcgtcgtagttgttgccggacccattgccaccagatagtcacggcctcttcgtaacttcactccgttcatgttcgtcgccgctcgtgccaccctcccgcggctgtaactccctctcccttcctcctctcaccgcaggcctcatcacgccctcatcacccatcgttgctggttctgcccgctgttgctggagatcgtgaccatggaactcacgtcgtcgtcctagcgctcctcgcgatgttgctgctccagggcgtcatcctcatgtcaacggtggagggccttgtgtggatcatgcaagaagctccacaagttcctcatcaagaagatcaggcaaactggttggagggatcttatcagaaatgtagcggcggactactcatctctttggagagcggaaacagccttactttccaacttgataagcgaggttacaagtcacctgaagattatcctggtacctggaatctcatgtctcaggcaagttgtgcccttgaccactta

SEQ ID NO: 208343 - DNA, 3411 bp, Zea Mays
atagagtgctaaattatcagcatgagcgtggagagaattcaggagagtgtggttgggagagaagctgccatgtcaaccgtcgagtcatcaggatcagctttatcccggcaaaggccagaaaccgttacgagtggtccacgagggtggctgctgtgcggcctatcttctccctgtccaatctctgcttctccctcctctcccacccagaatcagaagcatcgcgagtcgtcgccgggacaccgacgactgggcgagtgctgccgccggcctttctccaggtctttgccggacgccctcctgaccttcatgagctgttccgcggtcgcctccgatggcattgcgctgcacttccctaccccgtcgagggcaggaccctccgcggaggaggaggtgtctgcgcgtgcggggtgctcgctctcggttcccacaggagtactaggagagcgaggcgcaggcagtcaggcaccgagacacgcgccagggcagaaccaagttgcgatgctgaagttcacaggatttaagttgctaaacaacatttcagacagtgggaaggccttcctaatgattctagtatcagacatccttctagggttactgttccaggatgtccagagcttcatgtattttagaactgaaacgtgtcgacatcagaagagggaggcataatgagttgcagggttcagtatgcagtaaaaggaatcgccatgcccacatctacctgggccttttagccgggccgaatcccggcaaaggcccactgtagacccagaagaaaccgctagagttgtccatgaggtgtgaggcccatgagggttgctggtgtggcgcgtccgtggatttctctctagcaggctatgcctgcctggatcatcccgactcttcgtctccagctggcagctgctgcttctccgggtgcatctgcccctgcgttccaagtaccgctggggccagctatcttgctacttgctaggcagcatatggtccgcgtttcatgaccttcatgagctgttccgcggccgtctccaacaggaccctctgcgggggccacggcgctgtctgcgcgcgcggggtgctcgctctcggttcccacagtagtaggaggagggcgaggcgcagacacgcggtggtcttcgctaagaggaggcggcggcgtctcagcaaatggcagcggccgtggtggaagaccttcttttctgactggaacgaagacgacgagagcctggccgggtggagggaggaggacgagctcttggaggagattggcgccaaccaggagctgtcggacaatgaaaagttcaaggtgtggatgagtaaggccgaggcaatcgttgaaatgcgcgaggcccagcaggatgcgatgaacgccgaggagcgatcgtgggaggattggatcagtggtggcggcacgtcagggactggaggaggtggggactggaatcgggaggacagcttgttggaccagataactgatgatcctgcagagattgtgagggacaagagcattattcagattttcagagattccatcaatgaggattacgaggacatgctgttcgaagatcgagtgtttatgtatgcctcgacaaactcggatagagttgagggatgattggaggctagaaaatcgaaatgctttcgcaaatatatggtccgatactgtttatggaattgtgctatttcttcttatgtgcttcaaccagagcaaagttgcaatgctgaagttcacgggatataaggtgctaaataacatttcagacagtgggaaagcctttcttattattttagtatcggacatccttctaggctaccattcagagtcaggttggcatacattggtagaagttattctcgagcattatgggcttgaagctgatgaagcggcggtcacattttttgtttgtctggttccagtggctttcgatgtgtacataaaatattgggtatacaaataccttccaagattatcacccagtgtgggaaacgttttggatgaaataaagcgccattagagaactttttttagtttccttattgggaaattgcttgagaatttgtcgccttccaggtatgtactgggctctggattcctactcgcttaattttcggagtttgaacagttagtggagaatctattcactaactgtgttacactgtgcctaaggttagtcgttcgaattgaagaactaaccttagacataaaagttaggcaaagtgtaacaaattaggtagcgaatcaaacaggcagtccttgaacaataaggatgcatatttctgtacgttaggaattaccaggttcattcttttggcaagaaaaaaataacaatgttcatttgaaaggtgctgtgtgaaatatttttctcagatgacagtgtaaaatgttatgaaacattttttttttgtgtattcaactttttttttcttgtattatgcttgagatgatgaatacataaattttccccatcactcaagaatgaacatataactgccccaacgccaaaagccataaattatcctgactagataatttgattttttttgtgtgcttaggctgggaaactaattacaatttgcaggtagtcaatggcttggcatataaagttttaaaatctgaacgatgtcttcgtctgaaaggccttgcctagaatgtctgtctggtgatcaatcagagtctcaggctgttcgagaagactgggaatttggagaagtaacctaggtagtccttattctaaaagaaaggttccatgactcggaatcaacgtcaggcaaaaatctcttctctcttatttacatggtgttatctacttgtaaaataagaaatcgaatgattttgcgcgaaatgagacagccgtgctgacggacgtctgttctgaccaacaagcaattgtttttcctttgcttttgagatctgaactgacggttagcttcacgtttcaaatttgcttcgctaaaaaaagatagacccagtgttagcggcttccacataaatgaggtctagtgaaggaataatcgagtcttgctcctgtatttttgcagagactcagaacaaggaggatgcactgttgctttatggacaaattgcacttctctattttttcctttgactttgccattattggacttgtgacttttttatggggtttcatgcatgctatggttaattccctcgcaagcttattcaccatattttcatgattatgcggaggaagttgagtattccactttctcttccattgaataagtcccttcctagcctatcaccctcttctttgacctctttactttgttttataatggtatcatcgcaaggtcctacaagtgttagcacatgatgtaataaattgagcttatgtacatgtgcacttgtgaggtactgaggttggaatgattttaatgttgttaccataacctcac

SEQ ID NO: 208344 - DNA, 1804 bp, Zea Mays
gtcacttgcagctgagctactcgattcgaaaaaggttgcgatgctgaagttcacaggatttaagttgctaaacaacatttcagacagtgggaaggccttcctaatgattctagtatcagacatccttctagggttactgttccaggatgtccagagcttcatgtattttagaactgaaacgtgtcgacatcagaagagggaggcataatgagttgcagggttcagtatgcaggccaaatttctagcattgttgattgtggttccatgggtgatagattttctagtgcatgactatgttatgatgccctttttagagaggtatgtccagaaggtgccacttgcagctgagctactcgatgtaaggcgcagccaaaagctgcagatggttaaagacctaaatattgaaaaggcaagatatcgtcttgaagtagagattggcaaatctcctccactttctgatgaggaggtctggcatgagttgcgggaaaaagcgatagagttgagggatgattggaggctagaaaatcgaaatgctttcgcaaatatatggtccgatactgtttatggaattgtgctatttcttcttatgtgcttcaaccagagcaaagttgcaatgctgaagttcacgggatataaggtgctaaataacatttcagacagtgggaaagcctttcttattattttagtatcggacatccttctaggctaccattcagagtcaggttggcatacattggtagaagttattctcgagcattatgggcttgaagctgatgaagcggcggtcacattttttgtttgtctggttccagtggctttcgatgtgtacataaaatattgggtatacaaataccttccaagattatcacccagtgtgggaaacgttttggatgaaataaagcgccattagagaactttttttagtttccttattgggaaattgcttgagaatttgtcgccttccaggtagtcaatggcttggcatataaagttttaaaatctgaacgatgtcttcgtctgaaaggccttgcctagaatgtctgtctggtgatcaatcagagtctcaggctgttcgagaagactgggaatttggagaagtaacctaggtagtccttattctaaaagaaaggttccatgactcggaatcaacgtcaggcaaaaatctcttctctcttatttacatggtgttatctacttgtaaaataagaaatcgaatgattttgcgcgaaatgagacagccgtgctgacggacgtctgttctgaccaacaagcaattgtttttcctttgcttttgagatctgaactgacggttagcttcacgtttcaaatttgcttcgctaaaaaaagatagacccagtgttagcggcttccacataaatgaggtctagtgaaggaataatcgagtcttgctcctgtatttttgcagagactcagaacaaggaggatgcactgttgctttatggacaaattgcacttctctattttttcctttgactttgccattattggacttgtgacttttttatggggtttcatgcatgctatggttaattccctcgcaagcttattcaccatattttcatgattatgcggaggaagttgagtattccactttctcttccattgaataagtcccttcctagcctatcaccctcttctttgacctctttactttgttttataatggtatcatcgcaaggtcctacaagtgttagcacatgatgtaataaattgagcttatgtacatgtgcacttgtgaggtactgaggttggaatgattttaatgttgttaccataacctcac

SEQ ID NO: 208345 - DNA, 2204 bp, Zea Mays
cgacgtctggttgcgatgctgaagttcacaggatttaagttgctaaacaacatttcagacagtgggaaggccttcctaatgattctagtatcagacatccttctagggttactgttccaggatgtccagagcttcatgtattttagaactgaaacgtgtcgacatcagaagagggaggcataatgagttgcagggttcagtatgcaggccaaatttctagcattgttgattgtggttccatgggtgatagattttctagtgcatgactatgttatgatgccctttttagagaggtatgtccagaaggtgccacttgcagctgagctactcgatgtaaggcgcagccaaaagctgcagatggttaaagacctaaatattgaaaaggatagagttgagggatgattggaggctagaaaatcgaaatgctttcgcaaatatatggtccgatactgtttatggaattgtgctatttcttcttatgtgcttcaaccagagcaaagttgcaatgctgaagttcacgggatataaggtgctaaataacatttcagacagtgggaaagcctttcttattattttagtatcggacatccttctaggctaccattcagagtcaggttggcatacattggtagaagttattctcgagcattatgggcttgaagctgatgaagcggcggtcacattttttgtttgtctggttccagtggctttcgatgtgtacataaaatattgggtatacaaataccttccaagattatcacccagtgtgggaaacgttttggatgaaataaagcgccattagagaactttttttagtttccttattgggaaattgcttgagaatttgtcgccttccaggtatgtactgggctctggattcctactcgcttaattttcggagtttgaacagttagtggagaatctattcactaactgtgttacactgtgcctaaggttagtcgttcgaattgaagaactaaccttagacataaaagttaggcaaagtgtaacaaattaggtagcgaatcaaacaggcagtccttgaacaataaggatgcatatttctgtacgttaggaattaccaggttcattcttttggcaagaaaaaaataacaatgttcatttgaaaggtgctgtgtgaaatatttttctcagatgacagtgtaaaatgttatgaaacattttttttttgtgtattcaactttttttttcttgtattatgcttgagatgatgaatacataaattttccccatcactcaagaatgaacatataactgccccaacgccaaaagccataaattatcctgactagataatttgattttttttgtgtgcttaggctgggaaactaattacaatttgcaggtagtcaatggcttggcatataaagttttaaaatctgaacgatgtcttcgtctgaaaggccttgcctagaatgtctgtctggtgatcaatcagagtctcaggctgttcgagaagactgggaatttggagaagtaacctaggtagtccttattctaaaagaaaggttccatgactcggaatcaacgtcaggcaaaaatctcttctctcttatttacatggtgttatctacttgtaaaataagaaatcgaatgattttgcgcgaaatgagacagccgtgctgacggacgtctgttctgaccaacaagcaattgtttttcctttgcttttgagatctgaactgacggttagcttcacgtttcaaatttgcttcgctaaaaaaagatagacccagtgttagcggcttccacataaatgaggtctagtgaaggaataatcgagtcttgctcctgtatttttgcagagactcagaacaaggaggatgcactgttgctttatggacaaattgcacttctctattttttcctttgactttgccattattggacttgtgacttttttatggggtttcatgcatgctatggttaattccctcgcaagcttattcaccatattttcatgattatgcggaggaagttgagtattccactttctcttccattgaataagtcccttcctagcctatcaccctcttctttgacctctttactttgttttataatggtatcatcgcaaggtcctacaagtgttagcacatgatgtaataaattgagcttatgtacatgtgcacttgtgaggtactgaggttggaatgattttaatgttgttaccataacctcac

SEQ ID NO: 208346 - DNA, 5398 bp, Zea Mays
agaggaacccagcgtccacaccacagcccacggctgagactcaggtgaggtccgccgcgtccccccgctgccacaacccacaaccactacctgagtacctgaccaccaccggataggatgaagccgccggtgagcagggccgccttcgcgtccgtgctgatagggccgcgcacgctcggggcctctctggtggccgcccgctgcgcctcctcctctgccgccgctgccgtcactgcctatgatcatgcatcgtttgtcaaggaaatcgccgcaaccgatcctccagagcatctcaactctctcctcaatgtgcttcaagcacgaggtgaaaagattgtttctcctggagcaaaaagagggttgattccatgtgttgttcccttatcagaaagtccagcaggtgatttgacatctctccttagatggccaaccgctccaactgggatggaaatgcctgttgtggaagttcgtaaacatgggctgtggcttttggctaaaaatgtgaaacagtatatccacagaatacttgttgaggctgacttcagtgctggaactggtgatgatttatgggctgctgtgggcgaagctggtaaaaacctttacgctaaaggcgaattcaaagagtcgcaggtggcagaccttgatgtctatttgttgaagaaggttgggagatacatgtcagttcctaattactatgttacaaggcagcctgtgcactgatgtttttttttgtaggttggacttttccctgatgttatagagaggaaaacattgcgccatctcgaaaaaggagataatgtctcagctctcattactggagaattctatactagagatcaatttccaggatttggaagaccctttgtgttcaatgcagagatttttaaaagagttggacgtacatctgaagccaaagattcagctcgagtggctctgaaatcaccatggtggacacttggctgcagttacgaagaggctgctgaactagctgggtgggaggatgagcagctagagtttataagagagaaggtaactgaggagggtaagcgcgaggacctgaagagaggaaaggctccagaacaggtagctgacgagagcctccttaacttgtcacatgatagggttcaattatttcttggctggctccattgcctttgctgctctggtgcactgcaggtgattcttgacgaggcggcattcttaatggatttagcgtccgtggatggtaactgggacgaggttgtggatcggattgctgaatgttacagagaggctgggcttcatgacattgcgaatttcattgcctacagggaatagatgttagattccctatggtctagaatgttattcaagaaattttgattcatttgtgctctgctaatatatattcttatatacgggaagaacgcacaaccgttatatcgcagcagtccttttttgttttgttttgacatcagctagtgaccatagtttctttcctgtatagctctgaatgtacttgttttttccatttaaatttccatgcttattcatggttagtaagtgtcagattgagtgcattttattctcttgatcgatggctgatttgctgattgttctcgcgatacatagagaggacccgagcaatagatacatcaaagttggttgtgtggataatgtcatgacactggcagtcatggcaagcttggactggaaagagattattgtttggttgtgtgcatgcaaaatggttgaagaggcggctggtttgtaatgctggtgataacaaaatgaagaggttcaggaaagcaaataaagatatagagtgctaaattatcagcatgagcgtggagagaattcaggagagtgtggttgggagagaagctgccatgtcaaccgtcgagtcatcaggatcagctttatcccggcaaaggccagaaaccgttacgagtggtccacgagggtggctgctgtgcggcctatcttctccctgtccaatctctgcttctccctcctctcccacccagaatcagaagcatcgcgagtcgtcgccgggacaccgacgactgggcgagtgctgccgccggcctttctccaggtctttgccggacgccctcctgaccttcatgagctgttccgcggtcgcctccgatggcattgcgctgcacttccctaccccgtcgagggcaggaccctccgcggaggaggaggtgtctgcgcgtgcggggtgctcgctctcggttcccacaggagtactaggagagcgaggcgcaggcagtcaggcaccgagacacgcgccagggcagaaccaagtatgctatgcagattgtattacatgcattacctaataaagacaggcgtgtccagaaggtgtcacttgcagctgagctactcgattcgaaaaaggcaagatactgtcttgaagtagagattggcaaatctcctccgctttctgatgacgacgtctggtatgagctgcgggaaaaaaaatgctgaatacaatagctttcttgtcaagtcattactttttgtaaaatcaccatccatcagaatcattacttttatagcacctactttggaccaaagatgtgtcatccagttagcgtaactagcagacagctttctgtaataatgtataggcaatgtaaatttgtctgattgattatcatggccttttgtttctccaaatgaatgtatagggttatgttgttatcatacatcttacttttactccctcctcacattcaggttgcgatgctgaagttcacaggatttaagttgctaaacaacatttcagacagtgggaaggccttcctaatgattctagtatcagacatccttctagggttactgttccaggatgtccagagcttcatgtattttagaactgaaacgtgtcgacatcagaagagggaggcataatgagttgcagggttcagtatgcagtaaaaggaatcgccatgcccacatctacctgggccttttagccgggccgaatcccggcaaaggcccactgtagacccagaagaaaccgctagagttgtccatgaggtgtgaggcccatgagggttgctggtgtggcgcgtccgtggatttctctctagcaggctatgcctgcctggatcatcccgactcttcgtctccagctggcagctgctgcttctccgggtgcatctgcccctgcgttccaagtaccgctggggccagctatcttgctacttgctaggcagcatatggtccgcgtttcatgaccttcatgagctgttccgcggccgtctccaacaggaccctctgcgggggccacggcgctgtctgcgcgcgcggggtgctcgctctcggttcccacagtagtaggaggagggcgaggcgcagacacgcggtggtcttcgctaagaggaggcggcggcgtctcagcaaatggcagcggccgtggtggaagaccttcttttctgactggaacgaagacgacgagagcctggccgggtggagggaggaggacgagctcttggaggagattggcgccaaccaggagctgtcggacaatgaaaagttcaaggtgtggatgagtaaggccgaggcaatcgttgaaatgcgcgaggcccagcaggatgcgatgaacgccgaggagcgatcgtgggaggattggatcagtggtggcggcacgtcagggactggaggaggtggggactggaatcgggaggacagcttgttggaccagataactgatgatcctgcagagattgtgagggacaagagcattattcagattttcagagattccatcaatgaggattacgaggacatgctgttcgaagatcgagtgtttatgtatgcctcgacaaactcggccaaatttctagcattgttgattgtggttccatgggtgatagattttctagtgcatgactatgttatgatgccctttttagagaggtatgtccagaaggtgccacttgcagctgagctactcgatgtaaggcgcagccaaaagctgcagatggttaaagacctaaatattgaaaaggcaagatatcgtcttgaagtagagattggcaaatctcctccactttctgatgaggaggtctggcatgagttgcgggaaaaagcgatagagttgagggatgattggaggctagaaaatcgaaatgctttcgcaaatatatggtccgatactgtttatggaattgtgctatttcttcttatgtgcttcaaccagagcaaagttgcaatgctgaagttcacgggatataaggtgctaaataacatttcagacagtgggaaagcctttcttattattttagtatcggacatccttctaggctaccattcagagtcaggttggcatacattggtagaagttattctcgagcattatgggcttgaagctgatgaagcggcggtcacattttttgtttgtctggttccagtggctttcgatgtgtacataaaatattgggtatacaaataccttccaagattatcacccagtgtgggaaacgttttggatgaaataaagcgccattagagaactttttttagtttccttattgggaaattgcttgagaatttgtcgccttccaggtagtcaatggcttggcatataaagttttaaaatctgaacgatgtcttcgtctgaaaggccttgcctagaatgtctgtctggtgatcaatcagagtctcaggctgttcgagaagactgggaatttggagaagtaacctaggtagtccttattctaaaagaaaggttccatgactcggaatcaacgtcaggcaaaaatctcttctctcttatttacatggtgttatctacttgtaaaataagaaatcgaatgattttgcgcgaaatgagacagccgtgctgacggacgtctgttctgaccaacaagcaattgtttttcctttgcttttgagatctgaactgacggttagcttcacgtttcaaatttgcttcgctaaaaaaagatagacccagtgttagcggcttccacataaatgaggtctagtgaaggaataatcgagtcttgctcctgtatttttgcagagactcagaacaaggaggatgcactgttgctttatggacaaattgcacttctctattttttcctttgactttgccattattggacttgtgacttttttatggggtttcatgcatgctatggttaattccctcgcaagcttattcaccatattttcatgattatgcggaggaagttgagtattccactttctcttccattgaataagtcccttcctagcctatcaccctcttctttgacctctttactttgttttataatggtatcatcgcaaggtcctacaagtgttagcacatgatgtaataaattgagcttatgtacatgtgcacttgtgaggtactgaggttggaatgattttaatgttgttaccataacctcac

SEQ ID NO: 208347 - DNA, 2371 bp, Zea Mays
ggtaaaggccaaaaccggcccgacatgatccagaaccttacctctccacgcatcaacaaatgctccccctctcaaagcccgcctccggtttccgtcccccatcctcctccgccccccagccgccgcatccaatggagtcctcgctcctcctctctaccccgcgcccgctcaagcccttccatccgcatcacttccccaccgctcgtcgtcgcgacgcgtccttccgcgggaagccccctccgccgccgcccctgccaccgctcggacgcggcagccgccggttgggtcgggcggtgccgcgcgcctcgagcgaggcgttcggcgacggattccgcagccaggacaggcctcccggggttagcagcgggggtgttcgccggaggacctaccgcgaggcgcagggcgaggcggccgtgccacccgtggccgcggccgcgagagcagtcgcgccctacgtcgccccggtcggggcagtactcatgctgagctttgtcatatggaaggtggttcagaatatgattccagggaagaaaaaggatcatggttctggaaaacatgcgccttctggtatcatgtggtccttcgctgctggctccaatttggcaacatctaccctcagtgctgaaaaggagtcgcggaaaaatctgaacaagttctacaaagaacttcgaactttgaaaactgttaacatggctggtcgtcagtttggagatgagggcctgttttttctagcagaaagcttagcctatgacaagagtgcagaagaggtggacttttctggcaatgggataacagctgtggggatagaagcctttgatggagttcttcagataaacacaactttgaaaactctcaatttatctggaaatgacatcggggatgaaggagctaagatatattggttgaaaatgtgggtatccagaaactcctcctgaacagtatcaatattggggacgagggtgccaaggcactttcgaacatgctgaaaaagaataaatcaatacgtattctacagttcagcaataatgcaattgaatacagtggttttgcaagtattgcagaagcccttttagagaataatacgatacggagcttgtatctcaatggcaactatggtggtccccttggtgcatgcagcctagctcaaggaattctagggaataagtctttaagggaaattcacttgcatggtaatgggattgggaatgagggaatacgtgagttgatgtctgcattatctgctcacaaagggaagatcacagttgtggatattggcaacaacaacattagcccggaaggtttacatcctgtagccgagttcctcaaaaggacaaagtccttacagtggttcagtctctacatgaacgatattagtgatgagggagctgaaaaggttgctgaggctctgaaagataacaaaacaatttctaccatagacttgggtggcaataacattcactccaaagctgttagtgcagtagcggaaactttgaaggataatgcagtgctgacaacactggatttgagctacaatccaattggatcagacggagtaaaggctttgtgcgatgtcctcaagttccatgggaagatccaaacccttaagctcggctggtgccagataggcatggaaggtgcagagtgtattgccgactgtctcaagtacaacacaacgttatcgacattggatctgcgggcaaacgggcttggaaacgatggtgctatatgcttggcgcgaagtttcaagataatcaacgaatcgttgacgtcccttgacctgggtttcaatgagattcgagacgacggagcattcgcattggcacaggcgctcaaggctaacgaggatctggcggtcacgtcattaaatctcgcaaacaacttcttcacgaaattcggacaggtcgctctttctgaggcgcgggaccatgtgtacgagatgaccgaacgggagatagacatttatttttaggggggtaccggttcccctgtgcacacagttagcacaggacatgaccgatgcttgtttgtcgagtaggttgaagaataaggtcgcgcggtagagcgatggtttatcctttgtataggaaaattttggtgggttagttaaatatttttagttactatgtaggttagccattcgatcaggtgtctatatgcaagttttgctggaaacgtcggtgtcgttttgaaccattcgtattattggttgaaaatggaatggatatgacgggcatcacatgcaaactgattcttttttgtggaggacttcactgatgtggtggtgtgtgttcctcggaagttgaaatgtattctcatgccatccatgtgggatggtgttggtaacctcagacctgtcgtaggctgttgtgaa

SEQ ID NO: 208348 - DNA, 2936 bp, Zea Mays
gtaaaggccaaaaccggcccgacatgatccagaaccttacctctccacgcatcaacaaatgctccccctctcaaagcccgcctccggtttccgtcccccatcctcctccgccccccagccgccgcatccaatggagtcctcgctcctcctctctaccccgcgcccgctcaagcccttccatccgcatcacttccccaccgctcgtcgtcgcgacgcgtccttccgcgggaagccccctccgccgccgcccctgccaccgctcggacgcggcagccgccggttgggtcgggcggtgccgcgcgcctcgagcgaggcgttcggcgacggattccgcagccaggacaggcctcccggggttagcagcgggggtgttcgccggaggacctaccgcgaggcgcagggcgaggcggccgtgccacccgtggccgcggccgcgagagcagtcgcgccctacgtcgccccggtcggggcagtactcatgctgagctttgtcatatggaaggtggttcagaatatgattccagggaagaaaaaggatcatggttctggaaaacatgcgccttctggtatcatgtggtccttcgctgctggctccaatttggcaacatctaccctcagtgctgaaaaggagtcgcggaaaaatctgaacaagttctacaaagaacttcgaactttgaaaactgttaacatggctggtcgtcagtttggagatgagggcctgttttttctagcagaaagcttagcctatgacaagagtgcagaagaggtggacttttctggcaatgggataacagctgtggggatagaagcctttgatggagttcttcagataaacacaactttgaaaactctcaatttatctggaaatgacatcggggatgaaggagctaagatatattggttgaaaatgtgggtatccagaaactcctcctgaacagtatcaatattggggacgagggtgccaaggcactttcgaacatgctgaaaaagaataaatcaatacgtattctacagttcagcaataatgcaattgaatacagtggttttgcaagtattgcagaagcccttttagagaataatacgatacggagcttgtatctcaatggcaactatggtggtccccttggtgcatgcagcctagctcaaggaattctagggaataagtctttaaggtgaagcagattgaattccatctttgcttatgcatcaagttatggagaagtgtctgtttcagctttctgaaggggtagtagtattttgaaactttcaggtttggctatatgtccaaagcgtatggatcaatttgccttctcactactttatgctaaccgcacaatatggttggatttcaggatacatatctgtaaagcatggagtgtatagtaggacttgcacacaaagagcattttattaacttttcttgcttagatgataaaaacctattggtaatctgtaagtcttgctgtggcaatattggtagaatgattaccaatagaagtatagaactcttctgtaccaatgtgctacctatgaccaaatggaactatttattatttaagactgtaggttcgaaattaatgtgtttgaagttcttcgatctctgttcatagccccccccccccccccccccaaaaaaaaatgtttattactgtttggtatttttgtctatttctaactttgtatattatattcaatttacctatcatggttatgatatgtaagcatttaaccttcactaggaaattcacttgcatggtaatgggattgggaatgagggaatacgtgagttgatgtctgcattatctgctcacaaagggaagatcacagttgtggatattggcaacaacaacattagcccggaaggtttacatcctgtagccgagttcctcaaaaggacaaagtccttacagtggttcagtctctacatgaacgatattagtgatgagggagctgaaaaggttgctgaggctctgaaagataacaaaacaatttctaccatagacttgggtggcaataacattcactccaaagctgttagtgcagtagcggaaactttgaaggataatgcagtgctgacaacactggatttgagctacaatccaattggatcagacggagtaaaggctttgtgcgatgtcctcaagttccatgggaagatccaaacccttaagctcggctggtgccagataggcatggaaggtgcagagtgtattgccgactgtctcaagtacaacacaacgttatcgacattggatctgcgggcaaacgggcttggaaacgatggtgctatatgcttggcgcgaagtttcaagataatcaacgaatcgttgacgtcccttgacctgggtttcaatgagattcgagacgacggagcattcgcattggcacaggcgctcaaggctaacgaggatctggcggtcacgtcattaaatctcgcaaacaacttcttcacgaaattcggacaggtcgctctttctgaggcgcgggaccatgtgtacgagatgaccgaacgggagatagacatttatttttaggggggtaccggttcccctgtgcacacagttagcacaggacatgaccgatgcttgtttgtcgagtaggttgaagaataaggtcgcgcggtagagcgatggtttatcctttgtataggaaaattttggtgggttagttaaatatttttagttactatgtaggttagccattcgatcaggtgtctatatgcaagttttgctggaaacgtcggtgtcgttttgaaccattcgtattattggttgaaaatggaatggatatgacgggcatcacatgcaaactgattcttttttgtggaggacttcactgatgtggtggtgtgtgttcctcggaagttgaaatgtattctcatgccatccatgtgggatggtgttggtaacctcagacctgtcgtaggctgttgtgaa

SEQ ID NO: 208349 - DNA, 3006 bp, Zea Mays
ccagaaccttacctctccacgcatcaacaaatgctccccctctcaaagcccgcctccggtttccgtcccccatcctcctccgccccccagccgccgcatccaatggagtcctcgctcctcctctctaccccgcgcccgctcaagcccttccatccgcatcacttccccaccgctcgtcgtcgcgacgcgtccttccgcgggaagccccctccgccgccgcccctgccaccgctcggacgcggcagccgccggttgggtcgggcggtgccgcgcgcctcgagcgaggcgttcggcgacggattccgcagccaggacaggcctcccggggttagcagcgggggtgttcgccggaggacctaccgcgaggcgcagggcgaggcggccgtgccacccgtggccgcggccgcgagagcagtcgcgccctacgtcgccccggtcggggcagtactcatgctgagctttgtcatatggaaggtggttcagaatatgattccagggaagaaaaaggatcatggttctggaaaacatgcgccttctggtatcatgtggtccttcgctgctggctccaatttggcaacatctaccctcagtgctgaaaaggagtcgcggaaaaatctgaacaagttctacaaagaacttcgaactttgaaaactgttaacatggctggtcgtcagtttggagatgagggcctgttttttctagcagaaagcttagcctatgacaagagtgcagaagaggtggacttttctggcaatgggataacagctgtggggatagaagcctttgatggagttcttcagataaacacaactttgaaaactctcaatttatctggaaatgacatcggggatgaaggagctaagtgtctttcagatatattggttgaaaatgtgggtatccagaaactcctcctgaacagtatcaatattggggacgagggtgccaaggcactttcgaacatgctgaaaaagaataaatcaatacgtattctacagttcagcaataatgcaattgaatacagtggttttgcaagtattgcagaagcccttttagagaataatacgatacggagcttgtatctcaatggcaactatggtggtccccttggtgcatgcagcctagctcaaggaattctagggaataagtctttaagggtactacttaagacacttggttatatacttccagtcttccacatagttttaatgtttttttttttgtaaaattttaaatgtttgaaagtgaagcagattgaattccatctttgcttatgcatcaagttatggagaagtgtctgtttcagctttctgaaggggtagtagtattttgaaactttcaggtttggctatatgtccaaagcgtatggatcaatttgccttctcactactttatgctaaccgcacaatatggttggatttcaggatacatatctgtaaagcatggagtgtatagtaggacttgcacacaaagagcattttattaacttttcttgcttagatgataaaaacctattggtaatctgtaagtcttgctgtggcaatattggtagaatgattaccaatagaagtatagaactcttctgtaccaatgtgctacctatgaccaaatggaactatttattatttaagactgtaggttcgaaattaatgtgtttgaagttcttcgatctctgttcatagccccccccccccccccccccaaaaaaaaatgtttattactgtttggtatttttgtctatttctaactttgtatattatattcaatttacctatcatggttatgatatgtaagcatttaaccttcactaggaaattcacttgcatggtaatgggattgggaatgagggaatacgtgagttgatgtctgcattatctgctcacaaagggaagatcacagttgtggatattggcaacaacaacattagcccggaaggtttacatcctgtagccgagttcctcaaaaggacaaagtccttacagtggttcagtctctacatgaacgatattagtgatgagggagctgaaaaggttgctgaggctctgaaagataacaaaacaatttctaccatagacttgggtggcaataacattcactccaaagctgttagtgcagtagcggaaactttgaaggataatgcagtgctgacaacactggatttgagctacaatccaattggatcagacggagtaaaggctttgtgcgatgtcctcaagttccatgggaagatccaaacccttaagctcggctggtgccagataggcatggaaggtgcagagtgtattgccgactgtctcaagtacaacacaacgttatcgacattggatctgcgggcaaacgggcttggaaacgatggtgctatatgcttggcgcgaagtttcaagataatcaacgaatcgttgacgtcccttgacctgggtttcaatgagattcgagacgacggagcattcgcattggcacaggcgctcaaggctaacgaggatctggcggtcacgtcattaaatctcgcaaacaacttcttcacgaaattcggacaggtcgctctttctgaggcgcgggaccatgtgtacgagatgaccgaacgggagatagacatttatttttaggggggtaccggttcccctgtgcacacagttagcacaggacatgaccgatgcttgtttgtcgagtaggttgaagaataaggtcgcgcggtagagcgatggtttatcctttgtataggaaaattttggtgggttagttaaatatttttagttactatgtaggttagccattcgatcaggtgtctatatgcaagttttgctggaaacgtcggtgtcgttttgaaccattcgtattattggttgaaaatggaatggatatgacgggcatcacatgcaaactgattcttttttgtggaggacttcactgatgtggtggtgtgtgttcctcggaagttgaaatgtattctcatgccatccatgtgggatggtgttggtaacctcagacctgtcgtaggctgttgtgaa

SEQ ID NO: 208350 - DNA, 2729 bp, Zea Mays
ccagaaccttacctctccacgcatcaacaaatgctccccctctcaaagcccgcctccggtttccgtcccccatcctcctccgccccccagccgccgcatccaatggagtcctcgctcctcctctctaccccgcgcccgctcaagcccttccatccgcatcacttccccaccgctcgtcgtcgcgacgcgtccttccgcgggaagccccctccgccgccgcccctgccaccgctcggacgcggcagccgccggttgggtcgggcggtgccgcgcgcctcgagcgaggcgttcggcgacggattccgcagccaggacaggcctcccggggttagcagcgggggtgttcgccggaggacctaccgcgaggcgcagggcgaggcggccgtgccacccgtggccgcggccgcgagagcagtcgcgccctacgtcgccccggtcggggcagtactcatgctgagctttgtcatatggaaggtggttcagaatatgattccagggaagaaaaaggatcatggttctggaaaacatgcgccttctggtatcatgtggtccttcgctgctggctccaatttggcaacatctaccctcagtgctgaaaaggagtcgcggaaaaatctgaacaagttctacaaagaacttcgaactttgaaaactgttaacatggctggtcgtcagtttggagatgagggcctgttttttctagcagaaagcttagcctatgacaagagtgcagaagaggtggacttttctggcaatgggataacagctgtggggatagaagcctttgatggagttcttcagataaacacaactttgaaaactctcaatttatctggaaatgacatcggggatgaaggagctaagatatattggttgaaaatgtgggtatccagaaactcctcctgaacagtatcaatattggggacgagggtgccaaggcactttcgaacatgctgaaaaagaataaatcaatacgtattctacagttcagcaataatgcaattgaatacagtggttttgcaagtattgcagaagcccttttagagaataatacgatacggagcttgtatctcaatggcaactatggtggtccccttggtgcatgcagcctagctcaaggaattctagggaataagtctttaagggatacatatctgtaaagcatggagtgtatagtaggacttgcacacaaagagcattttattaacttttcttgcttagatgataaaaacctattggtaatctgtaagtcttgctgtggcaatattggtagaatgattaccaatagaagtatagaactcttctgtaccaatgtgctacctatgaccaaatggaactatttattatttaagactgtaggttcgaaattaatgtgtttgaagttcttcgatctctgttcatagccccccccccccccccccccaaaaaaaaatgtttattactgtttggtatttttgtctatttctaactttgtatattatattcaatttacctatcatggttatgatatgtaagcatttaaccttcactaggaaattcacttgcatggtaatgggattgggaatgagggaatacgtgagttgatgtctgcattatctgctcacaaagggaagatcacagttgtggatattggcaacaacaacattagcccggaaggtttacatcctgtagccgagttcctcaaaaggacaaagtccttacagtggttcagtctctacatgaacgatattagtgatgagggagctgaaaaggttgctgaggctctgaaagataacaaaacaatttctaccatagacttgggtggcaataacattcactccaaagctgttagtgcagtagcggaaactttgaaggataatgcagtgctgacaacactggatttgagctacaatccaattggatcagacggagtaaaggctttgtgcgatgtcctcaagttccatgggaagatccaaacccttaagctcggctggtgccagataggcatggaaggtgcagagtgtattgccgactgtctcaagtacaacacaacgttatcgacattggatctgcgggcaaacgggcttggaaacgatggtgctatatgcttggcgcgaagtttcaagataatcaacgaatcgttgacgtcccttgacctgggtttcaatgagattcgagacgacggagcattcgcattggcacaggcgctcaaggctaacgaggatctggcggtcacgtcattaaatctcgcaaacaacttcttcacgaaattcggacaggtcgctctttctgaggcgcgggaccatgtgtacgagatgaccgaacgggagatagacatttatttttaggggggtaccggttcccctgtgcacacagttagcacaggacatgaccgatgcttgtttgtcgagtaggttgaagaataaggtcgcgcggtagagcgatggtttatcctttgtataggaaaattttggtgggttagttaaatatttttagttactatgtaggttagccattcgatcaggtgtctatatgcaagttttgctggaaacgtcggtgtcgttttgaaccattcgtattattggttgaaaatggaatggatatgacgggcatcacatgcaaactgattcttttttgtggaggacttcactgatgtggtggtgtgtgttcctcggaagttgaaatgtattctcatgccatccatgtgggatggtgttggtaacctcagacctgtcgtaggctgttgtgaa

SEQ ID NO: 208351 - DNA, 2328 bp, Zea Mays
catcaacaaatgctccccctctcaaagcccgcctccggtttccgtcccccatcctcctccgccccccagccgccgcatccaatggagtcctcgctcctcctctctaccccgcgcccgctcaagcccttccatccgcatcacttccccaccgctcgtcgtcgcgacgcgtccttccgcgggaagccccctccgccgccgcccctgccaccgctcggacgcggcagccgccggttgggtcgggcggtgccgcgcgcctcgagcgaggcgttcggcgacggattccgcagccaggacaggcctcccggggttagcagcgggggtgttcgccggaggacctaccgcgaggcgcagggcgaggcggccgtgccacccgtggccgcggccgcgagagcagtcgcgccctacgtcgccccggtcggggcagtactcatgctgagctttgaggacagtcatatggaaggtggttcagaatatgattccagggaagaaaaaggatcatggttctggaaaacatgcgccttctggtatcatgtggtccttcgctgctggctccaatttggcaacatctaccctcagtgctgaaaaggagtcgcggaaaaatctgaacaagttctacaaagaacttcgaactttgaaaactgttaacatggctggtcgtcagtttggagatgagggcctgttttttctagcagaaagcttagcctatgacaagagtgcagaagaggtggacttttctggcaatgggataacagctgtggggatagaagcctttgatggagttcttcagataaacacaactttgaaaactctcaatttatctggaaatgacatcggggatgaaggagctaagatatattggttgaaaatgtgggtatccagaaactcctcctgaacagtatcaatattggggacgagggtgccaaggcactttcgaacatgctgaaaaagaataaatcaatacgtattctacagttcagcaataatgcaattgaatacagtggttttgcaagtattgcagaagcccttttagagaataatacgatacggagcttgtatctcaatggcaactatggtggtccccttggtgcatgcagcctagctcaaggaattctagggaataagtctttaagggaaattcacttgcatggtaatgggattgggaatgagggaatacgtgagttgatgtctgcattatctgctcacaaagggaagatcacagttgtggatattggcaacaacaacattagcccggaaggtttacatcctgtagccgagttcctcaaaaggacaaagtccttacagtggttcagtctctacatgaacgatattagtgatgagggagctgaaaaggttgctgaggctctgaaagataacaaaacaatttctaccatagacttgggtggcaataacattcactccaaagctgttagtgcagtagcggaaactttgaaggataatgcagtgctgacaacactggatttgagctacaatccaattggatcagacggagtaaaggctttgtgcgatgtcctcaagttccatgggaagatccaaacccttaagctcggctggtgccagataggcatggaaggtgcagagtgtattgccgactgtctcaagtacaacacaacgttatcgacattggatctgcgggcaaacgggcttggaaacgatggtgctatatgcttggcgcgaagtttcaagataatcaacgaatcgttgacgtcccttgacctgggtttcaatgagattcgagacgacggagcattcgcattggcacaggcgctcaaggctaacgaggatctggcggtcacgtcattaaatctcgcaaacaacttcttcacgaaattcggacaggtcgctctttctgaggcgcgggaccatgtgtacgagatgaccgaacgggagatagacatttatttttaggggggtaccggttcccctgtgcacacagttagcacaggacatgaccgatgcttgtttgtcgagtaggttgaagaataaggtcgcgcggtagagcgatggtttatcctttgtataggaaaattttggtgggttagttaaatatttttagttactatgtaggttagccattcgatcaggtgtctatatgcaagttttgctggaaacgtcggtgtcgttttgaaccattcgtattattggttgaaaatggaatggatatgacgggcatcacatgcaaactgattcttttttgtggaggacttcactgatgtggtggtgtgtgttcctcggaagttgaaatgtattctcatgccatccatgtgggatggtgttggtaacctcagacctgtcgtaggctgttgtgaa

SEQ ID NO: 208352 - DNA, 2317 bp, Zea Mays
caacaaatgctccccctctcaaagcccgcctccggtttccgtcccccatcctcctccgccccccagccgccgcatccaatggagtcctcgctcctcctctctaccccgcgcccgctcaagcccttccatccgcatcacttccccaccgctcgtcgtcgcgacgcgtccttccgcgggaagccccctccgccgccgcccctgccaccgctcggacgcggcagccgccggttgggtcgggcggtgccgcgcgcctcgagcgaggcgttcggcgacggattccgcagccaggacaggcctcccggggttagcagcgggggtgttcgccggaggacctaccgcgaggcgcagggcgaggcggccgtgccacccgtggccgcggccgcgagagcagtcgcgccctacgtcgccccggtcggggcagtactcatgctgagctttgtcatatggaaggtggttcagaatatgattccagggaagaaaaaggatcatggttctggaaaacatgcgccttctggtatcatgtggtccttcgctgctggctccaatttggcaacatctaccctcagtgctgaaaaggagtcgcggaaaaatctgaacaagttctacaaagaacttcgaactttgaaaactgttaacatggctggtcgtcagtttggagatgagggcctgttttttctagcagaaagcttagcctatgacaagagtgcagaagaggtggacttttctggcaatgggataacagctgtggggatagaagcctttgatggagttcttcagataaacacaactttgaaaactctcaatttatctggaaatgacatcggggatgaaggagctaagatatattggttgaaaatgtgggtatccagaaactcctcctgaacagtatcaatattggggacgagggtgccaaggcactttcgaacatgctgaaaaagaataaatcaatacgtattctacagttcagcaataatgcaattgaatacagtgttttgcaagtattgcagaagcccttttagagaataatacgatacggagcttgtatctcaatggcaactatggtggtccccttggtgcatgcagcctagctcaaggaattctagggaataagtctttaagggaaattcacttgcatggtaatgggattgggaatgagggaatacgtgagttgatgtctgcattatctgctcacaaagggaagatcacagttgtggatattggcaacaacaacattagcccggaaggtttacatcctgtagccgagttcctcaaaaggacaaagtccttacagtggttcagtctctacatgaacgatattagtgatgagggagctgaaaaggttgctgaggctctgaaagataacaaaacaatttctaccatagacttgggtggcaataacattcactccaaagctgttagtgcagtagcggaaactttgaaggataatgcagtgctgacaacactggatttgagctacaatccaattggatcagacggagtaaaggctttgtgcgatgtcctcaagttccatgggaagatccaaacccttaagctcggctggtgccagataggcatggaaggtgcagagtgtattgccgactgtctcaagtacaacacaacgttatcgacattggatctgcgggcaaacgggcttggaaacgatggtgctatatgcttggcgcgaagtttcaagataatcaacgaatcgttgacgtcccttgacctgggtttcaatgagattcgagacgacggagcattcgcattggcacaggcgctcaaggctaacgaggatctggcggtcacgtcattaaatctcgcaaacaacttcttcacgaaattcggacaggtcgctctttctgaggcgcgggaccatgtgtacgagatgaccgaacgggagatagacatttatttttaggggggtaccggttcccctgtgcacacagttagcacaggacatgaccgatgcttgtttgtcgagtaggttgaagaataaggtcgcgcggtagagcgatggtttatcctttgtataggaaaattttggtgggttagttaaatatttttagttactatgtaggttagccattcgatcaggtgtctatatgcaagttttgctggaaacgtcggtgtcgttttgaaccattcgtattattggttgaaaatggaatggatatgacgggcatcacatgcaaactgattcttttttgtggaggacttcactgatgtggtggtgtgtgttcctcggaagttgaaatgtattctcatgccatccatgtgggatggtgttggtaacctcagacctgtcgtaggctgttgtgaa

SEQ ID NO: 208353 - DNA, 2500 bp, Zea Mays
caaatgctccccctctcaaagcccgcctccggtttccgtcccccatcctcctccgccccccagccgccgcatccaatggagtcctcgctcctcctctctaccccgcgcccgctcaagcccttccatccgcatcacttccccaccgctcgtcgtcgcgacgcgtccttccgcgggaagccccctccgccgccgcccctgccaccgctcggacgcggcagccgccggttgggtcgggcggtgccgcgcgcctcgagcgaggcgttcggcgacggattccgcagccaggacaggcctcccggggttagcagcgggggtgttcgccggaggacctaccgcgaggcgcagggcgaggcggccgtgccacccgtggccgcggccgcgagagcagtcgcgccctacgtcgccccggtcggggcagtactcatgctgagctttgtcatatggaaggtggttcagaatatgattccagggaagaaaaaggatcatggttctggaaaacatgcgccttctggtatcatgtggtccttcgctgctggctccaatttggcaacatctaccctcagtgctgaaaaggagtcgcggaaaaatctgaacaagttctacaaagaacttcgaactttgaaaactgttaacatggctggtcgtcagtttggagatgagggcctgttttttctagcagaaagcttagcctatgacaagagtgcagaagaggtggacttttctggcaatgggataacagctgtggggatagaagcctttgatggagttcttcagataaacacaactttgaaaactctcaatttatctggaaatgacatcggggatgaaggagctaagatatattggttgaaaatgtgggtatccagaaactcctcctgaacagtatcaatattggggacgagggtgccaaggcactttcgaacatgctgaaaaagaataaatcaatacgtattctacagttcagcaataatgcaattgaatacagtggttttgcaagtattgcagaagcccttttagagaataatacgatacggagcttgtatctcaatggcaactatggtggtccccttggtgcatgcagcctagctcaaggaattctagggaataagtctttaagggtactacttaagacacttggttatatacttccagtcttccacatagttttaatgtttttttttttgtaaaattttaaatgtttgaaagtgaagcagattgaattccatctttgcttatgcatcaagttatggagaagtgtctgtttcagctttctgaaggggtagtagtattttgaaactttcaggaaattcacttgcatggtaatgggattgggaatgagggaatacgtgagttgatgtctgcattatctgctcacaaagggaagatcacagttgtggatattggcaacaacaacattagcccggaaggtttacatcctgtagccgagttcctcaaaaggacaaagtccttacagtggttcagtctctacatgaacgatattagtgatgagggagctgaaaaggttgctgaggctctgaaagataacaaaacaatttctaccatagacttgggtggcaataacattcactccaaagctgttagtgcagtagcggaaactttgaaggataatgcagtgctgacaacactggatttgagctacaatccaattggatcagacggagtaaaggctttgtgcgatgtcctcaagttccatgggaagatccaaacccttaagctcggctggtgccagataggcatggaaggtgcagagtgtattgccgactgtctcaagtacaacacaacgttatcgacattggatctgcgggcaaacgggcttggaaacgatggtgctatatgcttggcgcgaagtttcaagataatcaacgaatcgttgacgtcccttgacctgggtttcaatgagattcgagacgacggagcattcgcattggcacaggcgctcaaggctaacgaggatctggcggtcacgtcattaaatctcgcaaacaacttcttcacgaaattcggacaggtcgctctttctgaggcgcgggaccatgtgtacgagatgaccgaacgggagatagacatttatttttaggggggtaccggttcccctgtgcacacagttagcacaggacatgaccgatgcttgtttgtcgagtaggttgaagaataaggtcgcgcggtagagcgatggtttatcctttgtataggaaaattttggtgggttagttaaatatttttagttactatgtaggttagccattcgatcaggtgtctatatgcaagttttgctggaaacgtcggtgtcgttttgaaccattcgtattattggttgaaaatggaatggatatgacgggcatcacatgcaaactgattcttttttgtggaggacttcactgatgtggtggtgtgtgttcctcggaagttgaaatgtattctcatgccatccatgtgggatggtgttggtaacctcagacctgtcgtaggctgttgtgaa

SEQ ID NO: 208354 - DNA, 2377 bp, Zea Mays
gtttccgtcccccatcctcctccgccccccagccgccgcatccaatggagtcctcgctcctcctctctaccccgcgcccgctcaagcccttccatccgcatcacttccccaccgctcgtcgtcgcgacgcgtccttccgcgggaagccccctccgccgccgcccctgccaccgctcggacgcggcagccgccggttgggtcgggcggtgccgcgcgcctcgagcgaggcgttcggcgacggattccgcagccaggacaggcctcccggggttagcagcgggggtgttcgccggaggacctaccgcgaggcgcagggcgaggcggccgtgccacccgtggccgcggccgcgagagcagtcgcgccctacgtcgccccggtcggggcagtactcatgctgagctttgtcatatggaaggtggttcagaatatgattccagggaagaaaaaggatcatggttctggaaaacatgcgccttctggtatcatgtggtccttcgctgctggctccaatttggcaacatctaccctcagtgctgaaaaggagtcgcggaaaaatctgaacaagttctacaaagaacttcgaactttgaaaactgttaacatggctggtaactcaagggactaaagtttgaatacattgtctggaaatgttgggctaaagctccaacattgtgagtgataactacatctcaatttgcttgacaggtcgtcagtttggagatgagggcctgttttttctagcagaaagcttagcctatgacaagagtgcagaagaggtggacttttctggcaatgggataacagctgtggggatagaagcctttgatggagttcttcagataaacacaactttgaaaactctcaatttatctggaaatgacatcggggatgaaggagctaagatatattggttgaaaatgtgggtatccagaaactcctcctgaacagtatcaatattggggacgagggtgccaaggcactttcgaacatgctgaaaaagaataaatcaatacgtattctacagttcagcaataatgcaattgaatacagtggttttgcaagtattgcagaagcccttttagagaataatacgatacggagcttgtatctcaatggcaactatggtggtccccttggtgcatgcagcctagctcaaggaattctagggaataagtctttaagggaaattcacttgcatggtaatgggattgggaatgagggaatacgtgagttgatgtctgcattatctgctcacaaagggaagatcacagttgtggatattggcaacaacaacattagcccggaaggtttacatcctgtagccgagttcctcaaaaggacaaagtccttacagtggttcagtctctacatgaacgatattagtgatgagggagctgaaaaggttgctgaggctctgaaagataacaaaacaatttctaccatagacttgggtggcaataacattcactccaaagctgttagtgcagtagcggaaactttgaaggataatgcagtgctgacaacactggatttgagctacaatccaattggatcagacggagtaaaggctttgtgcgatgtcctcaagttccatgggaagatccaaacccttaagctcggctggtgccaggcatggaaggtgcagagtgtattgccgactgtctcaagtacaacacaacgttatcgacattggatctgcgggcaaacgggcttggaaacgatggtgctatatgcttggcgcgaagtttcaagataatcaacgaatcgttgacgtcccttgacctgggtttcaatgagattcgagacgacggagcattcgcattggcacaggcgctcaaggctaacgaggatctggcggtcacgtcattaaatctcgcaaacaacttcttcacgaaattcggacaggtcgctctttctgaggcgcgggaccatgtgtacgagatgaccgaacgggagatagacatttatttttaggggggtaccggttcccctgtgcacacagttagcacaggacatgaccgatgcttgtttgtcgagtaggttgaagaataaggtcgcgcggtagagcgatggtttatcctttgtataggaaaattttggtgggttagttaaatatttttagttactatgtaggttagccattcgatcaggtgtctatatgcaagttttgctggaaacgtcggtgtcgttttgaaccattcgtattattggttgaaaatggaatggatatgacgggcatcacatgcaaactgattcttttttgtggaggacttcactgatgtggtggtgtgtgttcctcggaagttgaaatgtattctcatgccatccatgtgggatggtgttggtaacctcagacctgtcgtaggctgttgtgaa

SEQ ID NO: 208355 - DNA, 1318 bp, Zea Mays
gtttgtgatgaagcactgtcgtcgcccatgacgggaaaacggctccatatacgtactactaacgtacacaccacagcgactctccggccatgcagttgccggctgcacaacttgtgcaagtgcatgcatgcatggatttggatccatgcatggccacagcccacagcccacaggggaggggaaggtgaggccgcgccgcgaggaaccgcgtcgaccttgtcgtcgatgttggcttgcaaggcgagcccgagccggccgtgcgtcgtcccccttgtttgcctgctggtggtggcggccgcagtcgtcgtcgtcgctgcctcggcgccgccggcggaggcggcgttcgacgacaactacgtggcgcagtggggtagagatggttatcaccttgtcgtccggggcacggaggcgaatgtcaccatggaccagagctctggtgccgggttccggtccaagtccacgtacggctcagggttcttccacatgaggatgaagctgccctccgggtacacggccggcgtcgtcacgaccttctacgtgagtccgacgaccgatatatatgtgttgttgcatctcatctcgcagccggaggatgggagccgcgacgaggtggacttggagttcctgggcgacaaggccggcgtgcccatcaccctccagaccaacgtcttcgtcgacggccgcggcgacagggagcagcggacgcgcctctggttcgaccccgccgccgacttccacgactacaagatcctctggaacccataccagctcgtgatgttcgtggacgacacgccggtccgggtgctgaggaacctgacgggcgccgtgccggggtacccgttcccggggaagcagacgatgctgatccgcgcgagcgtgtgggacggctccgactgggccacggacggcggccggaccaaggtggactggtccaggggccccttcaccgccggctaccggggcttcgacgtcgacggctgcgccaacaacgggagcgacgcgtgccaatcgcccgacctatggtggaacgccgccgagtaccggaacatcaccgcggagcagcgggcggcgtacgaggacgtgaagaggagttacatgaactacgattactgcgccgataaggccaggttcaacagcaccaccgtacccattgaatgcaactacgcttgataagccagctaggagtggcgttgtatattatacatacacgaaaagatatgtctgcttatttgttgcattgcaagggtttaaatatgcaaatgcttataaggactacaaaaatatattactttgtcactaaatttattattgttattcg

SEQ ID NO: 208356 - DNA, 1222 bp, Zea Mays
gtttgtgatgaagcactgtcgtcgcccatgacgggaaaacggctccatatacgtactactaacgtacacaccacagcgactctccggccatgcagttgccggctgcacaacttgtgcaagtgcatgcatgcatggatttggatccatgcatggccacagcccacagcccacaggggaggggaaggtgaggccgcgccgcgaggaaccgcgtcgaccttgtcgtcgatgttggcttgcaaggcgagcccgagccggccgtgcgtcgtcccccttgtttgcctgctggtggtggcggccgcagtcgtcgtcgtcgctgcctcggcgccgccggcggaggcggcgttcgacgacaactacgtggcgcagtggggtagagatggttatcaccttgtcgtccggggcacggaggcgaatgtcaccatggaccagagctctggtgccgggttccggtccaagtccacgtacggctcagggttcttccacatgaggatgaagctgccctccgggtacacggccggcgtcgtcacgaccttctacctcatctcgcagccggaggatgggagccgcgacgaggtggacttggagttcctgggcgacaaggccggcgtgcccatcaccctccagaccaacgtcttcgtcgacggccgcggcgacagggagcagcggacgcgcctctggatgttcgtggacgacacgccggtccgggtgctgaggaacctgacgggcgccgtgccggggtacccgttcccggggaagcagacgatgctgatccgcgcgagcgtgtgggacggctccgactgggccacggacggcggccggaccaaggtggactggtccaggggccccttcaccgccggctaccggggcttcgacgtcgacggctgcgccaacaacgggagcgacgcgtgccaatcgcccgacctatggtggaacgccgccgagtaccggaacatcaccgcggagcagcgggcggcgtacgaggacgtgaagaggagttacatgaactacgattactgcgccgataaggccaggttcaacagcaccaccgtacccattgaatgcaactacgcttgataagccagctaggagtggcgttgtatattatacatacacgaaaagatatgtctgcttatttgttgcattgcaagggtttaaatatgcaaatgcttataaggactacaaaaatatattactttgtcactaaatttattattgttattcg

SEQ ID NO: 208357 - DNA, 1381 bp, Zea Mays
ctgaaatgcccgagaggacaatggacacgcacgcagagggagctgccggctgggacaccggacaccacaccattcacatatctcgcgacagcagaaaccacgtcgcgacgctgccacagcagcaggctatgatggtgctcatgagttccatcccagttctcaggccgcgaatgcggttccaaaatactccaagcaaacaggcagtttcgattgggcgaagcgcgtggaaaatccaccgcgccaggaaatcccagagcggcgtcggatcgtggcctcgtgcagcggcatccgcagcaggaataatgaatcgtcatgatctacgttgccgagcccgcagacaggaacgggggtgtaagccgatccgcgagaaaaatccaacctacaagacctacaaggccaagcgacatcccaatccgagcgtttcatcttgccctctgctctgtcccctcacaccttctcgccaggctcagtggtgacatcagctgaggtccggtagtttgcctctgcagccatgcctcaaatccagaacaccatgcggcaaaactgcacactcctagctgttctttgtggggagtttgctgagaagcggcagacaccagcttccctggcgccagacacaaagcggctgcggctgtcataccctttccctgagctcgcttcgtctgggagactggaggtgcacacgctaatcaatcccactttggagcaatttagagaggcacagcaggcggtgcatcctgtcttcttgtatcttcaggggcagcagcaagagaatgaggaggagattggcacgcttgtctggggtgatacagatttatctgacccgcagatgtttgtctcactcatcaccccaccatttccgaccatggtttatttagaggttcccactggggaaaagcttgcccagtcacttcattcaaaggggataccatatgtggtatattggaggaatctattttcatcttatacagcatctcattttcgtcatgcgttaatgtcagtcattcagagttcctgcagccatacatgggatgcatttcaacttgcacatgcctccttccgactatactgtgtaagaaataatcatgtacaaagtgttaagcttggcccctgcctacttggggatgctccaaaaacaaatgtcatccctgctggggatgaagtgaatgaggaacaaggttgttctgaaggttttccagatataagaatatatgatgaagatgtgagcatgaaatttcttctctgtggagtaccatgcaccctggatgcatgtttgttgggggcactagaagatggtttgaatgcgctcttgaatatcgagattcgtgcgagtaaacttcagaaccgagccagacctatatttgggatatgatggagtaaa

SEQ ID NO: 208358 - DNA, 1004 bp, Zea Mays
attttcttcgtcgcatccccgattccaaaaggctcagtggtgacatcagctgaggtccggtagtttgcctctgcagccatgcctcaaatccagaacaccatgcggcaaaactgcacactcctagctgttctttgtggggagtttgctgagaagcggcagacaccagcttccctggcgccagacacaaagcggctgcggctgtcataccctttccctgagctcgcttcgtctgggagactggaggtgcacacgctaatcaatcccactttggagcaatttagagaggcacagcaggcggtgcatcctgtcttcttgtatcttcaggggcagcagcaagagaatgaggaggagattggcacgcttgtctggggtgatacagatttatctgacccgcagatgtttgtctcactcatcaccccaccatttccgaccatggtttatttagaggttcccactggggaaaagcttgcccagtcacttcattcaaaggggataccatatgtggtatattggaggaatctattttcatcttatacagcatctcattttcgtcatgcgttaatgtcagtcattcagagttcctgcagccatacatgggatgcatttcaacttgcacatgcctccttccgactatactgtgtaagaaataatcatgtacaaagtgttaagcttggcccctgcctacttggggatgctccaaaaacaaatgtcatccctgctggggatgaagtgaatgaggaacaaggttgttctgaaggttttccagatataagaatatatgatgaagatgtgagcatgaaatttcttctctgtggagtaccatgcaccctggatgcatgtttgttgggggcactagaagatggtttgaatgcgctcttgaatatcgaggagctacgacaaggaagttagtaccagacatactgatttttacgcagcatagagttattacataattataaatcggaatattcatatatcaaaattattactaaaagagggggtgg

SEQ ID NO: 208359 - DNA, 1875 bp, Zea Mays
aacccacaccaccgcaccacgcacctccaccaccagaagaaaaaaccaaggcggagggcggagaggagagcaaggagggtgaagggggaaaagggtaataaaaataaaagaggagaggagaagcaagacgaggaggaagagggagcacccagaggtaggggagggggaataattccgcaggggctgagggatctcggcgagtccggccgcggagcagcgcagcgaggcggcgatccgagggcgatcggaggcgggcgggcgtagacgccggcgagatttgtgttggtgacaagccatgaacagcgcaaccaccagttgttaagtaaccctcctgtaaacttgaagcaaccgaagcggagagcagaaatggtgttccaaaagaggtcctcgtcagagttggaggcgtccggtggaggccaagtcgcggagatgccgcgcgttcccaagtctgcgaggggcaagagatcggtcaggaagaaggaggcccagaacccgccccagatgtcagcattcgaccttctcgcgacggtggcagggaagctgcttgatgagggggtgggctcgctggggaacatgagcgctggtgccccagctttgactgcatgcgcgaaggatgtccgtgtgaagaaggagcagtgtgacgaggaaatgaagcagttcaagcatgaggtgacagatcaggatagctgcaatgagagtgcaattctcccgcacattgtgttccagcgggcggtgaataatgctcggaatgaggatcctaaggcgaagtctgaggcccaggacaaggaatcctccatgatcagctgtaccaaggctgaactgggttgtaattttggtgtgattgcagataggtggtcgcctgaatccgtggaatcaggagccttcacaggagatgcagtggcgagcctgatgccacctgccccagcaggatttcataagaatgcacccgaaatgtataatttgcttgattcaatggatgtggatgtcaagcctcctcctttggtcagctctgacagcaccggcgagatgccattgtatggcgataaagttcaccgctcaacctccttaccaagggtctcgaagggagtggggttttttgctgtagatagagatgatgacgacgataagtcctctgggtgcactcatcccagcaccaccactaacaaggatttcaggtccaattgtacagctgagtatagtagggtaaggaagttgctcaccagtaagtacaggaaagttgctccagcgagggtttacaaatctgatctttcctatagtgatgttgatcggaagccttctttccggaacaaaaaaatgcattatacacgacagaggacacaaaggagtacattcaagcgtaggaagctctttgatcgccattcagttctagcatctgaatttggtaccgcacatggaaagggaaacacgaagaaggttaccggaagagactcccatgctgtgtctttggaagcaaacaaggggactagttcaacgccattccagaaatctcgtgggtcaaatgattgccatgtgaaacttaaaattaagtcttttaaggtgcctgaacttcttgttgaaatcccagaaagtgcaactgttggctcactaaagaaaactgttctcgaggcagtgactgcgattctcggaggtggtctacgtgttggtgttcttcaccatggaaagaaagttagagatgataataaaacgttgattcaggctggtattggtcaggaggatatgctggacaaccttggcttttcacttgaacccaactgtacacaaaacccacaagtccaagctcctgaagatatcagtttcctggaaaccattgatactgctgaacccctcgcaagattggtgaactttgtatctgac

SEQ ID NO: 208360 - DNA, 3896 bp, Zea Mays
aacccacaccaccgcaccacgcacctccaccaccagaagaaaaaaccaaggcggagggcggagaggagagcaaggagggtgaagggggaaaagggtaataaaaataaaagaggagaggagaagcaagacgaggaggaagagggagcacccagaggtaggggagggggaataattccgcaggggctgagggatctcggcgagtccggccgcggagcagcgcagcgaggcggcgatccgagggcgatcggaggcgggcgggcgtagacgccggcgagatttgtgttggtgacaagccatgaacagcgcaaccaccagttgttaagtaaccctcctgtaaacttgaagcaaccgaagcggagagcagaaatggtgttccaaaagaggtcctcgtcagagttggaggcgtccggtggaggccaagtcgcggagatgccgcgcgttcccaagtctgcgaggggcaagagatcggtcaggaagaaggaggcccagaacccgccccagatgtcagcattcgaccttctcgcgacggtggcagggaagctgcttgatgagggggtgggctcgctggggaacatgagcgctggtgccccagctttgactgcatgcgcgaaggatgtccgtgtgaagaaggagcagtgtgacgaggaaatgaagcagttcaagcatgaggtgacagatcaggatagctgcaatgagagtgcaattctcccgcacattgtgttccagcgggcggtgaataatgctcggaatgaggatcctaaggcgaagtctgaggcccaggacaaggaatcctccatgatcagctgtaccaaggctgaactgggttgtaattttggtgtgattgcagataggtggtcgcctgaatccgtggaatcaggagccttcacaggagatgcagtggcgagcctgatgccacctgccccagcaggatttcataagaatgcacccgaaatgtataatttgcttgattcaatggatgtggatgtcaagcctcctcctttggtcagctctgacagcaccggcgagatgccattgtatggcgataaagttcaccgctcaacctccttaccaagggtctcgaagggagtggggttttttgctgtagatagagatgatgacgacgataagtcctctgggtgcactcatcccagcaccaccactaacaaggatttcaggtccaattgtacagctgagtatagtagggtaaggaagttgctcaccagtaagtacaggaaagttgctccagcgagggtttacaaatctgatctttcctatagtgatgttgatcggaagccttctttccggaacaaaaaaatgcattatacacgacagaggacacaaaggagtacattcaagcgtaggaagctctttgatcgccattcagttctagcatctgaatttggtaccgcacatggaaagggaaacacgaagaaggttaccggaagagactcccatgctgtgtctttggaagcaaacaaggggactagttcaacgccattccagaaatctcgtgggtcaaatgattgccatgtgaaacttaaaattaagtcttttaaggtgcctgaacttcttgttgaaatcccagaaagtgcaactgttggctcactaaagaaaactgttctcgaggcagtgactgcgattctcggaggtggtctacgtgttggtgttcttcaccatggaaagaaagttagagatgataataaaacgttgattcaggctggtattggtcaggaggatatgctggacaaccttggcttttcacttgaacccaactgtacacaaaacccacaagtccaagctcctgaagatatcagtttcctggaaaccattgatactgctgaacccctcgcaaggattgcacctgctgactcgtcttctaagcatggtgaagttgacctatcacaggagtttgcattaaccccattagcaatgaactaccagggcagtgatcatgattctgtgcactcccctgggggcgtctcatcgcccgataaagtctccacaaactcgcgagctttagttccagttccagctgcagatcccaatgcaggagctatagttccagcgaataagtctaagaggtcaccagagcaggggcaacgcagaatcaggcgcccgttctctgttgctgaagtagaagcacttgtgctcgcagtcgaaaagcttggaaccggaaggtggcgagatgttaaacttcgcgcgtttgacaatgcgaagcaccgtacctatgttgatcttaaggtaagaactgtcaaatgcttgactttgacttcaactaaagactaaagcaaaaatatctttgctttgcatatactcgtcaaatctgataactagttttcttactgtcctttcctgatttatttattgatcctctcgatttccttctctttttttttttgccaaaccttttaattgcctgtgaaaaggagtcttttgcatgggtttgtctacgtaatacgtatgctttatgcaaattcctagtgaggttaggttacttggccgatttaatcaatagtttggcacttgtgggttttaggcctactcacctaacaggtgcgtgctgtttctgtgttctttatttgaaagttttctgccagactcttgttcttgaaaaacttgtgtccttgtgattcagttggtgctgttcccacgcatcagctttgtagtttggctgggtcatgttagctttagtaccagaatgcttcacctggaaacaaaggagacccattcttgcacgtcaactaacccgatccggactttggagaaaaaacaagtccagctcagggatcagataacctttcctttattagactggaagcttcttggctgctttgcactgtacattgctgcattctctggtcagattttaacgatgactttgaaagtttgaacaggcaatggattaaccgtgtcgaaattgtggtgcgaacaggacaaatggaagacgctggtgcacaccgcgagcatctcgccgcagcagcggcgtggcgagccggtgcctcaggagctgctcgaccgggtcctggcggcccaggcctactggtcccagcagcaagccaagctccagcctaagacgcccccgctgctggctgaggctcgcttgctcacctaataaattcgatgatcctggctgatggcctcctccgaggccgttgcagcctttgtataaagtcagtaagtcagtcagtcccttcacaggaggtttaaggaagatatattaggaaaaaaaagaatacacatataaggtacaagaagcattgaccgatttgttgtaatatctactcaccaacagatattctttaagccaggattctctctccttgtgaatttaaccaaaggaaagggtatttctttggcaaattgtacatgttgatggtggaagaagaagatgatccatgaactgagatctggggtgccattgctcacaatttttgcagttgtgactgagaaattgaaggtcctgcttgaccaagctcggctccggctccggcttttggattctcctgcgaagaagttgttgcctcctcgcagaagctgagagccgaacagtgtatttggtttgaattgcagcctatagtataatttgattcacccgtacagacggccacaaaaagccgtaaagggagggtagcttcttttgttgagtctaggcttgcgagctgggccaaagcggcaccgaaagaaagcttcagattcttttgttcaattaaattcattcttttgttagtggacagtgacggaaggataggacattaggagggatggatctttggttctcttttccttttttttcttctattaaattagttgtactatgttatgtcaccaatcttgtagttaccctcaaatttgtaattgatgaaattaagaaattggaaggaaatgctttcgtacca

SEQ ID NO: 208361 - DNA, 3071 bp, Zea Mays
gtgctggtttacctggcgaatttatttgcttgtgcattaaattcagtggcgaaaccatctcgcaagaaaaaacctgaggtcttaactcggatcacgggttgaaatttgtgttggtgacaagccatgaacagcgcaaccaccagttgttaagtaaccctcctgtaaacttgaagcaaccgaagcggagagcagaaatggtgttccaaaagaggtcctcgtcagagttggaggcgtccggtggaggccaagtcgcggagatgccgcgcgttcccaagtctgcgaggggcaagagatcggtcaggaagaaggaggcccagaacccgccccagatgtcagcattcgaccttctcgcgacggtggcagggaagctgcttgatgagggggtgggctcgctggggaacatgagcgctggtgccccagctttgactgcatgcgcgaaggatgtccgtgtgaagaaggagcagtgtgacgaggaaatgaagcagttcaagcatgaggtgacagatcaggatagctgcaatgagagtgcaattctcccgcacattgtgttccagcgggcggtgaataatgctcggaatgaggatcctaaggcgaagtctgaggcccaggacaaggaatcctccatgatcagctgtaccaaggctgaactgggttgtaattttggtgtgattgcagataggtggtcgcctgaatccgtggaatcaggagccttcacaggagatgcagtggcgagcctgatgccacctgccccagcaggatttcataagaatgcacccgaaatgtataatttgcttgattcaatggatgtggatgtcaagcctcctcctttggtcagctctgacagcaccggcgagatgccattgtatggcgataaagttcaccgctcaacctccttaccaagggtctcgaagggagtggggttttttgctgtagatagagatgatgacgacgataagtcctctgggtgcactcatcccagcaccaccactaacaaggatttcaggtccaattgtacagctgagtatagtagggtaaggaagttgctcaccagtaagtacaggaaagttgctccagcgagggtttacaaatctgatctttcctatagtgatgttgatcggaagccttctttccggaacaaaaaaatgcattatacacgacagaggacacaaaggagtacattcaagcgtaggaagctctttgatcgccattcagttctagcatctgaatttggtaccgcacatggaaagggaaacacgaagaaggttaccggaagagactcccatgctgtgtctttggaagcaaacaaggggactagttcaacgccattccagaaatctcgtgggtcaaatgattgccatgtgaaacttaaaattaagtcttttaaggtgcctgaacttcttgttgaaatcccagaaagtgcaactgttggctcactaaagaaaactgttctcgaggcagtgactgcgattctcggaggtggtctacgtgttggtgttcttcaccatggaaagaaagttagagatgataataaaacgttgattcaggctggtattggtcaggaggatatgctggacaaccttggcttttcacttgaacccaactgtacacaaaacccacaagtccaagctcctgaagatatcagtttcctggaaaccattgatactgctgaacccctcgcaaggattgcacctgctgactcgtcttctaagcatggtgaagttgacctatcacaggagtttgcattaaccccattagcaatgaactaccagggcagtgatcatgattctgtgcactcccctgggggcgtctcatcgcccgataaagtctccacaaactcgcgagctttagttccagttccagctgcagatcccaatgcaggagctatagttccagcgaataagtctaagaggtcaccagagcaggggcaacgcagaatcaggcgcccgttctctgttgctgaagtagaagcacttgtgctcgcagtcgaaaagcttggaaccggaaggtggcgagatgttaaacttcgcgcgtttgacaatgcgaagcaccgtacctatgttgatcttaaggcaatggattaaccgtgtcgaaattgtggtgcgaacaggacaaatggaagacgctggtgcacaccgcgagcatctcgccgcagcagcggcgtggcgagccggtgcctcaggagctgctcgaccgggtcctggcggcccaggcctactggtcccagcagcaagccaagctccagcctaagacgcccccgctgctggctgaggctcgcttgctcacctaataaattcgatgatcctggctgatggcctcctccgaggccgttgcagcctttgtataaagtcagtaagtcagtcagtcccttcacaggaggtttaaggaagatatattaggaaaaaaaagaatacacatataaggtacaagaagcattgaccgatttgttgtaatatctactcaccaacagatattctttaagccaggattctctctccttgtgaatttaaccaaaggaaagggtatttctttggcaaattgtacatgttgatggtggaagaagaagatgatccatgaactgagatctggggtgccattgctcacaatttttgcagttgtgactgagaaattgaaggtcctgcttgaccaagctcggctccggctccggcttttggattctcctgcgaagaagttgttgcctcctcgcagaagctgagagccgaacagtgtatttggtttgaattgcagcctatagtataatttgattcacccgtacagacggccacaaaaagccgtaaagggagggtagcttcttttgttgagtctaggcttgcgagctgggccaaagcggcaccgaaagaaagcttcagattcttttgttcaattaaattcattcttttgttagtggacagtgacggaaggataggacattaggagggatggatctttggttctcttttccttttttttcttctattaaattagttgtactatgttatgtcaccaatcttgtagttaccctcaaatttgtaattgatgaaattaagaaattggaaggaaatgctttcgtacca

SEQ ID NO: 208362 - DNA, 1662 bp, Zea Mays
aggtccacccacatccgcgctcgtcccggccaccgccgccgcactctcacggtcccacctctctgtggcatgagaagatggtcgcgtgctccaggggactcgcgtggccgccgttcgatctgaccacggcgaggggggcggcgtcctggccgcgccggcgtgccgcgatccggtgctgctgcgccggagcagacgcacagccgcagaggcgactctcgagggcggccgcggtcgcgcccgagcgcgccgaggagtggcgcatcgatgggaacaagccgtccgccgcggcaccgggacggcggcgcaccagcctcaccgccatgcccccgctccccttccctgcacctcgctctagaagacaggtcaagcaaccggacttctacccgcggtgcactccgagggggtcggctcctcaatcccgtgataccccgcccaagagagacactggtattgctagtgagaaggaatggggaatcaacttgctggacgaagccgtcaaggagtctggaataaatgaagatggaagcacttggtacagggagagtggagatgatattggcgagaacgggtaccgctgccgctgggcaagaatgggaggacagagccatgatggttccaccgaatggaaagagacttggtgggagaaaagtgactggactggatataaggaattaggtgcggagaaatctgggaggaatgctgaaggagattcttggtgggagaaatggaaagaagttctgtaccaagacgaatggagcaatcttgcaagaatagagagaagtgctgagaaacaagcaaaatcaggcatagaaaatgctgggtggtacgagaaatggtgggagaaatatgatgccaaaggttggacagaaaaaggtgctcacaaatatggaagattgaatgagcagtcctggtgggagagatggggtgaacattatgatggccgtggatttgttttgaaatggacagataagtgggcagagacagacttaggcaccaaatggggggacaagtgggaggagaaattctttgcaggaattggttctcgacaaggggagacatggcatgtatgtcctggcggtgaacgttggtcaagaacctggggagaagaacactttggtaacggaaaagtccacaagtatggaaagagcacaaccggcgagaggtgggacttggtagtcgacgaggagacatactacgaggcggagccccattacggatgggccgatgtcgtcggagactcgacgcagctgctgtccatacagcccgtggagaggccacccggcgtgttcccggccatcgacttcagctccgcgccgccgccgaaggacgctccgccgggcatgcccccttctcctctggactgagtgaattaggcctgccagcacagacggatttttctgtctatataggctccagattttgcctgtaagggaacagcattctttgtaggaagttgacggaaccccgttcctgcgttcattggttggctcattctttgctacgcattcctttcctctggctgggatatatatatattttgcttgggaactgggtggatgcaataatcaaacggcgcccgtggttgtgtgtgttgcccctgtccccctatgtgcttgcaacttggtctgaaggcagtgtggtctgggcaaagctttccacagc

SEQ ID NO: 208363 - DNA, 1657 bp, Zea Mays
aggtccacccacatccgcgctcgtcccggccaccgccgccgcactctcacggtcccacctctctgtggcatgagaagatggtcgcgtgctccaggggactcgcgtggccgccgttcgatctgaccacggcgaggggggcggcgtcctggccgcgccggcgtgccgcgatccggtgctgctgcgccggagcagacgcacagccgcagaggcgactctcgagggcggccgcggtcgcgcccgagcgcgccgaggagtggcgcatcgatgggaacaagccgtccgccgcggcaccgggacggcggcgcaccagcctcaccgccatgcccccgctccccttccctgcacctcgctctagaagacaggtcaagcaaccggacttctacccgcggtgcactccgagggggtcggctcctcaatcccgtgataccccgcccaagagagacactggtattgctagtgagaaggaatggggaatcaacttgctggacgaagccgtcaaggagtctggaataaatgaagatggaagcacttggtacagggagagtggagatgatattggcgagaacgggtaccgctgccgctgggcaagaatgggaggacagagccatgatggttccaccgaatggaaagagacttggtgggagaaaagtgactggactggatataaggaattaggtgcggagaaatctgggaggaatgctgaaggagattcttggtgggagaaatggaaagaagttctgtaccaagacgaatggagcaatcttgcaagaatagagagaagtgctgagaaacaagcaaaatcaggcatagaaaatgctgggtggtacgagaaatggtgggagaaatatgatgccaaaggttggacagaaaaaggtgctcacaaatatggaagattgaatgagcagtcctggtgggagagatggggtgaacattatgatggccgtggatttgttttgaaatgataagtgggcagagacagacttaggcaccaaatggggggacaagtgggaggagaaattctttgcaggaattggttctcgacaaggggagacatggcatgtatgtcctggcggtgaacgttggtcaagaacctggggagaagaacactttggtaacggaaaagtccacaagtatggaaagagcacaaccggcgagaggtgggacttggtagtcgacgaggagacatactacgaggcggagccccattacggatgggccgatgtcgtcggagactcgacgcagctgctgtccatacagcccgtggagaggccacccggcgtgttcccggccatcgacttcagctccgcgccgccgccgaaggacgctccgccgggcatgcccccttctcctctggactgagtgaattaggcctgccagcacagacggatttttctgtctatataggctccagattttgcctgtaagggaacagcattctttgtaggaagttgacggaaccccgttcctgcgttcattggttggctcattctttgctacgcattcctttcctctggctgggatatatatatattttgcttgggaactgggtggatgcaataatcaaacggcgcccgtggttgtgtgtgttgcccctgtccccctatgtgcttgcaacttggtctgaaggcagtgtggtctgggcaaagctttccacagc

SEQ ID NO: 208364 - DNA, 616 bp, Zea Mays
gtaacatactcttcgactggatcttgatctcgcttctcagttctaaatcctgtgatctacttacatttagtgctctgtttggataggaactcctaaacttgatagcgattcttcgccgatttagcaattgatatggtagtatgaatcaactaggagcttgatgagattgtttgatgacgattgtattagagtggactaatcagggagccccctgttttatgccaagatgatcttcttgctgcctgattttctgccatctgcttaccacccgtggtcctgttgtattttgtaccatatctagatcatggatggacaatcatacttaacaaggacgtaacaatcggacaatttgccttatcaaggagctacatttggaagaaggctggactaacacacatgcagtattttgtttagtcatttctttaatcttttatccgataatgtatttgatgccctatccctccattgtagactcttcacatacagggtatcatctgtcctccatgtagtgaattgtcagttgtgttcatgtgccctgagaaccacttgtgctctcttcgttccttcgctcagctgatttgtttacatgactcatccatgtcttgatgccttcttt

SEQ ID NO: 208365 - DNA, 1304 bp, Zea Mays
ttcgtgacgactgacgacgagtgacgagatcccaattcccggtcagttcgtgtttcccggaaaaaacccagcgccctccccaccgccgcccgcctccctcgcctcctatcggaatccatcccgatggcgcaaggcaccgtgccgtccgcagccggggccggcggaggcggctgcgcctcggcccccgccgtctccacgaccccccctggcacgccacgggcctccgcggcagccgcgccgccaccgcctcctccctccttcgcgactggattctactacgccgtggagctctacttcgacccggcgctagagaaccaggtgctcaaggcgtggaacgcgctggcgcggcggcaacttggcagccgcctcatcgacgcggccgctcgcccgcacctcccgctgctccacctccccgccgccgcgctcccgccgcctggcaccggcgcgggcggggacccgctcctccgcctcgcaccctcgctccgcgcgctcgcgtcgcgcctcgacccgctcgcgctcgcgctctcctcgctcgccgcgctcccggcctccgccacctcctctccacacgacaacgttctcttcctcgcgcccactccgtctgccgcgctgctcggcctccatgcgcagctctgcgaactgctgcggaaggacgctggcgtcgagatccccgacccgttccggccggaccactggctaccacggtgcgccgtcgccatcgacgtgccacgcggccgcatggccgaggccttctgcgtgctccgagagctaaagctgctccccgtctctgggtacgggatggacatcgcgcttgtcgaggtcggggcaaccgtcagggagctcgtgtgctacccgctcggcggcagcggtagcactggagccgactgagagggagccccctgttttatgccaagatgatcttcttgctgcctgattttctgccatctgcttaccacccgtggtcctgttgtattttgtaccatatctagatcatggatggacaatcatacttaacaaggacgtaacaatcggacaatttgccttatcaaggagctacatttggaagaaggctggactaacacacatgcagtattttgtttagtcatttctttaatcttttatccgataatgtatttgatgccctatccctccattgtagactcttcacatacagggtatcatctgtcctccatgtagtgaattgtcagttgtgttcatgtgccctgagaaccacttgtgctctcttcgttccttcgctcagctgatttgtttacatgactcatccatgtcttgatgccttcttt

SEQ ID NO: 208366 - DNA, 1400 bp, Zea Mays
agcaaagcacactgagaaatcttgttggagcgcagttaatgcatgcacacagagctccgtccgtcactttcccctcgttccattcatggagaatatgctccacctagccccgtcgtcccaggcccaggcattggccttggaccgctcctccgtcttctcgcgtgagcacgtgccgccggccgtctccgctgtcacctccctgccagttatcgacatgtctcgcagccgcgacgaggtccgccgcgctatcctcgacgccggcatggagttcggcttcttcctggtggtggagcacggcatcccagaggaggtgatgcgcgacatgctggaggtgtgcgaggagttcttccagctgccggcggcgagcaaggcgtacatgtactcggaggacagtcagagacccaaccggatcttctccggcacaacctacgacacgggcggcgacaagtactggcgggactgcctccgcctcgcctgcccctcgtccttcccggtcggcagcggcacaagggacgactggccgcacacgccccagcggctgaggggtgtcgtggagcgtttcaccgctctgacgagagggctgggggtggagctgctgcggctgctgtccgaggccatggggatccggcccgactacttcgagggcgacatcagcgccggcgacgtggtcctcaacgtcaaccactaccctccgtgccccagcccggagaagacgctcggcctgccgccacattgcgaccgcaacctcatcaccctcctcctccaaggctccgtctatggcctcgacgtcgcctacaggggagagtggataaaggtcgagcccatgcccggtgccttggtcgtcaacttcggccagcaactcgaggtggtgaccaacggattgctgaagagcgttgagcaccgcgtggtgaccagctcgacgctggcgcggacggcggtggccacattcatcatgcccaccccagactgcctcatcggcccgtcaaaggagttcctcgccggggacaagccaccgtgctaccgcaccatcaggttcggtgacttcatgcgcatgtacaacactgtcaagctggggtcatccatcaaccagactacagatcttaagaatatccagaagaagatatgagcatatttatttaccagagagatcgtccggccagcaggggtcctccaagattttattcctttaataaaacgtacgacgagcatatttatgtcaagcaataaaacgtacgacggacaacttttaaaaatattattattaatcggaggcagcatggacgccattcctttatgagatatgctaaaaaaacaaatgtgctgaaatatctcaaagatgagagacatgcatgtggcgatatatgctgtggtataatctaatcattattgtcgttagtatc

SEQ ID NO: 208367 - DNA, 772 bp, Zea Mays
gcaggcagcaagccgaccgcgcctgcaacgaccgcgactcagctcggcgcccaggcggaccgacgccggccacccggccaggcccgcggagccgcagccacgcgcgcccagcaagtcgagcttatctgaatttgatgatcttgtgggccaccctggattcgacaagcaagggacacgcttcaagcggctcatcaaagaccagaataatcataaggacctcgaggagggaattaaccgtctagttctttgctctggaaagtttcaggtgtactacgaactggatgaagaaagaaggaagacggagcgcactgatgttgctatatgtagagttgagcagctctgcccattcccctatgacctcatccagtgtgagttgaagagatatccaagtatgtgtttagaaaaaagtggttgctcgtttttactctgctgcatgatctctaatctgtcaagtgtatagtagaaaatgttttgctagctggaagggacactgaaaggcggacgtgcggattggcttatagagaaatgtattgaacttggagcttctagtgttacccctgtcctgacagaacaatgtcacacaatagcggaaaatcgggtggacaggctgtaatgccttgtgctggatgcagttaagcaatgtatggagtttgggtatcacctccgttcttggcctgttaaacaatgtacggagtttggggttaaatgattttgtaaagtgtttgcaaatttgttcaaaacatgataatgtgtaggttttgtgaatgatttt

SEQ ID NO: 208368 - DNA, 552 bp, Zea Mays
atgtgtttttaatatatgtatgtgggctgtacatgccctaatccaccatctcactcctgattccgacgccaaccccctgccctgccgccgtctctctctaacccgcttctccacctccctcacatcggctactctccgcgcgcctaccgttccgcgccgcatcggattgggtggtcggggcctagtcgaggtttcgcgggacagcgtcggtccatggcggagcttgtgggaccgcgcgtctacagttgctgcacttgccggaaccacgtttgccttcacgacgacgtcatctccaaggcctttcaggggaggaatggccgtgcgtttctgttctctcatgccatgaacgtagttgtgggggcgaaggaggatagacacctcatgacagggctacacacagttgctgatatctactgtaatgactgccgtgaggtgttgggctggaagtatgtgagagcatatgaagagacgcagaaatacaaggaaggaaaattcatattcgagaagtcaaagattgtgaaggaaaactggcaagttgaaaatctggtgagc

SEQ ID NO: 208369 - DNA, 328 bp, Zea Mays
atgtgtttttaatatatgtatgtgggctgtacatgccctaatccaccatctcactcctgattccgacgccaaccccctgccctgccgccgtctctctctaacccgcttctccacctccctcacatcggctactctccgcgcgcctaccgttccgcgccgcatcggattgggtggtcggggcctagtcgaggtttcgcgggacagcgtcggtccatggcggagcttgtgggaccgcgcgtctacagttgctgcacttgccggaaccacgtttgccttcacgacgacgtcatctccaaggcctttcaggcaagttgaaaatctggtgagc

SEQ ID NO: 208370 - DNA, 1597 bp, Zea Mays
agccagcagcaagctgcaactcgctcgccacccaccctgacccagagtccacaccgaaatatccgcgtggcgtggactcgggcaccactctccattcctgcatcccattcccatctcttcttcgcctcctccgcctcgccggcgtcaccgtccggccccgcctcttccccccgctcgaagctcgatctctcctcccgttctccgcccacgcaatccctgccaccgccgaatgcggaacactcgcctttggtgaccgactgacctaccctgcttctgccgggttagttgagtgtccgcgcctaccggaccccgcgccgcgtccggatctcgaatgcgccgccgccgccgtcgcgcgatctagcggctgcgcgctgccccgcaggagggtagagctccaggggcccggtgtggtcaggcggcggatatggcaacggaggcgtctacctctgcggcgggcgggatctgggtggaggggatgtccgcggacaacatcaaggggctggtgctcgcgctctcctccagcttcttcatcggggccagcttcatcgtcaagaagaaggggcttaagaaggccggtgcgtccggcgtccgcgcaggtgttggtggttactcttacttgtatgaaccattatggtgggcaggaatgattacaatgattgttggagaagtggctaactttgcagcatatgcttttgctcctgctatcttggtcacaccacttggtgcacttagcatcataattagtgctgctcttgcagacattatgttgaaggaaaagctgcatatatttggtatacttgggtgtgttctttgtgttgtgggttcaacaactattgtacttcatgcccctcaggagcgcacaattgaatctgtagcagaagtgtgggatcttgctactgaaccagcctttctatcttatgctgccatcgttcttgctgcaacatttgtcctcatatactactttattccacgatatggtcagacacacatcatggtctatattggtgtttgttcccttgtaggatctctgtcggtcatgagtgtgaaagctcttggaatagccttgaaactgaccttttctggcatgaatcagctaatttatccacaaacatggttgttcaccattgttgttgttgcatgtatagtaacacagatgaactacctgaacaaggctcttgatactttcaacacagcagttgtatcaccgatatactatacaatgttcacgtcactaaccattttggctagcgtgataatgttcaaggactgggatcgtcaaaatccaactcaaattgtaacagagatgtgtggttttgttaccattctttcggggacgtttcttctccacaagacaaaagacatggttgatggcctcccgccaactctacctgtccggattcctaaacatgaggacgatggagctgaaggaatccctctcagatccgctgaaggcatcccgctcagatcaccgagggcaacggcgcgctctttaattcagcttacctgagcatcaatggtgaaggaagaatgcaagctcattgaccaaggtggcaatgatgtcgccgatccacaacgcgatggagacgaggacagtgat

SEQ ID NO: 208371 - DNA, 3477 bp, Zea Mays
ctaccacaatcttccactaggtgaagatgtcccaccactgcaattgaaagaaggtgtcttcaggtgcatcatgcagctctttgattgccttctaactgaggttcatgagcgttgtaaaaagggtttaagcttggcaaaacgcttgaacagcacacttgctttcttttgctatgatcttttatcaattattgagcctcgccaagtttttgagctggtttcgttgtacatggacaagtttgcaggagtttgtcaatcagtccttcatgactgcaaattgacattcctgcagataatatgcgaccatgatctattcgttgagatgcctgggcgggatccttctgatagaaactatctctcgtcagttctcatccaagagatctttctgaccttagaccatgatgatttatctcaacgagcgaaggctgctcggattttggttgtccttatatgcaaacatgaatttgatgcacgctatcaaaaaagcgaagacaaattgtacattgctcagctgtattttcctcttatagggcagatccttgatgagatgcctgttttctataatctgaatgccattgaaaagcgtgaagtgctagttgtcattttgcaaattgtgaggaacttggatgatgcaactcttatcaaagcatggcaacaaagcattgctagaaccagattgttcttcaagcttcttgaagaatgtataatccatttcgagcacaacaaaacaggagacaacatgctacttggtgctagttctcggagcccagatgtcgagcatcctgcatccccaaagtactctgaacgattgtccccatcggtcaacacatatttgtcggaggcttcgaggcatgaaataaggcctcagggaacaccagaaaatggatacatgtggaacagggttagccctcaattaagttcccctaatcagccctattcattgagagaagcacttgctcaagcacaatcttcaagaatcgggtcaaccgccagggcattgagagagtctctacatccagtgctgagacaaaaaatggaactttgggaagaaaatctcagtactgccgtgagcctcgaagtgttgggaataactgagaagttttcagttgctgcaggcgctcgaagcatcactactgattacgcgaagctagattgtgtaacatcaatcttaatgggtcttttatctaggaaccaatccttggctttttggaaggctttccttcctgtggtctacaatatatttaatgttcatggtgcaacactaatggcaagggagaatgaccgcttcttgaagcaaattgcttttcatcttttgcggcttgctgttttccgaaacgattcgattagaaaaagagctgttgttgggctgcagattcttgttaggaactcattcaactatttcaaaaacactacaaggttaagggtcatgttgacaattactttgtccgagttgatgtccgacgtgcaagtaactcaaatgaaattcgatggttctcttgaagaaagtggtgaagctcggcgccttaggaaatcactggaggaaatggctgatgtgagaagcaaggatctgttaaaagattgtggcctccctgttactgcattggaggcggcccctgaaggctcctctgataataggtggtcttgggtagaggtgaaacatttgtctaaatgtctagtccaggcccttgatgctggtctggaacacgccctcctgatcttcacattatgtggttgcttcatctgtgtgatgcacaccaggagatgcaatcatgggctgaagcagcacaatgtgcagttgctgtagctggcgtgatcatgcaggcacttgttggaaggaatgatgctgtgtggagcaaggagcatgttgcttcgctgcgcaagatttgccctattgtcaacactgatgtgagtgcagaagcatctgcagctgaagtcgagggatatggtgcatccaaattaacagtggactcagcggtcaaatatcttcaactagccaataaacttttcacacaagctgaactctaccatttttgtgcaagcattcaggaactcataattcctgtgtataaaagcagaagggcttatggacagctggccaaatgccacacatcgctcacaaacatctatgagtcaattcttgaacaggaggctagccctataccattcattgatgccacatactaccgagttggtttctatggtgagcgttttggcaagctcaataaaaaggagtatgtatttagagaaccacgggatgtacgtcttggtgatattatggagaagcttagtcatatatatgaggctaaaatagatggaagtcacactttacacataattccagactctagacaagtcaacgctgatgagttgcagcctggcttctgctatttacagatcactgctgttgatcctgtgatggaggatgaggacttgggtagcaggagggaaagaatattttctttatctactggtactgttcgtgcacgtgtttttgaccgttttcttttcgatacaccattcacaaaaaatggaaaaacacaaggtggtctagaagaccagtggaagaggcgcacagtgctccaaacagagggttcctttcccgctttggtgaaccgtctgccagttatcaaatctgaatctctggagttctctcctgtcgagaatgcgattggaatgatcgaaacaaggacagctgcattgagaaatgagctagaagaaccacggagttctgaaggtgatcaactcccaaggcttcagagcttgcaaaggatactccaaggaagtgtggctgtgcaggtcaacagtggggtattaagtgtgtgcactgcattcttatctggtgagccagcgactaggctcagatcccaagaactgcagcagctcatcgctgcattgcttgaattcatggctgtctgcaagcgtgcaatccgtgtgcatttcagattgataggggaagaagaccaggaattccacacccaacttgtcaatgggttccagtcactcaccgctgagctatctcactatatccctgctatactctccgagctatgatagaactgtagcaagccagaaattaggtagcatgtgaatggttgttcattcattcagttgcaggttcccaccaaatgtccatatttccattagctttggttgtatagttctaggaaccggaaattaactagtcttcgaagttctgtaccgtattgcagaaccgattcctgattttggagtgtaaagtctgtataatacctagtgttatctgttatgcaccagttatatgctgagttccttcttttttgcagtttgctactatgtcacaactagcggacattttgcacttgtattgtgatacatagtgcatatatatatatatatatatatatatatatatatataaaatgcacctgggtgcattttagtttgtggatgcacagacccaagacttcctgtctccgtcgctgcctcgcgcacagacccaag

SEQ ID NO: 208372 - DNA, 1226 bp, Zea Mays
tctcacgcaggtgtctgttgatgttcctgatgtacgtggaaggacagagattctaaaagtgcatggtggcaacaagaaatttgattctgatgtttctctcgatgtcatagcaatgagaacacctgggttcagtggagcagacttggcaaaccttctgaatgaagcagccattctggctggacggcgggggaggacagcaatttcttcaaaagagatagatgattctattgacagaattgtggctggtatggaagggactgtgatgacagacgggaagagcaaaagtcttgttgcttaccatgaagtcgggcatgcaatttgcggaactttgacacctggccatgatcctgtccaaaaggttaccttaatcccaaggggtcaagctcgtggtcttacatggtttatcccgatggatgacccaacactcatctccaggcagcaactttttgccagaattgttggcggccttggtggtagagctgctgaggaggtgatatttggagagcctgaggtgaccactggagctgctggtgacttgcagcaaattactggcttagccaagcagatggtggtaacgttcggtatgtctgaaattggtccatggtctctgatggagggtggggcacagagtggggacgtcatcatgcgaatgatggcaaggaactccatgtcagagaagcttgcggaggacattgattcggcagtgaagcagttgtcagatgaggcctacgagatcgcattgaggcacattagaaacaacagggaggccatcgacaaaatcgttgaggtgctcattgagaaggagacactggccggagacgagttccgggcgattctttctgagtttgtggagatccctgtagagaaccgggttcccccagccacaccggcggccgccctccctgcctaaagtcaagtcttgtagggggtgaaatttgttgttgtaagatgttcatattttggattcttggtgtacactaattctacttcacctgccgggtttttggtagacgacatgtaacttgctcatggtgaactatagtaaaatgtaattagcttaaaaggcctggcgcaacattttcggtttctagcttctggcgagtgaattctcttgctcgtagattaacgagaaaattgcacggttcctacttcataaagctatgttcttactaagaacttgtcattttcctttttggaactctgggattgaggtcagcaaattgcca

SEQ ID NO: 208373 - DNA, 1392 bp, Zea Mays
aatgagctagtaagaatccacaaaccgataacatcaatagcaactattctcaagttcaacagactcacaatgatctgccagccaagagtgcctaagaaacggtacaaaaacaggatagataaaagggatagataaaagggtgaccaatacggcaatcctacaaatcctaaataaacggccattgcttaatctccatcgaggagagtttgttacagcattaagatcaaatacgagccacagggaaatgctctctctcaggcagcatgtggctcagcacacttcaccatggcgctggcgccactgtccttggtcatggtgttattcagccatacaggcagattaatcaccacaggccacaataagcatgcctgtcaagcagcagcaggtttgcgcagctcaccttcgccatgggcgaagtggcacctgtctccaaaggtgcaggagcctttgttgaagttctcgcacaatttggttttgaagttgcttccaggacccccggcatgagaaccaggccccctacctgggttgttcttggcttgtggaggcggcttaccactgatgcggacaatcaactctgtgaccattgcgctagcgtgcttgatctggtcaaatgttccctcgagctcgatgtttttatggttgggatcagcctcgttgtcccggatggctaacttggccccagtcactcgggatatatgctttgtgttggtaccacccttcccaatgatggcaccagcaagggatgcatcgacgctgatcttggctgtggcggaagcaccgaatgtggagggaggaaccatgtctgggaaaggcattggcggtggcatgaagtgcccgttgggccctggccccattggaggaggtcccatcgggttgtccatctgcaggggctttccaagctccctctctccatgagcaaagtggcacttgctcccccatttacatccttcggcagtgttgtacttgttacacatgcgagtcttcacagcaggtgaaggtggcccatcaggaccaccaggtcccataggcattcttcctggtggagccggaacaggcggtccacccaagttggtcatctttgaaacggcctggtagccacccgggaagttatggagaaaatggcaacttgcaccaaaggggcaacccgcagtgctgcacattgaaaacataatataagcaacagaacatgctaatatatctgacaacctacagatgattttagttgatacacaaatgcaaacaatgttgatggaagagattaagttacatgcagctggataatgcaacctcactagatgactgctaaaaatatatatgcaaagaataaaagctgaagtaaatgatacaaactaatcttttagaaatcatgctttatatagaaatgccattcat

SEQ ID NO: 208374 - DNA, 2340 bp, Zea Mays
cgagctcgacgcccctcccctcgacgccctgcctctgtcttcctcctcgcgtcttcttccctcgcttccatttcttttcaaaccctaagaacccgattccctgctcaaaaccctaaccctagcccccgcctcctctactccgcgtcacccactgctccgcggcatccctcgcggttcccgccgtccggggcgccaggccctgccactcggcccttgcggacctagggtttctcccgagcttctcgttgcgttcactgccttgggcgagccggtgcgggcggatggttaggcgaggaggtggtgggcggagatgagatgaggttgcagcggcgttgggggttgtgggaactatgagtaggctctcgttcagaccgcggccgctagacatccacaagaagctccccatcctcaagtctgtgcgtgagttcgaggatgaggagccagggatcgcaccactgtcctctgcgagggctggggtgctgctgcgtcactcaggagctgacttcaccgcgtctggggccaacaatgccacagaaggcgagggaaatcaagcactcagtaagaaaaatgcccaggaaatacctacaccacaatttgatggtgttgacacatatgaaagggactatactcgtacctttgcacaaccgacatcttatatacgtggaagaggagccagggctgagatcggtgaatttgtcgagtatgaccttgacaatgaagacgaggactggcttgaagaattcaatagcgagcggaagaatataaaccctgaaaagctttgcagtacttatctgttcgaaatgccgttttccaagctgtatacaactactggaaatcaaagagggagcgatggcaaaagcctattcttcggcgtttgcagccgcctccaccagtgaatgatacaaatccatacaatgtcttcagaccaagagaaaaggctcatcgtcttcatacaagaaggatgcaaagaagggaaaacaatatccaatcattcgaaaaactccgcttggtgcgacgcaacttggagcaagcaaaagcactaatggatgctttgattaagagggaggagacaaagcgggaggccatggagtgccaagttaacctgcagcgtgttcagatgaaatataagcatgaggcccagcttgttgaggatgggactaccttgtctggcttccagcaaacttcgagcagatttgaatcgagcgatgatgatgtggattcagatgatactgcaactgaacagacatacatacgtccagcagttttccatccaaggttttctgctaataagctatctgtgatccctccacttcgcataaagcgtgaacgagagctaaaaaggagacctcagcagaatggctgtgtatttaaaagggatcctgaggagccagtattcttattcacaagaccgcttgatccggagaagttggttgcagcaggtatcaagccaccaccagatcctcctattgagaatggtgccacatcaccaccatttcggtgtcgaggtaggattggacgaggcggccgcatcatctttgatcgatggaatcctcttctccggacaccaattgaccaggagacttattatgtgccatacggtcacaggcccccctcacctgaaggttgaagcggtttttcatatgcacatagtgcttaatggcactggcacagctatggaatttgtgaagcctctgagcaattgtttttccataggtgccaaattggcccttggagagtccattgtgagttgagcccagtggttcattctgatggaaggcagagaaagctccttgataagcagcagcctcagtggaagttcgagagcatatgggatctcgtggggctagcatttcttgctcagatgtggcttggtcatcttttttcacagctgttgtaaaattattgcagtgtaggtgaaagagtagatctttttgtctaatctttgcatttagggtcagtattcatatcatgctctctcatttgattattcatttggaggagaggaaatccttctcattgctaagttcagcttttctgtataattcttcaacaccttgttgcatgcattcaactaatgcacgtgtgtatatactgaaacccaatgtgcattgcccttttgtggcagatgtcattagtcagtaggttaggcagaaaatgggaatggaaaggggccaacaatgttattgaatctgttgctgaatgttgggttggcgcgcagcttcctcttgtaaccgtgtacagattcaggtttttgttgtgtaacaccgccaacaaatagctggttattgtcaggactgccatatgttctgattcttgctgatgacactgggctactttagg

SEQ ID NO: 208375 - DNA, 1670 bp, Zea Mays
gccgccctcccagcacacgagcctcaagtcgctcgccacgaacacacacaaaacagaacaaccacatccctcgtggtctgaacacaggcgttcttcaacctcggggctgcggagccgcctcttggcctcttcttgttcctattcgttctcgcctagtaggctactaggctggagcagaacggagaaccagagacaaggaggttattcggacacagaaactcctctctcgtatctccctaaactgatgtagaacagccatttcatcttggtcatttgatgacatctctctgaaatcgacggagtcaacagatcaagatgacagaaccatcatcatcatattcattgccctctaaaaagcgacaacgctctcctgatgataatgaacattcactagacagaggtcgaatttgtttaagccttgatgataatcttacgttcaatgataccatgatagcacttcaattgatgcgcacacagtttccaaagctggataaggttttggcgcagccattcattttgcagtcacaattgtatagcagtgtgaaggatagaacacaagttgacagagacttggagtcatttaagaaagacaaagtgttacggatattcaaacttagttctgggcaagatgatcatgcaatcatgttcatggatgattatttgaaacaggtctcttttgctattaaacggtcagggggtaaagaccaagatggtagtgaagtatttgagtggtttgagagatatgtggtcccttcaaaactggatgttagcataactcaactagagctgtgctcactgttatcacagggtggtgatgtaacagacaaacatatcacactattgatgaatgctggtctcttaactcgtcaacttattgatccaaatatttactggttttctattccaagaattggccccatattgaaaggcctatcccaggaatgaaattctttcgctgttgaaccgtagaaagtacaaggagatgccgctttcttcactggagaatacaaagttaagattatcacctcttgatacgcggttcctccttcgcgatttgattggatctgggcacataaaaacagttcaaacgcccactggtttgctcgctcgcgtatcaagggattaatagagctctctgtcgtaatcctacttatctgtctgccttatctcttatctgatcatgcacgatttggtgattctagtttcgttttgcattttacctgttttcaaacagcattcaacatgaccccaactcgtcgatagtctttttcattttaagagggtggttgggactccgctctacgttttgatgttccgtggaaactccagcaactcggttccccaaaaagcgtttttgatggagaaattcgttttaagatgtagatgtggagttcagggttaattacccaccaatgtcattcattaaatgccattcattatgatgagaaaataacatttcgtctcaatctattccttcatgcgtacgcagcatccacctcttcgtcaatgcatctgctcctcctgaaaccatatcacttgccatggatgttggtctcgagtccgatttgatggaattgcctacacaaattcattctcatccccttcctcctaatcccatcctatagcggtactgtgccgcttgctgcggacattaactgtacagacgtttt

SEQ ID NO: 208376 - DNA, 1409 bp, Zea Mays
ggtctgaacacaggcgttcttcaacctcggggctgcggagccgcctcttggcctcttcttgttcctattcgttctcgcctagtaggctactaggctggagcagaacggagaaccagagacaaggaggttattcggacacagaaactcctctctcgatgataatcttacgttcaatgataccatgatagcacttcaattgatgcgcacacagtttccaaagctggataaggttttggcgcagccattcattttgcagtcacaattgtatagcagtgtgaaggatagaacacaagttgacagagacttggagtcatttaagaaagacaaagtgttacggatattcaaacttagttctgggcaagatgatcatgcaatcatgttcatggatgattatttgaaacaggtctcttttgctattaaacggtcagggggtaaagaccaagatggtagtgaagtatttgagtggtttgagagatatgtggtcccttcaaaactggatgttagcataactcaactagagctgtgctcactgttatcacagggtggtgatgtaacagacaaacatatcacactattgatgaatgctggtctcttaactcgtcaacttattgatccaaatatttactggttttctattccaagaattggccccatattgaaaggcctatcccagggcaggaatgaaattctttcgctgttgaaccgtagaaagtacaaggagatgccgctttcttcactggagaatacaaagttaagattatcacctcttgatacgcggttcctccttcgcgatttgattggatctgggcacataaaaacagttcaaacgcccactggtttgctcgctcgcgtatcaagggattaatagagctctctgtcgtaatcctacttatctgtctgccttatctcttatctgatcatgcacgatttggtgattctagtttcgttttgcattttacctgttttcaaacagcattcaacatgaccccaactcgtcgatagtctttttcattttaagagggtggttgggactccgctctacgttttgatgttccgtggaaactccagcaactcggttccccaaaaagcgtttttgatggagaaattcgttttaagatgtagatgtggagttcagggttaattacccaccaatgtcattcattaaatgccattcattatgatgagaaaataacatttcgtctcaatctattccttcatgcgtacgcagcatccacctcttcgtcaatgcatctgctcctcctgaaaccatatcacttgccatggatgttggtctcgagtccgatttgatggaattgcctacacaaattcattctcatccccttcctcctaatcccatcctatagcggtactgtgccgcttgctgcggacattaactgtacagacgtttt

SEQ ID NO: 208377 - DNA, 2755 bp, Zea Mays
tgagttgctgacggtcgcttgacgagtttgcgattttggatcccatcccatcgtttcctcctcctccctctggcctccggtcacggctcgatctcccgttccaatcacgcccatggcagccgccgccttcggctccgccactggtggcgggtcgcggcttgtggaccgctgcatcgacgcggcagcgcgcggtcccgccactgtggaggcctggcgccggcagcgccgctccctggagcgcctcccggccccgctcgccgacgcgctcttacgccgcctagctgcgcgtcgccttctcttcccctccctcctcgaggtgtttggccggtcagtagaggaggttgatctgagtggatttctttctgtgaattccgagtggttggcataccttggctccttcaggtaccttagggttctgaagttggcggactgcaagaacatcaacaatgacgctgtctggtcgctctctggtgagatgctgaagcttctttgatcatatgattacactgtgggcatgggtggatccagaatagagaaccatcaatgtcatgtcaatggtgttcaaaagaacaattggtggtcgtgtttctattagatcacactttagccttggattttaaatttcatttatgtcaagtgacaacatcaaaaattcaaaatagccttgctttgccccctgcttttgagttttgtgatttgcaacataatttgcttgttactttaggaatgaacacattaaaggagctggacttgtcaaggtgcaaaaagatttctgatgctggcatcaaacatatagtgaccattgaaagcttagagaagctacacttatctgagactgaattgactgacaatggagtgatgctcatttcttcactgacaaatctaagtttccttgatctaggtggaattctcatgacagacaaaaccctacagtctttacaggtattgacaaaacttgagcatcttgatatatggggtagtgaaactacaaatgagggagcttctgctctgaaatcctttgcaaggctgctatccttgaatcttgcgttgacacgtgtcaaccatttatcaattcctccaaccacaagctatctaaatatgagcaactgcgaaattcattctatttgtgatgtggattctgaagttcctgttccactagaaaactttattgtctctgcagctacatttggcaatattgataaagtattttctagcatccaagcaagctcactgatacatttggacttgtctagctgcaagttaagcaacttgtctttcttggaaaagatgaagaatctagagcatctggaccttagctacaacataataactgatggtgcaattgaacatattgcgaagattggaacaaacttgcaatatttgagcctcaagaatactggaataacttcccaggcactatgtattctggcagggacagttccaaacctcacctcactgtctttagctaatacaaaaattgatgactctgctctagcatatattggcatgatacctttgctgagaacgatagatttaagccagacaagtatcaaaggttgtgctcttgcttactaaaattttttgtttccttgattacattaatttacttttggccacaaaaaaataaattttaccttatggcaggttttattcacactgaagtaaattccgagaagttgttgtctatgtctgcatttgagcatctcaaatatctggaaagtctaaatctggaggatacaccgctatcagctgaagttatacctcccttggcatcctttgcaacactgaaatatttgtacctgaaaagtgatttcttgtctgatcctgccttgcacgcactctctgctgcctccaatttgatacaccttgggttccgcgggaatatattgtcaagctttgggcttttacagtttgtaccccctgtcacactctgtgtgttggatttaagcggctgttggatcttaacaggcgatgctatttcaacattccgtaagcgtcatcctacgattgaattgagacatgagctcctgcacgaagttgaggaaaattttgttggtggttcccaatttcgtaaacctagacgcagacgatctcctcatgtgaaagcagaagttggaaacagttttgctggctcaagtaggctacacgatatccgttttgtagatgaaaggataaaatacagcaaggaggaatttgtggagctgcaaggccttgctaaaccaaattcgttaatgcttggcgtgtggcttccaccagaactgcgaaggcccaaatgatagttttggatcttgattccttacgcatttactgccagcatatcataatcttccttgagttattcttgatatgacagacttttgagaattaagcatcaagcatgtcactcagttccaaattatagttcactttggttttgtcctaggtcaaacttttctagctttgacctatgcattcgaataaatgctataccaaaatgtatttcgtgaagaatctaaagaaactgatttgatgttctagatggtggtacactttcctttaaacttggtcaaacataaagaagtttgacttatgaaaccaaagttaactataatttggaacaaagggagtacactggagttatctaaaacaaattttcgataaattagttttaacatttgcattgggctctcatcagttgatcctgaatccagttctccgatctgtgatataaaatatcattttctggagtttccttttggtcacgtgaaacttttac

SEQ ID NO: 208378 - DNA, 1940 bp, Zea Mays
tgagttgctgacggtcgcttgacgagtttgcgattttggatcccatcccatcgtttcctcctcctccctctggcctccggtcacggctcgatctcccgttccaatcacgcccatggcagccgccgccttcggctccgccactggtggcgggtcgcggcttgtggaccgctgcatcgacgcggcagcgcgcggtcccgccactgtggaggcctggcgccggcagcgccgctccctggagcgcctcccggccccgctcgccgacgcgctcttacgccgcctagctgcgcgtcgccttctcttcccctccctcctcgaggtgtttggccggtcagtagaggaggttgatctgagtggatttctttctgtgaattccgagtggttggcataccttggctccttcaggtaccttagggttctgaagttggcggactgcaagaacatcaacaatgacgctgtctggtcgctctctggaatgaacacattaaaggagctggacttgtcaaggtggaattctcatgacagacaaaaccctacagtctttacagctgcaagttaagcaacttgtctttcttggaaaagatgaagaatctagagcatctggaccttagctacaacataataactgatggtgcaattgaacatattgcgaagattggaacaaacttgcaatatttgagcctcaagaatactggaataacttcccaggcactatgtattctggcagggacagttccaaacctcacctcactgtctttagctaatacaaaaattgatgactctgctctagcatatattggcatgatacctttgctgagaacgatagatttaagccagacaagtatcaaagtaaattccgagaagttgttgtctatgtctgcatttgagcatctcaaatatctggaaagtctaaatctggaggatacaccgctatcagctgaagttatacctcccttggcatcctttgcaacactgaaatatttgtacctgaaaagtgatttcttgtctgatcctgccttgcacgcactctctgctgcctccaatttgatacaccttgggttccgcgggaatatattgtcaagctttgggcttttacagtttgtaccccctgtcacactctgtgtgttggatttaagcggctgttggatcttaacaggcgatgctatttcaacattccgtaagcgtcatcctacgattgaattgagacatgagctcctgcacgaagttgaggaaaattttgttggtggttcccaatttcgtaaacctagacgcagacgatctcctcatgtgaaagcagaagttggaaacagttttgctggctcaagtaggctacacgatatccgttttgtagatgaaaggataaaatacagcaaggaggaatttgtggagctgcaaggccttgctaaaccaaattcgttaatgcttggcgtgtggcttccaccagaactgcgaaggcccaaatgatagttttggatcttgattccttacgcatttactgccagcatatcataatcttccttgagttattcttgatatgacagacttttgagaattaagcatcaagcatgtcactcagttccaaattatagttcactttggttttgtcctaggtcaaacttttctagctttgacctatgcattcgaataaatgctataccaaaatgtatttcgtgaagaatctaaagaaactgatttgatgttctagatggtggtacactttcctttaaacttggtcaaacataaagaagtttgacttatgaaaccaaagttaactataatttggaacaaagggagtacactggagttatctaaaacaaattttcgataaattagttttaacatttgcattgggctctcatcagttgatcctgaatccagttctccgatctgtgatataaaatatcattttctggagtttccttttggtcacgtgaaacttttac

SEQ ID NO: 208379 - DNA, 2172 bp, Zea Mays
aaaatctttggttggagcctttggtcaacttaaaattgctaactttggctggtccggcatcttcaacaggactatggtgtttggccggtcagtagaggaggttgatctgagtggatttctttctgtgaattccgagtggttggcataccttggctccttcaggtaccttagggttctgaagttggcggactgcaagaacatcaacaatgacgctgtctggtcgctctctggaatgaacacattaaaggagctggacttgtcaaggtgcaaaaagatttctgatgctggcatcaaacatatagtgaccattgaaagcttagagaagctacacttatctgagactgaattgactgacaatggagtgatgctcatttcttcactgacaaatctaagtttccttgatctaggtggaattctcatgacagacaaaaccctacagtctttacaggtattgacaaaacttgagcatcttgatatatggggtagtgaaactacaaatgagggagcttctgctctgaaatcctttgcaaggctgctatccttgaatcttgcgttgacacgtgtcaaccatttatcaattcctccaaccacaagctatctaaatatgagcaactgcgaaattcattctatttgtgatgtggattctgaagttcctgttccactagaaaactttattgtctctgcagctacatttggcaatattgataaagtattttctagcatccaagcaagctcactgatacatttggacttgtctagctgcaagttaagcaacttgtctttcttggaaaagatgaagaatctagagcatctggaccttagctacaacataataactgatggtgcaattgaacatattgcgaagattggaacaaacttgcaatatttgagcctcaagaatactggaataacttcccaggcactatgtattctggcagggacagttccaaacctcacctcactgtctttagctaatacaaaaattgatgactctgctctagcatatattggcatgatacctttgctgagaacgatagatttaagccagacaagtatcaaaggttttattcacactgaagtaaattccgagaagttgttgtctatgtctgcatttgagcatctcaaatatctggaaagtctaaatctggaggatacaccgctatcagctgaagttatacctcccttggcatcctttgcaacactgaaatatttgtacctgaaaagtgatttcttgtctgatcctgccttgcacgcactctctgctgcctccaatttgatacaccttgggttccgcgggaatatattgtcaagctttgggcttttacagtttgtaccccctgtcacactctgtgtgttggatttaagcggctgttggatcttaacaggcgatgctatttcaacattccgtaagcgtcatcctacgattgaattgagacatgagctcctgcacgaagttgaggaaaattttgttggtggttcccaatttcgtaaacctagacgcagacgatctcctcatgtgaaagcagaagttggaaacagttttgctggctcaagtaggctacacgatatccgttttgtagatgaaaggataaaatacagcaaggaggaatttgtggagctgcaaggccttgctaaaccaaattcgttaatgcttggcgtgtggcttccaccagaactgcgaaggcccaaatgatagttttggatcttgattccttacgcatttactgccagcatatcataatcttccttgagttattcttgatatgacagacttttgagaattaagcatcaagcatgtcactcagttccaaattatagttcactttggttttgtcctaggtcaaacttttctagctttgacctatgcattcgaataaatgctataccaaaatgtatttcgtgaagaatctaaagaaactgatttgatgttctagatggtggtacactttcctttaaacttggtcaaacataaagaagtttgacttatgaaaccaaagttaactataatttggaacaaagggagtacactggagttatctaaaacaaattttcgataaattagttttaacatttgcattgggctctcatcagttgatcctgaatccagttctccgatctgtgatataaaatatcattttctggagtttccttttggtcacgtgaaacttttac

SEQ ID NO: 208380 - DNA, 2036 bp, Zea Mays
agacaagtgagactctcgtgagtaaatctgatatttggccacataacgctgctagggtttcttaacgctaaaaacctcatttgagcgtgtgaggtcgttggcctcgacccctctcgcgcactcgcgcttgcctgcacgctccagggcttcaggctcccctcccacctcgccgcggcagccatggcgatcacggcgccaactcccgacatccgcggcgagcgtcagtccggccaggacgtccgcacgcagaacgtgatggcgtgcggcgcgttgtccaacatcgtaaaatcctcgctcggccccgtcggtctcgacaagatgctagtggacgatatcggtgatgttacaatcactaatgatggtgcaaccatacttaagatgttggaagttgagcacccagctgccaaggttcttgttgagttggctgaactccaagaccgtgaggtaggagatggaacaacttccgttgtcatcatagcggcagagctgctcaagagagccaacgatcttgtgaagaataagatccatccaacctctataatcagtggctacaggcttgctatgcgtgaagcctgcaaatatgttgaggaaaaattggcagtcaaggttgacaaacttggaaaagactcccttatcaactctgcaaaaactagcatgtcttcaaagttgataaatagtgacagtgatttctttgcaactctggttgttgaagctgttcaagctgtgaagattacaaatgccaagggagaggtgaaatatccaatcaagagcatcaatattttgaaagctcatggtaaaagcgccaaggatagttacctgctaaatggctatgcactaaacacaggccgtgcagctcaaggaatgcctacgagagtaactcctgctagaattgcttgtcttgattttaaccttcagaagacaaaaatgcaacttggtgtccaagttctcgtaactgatccaagagaacttgagaagattcgtcagagagaatctgacataacaaaggagcggatcgataaaattctcaagtctggagctaatgttgtgttgaccactaagggaattgatgatatgtccttgaaggtgagtacatttgcagacatggaaggtgaagaaacatttgattcatcattccttggacatgctgatgaagttgtggaggaaagaattgctgatgatgatgttattctggtgaaaggcacaaagaacaccagcgcggtctctataatacttagaggcgcaaatgacttcatgcttgatgagattgaccgatcattgcatgatgccctgtgcattgtgaagagaaccctggaatcaaatatggttgttgctggtggtggtgcagttgaggctgcgttatcagtttaccttgagaaccttgcaacgaccttgggttctcgggaacaattggcaattgctgaatttgctgaatctttgttaatcataccaaaggtactttctgttaatgctgcaaaagatgcaactgagcttgtagcaaagcttagggcatatcatcatactgctcaaacaaaggccgataagcaacattattcaagtatgggtcttgacctctctaaaggtatcattcgcaacaaccttgagtatggcgtgatagagccatctatgagcaaagtgaagattattcagtttgccacggaggctgccattactatactgaggattgacgacatgatcaagcttaccaaggaagagggtaacgaagaagagtaatcagcccaccagtatctcttttgcgctggttgtcatagcgtgtaactttttttccttcccatttttccgtttagttttttgctggctgtgtgtgagcattcgtgtagggtgttgtaggaaaactgagaatgaaggtggtattaacgtatccccgtggcgtgacgttatttagacaacgacccacggatggatcaaattttgcgtgtattggggccaaaacagttctgcttcaaggattgaagttggaaatttgaattgttccgtgtactgatggactttttgctggttggcgacttcgcgtcagg

SEQ ID NO: 208381 - DNA, 723 bp, Zea Mays
cccccactccggcattcccccccaaaaaatcgagccgaaaaagatcaaaagaaaaaaaaaagaagaaaaaaaccctaaccactccgatcgaatcatccgagggccgcagcagcccggcgaggctatgtctcaggcaaccgccgcctcccgggatcgcttcccctggtgatacaactcgggccgttcatttcgtctttccgtagggatatgagggccgctccaaccgatccgcccacggcgccggcgaagtcgatgctgaggcggctgttcgatcgccagctcctgcggatctcaccagcggagcgtctaccatcggcgggggcgggagagaaggatgaggcggagccgagctccgtgtgcctggacggcatggtgcgcagcttcatggaggacgacgtcggcagcgagaaggctgcccacgggggccggtactgtaactgcttccacggaggcgataattcagatgacgaggaggacgacgaagcggcggcggcggcctccgacgtcgccgagacgatcaagacttagctgtggggcgatgttgatcgaatggaatgctggaaggaaaccttctggattgactgttgtgcacgcaatgctaacaggattagcagtaaacaaacccctgcccatgagaagatgcaattcttccgacttccagattaggttgttgaactgtctcctgcaaatatgctcttgatcttgaaagaaatataatattct

SEQ ID NO: 208382 - DNA, 3227 bp, Zea Mays
cactgagagagagggggtgtccctctccgctccgtcccagaaaacccggtatagcatgaaggaacgtttttttggcgtgttgatctctctcctcctccagtcctcccccgtcctgcaggagtaaagcctgttccaggggacgagaagggaagggttcttggggggagagggaagaagatggcgcgcaatgcggtggacaaggcgacgtctatcgatgcgcagctgcggctgctggccccgcagaagctctctgacgacgacaagcttgtcgagtacgacgccctgctcctcgaccggttcctcgacatcctacaggacctgcacggcgaggacatcagggagacggtgcaagaatgttacgagttagctgctgagtatgaaaataagcttgaccccaaaatgctggatgagattgggaatgtgctgaccagcttggatcctggagactccattgtcataaccaagtcattctcacacatgctgatcctggcaaacttggctgaggaggtacaaattgcataccgcaggagaataaaactgaagaagggtgactttgttgatgagaactcagcaacaactgaatcagacattgaggagacactaaagaggcttatgcatcagcttaagaaatcccctctggaggtatttgatgctctcaagaatcaaactgttgacctcgtcctgactgcacatccaactcagtcagtccggagatcattgcttcaaaagcatggcaggataagaaactgtttaactcaactttatgcaaaggacatcactccagatgagaaacaggaacttgatgaagcacttcaaagagagattcaagctgcctttagaactgatgaaatcaggcgggcgcctcctactccgcaggatgaaatgcgtgctggaatgagttattttcatgagactatatggaagggtgtacccaagttcttacgtagggttgacactgctcttaagaacattggcataaatgagcggttgccatataatgcccctatcattcagttttcttcttggatgggtggtgaccgtgatgggaatccaagagtcacgccagaggttacaagggatgtatgcttgttggctagaatgatggctgctaatttgtataatgcccagatagaagacctgatgtttgagttatctatgtggcgatgcagtgacgagttacgtgtaaaggtcgatcagttataccattcctccaagaaagatacgacaaaacactatatagagttctggaagcaagtccctcccagtgaaccttaccgtgtgattctgagtgatgtcagagataaactctataacacacgtgaacgagcacgtcacttattagctagtgggttttctgaaattccagaggaagcaaccttcaccgatgttgaacagttcttggagcctcttgagctctgttacagatctctgtgtgcctgtggtgatcgctctgttgcggatggaagccttcttgacttcttaaggcaagtgtcaacatttggactatcccttgttagacttgatatcaggcaagaatctgaccggcatactgatgttatggatgctataactgaatacctcggtattggatcataccgtaaatggccagaggagaaacgccaagaatggctactatcggaacttaatggaaagaggccgttatttggtccggaccttcccaagtcagatgagattgctgatgtactagatactttccacgtattagctgaacttccatcagacagctttggtgcatatgtaatatctatggcgactgctccctcagatgtccttgctgtggagctcttgcagcgtgaatgccatgtgaaaaaaccactgagagtcgttcctttgttcgaaaaactggcagatcttgagtcagcaccagcagcgttagctcggctgttctccgttgaatggtacagaaacaggatcagcggcaagcaggaagtgatgatcgggtattcagattctggcaaggatgccggtcgtttctctgctgcttggcaactgtacaaggctcaagaggagctcattaatgtcgctaagctgtatggggttaagctaaccatgttccacggacgaggcggaactgtgggaagaggtgggggccctacccatcttgctatactgtcacaacctccagaaaccatccatggatcacttagggtaaccgttcaaggcgaagtcattgagcagtctttcggagaggagcatttgtgctttaggacactgcaacgtttcacggctgcgacccttgaacatggtatgcaccctccaatttcgccgaaaccagaatggcgtgctttgatggatgagatggctatcgtcgccacaaaggaataccggtcaatcgtatttgaggaaccgcgctttgttgaatacttccgccttgcaacgccagagatggagtatggcaggatgaacatcggaagcaggccatcgaaaagaaagccgagtgcgggcatcgagtcgctgcgcgcaatcccttggatcttcgcttggacgcagactcggttccacctgccggtgtggctgggtttcggcgcggcgttcaagcatgtcttggacaaggacatacggaatctccagacccttcaggagatgtacaaccagtggccctttttcagggtgacgatagacctggtcgagatggtgttcgccaagggtgatcctggcatcgcggcgctgtacgacaagcttctggtctcagaggatctgtgggcattaggggcgcgtctcagagccaactacgaagaaacaaagcagcttctcctgcaggtcgctgggcacaaggaccttctggagggcgacccgtacctgaagcagaggctgcgcatccgtgactcgtacaccacggcgctgaacgtttgccaggcctacacgctgaagcgcatcagggaccctggcttccaggtgaagccgcggccccacctgtcgaaggacatcatggacatgggcaagccggcgtcggagctcgtgaagctgaacaccaccagcgagtacgccccggggctggaggacaccctcatcctgaccatgaagggcatcgctgccgggatgcagaacaccggctgaagccagtgtgcctgtcttctttctgtaggggatcatatcatatggcgtgatgaaccagtgaacacctggatatgtggggattagttacaccctgttgcactcgaatttatgccccgcttggccgcgcccttgtcgcatggtttccatat

SEQ ID NO: 208383 - DNA, 1088 bp, Zea Mays
aacatactcctacgcctgtctctgttcacaactcttccgagcacgcggccgtctcctttgtcatcatcatcagctcagatctagcagcttcgccttctcagacgcgcccacttcgcaaccgccgctgtgcctatgctaccgcatgggcctctgcgcctgggaggcttgcggctgccaggcttaagtcacggggcagcaggagttcagattttttttaggcctctgaaacaaggctagcgcatattagcatcgagagtcaggagagtacgaatgggaagtaccgtcataaaattatctttgctactagcaataggaagcaccgtcataaaattaactctggtaataaaatcgattggatatatattgtttctaggaaactaggaaggatcccgtgtagaaagtgtggatagctagcctttttcatcggatcatttggttttttcttgaaatatttctttcaaaacagtctcacttttttcttaagttgtattggtgctccctaagatcgaaagcaggaatactacttttctgtaaaatcacaaaaatgcacacatttgggacctttcctaagctgtgtcttcgagcaaccaaaaagctgatgttagtttattttcattttttttgagagaagaaaattctttgcttgatgcttaatcagagatgaaaatattgatcattttttacatgtgtgctgatcatttttttactggactgctgtcaggtataattggagtgctgtcataagtggagtgttgttagttacatgtgtgctgatcattctaatcacattgttcgtcgttaatcatgtgaagaaaatattcaaagttataacttgaatttttgttgaatctggcaattgtatggcctagaatttattgttcattagtcagaaagactacgttcattagttcaggtcttgctgatttactttgcagcaacatggtatataaacctgatgcattctctgatgaacagactttataagccatcactcacattctgatgaacagactttaattatcatggctagatgcacttattgttttcgtttgtactctataaatcaattacatgtttccttagtggaa

SEQ ID NO: 208384 - DNA, 1099 bp, Zea Mays
cctacgcctgtctctgttcacaactcttccgagcacgcggccgtctcctttgtcatcatcatcagctcagatctagcagcttcgccttctcagattcgtttgttctcgccagacgcgcccacttcgcaaccgccgctgtgcctatgctaccgcatgggcctctgcgcctgggaggcttgcggctgccaggcttaagtcacggggcagcaggagttcagattttttttaggcctctgaaacaaggctagcgcatattagcatcgagagtcaggagagtacgaatgggaagtaccgtcataaaattatctttgctactagcaataggaagcaccgtcataaaattaactctggtaataaaatcgattggatatatattgtttctaggaaactaggaaggatcccgtgtagaaagtgtggatagctagcctttttcatcggatcatttggttttttcttgaaatatttctttcaaaacagtctcacttttttcttaagttgtattggtgctccctaagatcgaaagcaggaatactacttttctgtaaaatcacaaaaatgcacacatttgggacctttcctaagctgtgtcttcgagcaaccaaaaagctgatgttagtttattttcattttttttgagagaagaaaattctttgcttgatgcttaatcagagatgaaaatattgatcattttttacatgtgtgctgatcatttttttactggactgctgtcaggtataattggagtgctgtcataagtggagtgttgttagttacatgtgtgctgatcattctaatcacattgttcgtcgttaatcatgtgaagaaaatattcaaagttataacttgaatttttgttgaatctggcaattgtatggcctagaatttattgttcattagtcagaaagactacgttcattagttcaggtcttgctgatttactttgcagcaacatggtatataaacctgatgcattctctgatgaacagactttataagccatcactcacattctgatgaacagactttaattatcatggctagatgcacttattgttttcgtttgtactctataaatcaattacatgtttccttagtggaa

SEQ ID NO: 208385 - DNA, 2536 bp, Zea Mays
caaaaaaaaaaaaaaaactcttcgtccctactcccctgcagagtgcagtgtgcagacacccgaggagccgagacagagaagcagtgaagggaacccgcgcgctttctcccgacgtgcaccggaaatggtggtcgtggacgcgtcggagttcggggcggagggcttcgacccgaagcggtggatcaacgcggcgctggacgcgcggcacccgtcggagcctctcgatcgcttcctcgccgacgccgaggagcgcctgcgttccgcggccgacgacgccgcggccgcgctcgagagggatagcggcgacgccctccgccgcgtcccgttggcatgccgcgacgcgctgcgcctccgcgacgacgccgtcgccctacgctcccacctcgcctccgtcctccagtccctctccctggctgagggctcatccgcagaatcaatagctgcactagcgcgtattgacactgtgaaacagcgcatggaagccgcatacacaacattgcaggatgctgctgggttagctcagttgagccagagtgttgaggatgtgttttctagtggcaatcttccaaaagctgcagaaaccctggcaactatgagacattgcttgtcagcagttggagaggttgccgagtttgcaaacgtcagaaaacaacttgaagtattggaagaaaggctagatgaaatggtgcagcctcgattagtagatgcactttctaatcgcaaggtgcttgactgctttccctgacgaatacaaatcacttgtaccaaaagtacttactgagaccatgagtgagttgaattcaagctttgtctctcgtataaatatagcaaccggggatgttattcctgaaaccagatctattgccaaaggtatattggatgttctatcaggtgacttaccaaaaagcaccaaattgcagaataagcatcttcaagcgctaattgaactgcacaatatgactggcacttttgctaggaacattcagtacttattttcagaatcagatcttgcagttgtgctgaatactttgaaagctatttattctccatatgaaacctttaaagcaaggtatgggcagatggagcgtgctatactctctgctgagatgacaagtatcgacatccgtggggccgtccctcgtggtgttggtgcacagggtatagagctgagcgaaactgtccgcagaatggaggaatccatcccagaaatgatagtactccttgaggcagctgtggagagatgcattagtctgactggtggttcagaagcagatgaactggtactggctcttgatgacgtcatgctgcagtacatatctaatctccaagaaacattgaagtccctgaggataatctgtggactggatagtgatgccttgaaaaaagatgcaggtttagagaaaaaggaagtacaacgattggtggatgtttctgaagaggaagaatggtctattgtccaaggtgctttgcaaattcttacagttgctgattgcctaactagcagaacctcagtctttgaagcttctttaagagctacacttgccaggattggaacaaacttttctgtttctggatttggctcaagcctggataaatcacctgcagcaactgctgatgagaatgcagacttgtcttttgctgggagggctgcgctggacattgcagctattcgcttaagtgatctgccagataagtctaagaagttcttaactgtgctagaacagtcaaaagatccaagattccatgctcttcctctcacatcacaaagagttgcagccttctcagacacagtaaatgaactcgtctatgatgtgctcatatctaaggttcggcagcgtctcagtgaggtcgcacgccttccaatctggtcatccgtggaggaacagggtggtcttcctcttccaagcttcagtgcctacccgcaagcatacgtgaccagcgttggggagtatctcctcactttaccacagcagctggagccactcgcggaaggtatctcaggcaatgaggctggcaacgatgaggcccagttctttgccaccgagtggatttttaaggtcgccgaaggtgccactgctttgttcatggagcagctccgaggaatccactacatcaccgaccgaggttcacagcagctcgctgctgacattgagtacctaaacaatgtcctctctgcgctctcgatgccaatccctccattcctgtctaccttccacgcctgcgtctccaccccgagggaccaggtccgtgatctgatcaaatctgatggtgcaagccagctcgacctccctactacccatctggtctgcaagatccggcggatcacattagattagtgaaatcgtcctaacttctccccctttccatgaggtttacctctgtaaaagcatgcattaccgcacgcttctgcgatcgtatgtttggcatgcgggcttgtagcttgttgcttcaccttttttttcttgccttgtaaccgtactgctggcacatagtgagaataatcctatatagaataattcattacttggagcctata

SEQ ID NO: 208386 - DNA, 1764 bp, Zea Mays
cttgtttttcccctgtggcctcagtgatagtaaattgccaaggctgttgtaatgggggtcaacggtcatcacgaacctcgcagaggatgtaatggcaccgtctgcaatggtagtgtaagatcactagatcattttggtgatgtagatccatggacggcatgggcatacaagcctcgaacgatctcgctcttgctgatgggaacatgctttttaatttgggcaagtggtgctctcgatccagaacggagctcatctgctgatcgtgtttcgtcagtcaagaggggtgtatttgcgatgattgctgtttttttggcttactcttttcttcaggcgccttcaactgtactcattagaccacatcctgccatttggaggctagttcatgggatggcagttgtttaccttgtcgccctcactttcttgcttttccagactcgtgatgatgctaggcaattcatgaagtatcttcatcctgatcttggtgtcgaattacctgaaagatcatatggaactgattgccgcatatatgtacctgaccatccgaaaagcaggtttaacaatgtttatgagataatttttgatgagtttgttatcgctcatatcctcggatggtggggtaaggctataatgatacgaaaccaaccacttttgtgggtgttatcaattgggtttgaattaatggagctcacttttcgccatatgttgccaaatttcaacgagtgctggtgggacagcattgtcctagacatattgatctgcaattggtttggtatttggactggaatgagaactgtgcggtacttcgatgggaggacatacgaatgggttggtttgagccgccaacccaacattatcagtaaggtaaaaaggatgctgggacagttcacaccagcgcagtgggacaaggatgagtggcaccctacgcggggtccttggagattcatccaggtgctgagcctctgcgttgttttcatggctgtcgagctgaacacattcttcctcaagttctgcctgtggatccctccgcggaaccccttgattgtctatcggctggtcctttggtggttaatcgcgataccaaccatccgcgagtacaatacctacttgcaagacagcaaaccatttaaaaaggtgggatccttctgctggctttccctggctatatgcattgtggagctcctaatctgcatcaagtttggacacggtctgtttccaaagtcaatgccttcgtggctgatcacattctggtcagcagtcgccttgcttctcgtgctctttgtgtggacgtggaaataccgaacaatgaaaaggaaaatgatataattgtgaccaaaaaaatgatttgtttgcctccattctttacccgatttagtgttatcgtgtacataaaaatttattcaaattgtgtacatgtgctagcagtcaagtcttggtgatctgaagaggattatccatgagaaatttctatgccttctttgtctttgtattttccgtcagcgaagtaggatactggttcccctttggccctttaattcgtctgtattgccgcgtactacttcgttggccgtctcttaaatgtggagaacccttgatgcaacaacctatgaaataatgggattcgaatcccaaactgttgaataatgtttctcgatggcccaggaaaccatatctgcaggttgcacgacactaacactgacgtgggcacggaaattaactgcatcgtttccttttagtgaagcagcagactatatagtcctatctgtg

SEQ ID NO: 208387 - DNA, 1769 bp, Zea Mays
tgacaacttgtacttagcaaaatagtaaattgccaaggctgttgtaatgggggtcaacggtcatcacgaacctcgcagaggatgtaatggcaccgtctgcaatggtagtgtaagatcactagatcattttggtgatgtagatccatggacggcatgggcatacaagcctcgaacgatctcgctcttgctgatgggaacatgctttttaatttgggcaagtggtgctctcgatccagaacggagctcatctgctgatcgtgtttcgtcagtcaagaggggtgtatttgcgatgattgctgtttttttggcttactcttttcttcaggcgccttcaactgtactcattagaccacatcctgccatttggaggctagttcatgggatggcagttgtttaccttgtcgccctcactttcttgcttttccagactcgtgatgatgctaggcaattcatgaagtatcttcatcctgatcttggtgtcgaattacctgaaagatcatatggaactgattgccgcatatatgtacctgaccatccgaaaagcaggtttaacaatgtttatttttttctaggagataatttttgatgagtttgttatcgctcatatcctcggatggtggggtaaggctataatgatacgaaaccaaccacttttgtgggtgttatcaattgggtttgaattaatggagctcacttttcgccatatgttgccaaatttcaacgagtgctggtgggacagcattgtcctagacatattgatctgcaattggtttggtatttggactggaatgagaactgtgcggtacttcgatgggaggacatacgaatgggttggtttgagccgccaacccaacattatcagtaaggtaaaaaggatgctgggacagttcacaccagcgcagtgggacaaggatgagtggcaccctacgcggggtccttggagattcatccaggtgctgagcctctgcgttgttttcatggctgtcgagctgaacacattcttcctcaagttctgcctgtggatccctccgcggaaccccttgattgtctatcggctggtcctttggtggttaatcgcgataccaaccatccgcgagtacaatacctacttgcaagacagcaaaccatttaaaaaggtgggatccttctgctggctttccctggctatatgcattgtggagctcctaatctgcatcaagtttggacacggtctgtttccaaagtcaatgccttcgtggctgatcacattctggtcagcagtcgccttgcttctcgtgctctttgtgtggacgtggaaataccgaacaatgaaaaggaaaatgatataattgtgaccaaaaaaatgatttgtttgcctccattctttacccgatttagtgttatcgtgtacataaaaatttattcaaattgtgtacatgtgctagcagtcaagtcttggtgatctgaagaggattatccatgagaaatttctatgccttctttgtctttgtattttccgtcagcgaagtaggatactggttcccctttggccctttaattcgtctgtattgccgcgtactacttcgttggccgtctcttaaatgtggagaacccttgatgcaacaacctatgaaataatgggattcgaatcccaaactgttgaataatgtttctcgatggcccaggaaaccatatctgcaggttgcacgacactaacactgacgtgggcacggaaattaactgcatcgtttccttttagtgaagcagcagactatatagtcctatctgtg

SEQ ID NO: 208388 - DNA, 2092 bp, Zea Mays
gtcggccctaattatttccacagttttttaacccgcgggctgttttatatgtgtttctttttgaattgctcgatcccttctggcgctcttcatcttcttccgtggaatggatttttcctttgctcggccttgccctttgctgcctcaggtcccgtctgttttgctctaacgcagcatctggttgcagcagcacaccacaccccttctgttgttttggaataactggaagcctttcgggtttggaatttggcacctagcctgaatgccaccgaaaccattttggagatgagtgggattcattaagtgatccctggcaaatgattgagcaagcagtgacaacttgtacttagcaaaatagtaaattgccaaggctgttgtaatgggggtcaacggtcatcacgaacctcgcagaggatgtaatggcaccgtctgcaatggtagtgtaagatcactagatcattttggtgatgtagatccatggacggcatgggcatacaagcctcgaacgatctcgctcttgctgatgggaacatgctttttaatttgggcaagtggtgctctcgatccagaacggagctcatctgctgatcgtgtttcgtcagtcaagaggggtgtatttgcgatgattgctgtttttttggcttactcttttcttcaggcgccttcaactgtactcattagaccacatcctgccatttggaggctagttcatgggatggcagttgtttaccttgtcgccctcactttcttgcttttccagactcgtgatgatgctaggcaattcatgaagtatcttcatcctgatcttggtgtcgaattacctgaaagatcatatggaactgattgccgcatatatgtacctgaccatccgaaaagcaggtttaacaatgtttatgagataatttttgatgagtttgttatcgctcatatcctcggatggtggggtaaggctataatgatacgaaaccaaccacttttgtgggtgttatcaattgggtttgaattaatggagctcacttttcgccatatgttgccaaatttcaacgagtgctggtgggacagcattgtcctagacatattgatctgcaattggtttggtatttggactggaatgagaactgtgcggtacttcgatgggaggacatacgaatgggttggtttgagccgccaacccaacattatcagtaaggtaaaaaggatgctgggacagttcacaccagcgcagtgggacaaggatgagtggcaccctacgcggggtccttggagattcatccaggtgctgagcctctgcgttgttttcatggctgtcgagctgaacacattcttcctcaagttctgcctgtggatccctccgcggaaccccttgattgtctatcggctggtcctttggtggttaatcgcgataccaaccatccgcgagtacaatacctacttgcaagacagcaaaccatttaaaaaggtgggatccttctgctggctttccctggctatatgcattgtggagctcctaatctgcatcaagtttggacacggtctgtttccaaagtcaatgccttcgtggctgatcacattctggtcagcagtcgccttgcttctcgtgctctttgtgtggacgtggaaataccgaacaatgaaaaggaaaatgatataattgtgaccaaaaaaatgatttgtttgcctccattctttacccgatttagtgttatcgtgtacataaaaatttattcaaattgtgtacatgtgctagcagtcaagtcttggtgatctgaagaggattatccatgagaaatttctatgccttctttgtctttgtattttccgtcagcgaagtaggatactggttcccctttggccctttaattcgtctgtattgccgcgtactacttcgttggccgtctcttaaatgtggagaacccttgatgcaacaacctatgaaataatgggattcgaatcccaaactgttgaataatgtttctcgatggcccaggaaaccatatctgcaggttgcacgacactaacactgacgtgggcacggaaattaactgcatcgtttccttttagtgaagcagcagactatatagtcctatctgtg

SEQ ID NO: 208389 - DNA, 1793 bp, Zea Mays
caacggaacgccgccttttccggtgttttatgctgttgttaatgcccagtgccgtatagtaaattgccaaggctgttgtaatgggggtcaacggtcatcacgaacctcgcagaggatgtaatggcaccgtctgcaatggtagtgtaagatcactagatcattttggtgatgtagatccatggacggcatgggcatacaagcctcgaacgatctcgctcttgctgatgggaacatgctttttaatttgggcaagtggtgctctcgatccagaacggagctcatctgctgatcgtgtttcgtcagtcaagaggggtgtatttgcgatgattgctgtttttttggcttactcttttcttcaggcgccttcaactgtactcattagaccacatcctgccatttggaggctagttcatgggatggcagttgtttaccttgtcgccctcactttcttgcttttccagactcgtgatgatgctaggcaattcatgaagtatcttcatcctgatcttggtgtcgaattacctgaaagatcatatggaactgattgccgcatatatgtacctgaccatccgaaaagcaggtttaacaatgtttatgagataatttttgatgagtttgttatcgctcatatcctcggatggtggggtaaggctataatgatacgaaaccaaccacttttgtgggtgttatcaattgggtttgaattaatggagctcacttttcgccatatgttgccaaatttcaacgagtgctggtgggacagcattgtcctagacatattgatctgcaattggtttggtatttggactggaatgagaactgtgcggtacttcgatgggaggacatacgaatgggttggtttgagccgccaacccaacattatcagtaaggtaaaaaggatgctgggacagttcacaccagcgcagtgggacaaggatgagtggcaccctacgcggggtccttggagattcatccaggtgctgagcctctgcgttgttttcatggctgtcgagctgaacacattcttcctcaagttctgcctgtggatccctccgcggaaccccttgattgtctatcggctggtcctttggtggttaatcgcgataccaaccatccgcgagtacaatacctacttgcaagacagcaaaccatttaaaaaggtgggatccttctgctggctttccctggctatatgcattgtggagctcctaatctgcatcaagtttggacacggtctgtttccaaagtcaatgccttcgtggctgatcacattctggtcagcagtcgccttgcttctcgtgctctttgtgtggacgtggaaataccgaacaatgaaaaggaaaatgatataattgtgaccaaaaaaatgatttgtttgcctccattctttacccgatttagtgttatcgtgtacataaaaatttattcaaattgtgtacatgtgctagcagtcaagtcttggtgatctgaagaggattatccatgagaaatttctatgccttctttgtctttgtattttccgtcagcgaagtaggatactggttcccctttggccctttaattcgtctgtattgccgcgtactacttcgttggccgtctcttaaatgtggagaacccttgatgcaacaacctatgaaataatgggattcgaatcccaaactgttgaataatgtttctcgatggcccaggaaaccatatctgcaggttgcacgacactaacactgacgtgggcacggaaattaactgcatcgtttccttttagtgaagcagcagactatatagtcctatctgtg

SEQ ID NO: 208390 - DNA, 2284 bp, Zea Mays
ctacctctgtctatgagagagaaagagagcgtttaaaaaaattaaaagaaaaaacagaggggagagtgaaccatcatcaatgctccaatgatcccccttcaagactccgattcctttctcccccctctctctatctcgagccttttctttgaccgcctctctctctaacctcttatataagatgagaagattcgctcttcaccgcctcgcagggctacactccattctatccctctctatatccccccgcaccctctcctggtcctggccatctccatctcccgtctctctctctctctacgaactccacctcgcgaacagccgctgcttgcctgccgcgttggagagaacggaagaaaagcgagcgagggagagggacagcaactccctcggtcgctttcgacggcctggatctccccgcacgcgggatcgtacgaccggcacgctgttgtcgctttccaccgcatagtaaattgccaaggctgttgtaatgggggtcaacggtcatcacgaacctcgcagaggatgtaatggcaccgtctgcaatggtagtgtaagatcactagatcattttggtgatgtagatccatggacggcatgggcatacaagcctcgaacgatctcgctcttgctgatgggaacatgctttttaatttgggcaagtggtgctctcgatccagaacggagctcatctgctgatcgtgtttcgtcagtcaagaggggtgtatttgcgatgattgctgtttttttggcttactcttttcttcaggcgccttcaactgtactcattagaccacatcctgccatttggaggctagttcatgggatggcagttgtttaccttgtcgccctcactttcttgcttttccaggggtgctttcaccccctcctgccgaagattgaaaccagatcaggagctatgcactgctgtatttccaccatactcgtgatgatgctaggcaattcatgaagtatcttcatcctgatcttggtgtcgaattacctgaaagatcatatggaactgattgccgcatatatgtacctgaccatccgaaaagcaggtttaacaatgtttatttttttctaggagataatttttgatgagtttgttatcgctcatatcctcggatggtggggtaaggctataatgatacgaaaccaaccacttttgtgggtgttatcaattgggtttgaattaatggagctcacttttcgccatatgttgccaaatttcaacgagtgctggtgggacagcattgtcctagacatattgatctgcaattggtttggtatttggactggaatgagaactgtgcggtacttcgatgggaggacatacgaatgggttggtttgagccgccaacccaacattatcagtaaggtaaaaaggatgctgggacagttcacaccagcgcagtgggacaaggatgagtggcaccctacgcggggtccttggagattcatccaggtgctgagcctctgcgttgttttcatggctgtcgagctgaacacattcttcctcaagttctgcctgtggatccctccgcggaaccccttgattgtctatcggctggtcctttggtggttaatcgcgataccaaccatccgcgagtacaatacctacttgcaagacagcaaaccatttaaaaaggtgggatccttctgctggctttccctggctatatgcattgtggagctcctaatctgcatcaagtttggacacggtctgtttccaaagtcaatgccttcgtggctgatcacattctggtcagcagtcgccttgcttctcgtgctctttgtgtggacgtggaaataccgaacaatgaaaaggaaaatgatataattgtgaccaaaaaaatgatttgtttgcctccattctttacccgatttagtgttatcgtgtacataaaaatttattcaaattgtgtacatgtgctagcagtcaagtcttggtgatctgaagaggattatccatgagaaatttctatgccttctttgtctttgtattttccgtcagcgaagtaggatactggttcccctttggccctttaattcgtctgtattgccgcgtactacttcgttggccgtctcttaaatgtggagaacccttgatgcaacaacctatgaaataatgggattcgaatcccaaactgttgaataatgtttctcgatggcccaggaaaccatatctgcaggttgcacgacactaacactgacgtgggcacggaaattaactgcatcgtttccttttagtgaagcagcagactatatagtcctatctgtg

SEQ ID NO: 208391 - DNA, 1585 bp, Zea Mays
ctccagtctctccactccaccactgctcgtctaacccggtcttcaaatttgagcttttctctctctctctctctctctctctctctctctgcgccaacaaattctccagccttacagtagattttggtggccatttggtacaggcgtcggactcccaggaggatgaccggtggcaagaggttcggcggcgggcgggtgccgacggggaccccgtccctcgcgtggtcgtccgtcgtcatcgtcgcctccctcctcgttggcgcctccatcgtccacaacatctacaagcctgacatgaccattccacctgtggagggtgccgccggcggcggcggccaagaaagctgagctacgaatggctggacactgcatgcaagagaggaggctgggcatgggagtagtgagggaccggccatcagcacctttttttttttgttctagaacaaaaacgatattatgttgttcttttctgttttgctaccaaaagatgtgaggctgcatagtatttgcttcgttaggcgctactggtcacgcgtaaccatggtatatgtacgttgattttgttttttctaatgcctaataatcactacactcaaaatgtacgggcttgtggtggcactgcggcgggaggtggttggttggttccacttccatccaggctgctccgtggatgcgacggtgattcacgagcggatacgcaagtgtagctgtggcctgcacttggggccggattgtgacccattatcaggcttaggcctgcgtgcggggtcgtttgccgttgtgtacacatggaagaacggggcaccaagtcttgcttccattgccgccgccccttccgtgcacgcgcgcacggcgcacctatacatatgcaccgccccatgccccgcacgccctccctctcccagcgacaccagagagccgaatttacttcgttctcagcctccgttgcccctcgcgcgcgttacgctgtaccaccaggctcgatcggtcgatcctttgctgggcgtcagagaagcatggcagcagctggcaagtcgtcggccatggaggaggtggtggcggcggcggattgactggcaggccgttgacaggggcatcgcctacctgctcatggtggccacgtacgcgcttcactagagccgtcttggcttcggtctgctccggccggcggcagagatcacgggaaggaaggctttgtgagctctgcttcccggcctcagcgtgagagttcccccgcgccaaacttcattcgtttctcttccactcttcctcttgtatggagatggagatggagatatgcctgtgtctttaccactagaaaaaaatgttgttttttctattgtctttctgtgattattctgtgcaaaatggtcaattgttgccaaaacgatcaatgttaccatggtttcggcttgcgtctatcttctgttgtgattgggttcgacattcagagtttgcacaaggccatacatagcatacatatatggcagagtttgcagcgtgaggaaaactgtcatcgccgtgtattttagcattatacataacataccccatccgttcattccaataggcatataagctacca

SEQ ID NO: 208392 - DNA, 1268 bp, Zea Mays
gcgcgacccttactcccaccgtcccacggccacgggcttgcggccagctcccctcgccgatcgtttccaccaaatccaccggtcttgcggccccatcttccgctccgacgatcccggggactttccagtaagtagcagcctcaagcaccaattcgtctctctgccgaagttaccaagggcaccccagttcgccgaggtggatcggtagcaaaaaccgatactgaggttgtggatggtggaagagctatctgtgtacaatggaaccaacgaggagttgcccatattactcgcgattttgggctcagtgtttgatgtcacgaaagggaggtcacattatggtcctggaggaggttatcatcactttgctgggagggatgcatcacgagcatttgtttctggaaattttacaggtgatggtctgactgattctttacagggtttatcaagtagtgaggtaaacagcgtagttgattggaggaaattttacttcgaaagatacatatttgctggtaaacttattggacgttactacgacagtgaaggaaatcctacgaaatatctgaagggtgtagaagtgaaggcaaagagaggtacacagcttcttgaaaaacagaagagtgatgaagctaaaatacctggctgcaattcaaaatggagccagcaagaaggtggtgaagtttggtgcgacgcgggctacccaagactggtgaggaggccaggcgacatagctctgaccggacaagttagccaaaggtgcgcttgtttccaggaaaacgagctcgacaaagccgggctagtggtgtacgaagggtgtgattacttgagccagtcttgcaaagtaaactaggctgtacatatctatccccttcccttcgtccacgaacctgtactcagcgcaaccagccacgcatcatgatgggctgggccttctgttccgtcccgcactcccgcatccatcctctcgaaacacctggtgctgcaacgtcgtgtttcagaagccaagatacgcgattgatttgattggaagatacgtgcaaccgaatcaaatgatggtaacactggcgctgccgccgtgcattattcgtgtagcgcaagatcgatcttaaaggctgtccgtgttattgtgttaatagccatggggccttggctgtcgatggatcgagtcgatgctgccttgcaagttgcaccgtcggcatcatctttcaagtctctttatcacactacatatttcaaactctgtattctacatgtatgccaatgaattgaag

SEQ ID NO: 208393 - DNA, 1345 bp, Zea Mays
gcgcgacccttactcccaccgtcccacggccacgggcttgcggccagctcccctcgccgatcgtttccaccaaatccaccggtcttgcggccccatcttccgctccgacgatcccggggactttccagtaagtagcagcctcaagcaccaattcgtctctctgccgaagttaccaagggcaccccagttcgccgaggtggatcggtagcaaaaaccgatactggtacgttgccatggaggcagtttgatttggtggacctaacggccttccggatctcttgggagccagagcgatggcgcgcggcgctcgctttctccttgttctcgcgttgctcgccgcgctactcgccgtcgtcctccagctctaccgccacaggaagccgaggttgtggatggtggaagagctatctgtgtacaatggaaccaacgaggagttgcccatattactcgcgattttgggctcagtgtttgatgtcacgaaagggaggtcacattatggtcctggaggaggttatcatcactttgctgggagggatgcatcacgagcatttgtttctggaaattttacaggtgatggtctgactgattctttacagggtttatcaagtagtgagtgaaggaaatcctacgaaatatctgaagggtgtagaagtgaaggcaaagagaggtacacagcttcttgaaaaacagaagagtgatgaagctaaaatacctggctgcaattcaaaatggagccagcaagaaggtggtgaagtttggtgcgacgcgggctacccaagactggtgaggaggccaggcgacatagctctgaccggacaagttagccaaaggtgcgcttgtttccaggaaaacgagctcgacaaagccgggctagtggtgtacgaagggtgtgattacttgagccagtcttgcaaagtaaactaggctgtacatatctatccccttcccttcgtccacgaacctgtactcagcgcaaccagccacgcatcatgatgggctgggccttctgttccgtcccgcactcccgcatccatcctctcgaaacacctggtgctgcaacgtcgtgtttcagaagccaagatacgcgattgatttgattggaagatacgtgcaaccgaatcaaatgatggtaacactggcgctgccgccgtgcattattcgtgtagcgcaagatcgatcttaaaggctgtccgtgttattgtgttaatagccatggggccttggctgtcgatggatcgagtcgatgctgccttgcaagttgcaccgtcggcatcatctttcaagtctctttatcacactacatatttcaaactctgtattctacatgtatgccaatgaattgaag

SEQ ID NO: 208394 - DNA, 2986 bp, Zea Mays
  misc_feature (1)..(2): n is a, c, g, or t
nnaagcttgtggatgtgaaggataataattctgtatcagcaacgaagcgcctcgcaacaactgatcaaacgtaccaaccctctgtattccaaactcctgctcctactcgcaaaggtctgtcagtagcagtagattctcctacttcatttcattgtggccggacaaacttcaactatgtttctactgaaaacttggacaattctcaaagcacaccaggaacgttgatcaccacaacacttcctggtgtgaatgatcaacaatcaggaaatttggaacctcaacgggaggttcagttgtatgatgtgcagacatatactcttgctacacagcttcctgataacactagcagttcaggttcgggccggggttacatacaacccattatacatttcagtccttcagacacaatgttgctttggaatggagtcctgtgggatacaaggcagccaaattttgtacatcagtttgaccagttcacagattactgtggtggtggcttccatccggcaggaaacgaggtgatcttaaattcggaggtgtgggatctgaggaagttcaagcttttacggagtgtcccttccctggaccagacagtaataaagttcaacggcactggtgatgttatctatgccatcctgaggcgtaatcttgatgacgtgacatcatccatcaatgctcggagggtcaggcatcctcttttccctgcattccgcacgattgatgcggtgacttactcggatattgcaaccgtccaaatcgaccgctgcgtacttgatcttgccactgagcccaatgattctcttattggggtggttgctatggacgatcaccaggagcttttctcttctgcccgcttgttcgaagttggcaggaagcgaataaccgatgacgattcagacccggaggatgcaggtgaaaccgacgatgacgacgacgacgatggcgactctgatgatgatgttctccttgcgccggtgctggaaggggatacagattccgaagagattagtagcagcagcgatgatggtgatgaagatggtggtgacgatgatatccccagttcggatgacattgaagatgacccagagtacattgatggtggtggtgattttgaagggggagggggcttgatggatattttgggtgatgacgaaggggaaggcgatgagagtgatatgatggaatcctttagcagtggcgacgaggagggttggatcatgtagtttttttttgggtagtgcagccctgccgaagatggagcatggccctgtacaagtcaatatttatacgctcacattatgattgtaattattatttcctggttcttttgagcagctcctgccctgctagggaaatgtggaacataatggaagatggtgtaagtaaaggtgggaagagaacaatctaataccaatcgattaaaaatctatctatctattaattaattaatttatttgtggtgtgtgatctgactttggttgtggtgctcactgtcaatgaaggtcgatgctaactgctgatacctgcttccttttcttgttaagatgtcatgagagagaatcctaccactgaatattttcatcaataccatcaccattatgatagtgtatagtttgactgaaattcatgttacaggcacgcattacaacacaaaactaccaatggcaggcaagatactaagagtcagatttggagtctgctcataatcatgtcgaactctccgctggcgtgcacctgccgcaccgttctgtcgtagtcgtcgtcatcgtcatggtcgtcttcttcttcctgttgctctgcttcgtcgggcctggacggtggcttgggcaccgtctgcgcctcctgcacgatcctcaagatctcctccacgctctgcgacgagtaggcgggtgctgctgtcgcattattgctgctgctgctgctgctgtctccctggcggctgtagtagtaggctgcctgcgcctcctccttgagctccctcggcaggttcttgaggtaccaggggtgggtcttgatctcgctcatggtgatcctcttgtacgggttctggacgaagatgcgggagaggaggtggcggcagttgtgggagacgtgcacgtactcggggatcttgtactgaaccgacatgatgcgctgtattgtcttcctgaagttctttgggtcctttggatcctcgaacgggtacgcccccaccagcatgacgtagagcgtgactccgcacgaccagacgtcggcgtgcttcccgtcgtactctcgccgcgacagcacctcgggcgcgatgtacgccggcgtgcccaccgttgacttcggtcgcgagtgcagcaccgaggacttggagtagccgaagtcgcagatcttgaggcgcggcgccgggctgccgtccagcagcgtgttctccagcttgaggtcccggtggcagatgttcatggcgtggcagaagctgacgccgcaaaccagctgctggaagaagtagcgcgcctcgtcctcgtggaaccgcccggcgtcgcagatgcgctcgaacagctccccgcccgcagcgtactccatcacgatcgcaaggtgcgtgggagtcagcaccacctccttgaaccggatgatgttggggtggcggagggagcggtggttcacgatctcgcggaacacgttctcgtcgatctatcaattaatccatcaattagatactagctagcaaagaagacgcgacggctagactgactactcaccctgtttcctcgctctatgaacttcatggccaccagctccctcgtgtccttgttcctcatcagcttggccaccccgaagttgcccgccccgatctcgcgaacgggctcgtacttgtccatcggatcccttgccttcctagctagcttatcttgccttatcgtggattggaggtcagctagcagggagggagaagacgacgaagggggatgtgggtggagctgagtcactagtcagtcagtccagacggaggagcaggtgctgc

SEQ ID NO: 208395 - DNA, 3382 bp, Zea Mays
cgcctggttgtgcctcctcctgttcggcttcggccgttccctgcttgatctcgacttgctgtagcggtttacagttacgtgtgcctccattagctaaaggccaaacggctccgcatcgcgcggtgggtgtgtcttacaggtagggacgctaagaggtggcccgcgggtcagagtcgctggtgaagtggggttagtgggggcgggtatgtaatcatcgcagggttaaagggccatttgggtgtggtttattattaccacgaggggaggggagctcgagctcgctgctagtgctaatggcggagagcgatggtggcagcgaggcgcagagtccgagccctgatccaaggtccggggacggggcgaaccctgacccgcgcccgccgcggccgcagctcaccaagtcgcgcaccatctctggttctgttgcagcctccatattggccgctgatagggtagcaggaggaggaggcggaagcggcggaggcggtctaagggacagcatcctcgttcgccgctcctccacggcgcccctcccgccgtatacggcgtcagcggcgggggcgtcctcggcgccgcggcggctcaccgtcgccgtggacgacccctcctacgcggcacccaacggcggcgtgcttgaccgggactggtgctacccgtcgttcctaggtccgcacgcctcgcgcccccgcccgccgcggcagcagcagaccgcgacgactaccgaacgccgaagcgctaaccccaccgtgccggtgccgccgagggtggcggtgtcgcagcgggaggaggagaagagcctggcctccgtggtgaagcgcccggcgctgcttgaggagcggaggacgcctcctcctacgctcccgcccccacgcgctccgcgatttgatctctctccgtatctctcactcctgctggtcataactatcgcaagctctaccctcgctgtttggcaatggataaaagttatgggcctccaggaaaagatcagatcatgcagcgaggccaatgctggggaccgtgatggtaccgagaaggtgtcttggattgacagggaccatggctctgctttttttggttcgcggagatggaatttagctcaatctagtaccatctttgctcttgcaattcctttgtttctgtttaagtacattgatctgctccgacgcagacaaacaaattccatgagaggaagaagtggtgaggaagaagtacctctcaagaagaggatcgcctacaaagttgatgtgttcttctcaggacacccatatgccaagcttcttgccctcctattagccaccataattctcattgctttgggtggaattgcgctgtatgttgttagtggaagtggattcctggaggctctctggctttcctggacttttgtggcagattctggaaaccatgccgaccagattggcttggggccgaggattgtatccgtgtcaattagctctggaggcatgctggtgtttgccacaatgcttgggcttgtgtcagatgcaatatcagagaaggtggattcttggcgcaagggaaaaagtgaggtgatagagatcaaccacatactaatcctcggatggagtgataagctgggctctcttctgaagcagctagctatagcaaacaagagtattggtggtggtgtagttgttgttctagctgaaagggacaaggaagagatggagatggacatagcaaagttagaatttgacttcatgggaacatctgtaatatgcaggagtggcagtcctctaattctagcagacttgaagaaggtttctgtttctaaagcacgggccattattgttttagcatctgatgaaaacgcagaccaaagtgatgcacgggcattgcgtgttgtgctgagtctgactggagtcaaggagggtctaagaggccatgttgttgtagagatgagtgatcttgataatgaacctttagtgaaactggttggtggtgaactaattgaaacagttgttgcccatgacgtgattggacgtctgatgatacaatgtgcactccaacctggccttgcacagatatgggaagacatattgggatttgaaaatgcagagttttatattaagcaatggccagaattggatggcatgcggtttggggatgtgttgatctcatttcctgatgccgtaccttgtggagtcaaggttgcttcaaaatctggaaagatcttgatgaatcctgatgatggttatgttttaagagaaggagatgaggtccttgttattgcagaagatgatgatacttatgctcctgcccctctaccagaggtgaataagggttttctgcctaacataccaacccctcccaaatatccagagaaaattttgttctgtggttggcgccgtgacatccatgatatgataatggttctggaagcatttcttgctccaggttctgaattatggatgttcaatgaagtgccggagaaggagagggagataaaactgactgacggtggtttggatataggcgggttaataaacattaaacttgtacataaagaaggcaatgctgttatcaggcgacacttggaaagcttgcctctggagacatttgactctatgagtcagtagaggactccattgtacattctgattcgcgttctttggccacacttcttcttattcgtgacattcagtctaagcgtctcccatcgaaggagctgaagtcacctcatcgttacaatggcttctctcacagtgcctggattagagaaatgcaacatgcatcagacaaatctataatcatcagcgaaatacttgattctagaacaagaaaccttgtatctgtctccaaaatcagcgattatgttctatcaaatgagcttgtaagtatggcactagcaatggtagcggaagacaaacaaataaacagagttcttgaagaactttttgctgaggagggaaatgagatgtgcattcggtctgctgaattttacctttatgagcaagaggaattgagtttctttgatattatggttagggcgcgtgagagagatgagattgtgattggctaccgtcttgctaacaccgaccaggctatcattaacccagaatataagtctcagattaggaagtggtcactagatgatgtctttgttgtcatctcaaaaggtgactaattttcaggagcgtcacttttttgtgtaagtgtatattctaatgctaatccgtgctaattgaaatgataaccggtcaaacatactgtaaagtacagtcctgatccaaacagtcagctatgtacatgttaaattgtagcattcaaccaatcttggcacaaaacaattccctgtccgcgactgaaaatttgctaaatttgtcgtagcaaatgatactacctccgttcccgaatatttgtc

SEQ ID NO: 208396 - DNA, 3107 bp, Zea Mays
taaagggccatttgggtgtggtttattattaccacgaggggaggggagctcgagctcgctgctagtgctaatggcggagagcgatggtggcagcgaggcgcagagtccgagccctgatccaaggtccggggacggggcgaaccctgacccgcgcccgccgcggccgcagctcaccaagtcgcgcaccatctctggttctgttgcagcctccatattggccgctgatagggtagcaggaggaggaggcggaagcggcggaggcggtctaagggacagcatcctcgttcgccgctcctccacggcgcccctcccgccgtatacggcgtcagcggcgggggcgtcctcggcgccgcggcggctcaccgtcgccgtggacgacccctcctacgcggcacccaacggcggcgtgcttgaccgggactggtgctacccgtcgttcctaggtccgcacgcctcgcgcccccgcccgccgcggcagcagcagaccgcgacgactaccgaacgccgaagcgctaaccccaccgtgccggtgccgccgagggtggcggtgtcgcagcgggaggaggagaagagcctggcctccgtggtgaagcgcccggcgctgcttgaggagcggaggacgcctcctcctacgctcccgcccccacgcgctccgcgatttgatctctctccgtatctctcactcctgctggtcataactatcgcaagctctaccctcgctgtttggcaatggataaaagttatgggcctccaggaaaagatcagatcatgcagcgaggccaatgctggggaccgtgatggtaccgagaaggtgtcttggattgacagggaccatggctctgctttttttggttcgcggagatggaatttagctcaatctagtaccatctttgctcttgcaattcctttgtttctgtttaagtacattgatctgctccgacgcagacaaacaaattccatgagaggaagaagtggtgaggaagaagtacctctcaagaagaggatcgcctacaaagttgatgtgttcttctcaggacacccatatgccaagcttcttgccctcctattagccaccataattctcattgctttgggtggaattgcgctgtatgttgttagtggaagtggattcctggaggctctctggctttcctggacttttgtggcagattctggaaaccatgccgaccagattggcttggggccgaggattgtatccgtgtcaattagctctggaggcatgctggtgtttgccacaatgcttgggcttgtgtcagatgcaatatcagagaaggtggattcttggcgcaagggaaaaagtgaggtgatagagatcaaccacatactaatcctcggatggagtgataagctgggctctcttctgaagcagctagctatagcaaacaagagtattggtggtggtgtagttgttgttctagctgaaagggacaaggaagagatggagatggacatagcaaagttagaatttgacttcatgggaacatctgtaatatgcaggagtggcagtcctctaattctagcagacttgaagaaggtttctgtttctaaagcacgggccattattgttttagcatctgatgaaaacgcagaccaaagtgatgcacgggcattgcgtgttgtgctgagtctgactggagtcaaggagggtctaagaggccatgttgttgtagagatgagtgatcttgataatgaacctttagtgaaactggttggtggtgaactaattgaaacagttgttgcccatgacgtgattggacgtctgatgatacaatgtgcactccaacctggccttgcacagatatgggaagacatattgggatttgaaaatgcagagttttatattaagcaatggccagaattggatggcatgcggtttggggatgtgttgatctcatttcctgatgccgtaccttgtggagtcaaggttgcttcaaaatctggaaagatcttgatgaatcctgatgatggttatgttttaagagaaggagatgaggtccttgttattgcagaagatgatgatacttatgctcctgcccctctaccagaggtgaataagggttttctgcctaacataccaacccctcccaaatatccagagaaaattttgttctgtggttggcgccgtgacatccatgatatgataatgtgccggagaaggagagggagataaaactgactgacggtggtttggatataggcgggttaataaacattaaacttgtacataaagaaggcaatgctgttatcaggcgacacttggaaagcttgcctctggagacatttgactctatgagtcagtagaggactccattgtacattctgattcgcgttctttggccacacttcttcttattcgtgacattcagtctaagcgtctcccatcgaaggagctgaagtcacctcatcgttacaatggcttctctcacagtgcctggattagagaaatgcaacatgcatcagacaaatctataatcatcagcgaaatacttgattctagaacaagaaaccttgtatctgtctccaaaatcagcgattatgttctatcaaatgagcttgtaagtatggcactagcaatggtagcggaagacaaacaaataaacagagttcttgaagaactttttgctgaggagggaaatgagatgtgcattcggtctgctgaattttacctttatgagcaagaggaattgagtttctttgatattatggttagggcgcgtgagagagatgagattgtgattggctaccgtcttgctaacaccgaccaggctatcattaacccagaatataagtctcagattaggaagtggtcactagatgatgtctttgttgtcatctcaaaaggtgactaattttcaggagcgtcacttttttgtgtaagtgtatattctaatgctaatccgtgctaattgaaatgataaccggtcaaacatactgtaaagtacagtcctgatccaaacagtcagctatgtacatgttaaattgtagcattcaaccaatcttggcacaaaacaattccctgtccgcgactgaaaatttgctaaatttgtcgtagcaaatgatactacctccgttcccgaatatttgtc

SEQ ID NO: 208397 - DNA, 1751 bp, Zea Mays
ttccttccctccccctccctgctcggtgctcgcacacgctggcgcggcttgcccccacgctgcgctcccaccaccaccactatataatccccgatcgcctcacgcacacgcaccgacccaccggccgacgaggggcgaccgccgcaacacaaatccacacgcccgccgccaccgccgccatacggacccactcctcctttgccctggtgcgagcaggcttcggcagcaaaccccgcagactgctcccggacgagggagaacgcgcggggctgggctagccgctacccgctagccaggggaccggggcggaggcagcgaggaggtacgtatggacaagtacgaggcggtgcgggacatcgggtcggggaacttcggggtggcgcggctgatgcgcaaccgcgagactcgagagctcgtcgccgtcaagtgcatcgagcgtggccaccggattgacgagaatgtgtacagggagatcatcaaccaccgctcgctgcgccatcccaacattattcgcttcaaggaggtgatacttacaccaacacatcttatgattgtgatggagtttgcagcaggtggagagctttttgatcggatctgtgatcgtgggcggtttagtgaggatgaggcccggtatttctttcagcagttgatctgtggagtgagctattgccattacatgcaaatatgccatagagatctgaagctggagaatgttctcttggatggcagcccagctccacggcttaagatctgcgattttggctattccaagtcatcagtgttgcattcaagacccaaatcagcagtaggaacgccagcatatattgcacctgaggtgctatcccgtcgcgagtatgatggaaagaaaagtggagcggggctagttgatgacagacatccacaaaaaagagcttgcagacgtatggtcctgtggggtgactctttacgtcatgcttgtgggagcatacccatttgaagacccagatgaccccaagaatatacgcaacaccattcagcaaataatgcaagtgcaatacaagataccagatcatgtccacatatctacggaatgccagcaacttattgcccgtatctttgttgccaatccaatgaggtactttttacgaatattctccagagaatcacaatgaaggaaataaagagccatccatggtttttgaagaacctaccacgggaactcacggagactgcacaaggcatgtactacaggagggataacagggtcccttcttattcagaccaaacgtcggaagaaatcatgaagatagttcaagatgcaaggaccatgccgaaatcatccagatcaggctatgggtggagcagtgagtattcggatgaagaagaagagaaggaagaggaacacagaccagaggagcatgaggaagaggaagatgaatacgataggagggtgaaggaggtccatgcaagcggagaactccgtatggacgctcttcacatatgaaagctagtggaagagaaagttgcatgtagataactgggttgttgcggatctgaaggatccagtgggatgtatgcagttttggcttgagaatttgcttctgtttgtcaattttcatgtaacataatttaatacaccgagacaacagactaccatgttcttatattggtaaatatgaagcatgtaccttctatctgcattgtacagtctgctaggttccggtatgataattctaacgcatgtaagtggtgggatcgatgctatccaccag

SEQ ID NO: 208398 - DNA, 1685 bp, Zea Mays
acggcaggccccatccaacatctcctcctccccgtccctctcctcaccttccttccctccccctccctgctcggtgctcgcacacgctggcgcggcttgcccccacgctgcgctcccaccaccaccactatataatccccgatcgcctcacgcacacgcaccgacccaccggccgacgaggggcgaccgccgcaacacaaatccacacgcccgccgccaccgccgccatacggacccactcctcctttgccctggtgcgagcaggcttcggcagcaaaccccgcagactgctcccggacgagggagaacgcgcggggctgggctagccgctacccgctagccaggggaccggggcggaggcagcgaggaggtacgtatggacaagtacgaggcggtgcgggacatcgggtcggggaacttcggggtggcgcggctgatgcgcaaccgcgagactcgagagctcgtcgccgtcaagtgcatcgagcgtggccaccggattgacgagaatgtgtacagggagatcatcaaccaccgctcgctgcgccatcccaacattattcgcttcaaggaggtgatacttacaccaacacatcttatgattgtgatggagtttgcagcaggtggagagctttttgatcggatctgtgatcgtgggcggtttagtgaggatgaggcccggtatttctttcagcagttgatctgtggagtgagctattgccattacatgcaaatatgccatagagatctgaagctggagaatgttctcttggatggcagcccagctccacggcttaagatctgcgattttggctattccaagtcatcagtgttgcattcaagacccaaatcagcagtaggaacgccagcatatattgcacctgaggtgctatcccgtcgcgagtatgatggaaagcttgcagacgtatggtcctgtggggtgactctttacgtcatgcttgtgggagcatacccatttgaagacccagatgaccccaagaatatacgcaacaccattcagcaaataatgcaagtgcaatacaagataccagatcatgtccacatatctacggaatgccagcaacttattgcccgtatctttgttgccaatccaatgaggaacctaccacgggaactcacggagactgcacaaggcatgtactacaggagggataacagggtcccttcttattcagaccaaacgtcggaagaaatcatgaagatagttcaagatgcaaggaccatgccgaaatcatccagatcaggctatgggtggagcagtgagtattcggatgaagaagaagagaaggaagaggaacacagaccagaggagcatgaggaagaggaagatgaatacgataggagggtgaaggaggtccatgcaagcggagaactccgtatggacgctcttcacatatgaaagctagtggaagagaaagttgcatgtagataactgggttgttgcggatctgaaggatccagtgggatgtatgcagttttggcttgagaatttgcttctgtttgtcaattttcatgtaacataatttaatacaccgagacaacagactaccatgttcttatattggtaaatatgaagcatgtaccttctatctgcattgtacagtctgctaggttccggtatgataattctaacgcatgtaagtggtgggatcgatgctatccaccag

SEQ ID NO: 208399 - DNA, 5363 bp, Zea Mays
ccctcacacccgactacaaaaaccttccggcgccgccgcctgatcgctccagcgccctcgccgtcggcagctcggccgccgtactcccgctaccgagctaggaggcatcaccttcgccggtccaacatgggtaagacacgtggtatgggagctgggcgcaagctcaagacccacagaaggaaccagaggtgggctgacaaagcctacaagaagagccatctcggcaacgagtggaagaaaccctttgctgggtcatctcacgcaaagggaatcgtccttgagaagatcggcattgaggctaagcagcctaactctgctatccgtaagtgcgctcgtgtccagctggtgaagaacgggaagaagattgctgcctttgtgccaaacgatggttgcttgaactacatcgaggagaacgatgaggtgctgattgctggattcggtcgtaagggccatgctgtgggagatattcccggcgtccgtttcaaggtcgtgaagcgtacgacatttttctatcctgttgctaatccgggcgaactagcaaagcagtgcaaatctggaaaccgcgacctgatcgcagaacgccagaacaggaggctcgggcccgtaccgtaccgcatccctatcattgccaggtcagcagcctatccggccgcccccgcccggagcacgccgccggcgccgacgtcggcgcgtcgcatggatatggcccccgcgtctgtctacttcaacccgcgctcggtcgaggaaatcttcaaggacttctccggccgccgcgcggggctcgtccgcgccctcacctccgatgtggacgatttctgcagattgtgcgacccagataaggagaatttgtgtctctacggccttcccaacgggagctgggaggtgtcgccgccggcggaggaggttcctccggagttgcccgagccggcgctcggcatcaactttgcgcgcgacggcatgcagcgccgcgactggctcacactcgtcgccgtccactctgactcgtggctcatctccgtcgcattcttctacggtgcccgcctcaacggcaacgaccggaagcgcttgttcagcatgatgagtgatcttccttccgtcttagaagcattcgcggacaggaaacacggcagagataggtctggggttgatagcagcggcaagtccagacactcatcaaagagaggaaaagatggccatgccaagagtttcagggcagcagctcctgccgccaaggagtatgacgaagacgatgacgaggaagacgaggaggagcacacggagaccttttgcggaagctgcggcggcctttacaacgcgagcgagttctggatcggctgcgacatctgcgagcggtggttccacggcaagtgcgtgcggatcacccctgcgaaagcggatcacataaagcactacaagtgcccggactgcagctcgaagaagatgaggcagatctatgatgccgtgattaagacggggacggaatccaacgcgggcaaggccgcgctcgacgcgttgggcgctgagctgactacccctctcgtcgccgacgtgctgcaccgcctccgctacgaggagaagctggcgtttcggttcttcgcctgggcgtcccaacaggacggctacaaccacgaaccgacgacttacaacgacatcatcgacattctctccggcacgcgatacaagagccgccagttcggtgtcctctgcaacgtgctcgatcacatgaagcgccatggctcgaggtcggtgccggttgaggaccttctggagatcctgcgcgcctacacggagaagcatctcacgcacatgagaaagctggccaagaagcggcgggttcggatgcgtacgccgccagagactgatgcgctcaacgttctgctggacgcgttctgcaagtgtgggatggtcaaggaagcagaggcagtgtttggtcgcgtgaagaggaagttgctgggtaatgcagagacatacagtaccctgttcttcgggtggtgccgggcgagggaccccaagaaggccatgaaggtgctcgaggaaatgattcagatgaagcacacgccagagagtttcacctacgttgcagccattatatcattttgcagcgctggattggtgtcagaggcaagggaactgtttgagttcatgaggactgaggggttgacgatatcatcgcccacagccaaaacatattcgattatgattgttgcattagcaaaggctgaccggatggaggagtgttttgaactgctttcagacatgagaagttgtggctgtatgcctgacgtgacgacttataaagatttgattgaagggatgtgcttggtgggtaaactggatgctgcttatcgtgtgttggacgagatggggagggctggatttcctcctgacattgtcactcatcgaaaggctgatgatgcacttgaactctgtgagaggatgatagaggcacactgtgagcccagtgttcatacctataatatgatgatgatgatgttcttcgagatgggagaggcacatagagcattagatatatgtcttgagatggacaaaagaagatgtcaacgtgctatcgatacctacgagataatgatctatggtctctttgattgtggagaaacagaatatgcaactgctcttctagatgaggttataaaccgtgacatgaaactttcatacaagaagtttgatgctataatgctgaggagcttattcaaaggatcagaaggctgatgaagctattttggaagtgttagaccttcgatggtatgccattggaccaaagtattaattatatatgcaacgcttgtatcatctgttccactaataccagcagtgtgctattgctgtttgttctagcctgctacctgcaattgttagccgattaccataagaatttaacaactttttaaacctaaggtgtctatgttggtgatccttctaagctcagtatgaaggctgcatttggaaaggtttggtggttgaaagaagctgatggtagtattattggtggaaccatcaagacaaattcaggaaatgagcaagaatccaaaaccacccagggatgcgtaagagattgatgcattttctttttgttccactaattggctgttcccggatatatatgcaacgctcgtgtcatctgttccaatacttgaagaagcagcacgctacgagttgagatatgggcacagaaatagagctacaagaggaggtggatattttggcatattacacgttgagtggtgaactcaagtatcagtttgggtctggaagaattcaaggaaaggtagaatatatggcctacaaaaaaatggaatacaaaaaattcttgaggatgttcggtgccaccaaaagacccgagtgccaggtggcagagcctgcacttaatcagaaggaggaagttatgatagaatatcgaccaccagcacctgcagttcattctaggcctgcaccccaatggatatgcccagtgtcttttatagagctcagtaaaactaccttcccttcccctctcgtctatgcatgttgtggaggtttctacctacaagactggtctttagcatggtatggcagcatgtttgtgtatccactctgtagaaaatatcttatgcttcatgtctttagcatggtatggcaacatgtttgtgcatccactctgtagaaaaaagatgtcatatgtactgtatcgacactagaattttgtgttgttttttcatctgaaaatgtaggtggagaacaatgaactttaattgagtatgttatttctccaattatactggatgtttgggcacacccgttcatcagcattgatgttgtcgaagtgttagagtttttaggctatcaaggctcttggatgcttacaggcacttgtgtctcaaatcctttcaacaattggatccattttagtgaaaaatttatgatgtcactgccatggtgaaggtgaccaaccacgtaggcgcccacaccccacgtgtgtgtacctatttgcggcgtacccggcgttgagcttgttgttacagccaaccatgcggaggccagggtccacgatcaggtggtccaatagtgtcaggttgaagtcccccaagctgatgtaagcaacttatagccttaataattcctgctttgagctgcttcgtgcaagatattgctcgcatctgtaggcttagtggtatttagtttatggaatgaaattgtccattatcatctcactctttatttttgtttggtttatggaatgaaatgagttgatcaagctggcttcgacaagtggcaacctcgtgctatacaagtaatcatgttttttgtcagtgagttcgtttcttttgtcacctacggtgcatctggctataagaagataagatttggtaaagacgtttgttctgagttatccaacctagagaccgagcataacgaccttacatatagggattgtataaagtcaagctatcaaggctagctaccatgctgcatccagtggagaactagagattaacacgtattttatggatgcatgtttacatccttaaaacattaatatataggattagaataaaactgcagagttgtttgagggatatggccatatcatacatgaactgattgtcaatcgtgcgatccgtacagaggaaaatgtaacctattttagcctttttgatttgagatggagtttttgttgttcatatatgagcaattaatatttgtgattttgaattgtttgatgagtcatactgtaccttcctataaaatgggatatttaaagttcatgtgaaagttcaatcttgttttctctaatcgtgtgacttggactgttggagaaatgttggctaatttcacttgttttcaggaaataggtggattgctctggttgttgagaagtttgttgaacccgatgtttccttggttccaacactgtcatgctccatcgattattttggagagttgatcagtgggcagaaaccgtggaagaaaagctgacatttgcactcacccgagccctatcagcagcgccggccctggcaggggtcgagcagtgccctcaaccaggcccccagattaatggagcctccctttaggtactaaataacattacgtatatacatgcatatatcatatattgtatatgtatgtctgctggctctacagaactttgaaagacgtaattataagcaaggagaattaggcgtagcccgtcaatcttgatttctatattgcagtagtagtacttcgtagtctcaggcccatctgtctaggctctcggtcgcagacagacaagcggtcgtgtcctctcctctcggtagccaacacacgacattgggtacgacggcgtttttgtcttgccctacacgacgaaaaagaaactaaca

SEQ ID NO: 208400 - DNA, 2707 bp, Zea Mays
acgaaatgtgcttgaagctaagagacagatagccgcagctgtttcagttgaaagatatgctagaagatggttgtgtcgttgtgcatatttgcgtcttcgttctgcttctcttgtgatccagtctgggattcgctatatcttagcagttcagaggttgcggcacttaaagaatgctaaagcttctactgttatccaggtctttctcatcttgattcttctgaactctaatttttttaatctctctctctctctctcctcatcagttttaacttgccaagttgtggaattgtttcattggatcgagatttttattatcgtttgtaaatctcaagcttggtggaggatgcagaagctctattatttccatcagcagtatcgatgggcaacagttctcatccagtgttgttggagacagaagcttgctaaaagggcattgcggaaccttaaacatgctgcttatgaaactggagctttacgtgaagctaaaggcaaacttgagaagagcttggaagatcttactttgcgattcacattagagaggaggcaaaggcttgctgctgaagagtcgaaggcattggagatatccaagcttctcaaaatattggaatccgtgaaatcagaattagaggcatcaaatgaagaaaataaaaatagttgcaagaaaatttcctcgctccaacatcagctagatttatcatccaaggatcaagaagctcagcaaaatattctttctcagatagaagaagtgaagagggagaatattttactacaggcaaagaacacagaaatggaacaagagctcttaaaagctcaaaaatgtagccatgataatatggacaagttgcacgatgtggaaaagaactatgttcatctccgggataacttgaaaaacttagaggataagatctcaaatttagaagatgagaatcatttattgagacagaaggccttgaatttatctcctaggcacagccgaactgggagttatcactgcggttcttcaccatgcagcccaaaatcattcgttgaatcttcacctgtgaaacttgcacctccccctcataaccagacagaatcaagaaggtcgaggatgaattctgatagatatgaggattaccatgatgtgctccaccgctgcatcaaagatgatatgggattcaagaagggaaaaccagttgcagcctgtatcatttacaaatgccttctctattggggagtatttgaggctgaaagaacaactatttttgacttcataattcacacaatcaataccactctgaaggcagaaaacgagaatgacattttgccctactggctagccaatacatctgctcttctatgcatgttgcaaagaaacttaaggtcaaaaggattcatcatggcagcctctcgatcgtcttcggatactcacttaagtgaaaaggcaaatgaaacattccggactcctttaagagcctttggacaacaaacaagcatgtcacacattgatgctcgatacccagccatgctatttaagcaacaactaactgcttccttggagaagatctttggcttaattcgtgacaatctaaagaaagagatatcacctcttttaagcctttgcattcaggcaccaaaacttgctcgaggaggcagtggaaggaggtcgagatcacctgatgtagccttgcagcaaccgataagtactcattgggatcggattgtgaaatttttggactcattgatggatagactacacaaaaattttgtgccttcttttttcacccgcaagctagtaactcaagttttttccttcattaatgtgcagctgttcaatagtatgctcctacgacgagaatgttgcacattttcaaatggagaatatgtgaaatctgggctttgtgtgctggagaaatggattgtggacactgaagaggtgcagcttgggatgagctgcagttcattaggcaagcggttgactttctgatcattccacagaaaagcaaaaagaccattgagcagattaagaaaaatatttgcccggcattaagtgtgagacagatatatcgcttatgtacgatgtactgggacgacaaatatggtactcatagtgtatcagctgaggttgttgccagaatgagggacatggtgagtaatgacatgcaaaatcctgtctctaattcatttcttttagatgatgacttaagcattcctttcacaaccgaggaaattgcagagcaagtaccagatgttgacatgtcaaacatcgaaactcccgcatctcttcgtcatgttcattctgctcagttcttgacgcagcaccttcagccaccttatacgtctcgatgaattgcctaggtttttgctttggtaacaattagtgatgccgaggtagtgaacttagaggatttgataggtcggggggtaactataaccatcattgttgatttaatccatgctaatattcattccaccgtatgcttttttgttttatatttttgacatgcctcgtgtcatcatgtcaagcccaaagtagactacattctttgtaggtcgctgtcaaatttcagatccattatctagtcatcaatccatcattatgctgagtcctttatattgctaaacctgggatatacttgtggtatttttcctcatccctgacctggacaacagaagttcgtattatagtgatgacaacagaagtctagcggtaatgataatgacacaa

SEQ ID NO: 208401 - DNA, 1721 bp, Zea Mays
cggttcttcaccatgcagcccaaaatcattcgttgaatcttcacctgtgaaacttgcacctccccctcataaccagacagaatcaagaaggtcgaggatgaattctgatagatatgaggattaccatgatgtgctccaccgctgcatcaaagatgatatgggattcaagaagggaaaaccagttgcagcctgtatcatttacaaatgccttctctattggggagtatttgaggctgaaagaacaactatttttgacttcataattcacacaatcaataccactctgaaggcagaaaacgagaatgacattttgccctactggctagccaatacatctgctcttctatgcatgttgcaaagaaacttaaggtcaaaaggattcatcatggcagcctctcgatcgtcttcggatactcacttaagtgaaaaggcaaatgaaacattccggactcctttaagagcctttggacaacaaacaagcatgtcacacattgatgctcgatacccagccatgctatttaagcaacaactaactgcttccttggagaagatctttggcttaattcgtgacaatctaaagaaagagatatcacctcttttaagcctttgcattcaggcaccaaaacttgctcgaggaggcagtggaaggaggtcgagatcacctgatgtagccttgcagcaaccgataagtactcattgggatcggattgtgaaatttttggactcattgatggatagactacacaaaaattttgtgccttcttttttcacccgcaagctagtaactcaagttttttccttcattaatgtgcagctgttcaatagtatgctcctacgacgagaatgttgcacattttcaaatggagaatatgtgaaatctgggctttgtgtgctggagaaatggattgtggacactgaagagcatgcaggtgcagcttgggatgagctgcagttcattaggcaagcggttgactttctgatcattccacagaaaagcaaaaagaccattgagcagattaagaaaaatatttgcccggcattaagtgtgagacagatatatcgcttatgtacgatgtactgggacgacaaatatggtactcatagtgtatcagctgaggttgttgccagaatgagggacatggtgagtaatgacatgcaaaatcctgtctctaattcatttcttttagatgatgacttaagcattcctttcacaaccgaggaaattgcagagcaagtaccagatgttgacatgtcaaacatcgaaactcccgcatctcttcgtcatgttcattctgctcagttcttgacgcagcaccttcagccaccttatacgtctcgatgaattgcctaggtttttgctttggtaacaattagtgatgccgaggtagtgaacttagaggatttgataggtcggggggtaactataaccatcattgttgatttaatccatgctaatattcattccaccgtatgcttttttgttttatatttttgacatgcctcgtgtcatcatgtcaagcccaaagtagactacattctttgtaggtcgctgtcaaatttcagatccattatctagtcatcaatccatcattatgctgagtcctttatattgctaaacctgggatatacttgtggtatttttcctcatccctgacctggacaacagaagttcgtattatagtgatgacaacagaagtctagcggtaatgataatgacacaa

SEQ ID NO: 208402 - DNA, 2001 bp, Zea Mays
caccttttatgagtgtccgactgctagagatggctaagaaacaaacgattggagctcctgccgctcacggattagtccggatcgttcgtcagctgccagggcccaggacaactgtccctgcaggcctgcacgccggcgtccgtgtgatcgcgctcgcgcctccgaagatctgagcagctcagctagtggactcgtttcgcttcctccaggctccagcgcctgaggcagccgcaacgcaagggccccggaaccacgcgaaaacgcggccaaaacaccgcgaaaatctcgacacccaactgcgccgcgtgggcggctgcggcggacgaccaatgtggagggggacgcgcatgtacagcctcctaggcgtcctcctcctcctggccctggcctacctgaactggcatccaggccacggcccctccgccggcggccctggtgggttcaagctccccatgccgtggctgcagccgcggatgtccttcgtgggccgcgccggcacccacttcgtcgacaccctcactggcgcgccgatctacatcaacggctggaactcgtactggctcctctcggcccggtctccctcgttgtccgtcgagatgctgcgccgcggccgccgcatggggctgacgatatgccgcacatgggcattcagcgacggtggccccggcgcgctgcagatctccccaggccggtttagcgagcctgttttccagatgctggattatgtgatatacgagtcccgaagaaatcatgttagattgatcctatgccttgtcaacaatcttgataactttggagggaaggcccagtatgttcaatgggcacaagcagctggtgttaatgtcacaaattctacggattcctttttctttcacccaactattaaaggttactacatggagtatgtaaaggcaatattaaccagaagaaacacttacagtggaatcaaatattgtgatgaacctgctatatttgcttgggaactcatgaatgagcctagatgtgtgtccaattcatcgggtccgtatattcagtcttggatagaagaaatggcagcatatattaagagtttggacagaaagcatcttattacagtgggtactgaaggattttatggccctgggagaggtgagagactgggcgtaaatcctggagactgggcagcttcagtctgctctgactttatacagaactcagctgtcaaagatattgattttgcctcggttcacgcctatcctgatagctggctaccaaaggcaagtatggaagaaaaagtcaagtacctttctgtctgggttgattcacacttgaatgatagtgaatacgtcttgagaaagcctgtcttgtttacagaagtaggttacctccaacatgcagaagctaacagcacagttgatggagacattcttctaaaagttgtctatgataaactatacgattcggcaaaaaagctgcaagcaggaagtggcgctcttatttggcagttgatggtcgaaggcacgcagatgtaccatgatgacttctccatggtggcacgggatcgtccgtccacatataagctgatgaaggagcagtcatgccgactgcagagtctatatggaaaagagggagaccctacttggaaatgctcaccctaaggttttttcttcttcctattggtttcgaaaccttccacttcatccaacaaactggattgttggaatcattcagaaagaggatgattagggaaatgatgaacaaacatctgtgtggtaaatagcttgttcatagatttgtagctgaagagctagactgctagtggaaaatccacttcttacaacaaacatgcattctgtcatatcacatcatgctgtacgttgtacaattaatatgacctattagtggtcaaagtgaaaagagcaccgatacaagttatgatatctactgcagcatgcctgtatggcgtgacggtggacttgggagtttgtgcaacttgtgctcaccctagtgaaagcacccaga

SEQ ID NO: 208403 - DNA, 1765 bp, Zea Mays
aaacaaacgattggagctcctgccgctcacggattagtccggatcgttcgtcagctgccagggcccaggacaactgtccctgcaggcctgcacgccggcgtccgtgtgatcgcgctcgcgcctccgaagatctgagcagctcagctagtggactcgtttcgcttcctccaggctccagcgcctgaggcagccgcaacgcaagggccccggaaccacgcgaaaacgcggccaaaacaccgcgaaaatctcgacacccaactgcgccgcgtgggcggctgcggcggacgaccaatgtggagggggacgcgcatgtacagcctcctaggcgtcctcctcctcctggccctggcctacctgaactggcatccaggccacggcccctccgccggcggccctggtgggttcaagctccccatgccgtggctgcagccgcggatgtccttcgtgggccgcgccggcacccacttcgtcgacaccctcactggcgcgccgatctacatcaacggctggaactcgtactggctcctctcggcccggtctccctcgttgtccgtcgagatgctgcgccgcggccgccgcatggggctgacgatatgccgcacatgggcattcagcgacggtggccccggcgcgctgcagatctccccaggccggtttagcgagcctgttttccaggcaatattaaccagaagaaacacttacagtggaatcaaatattgtgatgaacctgctatatttgcttgggaactcatgaatgagcctagatgtgtgtccaattcatcgggtccgtatattcagtcttggatagaagaaatggcagcatatattaagagtttggacagaaagcatcttattacagtgggtactgaaggattttatggccctgggagaggtgagagactgggcgtaaatcctggagactgggcagcttcagtctgctctgactttatacagaactcagctgtcaaagatattgattttgcctcggttcacgcctatcctgatagctggctaccaaaggcaagtatggaagaaaaagtcaagtacctttctgtctgggttgattcacacttgaatgatagtgaatacgtcttgagaaagcctgtcttgtttacagaagtaggttacctccaacatgcagaagctaacagcacagttgatggagacattcttctaaaagttgtctatgataaactatacgattcggcaaaaaagctgcaagcaggaagtggcgctcttatttggcagttgatggtcgaaggcacgcagatgtaccatgatgacttctccatggtggcacgggatcgtccgtccacatataagctgatgaaggagcagtcatgccgactgcagagtctatatggaaaagagggagaccctacttggaaatgctcaccctaaggttttttcttcttcctattggtttcgaaaccttccacttcatccaacaaactggattgttggaatcattcagaaagaggatgattagggaaatgatgaacaaacatctgtgtggtaaatagcttgttcatagatttgtagctgaagagctagactgctagtggaaaatccacttcttacaacaaacatgcattctgtcatatcacatcatgctgtacgttgtacaattaatatgacctattagtggtcaaagtgaaaagagcaccgatacaagttatgatatctactgcagcatgcctgtatggcgtgacggtggacttgggagtttgtgcaacttgtgctcaccctagtgaaagcacccaga

SEQ ID NO: 208404 - DNA, 1846 bp, Zea Mays
gtgtgatcgcgctcgcgcctccgaagatctgagcagctcagctagtggactcgtttcgcttcctccaggctccagcgcctgaggcagccgcaacgcaagggccccggaaccacgcgaaaacgcggccaaaacaccgcgaaaatctcgacacccaactgcgccgcgtgggcggctgcggcggacgaccaatgtggagggggacgcgcatgtacagcctcctaggcgtcctcctcctcctggccctggcctacctgaactggcatccaggccacggcccctccgccggcggccctggtgggttcaagctccccatgccgtggctgcagccgcggatgtccttcgtgggccgcgccggcacccacttcgtcgacaccctcactggcgcgccgatctacatcaacggctggaactcgtactggctcctctcggcccggtctccctcgttgtccgtcgagatgctgcgccgcggccgccgcatggggctgacgatatgccgcacatgggcattcagcgacggtggccccggcgcgctgcagatctccccaggccggtttagcgagcctgttttccagatgctggattatgtgatatacgagtcccgaagaaatcatgttagattgatcctatgccttgtcaacaatcttgataactttggagggaaggcccagtatgttcaatgggcacaagcagctggtgttaatgtcacaaattctacggattcctttttctttcacccaactattaaaggttactacatggagtatgtaaaggcaatattaaccagaagaaacacttacagtggaatcaaatattgtgatgaacctgctatatttgcttgggaactcatgaatgagcctagatgtgtgtccaattcatcggtcttggatagaagaaatggcagcatatattaagagtttggacagaaagcatcttattacagtgggtactgaaggattttatggccctgggagaggtgagagactgggcgtaaatcctggagactgggcagcttcagtctgctctgactttatacagaactcagctgtcaaagatattgattttgcctcggttcacgcctatcctgatagctggctaccaaaggcaagtatggaagaaaaagtcaagtacctttctgtctgggttgattcacacttgaatgatagtgaatacgtcttgagaaagcctgtcttgtttacagaagtaggttacctccaacatgcagaagctaacagcacagttgatggagacattcttctaaaagttgtctatgataaactatacgattcggcaaaaaagctgcaagcaggaagtggcgctcttatttggcagttgatggtcgaaggcacgcagatgtaccatgatgacttctccatggtggcacgggatcgtccgtccacatataagctgatgaaggagcagtcatgccgactgcagagtctatatggaaaagagggagaccctacttggaaatgctcaccctaaggttttttcttcttcctattggtttcgaaaccttccacttcatccaacaaactggattgttggaatcattcagaaagaggatgattagggaaatgatgaacaaacatctgtgtggtaaatagcttgttcatagatttgtagctgaagagctagactgctagtggaaaatccacttcttacaacaaacatgcattctgtcatatcacatcatgctgtacgttgtacaattaatatgacctattagtggtcaaagtgaaaagagcaccgatacaagttatgatatctactgcagcatgcctgtatggcgtgacggtggacttgggagtttgtgcaacttgtgctcaccctagtgaaagcacccaga

SEQ ID NO: 208405 - DNA, 1759 bp, Zea Mays
ctcgcgcctccgaagatctgagcagctcagctagtggactcgtttcgcttcctccaggctccagcgcctgaggcagccgcaacgcaagggccccggaaccacgcgaaaacgcggccaaaacaccgcgaaaatctcgacacccaactgcgccgcgtgggcggctgcggcggacgaccaatgtggagggggacgcgcatgtacagcctcctaggcgtcctcctcctcctggccctggcctacctgaactggcatccaggccacggcccctccgccggcggccctggtgggttcaagctccccatgccgtggctgcagccgcggatgtccttcgtgggccgcgccggcacccacttcgtcgacaccctcactggcgcgccgatctacatcaacggctggaactcgtactggctcctctcggcccggtctccctcgttgtccgtcgagatgctgcgccgcggccgccgcatggggctgacgatatgccgcacatgggcattcagcgacggtggccccggcgcgctgcagatctccccaggccggtttagcgagcctgttttccaggcccagtatgttcaatgggcacaagcagctggtgttaatgtcacaaattctacggattcctttttctttcacccaactattaaaggttactacatggagtatgtaaaggcaatattaaccagaagaaacacttacagtggaatcaaatattgtgatgaacctgctatatttgcttgggaactcatgaatgagcctagatgtgtgtccaattcatcgggtccgtatattcagtcttggatagaagaaatggcagcatatattaagagtttggacagaaagcatcttattacagtgggtactgaaggattttatggccctgggagaggtgagagactgggcgtaaatcctggagactgggcagcttcagtctgctctgactttatacagaactcagctgtcaaagatattgattttgcctcggttcacgcctatcctgatagctggctaccaaaggcaagtatggaagaaaaagtcaagtacctttctgtctgggttgattcacacttgaatgatagtgaatacgtcttgagaaagcctgtcttgtttacagaagtaggttacctccaacatgcagaagctaacagcacagttgatggagacattcttctaaaagttgtctatgataaactatacgattcggcaaaaaagctgcaagcaggaagtggcgctcttatttggcagttgatggtcgaaggcacgcagatgtaccatgatgacttctccatggtggcacgggatcgtccgtccacatataagctgatgaaggagcagtcatgccgactgcagagtctatatggaaaagagggagaccctacttggaaatgctcaccctaaggttttttcttcttcctattggtttcgaaaccttccacttcatccaacaaactggattgttggaatcattcagaaagaggatgattagggaaatgatgaacaaacatctgtgtggtaaatagcttgttcatagatttgtagctgaagagctagactgctagtggaaaatccacttcttacaacaaacatgcattctgtcatatcacatcatgctgtacgttgtacaattaatatgacctattagtggtcaaagtgaaaagagcaccgatacaagttatgatatctactgcagcatgcctgtatggcgtgacggtggacttgggagtttgtgcaacttgtgctcaccctagtgaaagcacccaga

SEQ ID NO: 208406 - DNA, 1505 bp, Zea Mays
agctcagctagtggactcgtttcgcttcctccaggctccagcgcctgaggcagccgcaacgcaagggccccggaaccacgcgaaaacgcggccaaaacaccgcgaaaatctcgacacccaactgcgccgcgtgggcggctgcggcggacgaccaatgtggagggggacgcgcatgtacagcctcctaggcgtcctcctcctcctggccctggcctacctgaactggcatccaggccacggcccctccgccggcggccctggtgggttcaagctccccatgccgtggctgcagccgcggatgtccttcgtgggccgcgccggcacccacttcgtcgacaccctcactggcgcgccgatctacatcaacggctggaactcgtactggctcctctcggcccggtctccctcgttgtccgtcgagatgctgcgccgcggccgccgcatggggctgacgatatgccgcacatgggcattcagcgacggtggccccggcgcgctgcagatctccccaggccggtttagcgagcctgttttccagtcttggatagaagaaatggcagcatatattaagagtttggacagaaagcatcttattacagtgggtactgaaggattttatggccctgggagaggtgagagactgggcgtaaatcctggagactgggcagcttcagtctgctctgactttatacagaactcagctgtcaaagatattgattttgcctcggttcacgcctatcctgatagctggctaccaaaggcaagtatggaagaaaaagtcaagtacctttctgtctgggttgattcacacttgaatgatagtgaatacgtcttgagaaagcctgtcttgtttacagaagtaggttacctccaacatgcagaagctaacagcacagttgatggagacattcttctaaaagttgtctatgataaactatacgattcggcaaaaaagctgcaagcaggaagtggcgctcttatttggcagttgatggtcgaaggcacgcagatgtaccatgatgacttctccatggtggcacgggatcgtccgtccacatataagctgatgaaggagcagtcatgccgactgcagagtctatatggaaaagagggagaccctacttggaaatgctcaccctaaggttttttcttcttcctattggtttcgaaaccttccacttcatccaacaaactggattgttggaatcattcagaaagaggatgattagggaaatgatgaacaaacatctgtgtggtaaatagcttgttcatagatttgtagctgaagagctagactgctagtggaaaatccacttcttacaacaaacatgcattctgtcatatcacatcatgctgtacgttgtacaattaatatgacctattagtggtcaaagtgaaaagagcaccgatacaagttatgatatctactgcagcatgcctgtatggcgtgacggtggacttgggagtttgtgcaacttgtgctcaccctagtgaaagcacccaga

SEQ ID NO: 208407 - DNA, 1236 bp, Zea Mays
gcaccccaccccaccccactgccgtccttttatctattccgttcgttcgttcgcatttacagctgccattcccttgaggtggtatagagggcactgcatcatatgcaaatattattaggatctgtacaggagcatactgaaagatgctggaacctcatcagacaataagttcacttctattgctcttagcaacttctttgctggtgctgctgccggatgtacaaccctggtcctcatctatccgctcgacattgctcacactcgtcttgcagctgatatcgggcgtacagacacccgccagttcagaggcatccgccacttcatccagaccatctacaagaaaaacggcatcagaggcatatacaggggattaccagcatcgctccacgggatggtcgttcaccggggcctgtactttggcggcttcgacactgccaaggatgtcctggtccctttggagtcccccctgtggcagcgctgggttgcagcccaggcagtgacatccatggcagggctcatctcgtacccactggacaccgtgcgccggaggatgatgatgcagtcagggatggaggtgcagatgtacagcagcacactcgactgctggaggaagatatacaggctggaggggatccggtcattctaccgtggtgcattgtctaacatgtttaggagcactggtgcagccgccatacttgttttgtatgacgaggtcaagaagttcatggacaggggtaggttgtaacagctatagaggggtttctttcacagaattttggattcgatatgggaagtgggattaggccaaaaggtgcaaggagcagcagctcgagcattttgtaactggatgctggtttcctcctgcttactaacctgctcgatgtaaccgagcctgaaggttctgactcgcgaacaatgcagcttgttcagttcacctcatctttacctcttcgaggttccacttatgggttgtttgttgcctgcacggaggggcctgcgccatagttaaacccataatcacgtacttcattcttttttttatttgtcttgttttagtttaaaaataaattagtggacgacaaatattcaagacgaatgtatccttctgttcttttttatttgtcgcggtttagtatatcttttttatttgtcgcagtttagtgtaaaaattaactagcaggtgataaatatttaagaatagaggtagtagcacgtaattagctgcctagctccgcc

SEQ ID NO: 208408 - DNA, 589 bp, Zea Mays
aagaggcgtctacttgtgacccgacccataaacaagtttggggctggcccaaccctcagcatacaggcacgaaacctcgcgccgccaccaaatctccagcgagcgaagaggcggctccggcgagtgcgcggcaacgacgaaggcgtcggggccagtggcgagaggaagagcatgctgaagttcctgtccaaggtggtggtggagtactgccctctggacccgcggaaggcggcggcagtggagctcctcgcgcagtgcaacggccgcaaggccaaggactccaacccggcttgctcggtcgagctccgccgcctcccctccccagctccgtccacggacctcaagtcgcagccgactctcccgcctccgagggtcctcgtgacctacttcaccggagctgaagaggccatcgtctttgctgagggagctacggcgcagggcatccgggaccagatcgtcgcacggggccggctcatcgatacggagaagatgttccgcgacggcggggagaagtggcccgtcgtcatccccgaggaggagcttggcatgtcgttccctggcatcaaggacagccgcgcgctggagggtg

SEQ ID NO: 208409 - DNA, 3016 bp, Zea Mays
atccgtcagtgcagtcaagtagtcaccggttcacgcaaaccctagtaccaggccgccagtcccgacctccccggctccagcccccgcgcacgaccagctctgacgaccccgctcctgcctcccacctcctccggtggcctcgcgcctgactccctcctccggcacccaggccagccgcgccccgcctctcgcacaggacggaaatgatgccttctcctttttgttagctgattctgatcaaactggttagttcgatagagaatatcagtaatatcttgctgcccaaactgcagcttcaactgattccgcgtcaggagcacttagagcaaccatgggggggaaatcggagcagaagtctcgaaaagagaggcggaaagaggcgagatcagagaagcacaagctgcgatttctttcttgggttgggcatcagggtggcaaaaagaagaagccgtcaatgtcagtagtagagccaagttcggttgaggagaagccaaagaaagagcctgatggcatgatgaagaagaagagaaagagggaagcagagggtaagcggaagcccaggtccaacttccaggaatatcttgagatggagatgggtggacctgtgagcatggaggaggatctagagatggagaggaagcttgcaaaaaagctcaagttgaagaaaggaaagttgggaggtcctgatgatggtatggatgacctttttgcggaccttgggtttggtggtgactttggttcagatgatggtgaaacaaaagcatatgattggaatgtggtggaggacactaatttagacaagagaaaaggtaaaaagaaaaataaggagaaaaaggatgacacagtgatggaggaaccagatgacattgatgaagagaatggtcggaaaaagaagaaaaaaaagaagaaggatggtatggagaaggaggaactggttgatgtaggtgaagagaatggtcagaaaaggaaaaagaagaagaagatgaaggatgactcagagatggacgaaccagatgatgaaggtgttcacatggatgaagagaatgatggagcagtcctggaatctgaggatggagtgtctaatgtggttgaactgcccaaagaatcaaaagggaagtatgtacctccgagtctgcgtaatgcttccaattcagaatcagaagaaattgcccagatgcgtcgcagagtaagaggacttctgaacagactttcagagtcaaatgtggagtccattactcaggaaattgccacactttttcgatctgttccacgaagtgatggctcccagataattggggatgaggttttggctagttgttcccgaggacctcgtggcaatgaacagttaagggtctcccatcaaccatgtatgccgctgtctttgcagcctttgttgcaggtatggcatgtttggtcggtgttgacttcagtgccaagatccttgcatctattgctaagtcatttgaggatgagtattcaaaagaagatggtctatctttgagaaaccttaccttactcttctgctatttgtgcatatttggtgttacctcaagcgatcttgtgtatgatcttctgtcgattctgagcaagcgcttgacagagctagatgtctctacagtgttgaccatcctacagtgctgtggaatgaagctgcggggagatgatccatgtgctatgaaagattttgtccttagtattcagaactctgtgaatgatcttaaattgcactctggtgttggagcagacgggaagactgatatacgtagcagaagaatggaatttatgcttgaaaccatatgtgacattaagaacaataagaaaaggcctaaagaggatccttcacaccatactcgaataaaaaagtggcttcaaaagcttaaggcagaagatgtcctcttgcgtgggttaacatggagcaggcttttggaccctgataagaaagggcagtggtggttgtctggggatgttccatctacagtagctaagattgaagatgttgcagctgttataagcaaggatgttgcagagacaaaaaaacttcttcagcttgcagctgctcaacggatgaacactgacatacgaagagcaatcttttgtattataatgagtgctgaagactatgtagatgcttttgaaaagctcttgaggctgggcctttctgggaagcaggaccgagaaattataagggtcattgttgactgttgtctgcatgagaagatgttcaataagtattacacagtccttgcttccaagctatgcaaccatgagaaaaaccacaagttcagcttgcagtactgcatctgggaccattttaaggagctagataatatggagtcaagtagatccatgaaccttgcgaagctagttgcggagatgctgttgaacttcacgctctccctcgcaactttgaaggttgttaacctggccaacccggtggagatgactccggcaagggtctcgcatttccggatgctgtttgagaccttgctacagaaagacgatgcacgcgtgtggaatgtcttcactcgtgtcgctggccttccagagctcgaggtattgagggatggcattgtgatgttcatcaagcagcacgtgatcgccgaggactcagggaaggacttggctagcaaattcaagattgcgaagaaggcgctcgacaatactgccggagttctgatgtaactctgcccttgtcgaacattctgggcatctccaagtaaaacaaagttattagaacattctgctggagtcctctgttctcgttttgccttgttattagaatgcttctccaagagacctttcatgggttttgaatgcttacccaaaaaaaaggctttgatggtcatacattgtaccatttcttagaagtactctctgtttattgtttagctgcacatgaagatccttaggctatctgcactgccacatggtatctattgctccaaaagtgcgctgtaacaaatagagcaaaattgctccaggacgccaatcactacggcaccgtttgtttgggctt

SEQ ID NO: 208410 - DNA, 645 bp, Zea Mays
cggcggtcccctccacccgggatccatgtggacgtatgcggatgcggtgagcaggtagcatccactgcactctgcagaggaggaaggaagaggaccgacaaagatggggatggcattgccattgccgccggcgtcacaggccttgaggtgctaatatctatcagacctggaaacgcgccactccctgctgaaaaccatgggtttgggacagtcgagtcatttgctgaaatcttgacatgaagggaggatgcatcctcaacatgcatgcatgctgtgctatttaaagatggaaacggattgaactagtttcaaaaggcagatggaatggtttcatggccatgatttgcatcttcatactagctttatttacattgcccatgttcagtttgtcggagaccataaacacatgggatcaccaagttatcttacccttgattggtttcctttaactcgtccggtttgctgttcgtttcttcagtttcgtcaggcattgggtctgttagtcagggccaggggcaaagctaggtagaagcctgtggatgcacatgcaccacaattttttgtaaaactagtgttttgtccaaatttttaccatatatgcaccacctacaacttattactacgcatcctcaaggtatccgtgac

SEQ ID NO: 208411 - DNA, 1101 bp, Zea Mays
cggcggtcccctccacccgggatccatgtggacgtatgcggatgcggtgagcaggtagcatccactgcactctgcagaggaggaaggaagaggaccgacaaagatggggatggcattgccattgccgccggcgtcacaggggttgttgcgttccaggaggatgagcttcctcgcttcgccgccgctgtcgctcaaggcagccggtggaatcagcatcccatgcccgtggcgattggatggccgccgtccacgagcagccccagccagtgttcctcgactagcatcagtgcgaagcgtggtgctggacatcgagggcacgacgagccccatctcgttcgtgacggacgtgctcttcccctacgcccgcgacaacgtccgcacgcacctggacgccacctactccacccgcgagaccaaggacgacatcgccctgctgcgcgctcaggtcgagcaggacctagccgagggcgtccccggcgccgtcccggtcccgcccgacggcgccggcaaggaccgcgtcgtcgacgccctggtcgccaacgtggaggccatgatcgcggcggataggaagataacctcgctgaagcagttgcaggccttgaggtgctaatatctatcagacctggaaacgcgccactccctgctgaaaaccatgggtttgggacagtcgagtcatttgctgaaatcttgacatgaagggaggatgcatcctcaacatgcatgcatgctgtgctatttaaagatggaaacggattgaactagtttcaaaaggcagatggaatggtttcatggccatgatttgcatcttcatactagctttatttacattgcccatgttcagtttgtcggagaccataaacacatgggatcaccaagttatcttacccttgattggtttcctttaactcgtccggtttgctgttcgtttcttcagtttcgtcaggcattgggtctgttagtcagggccaggggcaaagctaggtagaagcctgtggatgcacatgcaccacaattttttgtaaaactagtgttttgtccaaatttttaccatatatgcaccacctacaacttattactacgcatcctcaaggtatccgtgac

SEQ ID NO: 208412 - DNA, 1130 bp, Zea Mays
cggcggtcccctccacccgggatccatgtggacgtatgcggatgcggtgagcaggtagcatccactgcactctgcagaggaggaaggaagaggaccgacaaagatggggatggcattgccattgccgccggcgtcacaggtaggggttgttgcgttccaggaggatgagcttcctcgcttcgccgccgctgtcgctcaaggcagccggtggaatcagcatcccatgcccgtggcgattggatggccgccgtccacgagcagccccagccagtgttcctcgactagcatcagtgggccacatctggaggactgggttcgagtgccaagaaatcaagggggtggtgttcgacgacgtgccgccggctctcgagaggtggcacgccagcggcatcaagacgtacatctattcaagtggcagcagggaagcccagaggctcatcttcgggaacactacctacggcgaccttagaaggcacctgtgcggattttttgacgcaacaattgggaccaagagagacgctcgcagctactatgagatctggcagacggtcggggtggaccggccgtctcagatactgttcctcacggacgtgtgccaggaagccacggcagcacaggctgcaggccttgaggtgctaatatctatcagacctggaaacgcgccactccctgctgaaaaccatgggtttgggacagtcgagtcatttgctgaaatcttgacatgaagggaggatgcatcctcaacatgcatgcatgctgtgctatttaaagatggaaacggattgaactagtttcaaaaggcagatggaatggtttcatggccatgatttgcatcttcatactagctttatttacattgcccatgttcagtttgtcggagaccataaacacatgggatcaccaagttatcttacccttgattggtttcctttaactcgtccggtttgctgttcgtttcttcagtttcgtcaggcattgggtctgttagtcagggccaggggcaaagctaggtagaagcctgtggatgcacatgcaccacaattttttgtaaaactagtgttttgtccaaatttttaccatatatgcaccacctacaacttattactacgcatcctcaaggtatccgtgac

SEQ ID NO: 208413 - DNA, 1503 bp, Zea Mays
cggcggtcccctccacccgggatccatgtggacgtatgcggatgcggtgagcaggtagcatccactgcactctgcagaggaggaaggaagaggaccgacaaagatggggatggcattgccattgccgccggcgtcacaggggttgttgcgttccaggaggatgagcttcctcgcttcgccgccgctgtcgctcaaggcagccggtggaatcagcatcccatgcccgtggcgattggatggccgccgtccacgagcagccccagccagtgttcctcgactagcatcagtgcgaagcgtggtgctggacatcgagggcacgacgagccccatctcgttcgtgacggacgtgctcttcccctacgcccgcgacaacgtccgcacgcacctggacgccacctactccacccgcgagaccaaggacgacatcgccctgctgcgcgctcaggtcgagcaggacctagccgagggcgtccccggcgccgtcccggtcccgcccgacggcgccggcaaggaccgcgtcgtcgacgccctggtcgccaacgtggaggccatgatcgcggcggataggaagataacctcgctgaagcagttgcagggccacatctggaggactgggttcgagtgccaagaaatcaagggggtggtgttcgacgacgtgccgccggctctcgagaggtggcacgccagcggcatcaagtcgcagacgtacatctattcaagtggcagcagggaagcccagaggctcatcttcgggaacactacctacggcgaccttagaaggcacctgtgcggattttttgacgcaacaattgggaccaagagagacgctcgcagctactatgagatctggcagacggtcggggtggaccggccgtctcagatactgttcctcacggacgtgtgccaggaagccacggcagcacaggctgcaggtgatcatctcaccccgcgctttgcctcgctgaaaaagaatgccacaccacgtcgttaggcaaccgccttgaggtgctaatatctatcagacctggaaacgcgccactccctgctgaaaaccatgggtttgggacagtcgagtcatttgctgaaatcttgacatgaagggaggatgcatcctcaacatgcatgcatgctgtgctatttaaagatggaaacggattgaactagtttcaaaaggcagatggaatggtttcatggccatgatttgcatcttcatactagctttatttacattgcccatgttcagtttgtcggagaccataaacacatgggatcaccaagttatcttacccttgattggtttcctttaactcgtccggtttgctgttcgtttcttcagtttcgtcaggcattgggtctgttagtcagggccaggggcaaagctaggtagaagcctgtggatgcacatgcaccacaattttttgtaaaactagtgttttgtccaaatttttaccatatatgcaccacctacaacttattactacgcatcctcaaggtatccgtgac

SEQ ID NO: 208414 - DNA, 2459 bp, Zea Mays
ccaccgcaggcacactgtcgtcatactcccgtcccgacttcccgagacgccgcattggatgctccctccgctcgaatctgccgctttccattatcgctgacccaagcaacattctctgcttcttggtccttgccttcttggttcgccctcccgcaatctctggttctggcctctgggcatcgcgggagtaaggcatttcttggttttcctttcctgagatgggtctgagaaagagaagcgccatggttggtgaggcagccgtgttcgccgcatcttggtagccctcactcagcattggcatcctctcgttcttggacttggagttaactcagccatgaggaagcatgggtggcagctgccgtaccaccctctccaggtggttgcgatagccgtgttctcggcactggggttcgccttctacgtcttcttcgtgccgttcgtggggacgaagccgttccagattgtggccatggctatctacactccattgattacatgtgttgttgtgttatacatatggtgtgcggcaacaaatcctggagacccaggcattttcgattcaacgaagaatttgaaattagataagaatgaaaagcactcctatgtgaattcggatcaggggattaatcatggaggaaggccattaagtgagacttttggtactgctgataacagtgagaagctgagcagcatgcttgagaggaacgattcgccttcttggcccagattttctggaattatttccctggtttgtctcccattctcttgcctttgcaaacggtgtctccattcagacagtctatcttcagaacacaaaatgtgtgaagaaggcatgtttttctgcagcttatgcgaagcagaggttttgaagaacagtaagcattgtagagtatgtgacaaatgtgttgatggctttgaccatcactgcagatggcttaacaattgcatagggaaaaggaactacaaaggtttctttgttctaatggcttctgcagttatcctgtggttgtcggggggacttgtgttgattctctgtattgtgaagcgaggagaattctccaggcaggttgtcacaaagttgggaagcagcttctcaacagtggcttttgtaattgttgtggcaacttgcaccattttagcaatggttgcaaccgtaccacttgcccagcttttatgttttcatgtccttcttgtaaaaaagggaattagcacatatgattacatcatagctttgagggagcacgaggaacaacaagaggttcctggacaccaaagcccgcagatgtctattgttagttctgttactggttttagcacagccagttcttttgggcctcttcatcgtggttcatggtgcactccaccaagattattcctggaagaccagttcgatgccattcctccagagattggcatttcacggaattcaggcagtaagaaaactaaggaagaggaaggagcaaggagaaaagctggagcagtgaaaatcagtccatggacattggcgcggcttaatgcagaggaagtctcaaaggcagccgcggaggcaaggaagaaatccaaaatcctgaaaccagttggaaaacatggcgccccagagaacagcagcaaaccagaccatttgcctagctacaagagacggctagacaggagaggtttccctgctgaactctctcttgacccacttgcaactctatctgcaagcggcaccgaaagcaactacagcgacgcagcaacagaaatctgtggcagtctagccccgttacagctcgaagcgagaagtgctttccaaccgagtactgcagcgtccacaagaaatgttgcttcatcgcctgaaagtagctttgactcaccaaatctccaccccttccgcacttcctcggccacagctgatgagatgcagggagccatgatgcatacagctcacaggggcatcgagtttaaaagatcgtcaagcgatggttatgaagcatcaggaggtgaagatagcgaccgcatcccttcaaggatcgtgcacaggtcgtcaaactgggccagtgtctttctgcattctggtcagggagaccctccagctgatctgctgacgacatcagctgaaggttttgtagctaacgactctggttcctagagcaggcattgctgggtatgacagagcgatgttgacaagacattgactagtatctggcattaggtttaggtttaggcgcttaatttgtctgattacatgcggggatttggattagttctaggggccgattacatgtctgtaaaactgccttcttgctggtgccacttttttggcattccattgtcgccttcggcaaaatgtgaatttgacgccattgtgcttgctgagcttgatccaaagtactgtcgctgagtagtcttttgtaatcacatccgagtgagattaataaggtgtttggctcggcaattaccgtctaagctttgtattatta

SEQ ID NO: 208415 - DNA, 2338 bp, Zea Mays
aggcacactgtcgtcatactcccgtcccgacttcccgagacgccgcattggatgctccctccgctcgaatctgccgctttccattatcgctgacccaagcaacattctctgcttcttggtccttgccttcttggttcgccctcccgcaatctctggttctggcctctgggcatcgcgggagtaaggcatttcttggttttcctttcctgagatgggtctgagaaagagaagcgccatggttggtgaggcagccgtgttcgccgcatcttggtagccctcactcagcattggcatcctctcgttcttggacttggagttaactcagccatgaggaagcatgggtggcagctgccgtaccaccctctccaggtggttgcgatagccgtgttctcggcactggggttcgccttctacgtcttcttcgtgccgttcgtggggacgaagccgttccagattgtggccatggctatctacactccattgattacatgtgttgttgtgttatacatatggtgtgcggcaacaaatcctggagacccaggcattttcgattcaacgaagaatttgaaattagataagaatgaaaagcactcctatgtgaattcggatcaggggattaatcatggaggaaggccattaagtgagacttttggtactgctgataacagtgagaagctgagcagcatgcttgagaggaacgattcgccttcttggcccagattttctggaattatttccctggttttgaagaacagtaagcattgtagagtatgtgacaaatgtgttgatggctttgaccatcactgcagatggcttaacaattgcatagggaaaaggaactacaaaggtttctttgttctaatggcttctgcagttatcctgtggttgtcggggggacttgtgttgattctctgtattgtgaagcgaggagaattctccaggcaggttgtcacaaagttgggaagcagcttctcaacagtggcttttgtaattgttgtggcaacttgcaccattttagcaatggttgcaaccgtaccacttgcccagcttttatgttttcatgtccttcttgtaaaaaagggaattagcacatatgattacatcatagctttgagggagcacgaggaacaacaagaggttcctggacaccaaagcccgcagatgtctattgttagttctgttactggttttagcacagccagttcttttgggcctcttcatcgtggttcatggtgcactccaccaagattattcctggaagaccagttcgatgccattcctccagagattggcatttcacggaattcaggcagtaagaaaactaaggaagaggaaggagcaaggagaaaagctggagcagtgaaaatcagtccatggacattggcgcggcttaatgcagaggaagtctcaaaggcagccgcggaggcaaggaagaaatccaaaatcctgaaaccagttggaaaacatggcgccccagagaacagcagcaaaccagaccatttgcctagctacaagagacggctagacaggagaggtttccctgctgaactctctcttgacccacttgcaactctatctgcaagcggcaccgaaagcaactacagcgacgcagcaacagaaatctgtggcagtctagccccgttacagctcgaagcgagaagtgctttccaaccgagtactgcagcgtccacaagaaatgttgcttcatcgcctgaaagtagctttgactcaccaaatctccaccccttccgcacttcctcggccacagctgatgagatgcagggagccatgatgcatacagctcacaggggcatcgagtttaaaagatcgtcaagcgatggttatgaagcatcaggaggtgaagatagcgaccgcatcccttcaaggatcgtgcacaggtcgtcaaactgggccagtgtctttctgcattctggtcagggagaccctccagctgatctgctgacgacatcagctgaaggttttgtagctaacgactctggttcctagagcaggcattgctgggtatgacagagcgatgttgacaagacattgactagtatctggcattaggtttaggtttaggcgcttaatttgtctgattacatgcggggatttggattagttctaggggccgattacatgtctgtaaaactgccttcttgctggtgccacttttttggcattccattgtcgccttcggcaaaatgtgaatttgacgccattgtgcttgctgagcttgatccaaagtactgtcgctgagtagtcttttgtaatcacatccgagtgagattaataaggtgtttggctcggcaattaccgtctaagctttgtattatta

SEQ ID NO: 208416 - DNA, 2493 bp, Zea Mays
aggcacactgtcgtcatactcccgtcccgacttcccgagacgccgcattggatgctccctccgctcgaatctgccgctttccattatcgctgacccaagcaacattctctgcttcttggtccttgccttcttggttcgccctcccgcaatctctggttctggcctctgggcatcgcgggagtaaggcatttcttggttttcctttcctgagatgggtctgagaaagagaagcgccatggttggtgaggcagccgtgttcgccgcatcttggtagccctcactcagcattggcatcctctcgttcttggacttggagttaactcagccatgaggaagcatgggtggcagctgccgtaccaccctctccaggtggttgcgatagccgtgttctcggcactggggttcgccttctacgtcttcttcgtgccgttcgtggggacgaagccgttccagattgtggccatggctatctacactccattgattacatgtgttgttgtgttatacatatggtgtgcggcaacaaatcctggagacccaggcattttcgattcaacgaagaatttgaaattagataagaatgaaaagcactcctatgtgaattcggatcaggggattaatcatggaggaaggccattaagtgagacttttggtactgctgataacagtgagaagctgagcagcatgcttgagaggaacgattcgccttcttggcccagattttctggaattatttccctggtttgtctcccattctcttgcctttgcaaacggtgtctccattcagacagtctatcttcagaacacaaaatgtgtgaagaaggcatgtttttctgcagcttatgcgaagcagaggttttgaagaacagtaagcattgtagagtatgtgacaaatgtgttgatggctttgaccatcactgcagatggcttaacaattgcatagggaaaaggaactacaaaggtttctttgttctaatggcttctgcagttatcctggtctccatggtttgtacaacttgatccagcttgtgatgcagtggttgtcggggggacttgtgttgattctctgtattgtgaagcgaggagaattctccaggcaggttgtcacaaagttgggaagcagcttctcaacagtggcttttgtaattgttgtggcaacttgcaccattttagcaatggttgcaaccgtaccacttgcccagcttttatgttttcatgtccttcttgtaaaaaagggaattagcacatatgattacatcatagctttgagggagcacgaggaacaacaagaggttcctggacaccaaagcccgcagatgtctattgttagttctgttactggttttagcacagccagttcttttgggcctcttcatcgtggttcatggtgcactccaccaagattattcctggaagaccagttcgatgccattcctccagagattggcatttcacggaattcaggcagtaagaaaactaaggaagaggaaggagcaaggagaaaagctggagcagtgaaaatcagtccatggacattggcgcggcttaatgcagaggaagtctcaaaggcagccgcggaggcaaggaagaaatccaaaatcctgaaaccagttggaaaacatggcgccccagagaacagcagcaaaccagaccatttgcctagctacaagagacggctagacaggagaggtttccctgctgaactctctcttgacccacttgcaactctatctgcaagcggcaccgaaagcaactacagcgacgcagcaacagaaatctgtggcagtctagccccgttacagctcgaagcgagaagtgctttccaaccgagtactgcagcgtccacaagaaatgttgcttcatcgcctgaaagtagctttgactcaccaaatctccaccccttccgcacttcctcggccacagctgatgagatgcagggagccatgatgcatacagctcacaggggcatcgagtttaaaagatcgtcaagcgatggttatgaagcatcaggaggtgaagatagcgaccgcatcccttcaaggatcgtgcacaggtcgtcaaactgggccagtgtctttctgcattctggtcagggagaccctccagctgatctgctgacgacatcagctgaaggttttgtagctaacgactctggttcctagagcaggcattgctgggtatgacagagcgatgttgacaagacattgactagtatctggcattaggtttaggtttaggcgcttaatttgtctgattacatgcggggatttggattagttctaggggccgattacatgtctgtaaaactgccttcttgctggtgccacttttttggcattccattgtcgccttcggcaaaatgtgaatttgacgccattgtgcttgctgagcttgatccaaagtactgtcgctgagtagtcttttgtaatcacatccgagtgagattaataaggtgtttggctcggcaattaccgtctaagctttgtattatta

SEQ ID NO: 208417 - DNA, 1631 bp, Zea Mays
aacaagtgctagtgatagcacggttttgaagaacagtaagcattgtagagtatgtgacaaatgtgttgatggctttgaccatcactgcagatggcttaacaattgcatagggaaaaggaactacaaaggtttctttgttctaatggcttctgcagttatcctgcttgtgatgcagtggttgtcggggggacttgtgttgattctctgtattgtgaagcgaggagaattctccaggcaggttgtcacaaagttgggaagcagcttctcaacagtggcttttgtaattgttgtggcaacttgcaccattttagcaatggttgcaaccgtaccacttgcccagcttttatgttttcatgtccttcttgtaaaaaagggaattagcacatatgattacatcatagctttgagggagcacgaggaacaacaagaggttcctggacaccaaagcccgcagatgtctattgttagttctgttactggttttagcacagccagttcttttgggcctcttcatcgtggttcatggtgcactccaccaagattattcctggaagaccagttcgatgccattcctccagagattggcatttcacggaattcaggcagtaagaaaactaaggaagaggaaggagcaaggagaaaagctggagcagtgaaaatcagtccatggacattggcgcggcttaatgcagaggaagtctcaaaggcagccgcggaggcaaggaagaaatccaaaatcctgaaaccagttggaaaacatggcgccccagagaacagcagcaaaccagaccatttgcctagctacaagagacggctagacaggagaggtttccctgctgaactctctcttgacccacttgcaactctatctgcaagcggcaccgaaagcaactacagcgacgcagcaacagaaatctgtggcagtctagccccgttacagctcgaagcgagaagtgctttccaaccgagtactgcagcgtccacaagaaatgttgcttcatcgcctgaaagtagctttgactcaccaaatctccaccccttccgcacttcctcggccacagctgatgagatgcagggagccatgatgcatacagctcacaggggcatcgagtttaaaagatcgtcaagcgatggttatgaagcatcaggaggtgaagatagcgaccgcatcccttcaaggatcgtgcacaggtcgtcaaactgggccagtgtctttctgcattctggtcagggagaccctccagctgatctgctgacgacatcagctgaaggttttgtagctaacgactctggttcctagagcaggcattgctgggtatgacagagcgatgttgacaagacattgactagtatctggcattaggtttaggtttaggcgcttaatttgtctgattacatgcggggatttggattagttctaggggccgattacatgtctgtaaaactgccttcttgctggtgccacttttttggcattccattgtcgccttcggcaaaatgtgaatttgacgccattgtgcttgctgagcttgatccaaagtactgtcgctgagtagtcttttgtaatcacatccgagtgagattaataaggtgtttggctcggcaattaccgtctaagctttgtattatta

SEQ ID NO: 208418 - DNA, 3118 bp, Zea Mays
gtcagacgtgtggatgcctggccgcccgcccgcccacgcatctcaaccgcctcccgacgctttctcttccatgcgcgcgtcttggtcagagacaggcagatgcaggtgcgcgtgcccaagtcaacatttccttctacttctaccattcgccgactccttgtgccatccggcctaacctcttgtgatgctcaaagccgtctctaaggacaaatctagctagtctggtgcagccaaaaggaatcttcgtgttctacactccacaaagaccacaaaaagtgtcatctttttcttccttttcttggtcgacgaaaggaggaggaggaatgagctcataggaggcaacaagtgatgaggggtttaggattcgtgttgctgttggtggcagctgcagcattgatcaggccatcagaagtagtaggggcagaggaggaggactgggagcttttcttgttgcagtggaggcagcataattctcttccatccccacttctcaatggggatctggtggatagaatatggtcaatttgcttaccagacatggccggtgcacaggaaatattgggcaatccactgcaatttgcttcagatcagctattgagtcagccatcagaaaatgctttgaaggcaatgctgtttctggagtttctgtctcttctttcccctgaaaaattatccagtacctatggttgcatccatgcaaactacttcggtttgggcattccacaagaactcagtgtttcactggcaacctaccttgagagccatcagctgttgcttggttcgaacttctatgcgagacggcatttggctgacaactcaattggagatgctccttccatggctccagattttgcgccgtccatgtcctctggcgatgacgtgaagcttcctcagtctgttacagaaacaccgtatgcaccttccagctcttacaacaatgaaaatccaaaccgacctcatcacagtaaacctgcacagaagcatcggggagtacctccaatttcacttctggagaagcataaagactatgttagattagtcttgatcgtggttctaccaacagcggcattctcgttcattgctgcttttctaattttctactgctgcggatgcaacaagaacaaggtctctgtcggtgagcaacgagatgatcatcctcttcttcacatgcagttggctaatgtacctggttcatcacccgatgcccgtgtttctgccagtcaccttaacaaggataatcgaagtcattctggagtcagcatgagtcggtgcttttcatgctgttttaaaagatccactgatgccacaccatcttcagaagtgattggaggaacaccagagaataatgtcacaagtgatgctcctaaaccgatgtcgcctccagctcctccacctttgccacctccgatcaagaaggctcctcctcccccacctggacctcccagaggttctaaagcaagacttgctcagctgtcacctgttgagtcaagtcgttctgaaggatcatctgccagcgagcagaccagcgaatcatctgaagcagaagttaatgctccaagaaccaagcttcgacctttctattgggacaaagttcttgctaatcctgatcagtcaatggcatggcatgatatcaaattcggttcttttcatgtgaatgaagatatgatagaggaattgtttggttatagtggtggaagcagaaataaccttaaggataaggaactcccctctgcggatcctgcatctcagcacatttctcttctcaatgttaagaaatcatgcaacctggcagttgttttaaaggcaatgaatatcagggtacaagacattcatgacgctcttattgaagggaacgaacttccaagggtgcttcttgagacaatcttgagaatgaaaccaactgacgaggaggaacagaatctcaggctttataacggggatttctcgcagctaggccttgcagaacaagtgatgaaggcattaattgacacgccttttgctttcaagagggttgacatgttgcttttcatgtcctccttgcaagaagatgcttcaagtctcagggattcgttccaccaattggaggccgcttgtggggaactgaagcaccgcctttttctcaagttactagaagccgtgctcaaaactggaaaccgtttgaatgatggaaccttccgtggtggtgctaatgcattcaagcttgacactctcctgaagctatcagatgtcaagggtgctgatggaaagaccacattgctgcactttgttgtgcaggagattgttcggtccgaaggtgtccgcgaagcaaggctagccatggaaaacggaagaagtccagctcatagtgcttcagatgacacttccaatggatctcttgaagaggacggtgatcactactccaaccgcggacttagcattgtgtcaggacttagcagtgagatggacaacgtcaagagggtagccgcactggatgctgagcctctgtttgccactgtggtgaccctcagacaagagttgctgaaatcaagggagttcctgaatgaaattgcgacagtagaagagacgagtggattcagacgttcgttggaaagctttgtggaacacgcggataatgagacggggtttttgttgaaagaagagaagaggttgagatcgttggtgaagaaaacaatccggtatttccatggaaacgactctaaagacgacggtttccggttgtttgtggttgtgagagatttcttggtgatgctagataaggcgtgcaaggaggtcggggcatcacagaagggtacgaataaatcacgaagcagtggcagtggcagtggcaatggcaatggcaaccctacgttcccgtcaatcctacaggagcaacagttccctgctgttattgatggccattcagatagttcacatactagcaattgacgatgagatactaacctttttttgtaaagaaaaaaaaatccgttttggagaggaaatacattttagcatacatgtagatttacatacgtatcatcctacgggatctttttatttttaatattttaatcaatattttaataataaccgtggacaggttatttctaactcattgtttaatcacgatatataaaat

SEQ ID NO: 208419 - DNA, 7679 bp, Zea Mays
  misc_feature (7678)..(7679): n is a, c, g, or t
aaaaagagcagcagccaaaataataaaaatagaaacaaactcgcctttttttctctctcctcccaccccggcgctccctccctcccgctcctccgccgaggtctgtgatcttctgccgctcctccgattggattcctcctcctccggcgttgcccggccccgcgccaccgggctcctctcctctcccgatcggaccggaccgcaccgcgccgggcgtgccctttggcgctgccgccaaatgcccggcgcgcgcggcgctgccgccccgcccccgctgcctcgctgcgacacgggtgcggggcgcgacgtaggattctgacaccggggatctttgcgcggtggagttctgggcccctcctccgtggaccgtggcggtgcctcgattagcaagcggcgcgcgcctgtcgctcgaccgatcctgctcgcgcttcctcggattccgatgcaatgcgcaccgcgggccgcgcggctcctcttctgaccgatctcggaggagctctgagatttctgtcgcatcagatgaggatgcaagtatgaaggtttctttgaggtggtacagttttagctgccaatggaggacccaaataaaacgttttctgacgtagttaagcttttgacatcatggctgccgcgacgctccaacccagataatgtctcccgggacttctggatgcccgatcacagctgtcgagtttgctatgactgtgattcacaattcaccatattcaaccgcagacatcattgtcgtcgctgtgggcgaattttctgtggtaagtgcactgcaaactccatcccagtttcaagtggccctgacagaaatgtcgatgagggggacaggatacgtgtctgcaacttctgcttcaagcaatgggagcaagaaagagtcacttccctcaaaccggtgctgccggtgctcaccccttccctgtctgagacgagtttgttcagcaccaagtcagctatcaccatcaatagtgttaccacaacggcaggctcttactctaatgggaattatcagcatgtgagctgtgttaccagcactagtcctccaaagtgttgccatgacaagacctcccataatatgcaagacactcatgctcctgagaaatgtatgtccactgtttcaaacaaagatgactcttcagttcagtttggctactacacaaacaggagtgatgacgaagatgaagaataccctgcttactgctctgataggcaggtacaacatcaacaacagagtggacaatattatggcccagatgagttttatgagcttgatacaccctacaattcaaaaatgtcgatcgttgaagaatctatgacctctaaagaactatccccacatgtgcttgatcaaggatttccgagtgcaccgaccattacaaaatcagacaatgaaccagaacattattatagttctgaatgtggtgctgcttcatccatttatgctttagaaagtaatgatacgaaccctgttgattttgaaaaggatgaacttttctggcttcctcctgaaccagaagatgaagaagatgagttgcaagctgaattgtttaatgatgatgacggtgacgatgacgatgacaaatctgtagctgatggtgaatggtgtcgaattcggtcgtcaagtagttttggcagtggagagttccgaagtagagatcggtcgggcgaagaacataagaaagtaatgaagaatgttgttgatggacatttcagggctttgatctctcagctactagaggtggagaatattccgttgcatgaaggtgatgacatgggctggttggagattgttacttctgtatcatgggaagctgccaacttcctcaggccagacacaagccagggtggtggcatggatcctggtggatatgtcaaggttaagtgcttagcatgtgggcaccgcaatgaaagtactgttgtaaaaggagtagtttgtaagaagaatgttgcacataggcgcatgacaactagaatagagaagccccgtctcctactacttgcaggagctcttgagtaccatcgagtcacaaatcagctgtcaagtattgatacattgctccagcaggaaacagatcaccttaaaatggcagtcgcaaagattgtagctcaaagacccaacttgcttttggttgagaattcagtttctcgatatgctcaagatttgcttctagaaaagaacatatcgttggttttaaatatcaagcagcccctcttgcaacgtattgctcgttgcacaggtgctcagatagttccttctattgatctcctaccatctcagaagcttggttactgtgagttatttcatgtagataaatacgatgaacagtctgttagctcggttaacgtgtcaaagaaaatggtgaagaccatgatgttctttgaaggatgcccaaaaccattgggttgcactgttctgctaaagggtggtagcatggatgagctcaagaaaattaagcatgtggtccagtatggtatttttgcagcatatcacttggcgttggaaacatctttccttgcagatgaaggtgcaaccctaccagaacttccattgttgtctccattgactgtagccttgccagataaacgatctactgcagacagctccatttcagcagtgccaggcttcacaattaatgtttcaattagccagcaaactgatagttttgaccacattggtaccgactacatcatgtcaacccaaccaggtgaaaatgctgtggctgaagcaccagtatccagcgaatgctttagttctcagaatacctactctcattctcttggaccttggtgtgctaataacagcaatttcaataacggcactggtgatggagatggattagctaatgtcactgcaactccaaattctgtttccatatcttctttgtctacatctggtgcactcacaaaccatacttctagatattctagtgtagagaaaaacagtatgcattttggtgattatcatgatggttcaatgaggttacatggtaagacggtgacaatagattcaaccagcacagcaagccattatcaccagagcacagtcaaagctagcactaatatcaatgtcaatgagtcattagaaggtccatatgctttggctaatgtgaaaaccatcaacgagaacaattctattgtagtccaaccagtgtctactgctgctgtacaataccaagagaccagtcaaggagatgatagcacatcaaataaggatgaagtggtgccttctgatcatcaaagcatcttagtctcattgtccacacgttgcgtatggaaaggtactatttgtgagcgttcccagctgttacgcatcaagtattatggtaactttgataagccccttggaagatttttgcgggattacttgtttgatcaggtttggcaaaatggttgcatgcttccgatatgctcctattagtgttcactctgttcatttaccacctcataaacttgattttggccaccagcccttggattggatacaaaaggaagcaaatgaggttattgagcgagcaaaacatctatttgatgaagtattgcatgctttacacatgatatctgacaaaaaggttcaaggcagttcgattaacatggaatttagcaattacattgctgatcttgaaatcatgcttcgaaaggaaaagtcagaatttgagggatgcttgaataaagtcttgagaagggatatgcagaaaggccaaccggacattcttgagatcaataggctgcgaagacagttactcttccattcatacttgtgggataaaagactggtatttggcgcaagatcagatagatgtcgtcatgagaagacccattccatagatagtgtcgctgagcaaaatgtaatactaaagcctcaaagtgaatgcagcgggaataggtctgccaacaaagatgctaaatatgttgagtgccttcaggaaagtatttatggagggaatcacactggagttgatgtgggtactgtcaattcgaatcatgtccatcaaatggctacaggcgaattggattcgcttcagagagacatcaaagctcctctatacagcagtgttagtgtaaatggtgagtcgattcccttggaaccagatcttgttgctcgacgcaccctttcagaaggtcagtttcctagtgtattggatgtgactaatgcacttgaagcgaaatggaccggtaaagatgatcctgtttctagcaaggtaaccatgccagaatctacagcatcttcagaggactcagaagaacatatgggtgataatacaccttcatacgcctctatattgctgagcaagctaggggacagtgcagcagatcattctaattggatagagatgcctttcttactattttaccgttccctcaataagcaatggaatcgatcaaaccgatttgatgcactcaacgaatatagtcccgaatatgttcctttcttaagggaagtggagcgtcatattggacctaaatttttctttcctataggaatcagtgatactgttgttggagtttatgatgacgaacctactagcattatctcttatgcgctggcctcccatgaatatcatcttcagatgtcagatgaactggaacgagaaatgacagacacttcactcccactatgtgactcaagaagtgtctcgttaactgaactggatgaatgtacttctgaacttctaagaagtgttgtctctacagaggacattatcctctccatgtctggaagaaagaacccacttgcttcagattcacttgtgcctcgaaaagtaagtcacataaaagtgaattttggggatgaaggtcctctaggacaggtgaagtacactgtgatttgttactatgccaaacaatttgatgctctgaggagattatgctgtccatcagagcgtgattttgtcaggtcccttagtcgttgcaagaaatggggtgctcaaggaggcaagagcaatgtattctttgcaaaaacaatggatgatcggttcataattaaacaggttaccaaaactgaattggagtctttcatgaagtttgctccagattacttcaaatatgtatcagagtcgatttgtactggaagtcctacttgcatcgcaaaaattcttggtatttatcaggttaagagcctcaaaggaggtaaggagatgaggatggatgttcttctgatggaaaatcttttgtttgagcgcgatgtgacaacattgtatgatttaaagggctctgccagatcaagatataacccagactcaaatggtagcgataaagtacttcttgatcagaacttaattgaagcgatgcctacatcacctatatttgtcggaaacaaggcaaagaggctgctggagagagctgtttggaatgacacgtcctttcttgcttccatcgatgtaatggattactctttacttgttggtgttgatgagaaaaggcatgaacttgtaatgggtattatagatttcataaggcaatatacgtgggacaaacacctagagacatgggtgaaagcttcagggatactaggtggaccaaagaatgtgtcgccaacagtaatttcaccaaagcaatacaagaagcggtttaggaaagccatgtcggcctactttcttgtcgtcccagaccagtggtcgcctccagtggtcatccccagcaagcaagctgagagtggtcaagacagggacgaacaggttgtcttgacagaattgtgagatgcatgcattacttttaggaacattcagggaataactcctcttttttgcaacatctatagattttgattttatttaaattttgttcattgttttttcttgtagctgtattttctgggtattcctaccctttcctttttttggggaggatctatagaaagttttagcccaagtctttgaaactggtcattgtaaataccatccttcttctaatgaaatgatacacagctctcctgcgtgtttaagaaaaaaaagtctttgaaacttaagtatgtgtctcccgccccctcccctccccggcgctccagcccccccccccccccccccccccagcctcacgtcggtgtccactctaggctcggcggccacccatattcctccctcggcaccggcaaactcctctgtttctgccccgctggtcgctcaaaggctcagcggtggagcgatgatggagattcctcctttggtgtctcgccggagcctcttcaggtgcaagcttcctacaaggacgtcctaatctcatcaggggagcttgttcatcccgcttcttctcgggaagaggaaggcagctgggttaaggttctcggtcgtcgtgatcgtaggcggcgctcccagtcctcccccctagtttggctcttgtggacttgcgtgggaggtgcttcaactgcttctcgccatctcatcgggttgctgagtgtcggcggcaggtgcggtgcttccattgccggctgcctgggcactgtgcctagcgtgcccgcgacggtcgacggctactcatcatccgcgtcgagtccaggtgtggcgccccgtcgtccaagtggcagcgccgatggaagcccctagaggccgtatggaggatcatgcaaggtgtgccgggggaggctctgctgatggcggacgaaggcgtactcgccgtgggccgaggaagaggcggggacggagctctggtggtcatggtgatcgtgatgccgccgatgccccctctccctctttcgcattcagataccagtataccaccatcccgtctgtttcctccggatgacatgtgagttacatcaaacactcatggaaaatttggcaggctgagcaagatcttcaccgcactcttcttatctcagctgttgatctggagggttctggtggcgccacggaggtcttgatcgcactaagcttgagttttaaccttgatgctgatgtgatcgacctacgcatggtcgcaccaaattcctccatcgctctatttccgaatgttgggatggatgatcaggttctatctggaggacaatctttgtatgtgccccccattcggttgatcatcaagcgctggtctcgtcaggcaatggtatccggtggtggcgctgctggatattaatctttagggtattcttgctcatctatgggggatggagacggcggagcacattctgcgaggattctgtctgctgagccgtcagccgtagtaaagtctccaagtttgaatctggcgggaagggtggtgactgttactccagttgatggccttgctctcccaacttgggatgttgagctggaggcgcctgggtcccatcttgtctcttcgtctgctgctgcttctctggtaataatgtctccaactttgattcaagtggagggcttcgcaaaggatgctaataatgatgttctggtctcagcgatccaacagatggatggttttctcacagttgtgaaaatgtaccagattctatggctattgtgcagcttccacctgttttaccccagacaccttgcaaagtaacccaagttcatactagaagaaagcacctattgcaaactcaggaagctacggacgatggtggtgtggctaaggaattcatgaataagattttgcaatccctttcaggcgttctacctgtttctccttcgtcgaagctaaaaaaacagaaggtctattgcgcccaattttgttccaagaagatccaggagggtagctaagcttnn

SEQ ID NO: 208420 - DNA, 4040 bp, Zea Mays
aaaaagagcagcagccaaaataataaaaatagaaacaaactcgcctttttttctctctcctcccaccccggcgctccctccctcccgctcctccgccgaggtctgtgatcttctgccgctcctccgattggattcctcctcctccggcgttgcccggccccgcgccaccgggctcctctcctctcccgatcggaccggaccgcaccgcgccgggcgtgccctttggcgctgccgccaaatgcccggcgcgcgcggcgctgccgccccgcccccgctgcctcgctgcgacacgggtgcggggcgcgacgtaggattctgacaccggggatctttgcgcggtggagttctgggcccctcctccgtggaccgtggcggtgcctcgattagcaagcggcgcgcgcctgtcgctcgaccgatcctgctcgcgcttcctcggattccgatgcaatgcgcaccgcgggccgcgcggctcctcttctgaccgatctcggaggagctctgagatttctgtcgcatcagatgaggatgcaagtatgaaggtttctttgaggtggtacagttttagctgccaatggaggacccaaataaaacgttttctgacgtagttaagcttttgacatcatggctgccgcgacgctccaacccagataatgtctcccgggacttctggatgcccgatcacagctgtcgagtttgctatgactgtgattcacaattcaccatattcaaccgcagacatcattgtcgtcgctgtgggcgaattttctgtggtaagtgcactgcaaactccatcccagtttcaagtggccctgacagaaatgtcgatgagggggacaggatacgtgtctgcaacttctgcttcaagcaatgggagcaagaaagagtcacttccctcaaaccggtgctgccggtgctcaccccttccctgtctgagacgagtttgttcagcaccaagtcagctatcaccatcaatagtgttaccacaacggcaggctcttactctaatgggaattatcagcatgtgagctgtgttaccagcactagtcctccaaagtgttgccatgacaagacctcccataatatgcaagacactcatgctcctgagaaatgtatgtccactgtttcaaacaaagatgactcttcagttcagtttggctactacacaaacaggagtgatgacgaagatgaagaataccctgcttactgctctgataggcaggtacaacatcaacaacagagtggacaatattatggcccagatgagttttatgagcttgatacaccctacaattcaaaaatgtcgatcgttgaagaatctatgacctctaaagaactatccccacatgtgcttgatcaaggatttccgagtgcaccgaccattacaaaatcagacaatgaaccagaacattattatagttctgaatgtggtgctgcttcatccatttatgctttagaaagtaatgatacgaaccctgttgattttgaaaaggatgaacttttctggcttcctcctgaaccagaagatgaagaagatgagttgcaagctgaattgtttaatgatgatgacggtgacgatgacgatgacaaatctgtagctgatggtgaatggtgtcgaattcggtcgtcaagtagttttggcagtggagagttccgaagtagagatcggtcgggcgaagaacataagaaagtaatgaagaatgttgttgatggacatttcagggctttgatctctcagctactagaggtggagaatattccgttgcatgaaggtgatgacatgggctggttggagattgttacttctgtatcatgggaagctgccaacttcctcaggccagacacaagccagggtggtggcatggatcctggtggatatgtcaaggttaagtgcttagcatgtgggcaccgcaatgaaagtactgttgtaaaaggagtagtttgtaagaagaatgttgcacataggcgcatgacaactagaatagagaagccccgtctcctactacttgcaggagctcttgagtaccatcgagtcacaaatcagctgtcaagtattgatacattgctccagcaggaaacagatcaccttaaaatggcagtcgcaaagattgtagctcaaagacccaacttgcttttggttgagaattcagtttctcgatatgctcaagatttgcttctagaaaagaacatatcgttggttttaaatatcaagcagcccctcttgcaacgtattgctcgttgcacaggtgctcagatagttccttctattgatctcctaccatctcagaagcttggttactgtgagttatttcatgtagataaatacgatgaacagtctgttagctcggttaacgtgtcaaagaaaatggtgaagaccatgatgttctttgaaggatgcccaaaaccattgggttgcactgttctgctaaagggtggtagcatggatgagctcaagaaaattaagcatgtggtccagtatggtatttttgcagcatatcacttggcgttggaaacatctttccttgcagatgaaggtgcaaccctaccagaacttccattgttgtctccattgactgtagccttgccagataaacgatctactgcagacagctccatttcagcagtgccaggcttcacaattaatgtttcaattagccagcaaactgatagttttgaccacattggtaccgactacatcatgtcaacccaaccaggtgaaaatgctgtggctgaagcaccagtatccagcgaatgctttagttctcagaatacctactctcattctcttggaccttggtgtgctaataacagcaatttcaataacggcactggtgatggagatggattagctaatgtcactgcaactccaaattctgtttccatatcttctttgtctacatctggtgcactcacaaaccatacttctagatattctagtgtagagaaaaacagtatgcattttggtgattatcatgatggttcaatgaggttacatggtaagacggtgacaatagattcaaccagcacagcaagccattatcaccagagcacagtcaaagctagcactaatatcaatgtcaatgagtcattagaaggtccatatgctttggctaatgtgaaaaccatcaacgagaacaattctattgtagtccaaccagtgtctactgctgctgtacaataccaagagaccagtcaaggagatgatagcacatcaaataaggatgaagtggtgccttctgatcatcaaagcatcttagtctcattgtccacacgttgcgtatggaaaggtactatttgtgagcgttcccagctgttacgcatcaagtattatggtaactttgataagccccttggaagatttttgcgggattacttgtttgatcagggctatcagtgtcgttcctgtgataagccacctgaagcccatgtccattgctatactcatcgccagggaagtctaaccatttcagttagaaaacttaccgaatttgttttaacgggtgaaagggatgggaaaatttggatgtggcacagatgtctgaaatgtccttggagtaatggatttcctccagcaactcagaggattgtcatgtctgatgctgcctggggtttgtcacttggtaaatttttggagcttagcttttcaaaccatgcagctgcaagtagggtagccagttgtggtcattctctccacagggactgcctccggttctatgggtttggcaaaatggttgcatgcttccgatatgctcctattagtgttcactctgttcatttaccacctcataaacttgattttggccaccagcccttggattggatacaaaaggaagcaaatgaggttattgagcgagcaaaacatctatttgatgaagtattgcatgctttacacatgatatctgacaaaaaggttcaaggcagttcgattaacatggaatttagcaattacattgctgatcttgaaatcatgcttcgaaaggaaaagtcagaatttgaggaatcgaagccaggagaggggaagatgagggcaaatagactatttg

SEQ ID NO: 208421 - DNA, 1060 bp, Zea Mays
tctgaattctgacgccgtcgatgcataacctcctcgtgcgttgtttgtctctctacttctctagtctagcccctctgtcgctctcagacgacgggtgcgccgccgccgccgccctaagccaggtgctgactgctgaggctttctttggtctcttcgccggcgacgacacccgccaggtttgggtttgacaattggtctgaaatcaactatgcagttcttcaccaagccaaagaattacaaggttattttgcaaccactgtatttgctagggctattgcccttaaacatgtctaacatcccatctttctcgataactgctctggtgaacagggtactatctcatttggtgctggtttttttctggttctcattgggtggccgttttttggcatgctcttagaggcatatggctttattgtactcttcagtgggttctggccaacactttctgtgttcttgcagaggattcctatcatcggctggattttccaacaaccatttgtgacatcgttccttgaccgctacagaggaaaacgtgttccggtctagcaaccttttgcgcaatatatgcttgcggtgtagcaactagcagcctgtatttttttaactacagtagcaaactgattataccgatgtctgatccctcatgtttatatgttttctttaggattgctctttgtaaattacagccccaaactggccaaatcaaaggtccattcctttgagaccaggatgcaggttcacccatgaaatggatctgttgaagaaactcttaagcttgtatggaagtaaaagctaatatgttcctttatatgataatataagttatatattattgtgtggaccgagtttctgaacacaattgcggttcatgtaatcatgtatgtggctcgacccaggattactagaccttccaaatttttaaggggttatctaaatgattcacaatataactaggaaaaccttgaaaaaacacacatgagtggcacatgagaatcaacattttttgtgagggaggataaacaagttgtagtctccgtgtttggaaaaaatcagaaga

SEQ ID NO: 208422 - DNA, 1966 bp, Zea Mays
ctttcttctcggcgtcctcgcagtttcgcgtttacccaaaatacccctaccttaaaccctccgcctccgccgccatgcgccgcctcctccaaaccctccgcccgctccaagccctacccctcaaccccgctcccggtatccccacccctctccgcctcctctctaccgcctcgtcggccgcgtcctcggactctgactccgccgcttcccccgccgtggccccgccccccgctgccgatgccgactttgacagcgccgactacgacctcccgacccctggtcccgccccctccagaaaaatcaacaaccccgccgccgcgctgaggaaggtccggttcgacccctccctccgcgcgcgcgccgacgaggcgctctttggtaaggggctgggcgcggcagccgttgatgaggaggatgaggaccgctcacgggacgtggcgctcgcgctgctcgatgcggcgctggaggcgcctgacgaggatgaagaggatctcggggaggtcagggaagaagaccagatgtcgctttccgttggcattgtcggcgcgcccaatgccggcaagtcctcgctcacaaataccatggttgggacaaaagtggctgcagtctcccgcaagacaaatactacgactcatgaaattttgggggtgctaacaaaagggaacacacagatatgcttttttgacaccccagggctcatgttagggcaccatggatttccttatagggatgtcacagttcgtgtggagagtgcctggagctcaattaacctctatgatttactaatagtcatgttcgatgtcaataggcatcttaatctgccagattcacgagttataaagttaattaaacgtttgggtacggaggtgaacccaaaccagaggcgtatattgtgcatgaataaggttgacttggtggaagacaagaaggacctacttaaagttgcaaaagaatttgaagatcttcctggatatgaaaggtacttcatggtatctgggctaaaaggcaagggagtgaaagaccttgtacagtatttgatggagcaggcagtaagaagaccttgggatgaggagccaactgtaatgactgaagaggtaatgaaaaccataacgttggaggttgtgcgcgagaagatgctgcatcacatccaccaagaaatcccctatgtaattgagcatcgtctgatgggctggaaggagctaaaagatggttctcttagggtggagcagcacttcattgcacctaagcaaagccagcgtcagattcttgttggtaaaaatggttctaagatagggagaatcggtattgaagctaatgaagagctaaggtccatattcaagagagatgtccatctaattctccaagttagagttgcgaaaaagagaagtgcctgaacagacagatgttgtcacaatgtattcaggagacatggttggtaagtggtgcttgggcgcatcagttcgggtgactgctttgacagaactttggatctatgatcaaatggaggtgccgagctataacctagcgtgtggagccttgatttctgaataaaagatataccgggagcaatccacacgccagtggtgacaaggaaacggcttgctgaatagcgagctgctcgtgtgctggcgaatctggggtctgtgatactgatatgcagatacgaatgcgctggacaccgttttgcctactctctgattcgaaaagtagtccctctccttctcaggtctcagcctgtattttctataggttctttagacagtgttgtaacgacaggatgatcgagcatgtcggcgttgaagtttgctgctgatcttccgcggtgttttgaacagcggaaatttaaggatgaaatccggtggaaaatttacacgatggaaaatttccccgggacgtgcgcgtgctgtactgctgatacagaaatgctccctatatctatatttatcatcgtctatatttatcatca

SEQ ID NO: 208423 - DNA, 1479 bp, Zea Mays
cctctctgcaaaatgcaggggttttgcgtgcacatcacgatgaagtgtggtttattcaattctcaaataatggaaagtatttagcctcagcgtcaaatgataaatctgcaattatatgggaggttgatgaggatggagagctattactgaggcatacattgagtggccatcaaaagtcagtgatgatggttgcatggagccctgatgattgtcagctcctcacatgtgggcaggaagaaaccatccgacgctgggatgttaaatctggcaaatgtcttcatgtttacgagaagtctgccactggtttgatatcatgtgcttggttcccagatggaaagcaattatctggtttagctgatcaaaacttttgcatttgggatttagatggtaaggaagtagattgctggaaagggcagggatcaacaggaacatctgattttgctgtagcaaaagatggaaaccttataataagcatgagcaagcagaacacaattcttctatttgatagggagacaaaacaggagagaataattgaagagggtagtacaattacttcattttgtctatcagaagacggtgatttcctgcttgtaaatcttgtaagcgaagagattcatttgtggaacataagaaatgatcctgttcgtgtcaaccggtacaatggtcataagcgcacccggtttgtgataaggtcttgttttggcggatttgagcaggcgttcattgctagtgggagtgaagattcacaggtctacatatggcatagagccactggcgatctcattgagactcttgctggtcactcgggcacagtcaactgcgtcagttggaatcctgcgaatccccacatgctcgcctcagcgagcgacgatcacacagttcgtatatggggggcaaagaagtccagtcttaagcgcaaggatgttgggagcagcaattgcaacagtaacggttctcgctcgaatggcaatgcacataacaacgttttcgttcaaaagtgcaacgggaacaacaccaaatgatttgccagggcaatgtatccccatggatggttgactggcgtctgtaaatccccctgtcctttacttccctcgtggaagaagaatcgccaccgccatagttaagacaacaacaacaaagctgcagcacaaagtgtggggaacctgctaggtttcgtgcgctatctttcccttgttccttcatgactgtcatcacatgtatttcttaattcaagctgggatggaattatggtattactttgcatctttgatatcttgatttgccctctctgattgattgtaactgcattttggtggtgatggttgttaactcctcttattgcattttgccttgagaagaaacaaatgttggcctaggatgctccgtctaaagaacgggacggaacatcttatcacaaatttaagtagattcatggatcatttatttccaatgaattaagtggtctgtttgattgtcata

SEQ ID NO: 208424 - DNA, 1771 bp, Zea Mays
gtgagcaccttcccagcttccgtcaacagcggttcacaagagagagagagagagaaatctggtgaaacttcccaataatctggcatgctaatgattaaaacattccaacttcaacggagacaggatagatatgacgagctactttgatttggcaccaaccattccgaacgcccacttggggcacctcctcgacaagaacacacgccatgccatgaagaaaaaacaaacaaacaacctgtccttttccctgagcacaatccgtcgatacctactatgaaacttcaactgataagaaaaaatgtgtcatctgtctaataataagatgctctgataaatgacagtagtagttgttagcagtcaaaaccgattgattaggttgattgaaacactactctgaataccaacgaagtaaaagtatagtaacactagtcctcgttctgtaccgtcgaaaagctcgtgttcttgggcttatcgattggaaccaggaatccaatcagtgctagtgaacgaaagagacaaatcagcgcgtagctctcgcagcagtacccacaggccttccgtgtcgtctccatcggagaaagggggcgtcgtccctgccgttggtgctaaaggcaagagaatcctgctgcagacaagcggaacggaacaatgccttgttgccttccttctcccccagcctcacaatggagccgccccccctcccctttgcagattcttcgagcaacatggcaggatcattcattattcgaatcagtaaccgtaagggcaattctgtggtggttggtgcaggttctggagctgggaatcctggtgcactcggtgatcatcggcgtgtccctgggcgcctccctgcggccgtccaccatcaggcccctcgtcggagccctcagcttccaccagttcttcgagggcattggccttggcggctgcattgttcaggcagagttcaaggcgagggcggccgtggtcatggcggccttcttctcgctcaccgctcccgcgggcatcgcgctgggcatcgccatcgcttccggctacagcaggcacggcgccaccgccctggtcgtggagggcgtcttcaacgcggccgccgcagggatcctggtgtacatgtccctggtcgatctcctcgccgcggacttcagcaacccgaggctgcagacgaacgccaagctccagctggcggcgtacgtcgccctgttcctcggcgcggggctcatgtcgttgctcgccaaatgggcgtagaacagaacagattcgctacccgtcagttttttttttctgccgaatcaccgtcagcgagaatttcggtgcgcagaggaagcgaggaaagaaggcccggatgtgatgtattttctacgcagagaacacatttaatgacttcacaaaagaagcagacttcgtttctcagagggaaggggaagaaaacgaggatggaaaccaccgacggggctcaacgctattttggtcgtttccatgctcttttcacaataaatctcttgccacattatcaaaaagctgatatggcagtctaataaattctataaaaaccatatgagctggagagcgttgggagtgctctaaccgagttctagggggatgaggcggcggagtagtttggccttcaacgatctttggggctaaataatagctgtacatacaaagggtcgattttttttaggggaacgggcgaacggcaatgcacatgtctgttatcccggatcctccttttttgcatgaaatttcttcatattcccctgaaagaaggcgt

SEQ ID NO: 208425 - DNA, 1968 bp, Zea Mays
aacctgatccgtttttttccaaacaatcacgacaaaaggtccacggcaacaccaacacttgctgccagttggagagcgtgcccacacacccagatcggacggtgcacactgctcagggcccaccacgcttcaaagcggcgttgccggagtgtgagctcaccatgtcaccacactcgcggccgcggagctttatatagctcagcgcgcgcgcggcgccgactccctccctccgtcactcaccgcaccggccctctctcccacgccaggcgcacgtgcgcgcacgccatggacgccacgcgagttcgggttcctcttcccccgtctctgccggcgtggctcgctgtgctactgctcctcgttcaggtgacgcccggggtcggcgcggcggcagcggcgggcgtggggtgcgattgtggcggcggcgaggcggcggcgatcaaggaggaggacgcgcgcggggcgctgcggctgaagctcgtcgcggtggcgtccatcctggcgtcgggcgcggcgggggtgctggtcccgctgctgggccgctccgcctcggcgctgcgccccgacggggacgtcttcttcgccgtcaaggcgttcgccgcgggggtcatcctcgccaccggcatggtgcacatcctgcccgcggccttcgacgcgctcgcgcccccctgcggcggcggcgccagggccggcgggttcccctacgcgggactcgtcgccatgtgctctgccatggccaccatgatggtcgactccgccgccgcgggctactaccagcgcgcgcacatccgcaaggcgcgccccgtcgacgacgacgccgtcgacggaggccagggccgcgcggcgcccgcggacgaggagggcgccgccgccgagcccgcgggccacgtgcacgcgcacacgcacgcccacggagggcacggccacgccggtgcctcgcctcaggatgcctccgccgtcgccgtgtccatcaggcacagggtgatctctcaggttctggagctgggaatcctggtgcactcggtgatcatcggcgtgtccctgggcgcctccctgcggccgtccaccatcaggcccctcgtcggagccctcagcttccaccagttcttcgagggcattggccttggcggctgcattgttcaggcagagttcaaggcgagggcggccgtggtcatggcggccttcttctcgctcaccgctcccgcgggcatcgcgctgggcatcgccatcgcttccggctacagcaggcacggcgccaccgccctggtcgtggagggcgtcttcaacgcggccgccgcagggatcctggtgtacatgtccctggtcgatctcctcgccgcggacttcagcaacccgaggctgcagacgaacgccaagctccagctggcggcgtacgtcgccctgttcctcggcgcggggctcatgtcgttgctcgccaaatgggcgtagaacagaacagattcgctacccgtcagttttttttttctgccgaatcaccgtcagcgagaatttcggtgcgcagaggaagcgaggaaagaaggcccggatgtgattttctacgcagagaacacatttaatgacttcacaaaagaagcagacttcgtttctcagagggaaggggaagaaaacgaggatggaaaccaccgacggggctcaacgctattttggtcgtttccatgctcttttcacaataaatctcttgccacattatcaaaaagctgatatggcagtctaataaattctataaaaaccatatgagctggagagcgttgggagtgctctaaccgagttctagggggatgaggcggcggagtagtttggccttcaacgatctttggggctaaataatagctgtacatacaaagggtcgattttttttaggggaacgggcgaacggcaatgcacatgtctgttatcccggatcctccttttttgcatgaaatttcttcatattcccctgaaagaaggcgt

SEQ ID NO: 208426 - DNA, 3550 bp, Zea Mays
gtggatggccgggcccgggacagcagcatggtgcgtacattggcgtgaacattggcacggccatgtcgtcggtgccagcgccgacgcagatcaccacgctgctccggtcgcagaacatccgccacgtgcgtctctacgacgcggacccggcgatgctggcggcgctgtccaacaccggcatccgcgtcatcgtgtccgtgcccaacgagcagctgctggccatcggcaactcgaacgcgacggcggccaactgggtggcgcgcaacgtggccgcgcacttccccgccgtgaacatcacggccatcgccgtggggtccgaggtgctctcggcgcagccgagcgcggcgccgctgctcatgcccgccatgcgctacctccagaacgcgctggtggccgcggcgctggaccggtacatcaaggtctcgacgccgcactcgtcgtccatcatcctcgactcgttcccgccgtcccaggccttcttcaaccggtcgctggacggcgtgctggtgccgatgctcaggttcctgcagtccacggggtcgccgctcatgctcaacgtgtacccttactacgactacatgcgctccaacggcgtcatcccgctggactacgcgctgttccggccgctgccgcccaacaaggaggccgtggacgccaacaccctgctgcactacaccaacgtgttcgacgcggtggtggacgccgcctacttcgccatggcgtacctgaacgtcaccaacgtgccggtgatggtgacggagaccgggtggccgcacaagggcgactcctcctccgagcccgacgccacctctgacaacgccgacacgtacaacagcaacctcatccgccacgtgatgaacagcaccggcacgccgaagcaccccggggtggccgtgccgacctacgtctacgagctgtacgacgaggacacccgcccgggctccacgtcggagaagtactggggcctgttcgacatgaacggcgtccctgcctacaccctgcacctgacgggctccggcgtcctgctggccaacgacacgacgaaccagacctactgcgtggcgcgggagggcgcggaccccaagatgctgcaggcggcgctggactgggcgtgcggccccgggaaggtggactgctccgtgctgatgcagggccagccgtgctacgacccggacaccgtggacgcgcacgccacgtacgccttcaacgcctactaccacggcatgggaatgggctccgggacgtgctacttcagcggcgtcgcggtggtcacgacgaccgacccgagtcacggatcttgtgtttatgctgggaagaacgggacgtcgttgatgaacggcacctccctggcgccgtcgtccaactccacggagggaggctccggcgcgcaccgggcgttcggcgacgtctcgtcactcgtccgcatcgtctccaccgcgctgctcttcagcgtcgtcctcctcctgttgtaggcagtagttagtactagaggtagaaggcaccttggaatggaaccatgcagtctttgcagaattaggcattcgtgagggagagggagggataattctttttgctgtcaagtggcgggccgggaatgttctgaggctctattctcccgtctggtattggtatggtatggaacaaaaattggtttgcatcccagcagttgctcacctacactgccggttggtcgagtgtgaggcaaacagttttaggctgctagatgggctgggccgaacaatgtcatttttggcccacgcggcaagaatgggcatagttgtaatttgcccggtcagccgtgcgcatgccctaaccaaggcctatataaggctgcaaaggcatcgcactcgttccacctgtgcgccgccgtcttcgttactcagcaacaatttctttggcatctcctttcgcagtttctgtcctcgaaaattctgcttcttgtctcgctctctggtcgcaaatttgctctgaaatcttgttctattttcttggtttagtttttctcgagcactcttcgcgttttgaaagatctgaagcccctggtcgccgttttgcggatcctggcttcggttttctgaagagatgcgatatcatacctctggacctctggacatgcgggttcgttctatacatcctcgcattttctcgaaggtccaacaatctgcttcaaatacaccagtgaatcataagaattgttcttggcagtttgcattttttttgttttttctattttttgctatgtgaatctatttgaatgaatcatatgcatcttgaatccgtgacgacgaatcgatggctcgatgatgattattcttgctttaaccacaccgaactaaaggctattggaagggtgctttcttccttcctccatttgcgccaggctcctctttcttggtgtttcctcatgaaaccttgctttcttgttgaagaatgcagttcctgttttcttccgcgagagtgcgaggtagaaggattcggtaagatttggtagcgtagcaaggggggaaagctggaggcctcgtccgctggttcttggcttgtagaaaaacctggcctttctctgagagcctttgccctgtatttgcaattgatacccctctttgaataagtatttcccccttttcaagccaatatgttccgctgatcaattatttatatgggtgttggacgataatctggaataaaatttgtcgctaacaaaacatattatgaaagtgattcggattattaaaatgattcttaatctgagatatatataaccatctagttacaaaacagttaactattcgcggacaggccggtctgccggtgcacaacctgcgagcgtcattgcatatctggtactttgaactaaattcccagagtgcaggagcccactaatcccttccaaatccgagcttcggtccctgctgctccccagctacccgcaggccgcagcaatggtgccgctttgttacgtagtccttatgtttcagacattctgcacaagaccacaacacaaatttacgaaaattttagtctatctgaacggccaaatttttgtgtcaaatcaattttggatatgtacttggctgtttcagatatccaaatcgtatctgttttctcagattaagataagcttgtacaattttaatgccgatgataatatatgttttggttgtttttaaataatcgtcctgtgcttatttattcgaaaatatactttgcgctgcagcttcggagcattgcactgaaaaataaaaaaaatgtcgtattaatcagaccgtaaaaaatggcactttattttgatttaagtgtgtagccacatatactccctaactttcccccttccatctattagtgtgtgatgtgtaactgccaaccaccagcaacgattcactgtgtttgctccagcttttttctcgggctgtcatgtcgcatcatatacatttaagaattaagatcgtttagccaaaagctcgtttgattggacccggtcttccgcgctgtcctttctattaatgctgtactatcttggtgcagcagctgagcaaccactggcaactggaat

SEQ ID NO: 208427 - DNA, 1976 bp, Zea Mays
taacttcgaatgtgctgagaaagctggtggatgatgcatcaaagtttttgaatgacaaagtcacaaaggcagtgatcacagtccctgcttacttcaacgattcacaaaggacagcaaccaaagatgctggccgcattgctgggctggaggttctgcgtattataaatgagcccaccgcagcatcactagcatatggttttgagaaaaagaacaatgaaacaattctggtttttgacctcggaggtggcacatttgacgtttcagttcttgaagtcggtgatggtgtttttgaggtgctgtctacatcaggtgacactcaccttggtggtgatgactttgacaagagaattgttgattggctcgctggaaacttcaagaatgatgagggtattgacttgctaaaagataagcaagctctccagcgattgacagaagcggctgagaaggcaaagatggagctgtcatctttgacccaaacaaacataagcttgccttttattacagctactgcggatggccccaagcatattgagactactcttaccagggctaaatttgaagagctatgctcagatctccttgacaggttgaggacccctgtggacaatgcccttagagatgcgaagttgcagttcaaagatattgatgaggttattcttgtcggtggctcaactagaataccagccgttcaggagcttgtcaagaaaatgacaggaaaggaccccaatgtgacagtcaaccctgatgaggttgttgcacttggagcagctgtgcaggctggagttttgtctggtgatgttagcgacattgtccttctcgatgtgaccccattgtcccttggtttggagacactgggtggtgttatgaccaagattatcccacggaatacaaccctgcctacctcaaagtcggaagttttctcaacagctgctgatggccagaccagtgtggagatcaatgttctccaaggagaaagggagttcgtgagagacaacaagtctcttggtagcttccggcttgatggaatccctcctgccccacgtggtgttccgcagatcgaagtcaagtttgatattgatgctaacggtatcctttctgtcactgccgtggacaagggtacagggaagaagcaggatattacaattactggtgccagcactctgccaaaggacgaggtggagaggatggttgacgaagctgagaagtttgcaaaggaggataaggagaagagagatgccattgacaccaagaaccaagccgagtcggtcatctaccagaccgagaaacaactgaaggaactaggggacaaggtcccaggcgacgtcaaggggaaggtcgagtcgaagctgcaagagctcaaggatgctgttgctggtggctccacacagacgatgaaggacgccattagtgcattgaaccaggaagtcatgcagattgggcagtccctctacagccagcagggtgccccaggcgccggacctggtccagctgatgcttctgctggttcagcggcgggcacttctgagaagccaggtgacgatggcgatgtaatagacgcagatttcactgacagcaaatgagtggcatgctaggtttagatgaggctgttcgctggggatgttttgccgcgagggagagatttgttttgtaggatgtgggtgtactttttggtagatttgcacctttgttcccatttggagttcggatgaaggtgagttagggaaaggtcgggttttaactgtcaaatgaatgtacataggcctatttttcttttgtgccttgccttcgaccgttcgacgttcgacctagttggtgtttgtttcaacccgttttgtcagaacccggtttgtgagactcgttttgacgagttttgatgaaaatcgtttaaaatcaaattgtatgtataaaaactacagcaaaaaaacctgtaattttataaattgtctacaataaaaagaaaaatcagataactaaat

SEQ ID NO: 208428 - DNA, 4895 bp, Zea Mays
ccacgacgtaccccgcgaccgcaaagcgagcagcgaagcgagccccaggcgccggcgagccgggagtgcgtcgccggcggcggaggtggaggcagtaatggggaataagatcgcgcggacgacgcaggcgtcggccacggagtactacctccacgacctgccgtccacctacaacctcgtgctcctcgacgtcgtcagccgcggccgcttcctcaagtccgtccgctgcaagcacgacgaggggctgctcctcgtcaaggtctacttcaagcgcaccggcgagcccatcgacctcaaggagcacgagcggaggctggagcggattaggaaggcgttcaaggggattgatgggtcccatgtatggcccttccaggtttggctgcaaacagataaggcagcatatctcctgagacagtacttcttcaacaacttgcacgatcgactgagtacacgccctttcctcagtcagattgcaaagaaatggcttgcctttcagttaattcatgcagtggagcagagccatagtaagggaatttgccatggtgacataaaatgtgagaatgtgcttgttacttcttggaattggttatatcttgcggactttgcatcattcaagccaacgtatatcccggatgacgacccatctgatttctcattctacttcgacaccggaggaagacgaagatgctatctagcacctgaaagattctacgaacacggtggtgagtcccaagttgcagcagatgcacctctgcaaccatctatggatatattttctcttgggtgcgttcttgctgaacttttccttgaaggtcagccactttttgagctttcccaacttctggcttatcggcgtggtcaatatgaccccatacataccctagaaaagatacaagatactggtatccgtgacatgatacttcacatgacccagttggagcccaaaaaaaggttaccatgtcgaagctatctgcagaaatatgaaattgttgtgttcccattttatttctcaaaatttttgcacaagttcttctcagatattgttccacttgactccgatgccaggttctctttgaaggttgaaaagactcaagaaaattttgaaaagatacatgaaataatgatgggcagctcaacaattgaacaaattgagaggtccacatcgtgtgagcatagtgaaccatctgggagaaaaggcatgggaggagaaactttatattcaccaggagattatagaaacagcacatccataggtaagaaaaatacttctgtagaccatcaacatattgtcggaggtatcaatttcctcctcaaagaagtggagagcaggagcaacaacacaagcacaaaagtcacaaaagacactgagcattttgttgcaccgagcatttcatgtgcaagtggtgttcagtccttgcagctagttaatccagcaggaagacaaattggaagtggtttgatgagccagaacaatgctgtatctcatgtgaagaagatctcaaagactaacttatgctccttagtggctgcttatgatgatcaatcagatacctatagttttgacatttttcagcagatagacaccaaggtgagctgtgaaggaatggttttgcttgtctcgttactctgctcatgcatacgcagtgtgaaaaaacctgagctaagaagggccagcctaattcttctgaagttctcctccacatacatagatgatgataggcgcttacagctagtgctcccctatgtgattgcgatgctttcagatccatctgccattgtccgttgtgctgctttggaaaccttatgtgatgttctttgtcttgtgcaagatttccctatcagtgatactgttatattccctgagtatgtcctcccaatgctctctttgctccctgatgatacggaagagagtgttagggtttgttatgctagtaacattcacaagctggctttaacagcttacaggttcctacttcgttctcgtagcatcgcgaatattcgacctctggatgaatcactggtagctcacagatcccagtctgcagattcaccagcgaagaggcaagatattttttttcgccaacttgcagaactgaggaaatctatttatgagatagtgcaagatttagtgatgggacaaaagcagacacctaatacccgtagagctcttctgcaggatataggttatttgtgttacttctttgggcacaaacaaagtaacgattttcttctgcctatactcccagcatttctaaatgatcatgatgagcagctccgtgcagttttctttgcccagattgtctatgtttgctattttattggagcaaggagtgttgaggaatatcttctgccatatcttgaacaggcgctaagtgatggtatggaggctatccttgtaaatgcacttgattgcttgaccatgatgtgcaaaagtggttatttgaggaaaagagtaattgttggtctattggtaaaggttctccccctgctccggtatacaatcaattgggttaaacagtctgctgtaagatttgttgctgcctgcagcgagagcttaggatctgtagatacttatgtgtatctttctcctcagctacggcagttcctacacagggagccaccttcattggactctgaaactgctcttctttcatgtcttaagcctccactaccaaaatcaatgttctacgtacctttagaagatgctcaggacattggaaacattttactgaagagcagtggcaagaaagaacagatattacatggtggaagatactctggcatggcacaaagtggatctttgggcaaccttgaagatattcgtcgactgaaaggcactaatatttccagcagcgtgtccttggatgtcaaagactccttttcttttggcaaatcactatattctggttttgctctacatgcatctgctgcaaatagctccttttatgatggcttatctaaaggaataccatcatattctttttgtattgataaccggggtttaggagaaacacacatggtccctgattcatcagtgtataaagcttcgataaggctaccttggttggaaccgaatcgtcctggcatgcagactagagatgatcatttcagtagcaagcggcgagatttaagcatcaatgactctttgaagagcaattcttctttgcaaggggatagcatttcaaactctgatactggaggattgccgttctccagatcagcagtgaacctggagactggatggaagcctcgaggaattctagtggcacatctccaggaacatcgcttttctgtcaatgacattgccgtgtcgaatgacaataccttttttgtgactgcttctgacgactcgagtgtcaaaatctgggatacaagaaagttggaaaaagacattgctttcagatctaggttaacatatagcgtgggtaatagccgagctttatgtacggcaatggttcatggtacttcacaggttattgtcggtggtagcaatggaacattacacttgttttctgtggattgtgcacgaagcgttgggagtgtcgtggaaaggtatgctggaattgttggtgtaaaaaggaatgatatcaaagaaggcgcaattctcagcgttgtaaattgttcacccgacagctttagcccaactgttcttttcagcactgaacattgtggtatccataaatgggatacaagaaccaactcagaattttggtattttaaatcctctccagaggagggctatatatcagcacttgttgtgggccagtgtgggaattggttcatctcaggttcttcaagaggtgtccttacattgtgggataataggtttttactacctgttaactcgtggaactattcaatagtaagcccaatagagaaattgtgcttgcttatacctccaccaagttcaatatcttctgctggaaggccactagttttcgttgctgccggatgcaatgaagtctctctgtggaatgctgagaatggaagctgccaccagatgtttagaacagcgagcactgataatgaagctgtgatgtcaaaggcaccatcaaggcctgttaacaagccaatcattaaagatataataagagcacgtaattataagtacagaatcgatgagttgaatgacccacctgtgcgtcgtccaggcattcgttctttgctacccttaccaggtggtgatctgttaactggaggaacagatttgaagattcgttactgggatcaagccaggcctgagcaaagcttctgtattgctggtccctcggcgaaaaaagtccgttcagctaaagctgacattttagagaaagcagctggaaacgatgagtgttacgatataagatccagttttggagtacaagtcgtgcaggaaatgtacaaacagaataccacggtatccggtttgacgcccaagactcagttcgcggaggcagctgcagattctgccgggtgccatcgtgacgcaatactcgcgctggcatccttcaacttgtctagccagagattgatatcagccagcagagacggtgctgtcaaagtgtggaaatagctgctccagcatgggtaagatgacaagtcctttggcgtgtacatatttgcctggttagtgcttacacagtacacatatgccactagttattgttgtacagaagattgatccacacaagagtcgaaattgacacgtaagctttcatcctgtgtgacctgacctgtgtatataaataccaatggcttacctaccttacagtagtatattcatggattagtaaaagatatcataatgaataggaggtaggaaggctgtctaactacaataacatagggctccaaccataatcctccacacaaaaatgatctttttttgtcggtgctgttattttggacaatgaaag

SEQ ID NO: 208429 - DNA, 5697 bp, Zea Mays
aggcagtaatggggaataagatcgcgcggacgacgcaggcgtcggccacggagtactacctccacgacctgccgtccacctacaacctcgtgctcctcgacgtcgtcagccgcggccgcttcctcaagtccgtccgctgcaagcacgacgaggggctgctcctcgtcaaggtctacttcaagcgcaccggcgagcccatcgacctcaaggagcacgagcggaggctggagcggattaggaaggcgttcaaggggattgatgggtcccatgtatggcccttccaggtttggctgcaaacagataaggcagcatatctcctgagacagtacttcttcaacaacttgcacgatcgactgagtacacgccctttcctcagtcagattgcaaagaaatggcttgcctttcagttaattcatgcagtggagcagagccatagtaagggaatttgccatggtgacataaaatgtgagaatgtgcttgttacttcttggaattggttatatcttgcggactttgcatcattcaagccaacgtatatcccggatgacgacccatctgatttctcattctacttcgacaccggaggaagacgaagatgctatctagcacctgaaagattctacgaacacggtggtgagtcccaagttgcagcagatgcacctctgcaaccatctatggatatattttctcttgggtgcgttcttgctgaacttttccttgaaggtcagccactttttgagctttcccaacttctggcttatcggcgtggtcaatatgaccccatacataccctagaaaagatacaagatactggtatccgtgacatgatacttcacatgacccagttggagcccaaaaaaaggttaccatgtcgaagctatctgcagaaatatgaaattgttgtgttcccattttatttctcaaaatttttgcacaagttcttctcagatattgttccacttgactccgatgccagggttgaaaagactcaagaaaattttgaaaagatacatgaaataatgatgggcagctcaacaattgaacaaattgagaggtccacatcgtgtgagcatagtgaaccatctgggagaaaaggcatgggaggagaaactttatattcaccaggagattatagaaacagcacatccataggtaagaaaaatacttctgtagaccatcaacatattgtcggaggtatcaatttcctcctcaaagaagtggagagcaggagcaacaacacaagcacaaaagtcacaaaagacactgagcattttgttgcaccgagcatttcatgtgcaagtggtgttcagtccttgcagctagttaatccagcaggaagacaaattggaagtggtttgatgagccagaacaatgctgtatctcatgtgaagaagatctcaaagactaacttatgctccttagtggctgcttatgatgatcaatcagatacctatagttttgacatttttcagcagatagacaccaaggtgagctgtgaaggaatggttttgcttgtctcgttactctgctcatgcatacgcagtgtgaaaaaacctgagctaagaagggccagcctaattcttctgaagttctcctccacatacatagatgatgataggcgcttacagctagtgctcccctatgtgattgcgatgctttcagatccatctgccattgtccgttgtgctgctttggaaaccttatgtgatgttctttgtcttgtgcaagatttccctatcagtgatactgttatattccctgagtatgtcctcccaatgctctctttgctccctgatgatacggaagagagtgttagggtttgttatgctagtaacattcacaagctggctttaacagcttacaggttcctacttcgttctcgtagcatcgcgaatattcgacctctggatgaatcactggtagctcacagatcccagtctgcagattcaccagcgaagaggcaagatattttttttcgccaacttgcagaactgaggaaatctatttatgagatagtgcaagatttagtgatgggacaaaagcagacacctaatacccgtagagctcttctgcaggatataggttatttgtgttacttctttgggcacaaacaaagtaacgattttcttctgcctatactcccagcatttctaaatgatcatgatgagcagctccgtgcagttttctttgcccagattgtctatgtttgctattttattggagcaaggagtgttgaggaatatcttctgccatatcttgaacaggcgctaagtgatggtatggaggctatccttgtaaatgcacttgattgcttgaccatgatgtgcaaaagtggttatttgaggaaaagagtaattgttggtctattggtaaaggttctccccctgctccggtatacaatcaattgggttaaacagtctgctgtaagatttgttgctgcctgcagcgagagcttaggatctgtagatacttatgtgtatctttctcctcagctacggcagttcctacacagggagccaccttcattggactctgaaactgctcttctttcatgtcttaagcctccactaccaaaatcaatgttctacgtacctttagaagatgctcaggacattggaaacattttactgaagagcagtggcaagaaagaacagatattacatggtggaagatactctggcatggcacaaagtggatctttgggcaaccttgaagatattcgtcgactgaaaggcactaatatttccagcagcgtgtccttggatgtcaaagactccttttcttttggcaaatcactatattctggttttgctctacatgcatctgctgcaaatagctccttttatgatggcttatctaaaggaataccatcatattctttttgtattgataaccggggtttaggagaaacacacatggtccctgattcatcagtgtataaagcttcgataaggctaccttggttggaaccgaatcgtcctggcatgcagactagagatgatcatttcagtagcaagcggcgagatttaagcatcaatgactctttgaagagcaattcttctttgcaaggggatagcatttcaaactctgatactggaggattgccgttctccagatcagcagtgaacctggagactggatggaagcctcgaggaattctagtggcacatctccaggaacatcgcttttctgtcaatgacattgccgtgtcgaatgacaataccttttttgtgactgcttctgacgactcgagtgtcaaaatctgggatacaagaaagttggaaaaagacattgctttcagatctaggttaacatatagcgtgggtaatagccgagctttatgtacggcaatggttcatggtacttcacaggttattgtcggtggtagcaatggaacattacacttgttttctgtggattgtgcacgaagcgttgggagtgtcgtggaaaggtatgctggaattgttggtgtaaaaaggaatgatatcaaagaaggcgcaattctcagcgttgtaaattgttcacccgacagctttagcccaactgttcttttcagcactgaacattgtggtatccataaatgggatacaagaaccaactcagaattttggtattttaaatcctctccagaggagggctatatatcagcacttgttgtgggccagtgtgggaattggttcatctcaggttcttcaagaggtgtccttacattgtgggataataggtttttactacctgttaactcgtggaactattcaatagtaagcccaatagagaaattgtgcttgcttatacctccaccaagttcaatatcttctgctggaaggccactagttttcgttgctgccggatgcaatgaagtctctctgtggaatgctgagaatggaagctgccaccagatgtttagaacagcgagcactgataatgaagctgtgatgtcaaaggcaccatcaaggcctgttaacaagccaatcattaaagatataataagagcacgtaattataagtacagaatcgatgagttgaatgacccacctgtgcgtcgtccaggcattcgttctttgctacccttaccaggtggtgatctgttaactggaggaacagatttgaagattcgttactgggatcaagccaggcctgagcaaagcttctgtattgctggtccctcggcgaaaaaagtccgttcagctaaagctgacattttagagaaagcagctggaaacgatgagtgttacgatataagatccagttttggagtacaagtcgtgcaggaaatgtacaaacagaataccacggtatccggtttgacgcccaagactcagttcgcggaggcagctgcagattctgccgggtgccatcgtgacgcaatactcgcgctggcatccttcaacttgtctagccagagattgatatcagccagcagagacggtgctgtcaaagtgtggaaatagctgctccagcatggctatgattattcaggctacggtgcttctacaggaaaaccatcagagtacaacacctacaatgacatagaggctgtttatgattgcttgagaacggagtatgggatagaagaagaggatctaatcctgtatgggcaatccgttggaagtggaccaacgttgcatctagcctcacgtctcgagaagttaagaggggttgtcctccacagcggcatactctctggcatacgggttctgtatccagtgaaagtgacgctttggttcgacatcttcaagaacatcgacaaaataaagcaggtggactgccctgtgttagtcatacatggcacagccgacgacatcgtggacttggctcacggcaagcggctgtgggagctagccaaggacaagtatgagccgctgtggatcaaaggcggtgggcactgcaacctggagacgtacccggagtacatcaggcacatgcgcaagttcataagcgccatggagaagctggccaaggacagcagcaaggcggcccaggcgccgccgccgtcgagcatggccgccgaagaaagacacaccaagtgcttgagattcgggaagagatgaggtaccgtatcggccttctttagctgtgtacgcccagtcaagtcacgaaaacgctgatgcactgcgttgccttgctgccgctgctttcgtgtgcaagtccaagaagcgatagcacaggtcgtcagtgagccggccaggcggatggatggatggaggtttcctgttgagtttcatggactctctctttctctctctgcagatgccggcgacctggacctgggaaggaaacgcggtgcagcagcaaccctagttcgtgtatcatccgtgtgagattgagttcagacttcagagtagagagtagacagagtggagtgacagacagacctgtggctgctgtagtatgctgtacgtgctggagttcaggactagagagatgtctttgttttcctaggggcgccacggattagcctgttcgcagctgaattttttcttgttttttttttctgttttcgctatctgtattgtagtcactgtgcaaaaaaaatcgttttgattgattggctgcaaaaagtgaagtgcgctattgcgctgtgactagggccacgaaatgtccgttgctcgcttggttcttggatagctcaattcggataagttcttttaaatcggtttgtggttagctcgattcggatcagttcttttaattttt

SEQ ID NO: 208430 - DNA, 4783 bp, Zea Mays
atggggaataagatcgcgcggacgacgcaggcgtcggccacggagtactacctccacgacctgccgtccacctacaacctcgtgctcctcgacgtcgtcagccgcggccgcttcctcaagtccgtccgctgcaagcacgacgaggggctgctcctcgtcaaggtctacttcaagcgcaccggcgagcccatcgacctcaaggagcacgagcggaggctggagcggattaggaaggcgttcaaggggattgatgggtcccatgtatggcccttccaggtttggctgcaaacagataaggcagcatatctcctgagacagtacttcttcaacaacttgcacgatcgactgagtacacgccctttcctcagtcagattgcaaagaaatggcttgcctttcagttaattcatgcagtggagcagagccatagtaagggaatttgccatggtgacataaaatgtgagaatgtgcttgttacttcttggaattggttatatcttgcggactttgcatcattcaagccaacgtatatcccggatgacgacccatctgatttctcattctacttcgacaccggaggaagacgaagatgctatctagcacctgaagtgcgttcttgctgaacttttccttgaaggtcagccactttttgagctttcccaacttctggcttatcggcgtggtcaatatgaccccatacataccctagaaaagatacaagatactggtatccgtgacatgatacttcacatgacccagttggagcccaaaaaaaggttaccatgtcgaagctatctgcagaaatatgaaattgttgtgttcccattttatttctcaaaatttttgcacaagttcttctcagatattgttccacttgactccgatgccagggtaagtgtcattcaagtctgtagtaacctcagtttcactgttactgttcatcaatgtaaacatagttctctttgaaggttgaaaagactcaagaaaattttgaaaagatacatgaaataatgatgggcagctcaacaattgaacaaattgagaggtccacatcgtgtgagcatagtgaaccatctgggagaaaaggcatgggaggagaaactttatattcaccaggagattatagaaacagcacatccataggtaagaaaaatacttctgtagaccatcaacatattgtcggaggtatcaatttcctcctcaaagaagtggagagcaggagcaacaacacaagcacaaaagtcacaaaagacactgagcattttgttgcaccgagcatttcatgtgcaagtggtgttcagtccttgcagctagttaatccagcaggaagacaaattggaagtggtttgatgagccagaacaatgctgtatctcatgtgaagaagatctcaaagactaacttatgctccttagtggctgcttatgatgatcaatcagatacctatagttttgacatttttcagcagatagacaccaaggtgagctgtgaaggaatggttttgcttgtctcgttactctgctcatgcatacgcagtgtgaaaaaacctgagctaagaagggccagcctaattcttctgaagttctcctccacatacatagatgatgataggcgcttacagctagtgctcccctatgtgattgcgatgctttcagatccatctgccattgtccgttgtgctgctttggaaaccttatgtgatgttctttgtcttgtgcaagatttccctatcagtgatactgttatattccctgagtatgtcctcccaatgctctctttgctccctgatgatacggaagagagtgttagggtttgttatgctagtaacattcacaagctggctttaacagcttacaggttcctacttcgttctcgtagcatcgcgaatattcgacctctggatgaatcactggtagctcacagatcccagtctgcagattcaccagcgaagaggcaagatattttttttcgccaacttgcagaactgaggaaatctatttatgagatagtgcaagatttagtgatgggacaaaagcagacacctaatacccgtagagctcttctgcaggatataggttatttgtgttacttctttgggcacaaacaaagtaacgattttcttctgcctatactcccagcatttctaaatgatcatgatgagcagctccgtgcagttttctttgcccagattgtctatgtttgctattttattggagcaaggagtgttgaggaatatcttctgccatatcttgaacaggcgctaagtgatggtatggaggctatccttgtaaatgcacttgattgcttgaccatgatgtgcaaaagtggttatttgaggaaaagagtaattgttggtctattggtaaaggttctccccctgctccggtatacaatcaattgggttaaacagtctgctgtaagatttgttgctgcctgcagcgagagcttaggatctgtagatacttatgtgtatctttctcctcagctacggcagttcctacacagggagccaccttcattggactctgaaactgctcttctttcatgtcttaagcctccactaccaaaatcaatgttctacgtacctttagaagatgctcaggacattggaaacattttactgaagagcagtggcaagaaagaacagatattacatggtggaagatactctggcatggcacaaagtggatctttgggcaaccttgaagatattcgtcgactgaaaggcactaatatttccagcagcgtgtccttggatgtcaaagactccttttcttttggcaaatcactatattctggttttgctctacatgcatctgctgcaaatagctccttttatgatggcttatctaaaggaataccatcatattctttttgtattgataaccggggtttaggagaaacacacatggtccctgattcatcagtgtataaagcttcgataaggctaccttggttggaaccgaatcgtcctggcatgcagactagagatgatcatttcagtagcaagcggcgagatttaagcatcaatgactctttgaagagcaattcttctttgcaaggggatagcatttcaaactctgatactggaggattgccgttctccagatcagcagtgaacctggagactggatggaagcctcgaggaattctagtggcacatctccaggaacatcgcttttctgtcaatgacattgccgtgtcgaatgacaataccttttttgtgactgcttctgacgactcgagtgtcaaaatctgggatacaagaaagttggaaaaagacattgctttcagatctaggttaacatatagcgtgggtaatagccgagctttatgtacggcaatggttcatggtacttcacaggttattgtcggtggtagcaatggaacattacacttgttttctgtggattgtgcacgaagcgttgggagtgtcgtggaaaggtatgctggaattgttggtgtaaaaaggaatgatatcaaagaaggcgcaattctcagcgttgtaaattgttcacccgacagctttagcccaactgttcttttcagcactgaacattgtggtatccataaatgggatacaagaaccaactcagaattttggtattttaaatcctctccagaggagggctatatatcagcacttgttgtgggccagtgtgggaattggttcatctcaggttcttcaagaggtgtccttacattgtgggataataggtttttactacctgttaactcgtggaactattcaatagtaagcccaatagagaaattgtgcttgcttatacctccaccaagttcaatatcttctgctggaaggccactagttttcgttgctgccggatgcaatgaagtctctctgtggaatgctgagaatggaagctgccaccagatgtttagaacagcgagcactgataatgaagctgtgatgtcaaaggcaccatcaaggcctgttaacaagccaatcattaaagatataataagagcacgtaattataagtacagaatcgatgagttgaatgacccacctgtgcgtcgtccaggcattcgttctttgctacccttaccaggtggtgatctgttaactggaggaacagatttgaagattcgttactgggatcaagccaggcctgagcaaagcttctgtattgctggtccctcggcgaaaaaagtccgttcagctaaagctgacattttagagaaagcagctggaaacgatgagtgttacgatataagatccagttttggagtacaagtcgtgcaggaaatgtacaaacagaataccacggtatccggtttgacgcccaagactcagttcgcggaggcagctgcagattctgccgggtgccatcgtgacgcaatactcgcgctggcatccttcaacttgtctagccagagattgatatcagccagcagagacggtgctgtcaaagtgtggaaatagctgctccagcatgggtaagatgacaagtcctttggcgtgtacatatttgcctggttagtgcttacacagtacacatatgccactagttattgttgtacagaagattgatccacacaagagtcgaaattgacacgtaagctttcatcctgtgtgacctgacctgtgtatataaataccaatggcttacctaccttacagtagtatattcatggattagtaaaagatatcataatgaataggaggtaggaaggctgtctaactacaataacatagggctccaaccataatcctccacacaaaaatgatctttttttgtcggtgctgttattttggacaatgaaag

SEQ ID NO: 208431 - DNA, 899 bp, Zea Mays
gttcttgaattggtgtcaaacatcccaggtgttgggaaaagttgtctccttttgcggttctcagatggctctttcaccactagctttatcaccaccattgggattgacttcaaaataagaacagttgagcttgatggtaagcgcgtaaagttacagatatgggatactgctggtcaagagcggtttcgaactattacaaccgcctactacaggggtgcaatgggaattttgcttgtctatgatgttactgatgagtcatctttcaataatataagaaactggattaggaacatagagcaacatgcttccgacaatgtgaataaaattttggtaggcaacaaagctgacatggatgaaagcaaacgggctgtgccaacttcaagagggcaggctcttgctgatgagtatggcatcaaattttttgaaacgagtgcgaagacgaacctgaatgtggagcaggttttcttctccatagcaagagatatcaagcaaaggcttgctgaatctgattcaaagccagaggatcgcacgatcagtatcaacagacctgagggtggtgaggcttcagcgtcacaaaaatcagcttgctgcggatcgtgacggggttacattgtcacaaggaagataaatagtgcgataccatactttgtaatttacccttctacgtaccttttatctggctgtcatcgttctcgtctagcttttaaatgcaattgcttggattcaggtttctgtgttgtaatgtgaacaattttagttgtacccctggtagaaatgcatgtgctcataagtcattgcaccttgttttgatggaaatgcttgcaaaatcgttcacagtttaggcgcggccgtactacctgttgttttactacatttagactgactagcagactgtatat

SEQ ID NO: 208432 - DNA, 827 bp, Zea Mays
caacgccctcctatcactgccacgtcaccgcatttgcacccagctttcctcccatcccatggcttccctcctctgccccgcctcttcctgcccctctgcttcactgcgccgcacagccgcctcccccgctgcaccatccttcgcctcaagtcggcactacggagccccgcttacgttccgagtcgcctctcagccgccgcaggcccttgccgcggccccttacggctacggcagcgacctgctcaggcccatcgacacacagacgatcatcatagccgccgccgtcgtatccgcagtctccctctctctcgtcctcggcctcaagggcgacccggtgccgtgcgacagggggcacgaagtgtgtgttctgcaacgatggcaaaatgaaggtggaaaatggagtcgttgagtgccgtgtatgcagaggagcagggctaatactttgcaagaagtgtgctggttctggatactccaagcggttgtagcggaatcccggtttgactggcattctgtgcagtttgacatccgaaagatggactttgtacagatgtatatacactcttctcttctctatcagcaaatatgtatgtccaggcagagatgagcttgaagggaagctgatttacagtctgctgatatattatcagttgcagttcatttatcatgcgcttcttctctgtttatcaaactgttcacacaagtctgctgatatattttattagcgtgcggcttcgtaatcataacgttataagcagaaccgatcgtccggttttgaatgtctacaaccagagcgtgatcccggcccttaggaacttggccaattcctt

SEQ ID NO: 208433 - DNA, 1839 bp, Zea Mays
tccgtcttcgtccgcgtcgactgcgtcatccccgacgacccaccctcttcctcctccgcgggcgccgcaccgggctccccgccgcaccaggcgccggcgccaaccgcgcgcgggcgcggcgcgctcgcgcgcgtcgcgcgcgccctgctcggcggcgtcgctaggcccatccacgcgctcggccagatcctctcctccgccgcggcgaccgtctcccggcgctccgagccacttcccgcttccccgccgcccgcgcccgttgcggacgtctcccaccactcgccctccgaggtgctccgctccttcagggagctgcggcgccttcacatcgagctgcccacgggcgagctcggcattgacgacggcgtgctccttaagtggaaggccgacttcggctccaccctcggcagctgcgtgatcctcggcgcctcgtcggtctcgtccaaatcgccggcagggtccgctcaggcggaaactgctgcggccgacagcgcggccgccgctcccgataccggtagggagactgaagagccggggagcctgcctgattctctctacacaaatggagggcttaagctccgcgttgtctggaccatcagctccctgattgccgcgtcggcgaggcattacttgctgcacccgattatctgtaatcacggaacgcttgagagcttggacctgacagatgccgacgggcaaggggtgctcaccatggacaagaggcagctgcaggaactgcgggtgcggcccgtctctccatcagggagctcgcaccgcacactcatgccggcactcagtatgcgtctgcactacgcaccactcattgaactgcctgggggaacgctgctgaaaggtgcaacactagtggcgatcagaccaagcgaggatgccttgagggagggccaaggggttgcaggtcctgctggtacatgctggatttcagaggcctttgaggagccatatcggactgcggcaaaggtgctcctcaagagaagggcatattgccttgaaatgaactcgttctgagcaccagggattcacttccacagagttctacccatctgacaggatgggggaagtgagatgcccttcggttaatatatgggaattcatcattcagtgcaaaaattggaccaactctccccatcattaatttatctgatctcggtgaagagatgacttcgtgtacctgtacctttagggttgtaattacagatacgtatttgtgctggactactacacgcggaacggaatgctatttggccgattcccacagagtgtcccatgaagagaagccgtatcacttgagcgtttgagcgtgacgctcctgggccaagctggcattatacttcttttctcaaaggaagcaccagagatttcgtttttagcagggcctttttgcttaaatcttaccgagtcatgctcctagcactgcaatactgcgtcaatttatactcattgttataaaaaaattatagactcgaatataatgtcccttttaagaaaaattatagtgcactctcttttttctaatgctttgtgtgcaccagatgaccagactgccatgagctcaccctcacctagggttaaatgtttcggtagggatttgtcaggaagcccaggtcgcagcagcagaagcggcatgtccaagtaaatgtggagcgtgagaaggaagaagtggttcaagacaacgattcgctgatgggccgtggccgtcgagtccgcaggcccagtgggcgctttccatctgatgtgtggaccaattgagtccttgtaattggcttataactggagaacagccaaaggaagaacttacgatgatgctaatggaaatttccc

SEQ ID NO: 208434 - DNA, 1054 bp, Zea Mays
tgatctacacgacacctactctatgattattcaggctacggtgcttctacaggaaaaccatcagagtacaacacctacaatgacatagaggctgtttatgattgcttgagaacggagtatgggatagaagaagaggatctaatcctgtatgggcaatccgttggaagtggaccaacgttgcatctagcctcacgtctcgagaagttaagaggggttgtcctccacagcggcatactctctggcatacgggttctgtatccagtgaaagtgacgctttggttcgacatcttcaagaacatcgacaaaataaagcaggtggactgccctgtgttagtcatacatggcacagccgacgacatcgtggacttggctcacggcaagcggctgtgggagctagccaaggacaagtatgagccgctgtggatcaaaggcggtgggcactgcaacctggagacgtacccggagtacatcaggcacatgcgcaagttcataagcgccatggagaagctggccaaggacagcagcaaggcggcccaggcgccgccgccgtcgagcatggccgccgaagaaagacacaccaagtgcttgagattcgggaagagatgagatgccggcgacctggacctgggaaggaaacgcggtgcagcagcaaccctagttcgtgtatcatccgtgtgagattgagttcagacttcagagtagagagtagacagagtggagtgacagacagacctgtggctgctgtagtatgctgtacgtgctggagttcaggactagagagatgtctttgttttcctaggggcgccacggattagcctgttcgcagctgaattttttcttgttttttttttctgttttcgctatctgtattgtagtcactgtgcaaaaaaaatcgttttgattgattggctgcaaaaagtgaagtgcgctattgcgctgtgactagggccacgaaatgtccgttgctcgcttggttcttggatagctcaattcggataagttcttttaaatcggtttgtggttagctcgattcggatcagttcttttaattttt

SEQ ID NO: 208435 - DNA, 2756 bp, Zea Mays
ggaaatcttgtgctaacgagattcagtaataatttctcatttctgcaatggtggaaattatgaagttaagacatgtaaagttctgatttatatgaagcacttctagcaattgagcaaggaaaaaataaaagaaatatccaccaagcattagcagctgaactagaagcacttgcagatatgaaattttcatatgtcatttcatgtcagaagtttggggaacaaaaaatcaaaggtgatccccatgctcaagacatcatagatctgatgatgaggtgccctgctctgagggttgcttatattgaagagaaggaagtcatagtaaataactgttctcatatggttgaagggaaggaagtcatagtaaataactgtccccataaggtttattcatctgtgttaataaaagcagagaataatttggaccaggagatttaccgtataaagctgcctggtccacctatcattggagaagggaagcctgaaaatcagaaccatgcgattatcttcactcgtggagatgctctacaaacaattgatatgaatcaagacaactatctggaagaagcttacaaaatgaggaatgtccttcaagagtttgtaaggcatcctagggacaaagctccaactatccttgggttaagagagcatatcttcactggaagtgtttcatctcttgctggcttcatgtcatatcaagagacaagctttgttacaattggacaaagatttcttgctgaaccccttagggtacggtttcactatggtcatccagacatttttgatcggatatttcatttaacaaggggcggcataagtaaagcgtctaaaactataaacttaagtgaggatgtgtttgctgggtataattccatattgcgtcgtgggaatataatttacagtgaatacattcaagttggcaaagggcgtgatgttggtcttaaccagatatccaaatttgaagctaaagtggcaaatggcaatagtgagcaaacaatcagtcgtgatattcaccggctaggtcggcgatttgatttcttcaggatgctctcatgttattttacaacagtgggattttactttaatagcctaatatcagttgttggtgtttatgttttcctctatggccagttgtacttggttctcagtggcctgcagagggctctgctacttgaagctcagactcagaatataaagtccttagaaacagcccttgcatctcagtcttttctccagctgggactgcttacaggattgcctatggtgatggagctaggtttggaaaagggtttccgtgcagctctgagtgattttatcctcatgcaattgcagttagcatcagttttcttcacattctcacttggaacaaaagcacactactacggccgtactattctccatgggggtgctaaataccggcctacagggcgtaaatttgttgttttccatgcaagctttactgagaattatcagttgtattccagaagtcattttgtcaaaggatttgagttgatcttccttttgatagtctaccacatctttaggagatcttatgttagcaatgtcgtgcatgtgatgatcacatactcaacatggtttatggcagtggcttggctgtttactccttttctttttaacccagctggttttgcttggcaaaaaattgttgacgactgggctgactggaataggtggatgaagaatcaaggaggcataggagtgcaaccagagaaaagctgggagtcatggtggaatagtgagaatgcacatctacgttactcagtattgagttctagaattcttgaagtgttgctctcactacgcttcttcatatatcaatatggacttgtttatcacctgaatatctctcaagacaacaagaatttccttgtctacctgctttcatgggtcgtaattattgccattattggttttgttaagcttgtcaattgtgctagccgtcgtttgagcacaaagcaccaactcgtcttcaggctcataaaacttttgacattcctctcagtggttacttccttggtccttctctattgtctctgtcgattatctatcatggatttgatcatctgttgtctcgcattcataccaactggctggggtctcctccttattgttcaagttttgagacccaaaatagagtactacgcagtatgggagcctattcaggtcatagctcacgcttacgactatggaatgggatctctgcttttcttcccgatcgctgtgcttgcatggatgcctgttatctcggccattcaaacccgggttcttttcaacagagcattttcccggcaactacagatccagccttttattgcaggcaaaactaaacggagatagcataaccgatggttttacatcgcatattggggatttgtgaatatgatctattggttggtcatcagagcaataagtttctgtactctggtagcataaatgtcgtgtgcagtgtgatccattattctttggcctaagcctgttccacatctaacatagtaataccttggtttcggtttttattgccgtgtaactttacatatcatttctgtaaaaaagaaacagctctagcattgctcttagatgagttgagactgatgaatctcatgatacctacacagttacaaaggtactaccttattttcatgtgaaatacgacacttattgtactactgtattattatgctttaacgtgcagtaccaaatcatttgccactgttagattcttgtgtttgattattttt

SEQ ID NO: 208436 - DNA, 5309 bp, Zea Mays
atgggtgtacctacccatccgtccctatggtgggaagaagcccatgcaaagatttcaaaaaatgatagaagtcgatttaatggggtgatgtcatatgagctatatggagtgctctctggggctgaatcacaaaagaacaagaacggggcatctgatcactcaacatggagaaactatgatgacctcaatgaattcttctggtctgctgattgctttaagcttggttggcccatgcgtcttaacaatgatttctttttcacatcaagtgcaactaaggactctcaggttctttgcggatcaagattatcaaaggtgccacatggccttgaaaactgtgctagctgtgttccactagtgtcactacacacatctcagcagaatgagcaactaaattcccaactgcctcctgaatcatcatcaacagaaaactatcttaattcagaagcagctgaacaaagacaacagcaagctatgagttccagttctcaacagagatggttgggaaaaacgaattttgttgaggtccgttctttttggcatctcttcagaagctttgataggatgtggacactccttgtgcttgggcttcaggttctgataataatggcatggcatggattagaaagccctactcagttacttgatccaataatttttgaggatattctaagtattttcatcacgaatgcagtacttcgagttattcaagtcatccttgacattgctttctcatggagaaccaagggaacaatgagagttgaccagatactgagatttactataaaactctctctggtggtggcatgggcgattattcttcctgtattttatgctaattctcaaaactataaggcttgctcaactaaacgctctaaaacctttttgggaatgttctgcttgtcaaaatatatggtggttgttgcattgtaccttgcaagcaatgtggttggtatggcattattttttgtcccagctgtcaccaactacatagagacatctacatggagaatttgcaatgtgttgtcatggtggtgtcagccacaattatacgttggacgaggaatgcaagaaggactcgtatctatactgaagtacacaactttttggactattctattgtcatgcaaatttttattcagctactactttgagattaagccacttgtgggaccaacgaaagaaattatgaagatcaatgtgaacagatatgagtggcatgaattttttccacaagtcaagagtaatgctggcgctattcttgctgtatgggctcctataattcttgtctattttatggacacacaaatatggtattcggtattctgtactattttcggtggtatgtgtggtattatccatcatcttggtgagattcgcacaatgggaatggtgagaagtcggttttattccttaccagaagccttcagtatgtctctttgtcctcctgcaacaccaatacagagaaagggaatgttttttagtttcttggagaagagaattttcaagaaattaggtaaagatgaaagatattacccaagaaagtttgcgctggtttggaacaatataataagtagcttccgttctgaggatttaataagtaatagagagatggaattgatgacaatgcccatgacaccaatgcataattctggttctatctgttggccattgtttttacttgctaaaaagttttcagaagcagtggatatggcagcaaattttactggaaaaagtgctcaactcttctggatgattaagaaggatcactacatgttttgttctataaatgaattctatgaactgacaaaaaatattttcagatttcttattatcggggagacagagaggagggtggtagctgccatatttgatgaaatagataagagtattcaaaattcaagcctggtgattgattttcggatgaatcatttgccttcactgttccaaaaatttgaccagctggctgaacttctgtttataaacgaacaaaaacatcggcatgaggtgacaattctgctccaagatattgttgatattgtagtccaggacatgattgtggatcctcaaagtatactgaatgtggttaactcttcaaagagattgatctctgatgatgatggagcattcagctattatgaaccagagctgtttgcatcagtcagctcaagaacaagcatccgatatccatattttgatcagcaaaaagaacaggttaaacgcttctatcttttgcttagtacaaaagaaaaggctgcggaaataccatcaaatttagaggctcggcgacgcatttcatttttcgccacatctctgtttatgcatatgcctgctgctcccaaagttcgcagtatgttgtcatttagtgtaataactccatatttcatggaagaagtgaagttttcagatgaagagcttcattcaaatcaagatgaagcatccaccctttcgtacatgcaaaagatatatccagatcaatggaaaaactttctggaacgcgttgatacaaaggtaactaatgatgaaattagatattgggcttcctaccgtggccaaacactgagccgaactgtacggggaatgatgtactacagaaaagcattgaagctacaggctctcttagacatgacaaatgatcaagatttatatgaagcacttctagcaattgagcaaggaaaaaataaaagaaatatccaccaagcattagcagctgaactagaagcacttgcagatatgaaattttcatatgtcatttcatgtcagaagtttggggaacaaaaaatcaaaggtgatccccatgctcaagacatcatagatctgatgatgaggtgccctgctctgagggttgcttatattgaagagaaggaagtcatagtaaataactgttctcatatggttgaagggaaggaagtcatagtaaataactgtccccataaggtttattcatctgtgttaataaaagcagagaataatttggaccaggagatttaccgtataaagctgcctggtccacctatcattggagaagggaagcctgaaaatcagaaccatgcgattatcttcactcgtggagatgctctacaaacaattgatatgaatcaagacaactatctggaagaagcttacaaaatgaggaatgtccttcaagagtttgtaaggcatcctagggacaaagctccaactatccttgggttaagagagcatatcttcactggaagtgtttcatctcttgctggcttcatgtcatatcaagagacaagctttgttacaattggacaaagatttcttgctgaaccccttagggtacggtttcactatggtcatccagacatttttgatcggatatttcatttaacaaggggcggcataagtaaagcgtctaaaactataaacttaagtgaggatgtgtttgctgggtataattccatattgcgtcgtgggaatataatttacagtgaatacattcaagttggcaaagggcgtgatgttggtcttaaccagatatccaaatttgaagctaaagtggcaaatggcaatagtgagcaaacaatcagtcgtgatattcaccggctaggtcggcgatttgatttcttcaggatgctctcatgttattttacaacagtgggattttactttaatagcctaatatcagttgttggtgtttatgttttcctctatggccagttgtacttggttctcagtggcctgcagagggctctgctacttgaagctcagactcagaatataaagtccttagaaacagcccttgcatctcagtcttttctccagctgggactgcttacaggattgcctatggtgatggagctaggtttggaaaagggtttccgtgcagctctgagtgattttatcctcatgcaattgcagttagcatcagttttcttcacattctcacttggaacaaaagcacactactacggccgtactattctccatgggggtgctaaataccggcctacagggcgtaaatttgttgttttccatgcaagctttactgagaattatcagttgtattccagaagtcattttgtcaaaggatttgagttgatcttccttttgatagtctaccacatctttaggagatcttatgttagcaatgtcgtgcatgtgatgatcacatactcaacatggtttatggcagtggcttggctgtttactccttttctttttaacccagctggttttgcttggcaaaaaattgttgacgactgggctgactggaataggtggatgaagaatcaaggaggcataggagtgcaaccagagaaaagctgggagtcatggtggaatagtgagaatgcacatctacgttactcagtattgagttctagaattcttgaagtgttgctctcactacgcttcttcatatatcaatatggacttgtttatcacctgaatatctctcaagacaacaagaatttccttgtctacctgctttcatgggtcgtaattattgccattattggttttgttaagcttgtcaattgtgctagccgtcgtttgagcacaaagcaccaactcgtcttcaggctcataaaacttttgacattcctctcagtggttacttccttggtccttctctattgtctctgtcgattatctatcatggatttgatcatctgttgtctcgcattcataccaactggctggggtctcctccttattgttcaagttttgagacccaaaatagagtactacgcagtatgggagcctattcaggtcatagctcacgcttacgactatggaatgggatctctgcttttcttcccgatcgctgtgcttgcatggatgcctgttatctcggccattcaaacccgggttcttttcaacagagcattttcccggcaactacagatccagccttttattgcaggcaaaactaaacggagatagcataaccgatggttttacatcgcatattggggatttgtgaatatgatctattggttggtcatcagagcaataagtttctgtactctggtagcataaatgtcgtgtgcagtgtgatccattattctttggcctaagcctgttccacatctaacatagtaataccttggtttcggtttttattgccgtgtaactttacatatcatttctgtaaaaaagaaacagctctagcattgctcttagatgagttgagactgatgaatctcatgatacctacacagttacaaaggtactaccttattttcatgtgaaatacgacacttattgtactactgtattattatgctttaacgtgcagtaccaaatcatttgccactgttagattcttgtgtttgattattttt

SEQ ID NO: 208437 - DNA, 757 bp, Zea Mays
gttcgttcgacggctggccatcgattccatggtgcagtttacggagttcatacagaagaacctccacctgtaccagttccgcaacaccatcccgctgtcaaccgccgctgccgccaacttcacacgcggcgagctcgccacagcccttcgtaagaatccatacatggtcaatgttattctcggtggttacgataaggatgttggcgcctcactgtactacatcgactacattgcgaccttgcacaagatcgacaagggcgcttttgggtacggatcgtatttctgcctgtctctgatggacaagctgtaccgcccggacatgaccgttgaggaagcggtagacctcgttgataagtgcattaaggagatccggctgcggctggttgtggcgccccagaacttcgtgatcaagatcgtcgacaaggacggggccagggagtacgcgaggcgtgaactcgtcggcgacagtgcacctgctgaagctgcagctacggttgccgcctgaggcatgaaacttgtttgtgttagttgtttgtttctcagcgaggctactatgtaatcaaatggatactggtgggggtcccacagctgttttttaatcaattttagcccagacatgtaattctgtttctgcactaattcatgtcttcgccgagtacaagttgacacggagtgtgtggcgcttgacattgctgtgcaccatttctgatcactgaaatgaacataaaatctgtgccaacgtccaacggtgcgcagc

SEQ ID NO: 208438 - DNA, 1139 bp, Zea Mays
tgcccttgacgtccttttactcatgtagattttatgcaaggaaagcttccacaggctcctggggagttgcccactcttaacgattgggagaaccatctaacaacaatttttcctgaggttaggctaaagaggtaccttgagatgagaggtgctgatggtggcccatggaggagattgtgtgcgttgcctgcattttgggttgggctgctgtacgacgaggaatcgttacaaagcattttagacatgacttttgattggacaaaggaggaaagagagatgctaagacggaaggtaccatcgactggtttgaagacgccgtttcgtgatggatatgtaagagatttagctgaggaagttctaaaactggccaagaatggactggaaagaagagggtacaaggaggttggtttccttagagaggtcgacgaagtagtgagaacaggagtgacgcctgcggagaggctgctgaacctgtacgagaccaagtggcaacgcaacgtcgaccatgttttcgagcatttgttatactgattactgaggatgacgccgccgaacgacgttggactgagcttgtagatgtaccccgtaccctaatacagagtctcgtcttgattcattcaatgcctgagccggaagggctcagtttcaggcacacaggagcagagctttcggttggttgttgacggggggcaaccgctgcacagcccggtgctgtgcctacaaataacttcgcctggaactggaacggatcactcatcactgtgctttgctttgacttgatctgcctgtctctccagggagatggaacaaactactgtttgtaccggcccgttttgttttgcagctatgaaaatcgccgtattgaaaataagtccgtcttctgcacgatggaactgtttgtttttcctttttttttggattgttgggacttgggatgtttgttcggggttaacatggcaaaagtgatctcatcgacgataaataaatgaactgatggtttgatccggaatctgcgatatctgcatgttcctttgtagccggtctttatggtctgctacctctgctacgataccttagggtacatgattttccgtacgcatcgtctcttagctgcatttgttgcatttgtgatttaggaa

SEQ ID NO: 208439 - DNA, 1725 bp, Zea Mays
cttgagatgctacagccaaacacaaggaaagcaaagcatctcactagaacctggaggccaatttgaacttagtggcgctcctctcgaaacattacatcaaacttgtgctgaggtcaattcgcatctttatcaggttaaagcagttggagaggaaatgggaataggatttcttgggcttggctttcagccaaaatgggcactgagtgacataccaataatgccaaagggaagatacgaaataatgaggaattacatgcctaaagttggtactcttggccttgatatgatgttccggacatgtactgtgcaggttaatcttgacttcagttcagaacaggatatgataaggaaatttcgcgctggcctcgctttgcagcctattgcaactgcaatatttgccaattctccgttcaaagaaggaaaaccaaatggatttctcagcttaaggagccatatctggacagatactgataataatcgtgcagggatgctcccttttgtctttgacgactcatttgggtttgagcaatatgtggactatgcattagaagtccccatgtattttgtgtaccgaaataaaaagtatattgactgcaccggaatgtcgtttcgggattttatgcaaggaaagcttccacaggctcctggggagttgcccactcttaacgattgggagaaccatctaacaacaatttttcctgaggttaggctaaagaggtaccttgagatgagaggtgctgatggtggcccatggaggagattgtgtgcgttgcctgcattttgggttgggctgctgtacgacgaggaatcgttacaaagcattttagacatgacttttgattggacaaaggaggaaagagagatgctaagacggaaggtaccatcgactggtttgaagacgccgtttcgtgatggatatgtaagagatttagctgaggaagttctaaaactggccaagaatggactggaaagaagagggtacaaggaggttggtttccttagagaggtcgacgaagtagtgagaacaggagtgacgcctgcggagaggctgctgaacctgtacgagaccaagtggcaacgcaacgtcgaccatgttttcgagcatttgttatactgattactgaggatgacgccgccgaacgacgttggactgagcttgtagatgtaccccgtaccctaatacagagtctcgtcttgattcattcaatgcctgagccggaagggctcagtttcaggcacacaggagcagagctttcggttggttgttgacggggggcaaccgctgcacagcccggtgctgtgcctacaaataacttcgcctggaactggaacggatcactcatcactgtgctttgctttgacttgatctgcctgtctctccagggagatggaacaaactactgtttgtaccggcccgttttgttttgcagctatgaaaatcgccgtattgaaaataagtccgtcttctgcacgatggaactgtttgtttttcctttttttttggattgttgggacttgggatgtttgttcggggttaacatggcaaaagtgatctcatcgacgataaataaatgaactgatggtttgatccggaatctgcgatatctgcatgttcctttgtagccggtctttatggtctgctacctctgctacgataccttagggtacatgattttccgtacgcatcgtctcttagctgcatttgttgcatttgtgatttaggaa

SEQ ID NO: 208440 - DNA, 2327 bp, Zea Mays
aaaaaaaagtgactcccactgaaactcagtactactagtaatgaacggctcgcctctcgcaatcagcagggcacccgcgcccacacgccagtgacgaagccgccgccgccgccgccgcacgcacgcaccggcggcttctgccttctgctgccgatgccgctcgcccgctcctgcgattgatgcgcgcacttcaacgcgccgtcctgacgcccgggccccaccaccacaccgctttataaagtgaccagctcgcgctgctggccccgtctcttcttactcccttcttccgcggtggtagtaccgcgacggaagcagaggcggcggcagcagtggacgcggaggagccctagccagcctccgggtgccggcgcggcgagccctcccacggaggaggccgtgcagatgacggagccgctcaccaaggaggacctcgtcgcctacctcgtctccgggtgcaagcccaaggagaattggagaattgggacggagcacgaaaagttcggtttcgaagtcgacactttacgccctataaaatatgatcagattcgtgacatactgaacggtcttgctgagagatttgattgggacaagataatggaagaaaacaatgttatcggtctcaagcagggaaagcaaagcatctcactagaacctggaggccaatttgaacttagtggcgctcctctcgaaacattacatcaaacttgtgctgaggtcaattcgcatctttatcaggttaaagcagttggagaggaaatgggaataggatttcttgggcttggctttcagccaaaatgggcactgagtgacataccaataatgccaaagggaagatacgaaataatgaggaattacatgcctaaagttggtactcttggccttgatatgatgttccggacatgtactgtgcaggttaatcttgacttcagttcagaacaggatatgataaggaaatttcgcgctggcctcgctttgcagcctattgcaactgcaatatttgccaattctccgttcaaagaaggaaaaccaaatggatttctcagcttaaggagccatatctggacagatactgataataatcgtgcagggatgctcccttttgtctttgacgactcatttgggtttgagcaatatgtggactatgcattagaagtccccatgtattttgtgtaccgaaataaaaagtatattgactgcaccggaatgtcgtttcgggattttatgcaaggaaagcttccacaggctcctggggagttgcccactcttaacgattgggagaaccatctaacaacaatttttcctgaggttaggctaaagaggtaccttgagatgagaggtgctgatggtggcccatggaggagattgtgtgcgttgcctgcattttgggttgggctgctgtacgacgaggaatcgttacaaagcattttagacatgacttttgattggacaaaggaggaaagagagatgctaagacggaaggtaccatcgactggtttgaagacgccgtttcgtgatggatatgtaagagatttagctgaggaagttctaaaactggccaagaatggactggaaagaagagggtacaaggaggttggtttccttagagaggtcgacgaagtagtgagaacaggagtgacgcctgcggagaggctgctgaacctgtacgagaccaagtggcaacgcaacgtcgaccatgttttcgagcatttgttatactgattactgaggatgacgccgccgaacgacgttggactgagcttgtagatgtaccccgtaccctaatacagagtctcgtcttgattcattcaatgcctgagccggaagggctcagtttcaggcacacaggagcagagctttcggttggttgttgacggggggcaaccgctgcacagcccggtgctgtgcctacaaataacttcgcctggaactggaacggatcactcatcactgtgctttgctttgacttgatctgcctgtctctccagggagatggaacaaactactgtttgtaccggcccgttttgttttgcagctatgaaaatcgccgtattgaaaataagtccgtcttctgcacgatggaactgtttgtttttcctttttttttggattgttgggacttgggatgtttgttcggggttaacatggcaaaagtgatctcatcgacgataaataaatgaactgatggtttgatccggaatctgcgatatctgcatgttcctttgtagccggtctttatggtctgctacctctgctacgataccttagggtacatgattttccgtacgcatcgtctcttagctgcatttgttgcatttgtgatttaggaa

SEQ ID NO: 208441 - DNA, 1920 bp, Zea Mays
caccgcagaggatcctcgcgcggcacccctctcatcatcgtcttcgtcatcagcgacgatccagtattgaattgggacggagcacgaaaagttcggtttcgaagtcgacactttacgccctataaaatatgatcagattcgtgacatactgaacggtcttgctgagagatttgattgggacaagataatggaagaaaacaatgttatcggtctcaagcagggaaagcaaagcatctcactagaacctggaggccaatttgaacttagtggcgctcctctcgaaacattacatcaaacttgtgctgaggtcaattcgcatctttatcaggttaaagcagttggagaggaaatgggaataggatttcttgggcttggctttcagccaaaatgggcactgagtgacataccaataatgccaaagggaagatacgaaataatgaggaattacatgcctaaagttggtactcttggccttgatatgatgttccggacatgtactgtgcaggttaatcttgacttcagttcagaacaggatatgataaggaaatttcgcgctggcctcgctttgcagcctattgcaactgcaatatttgccaattctccgttcaaagaaggaaaaccaaatggatttctcagcttaaggagccatatctggacagatactgataataatcgtgcagggatgctcccttttgtctttgacgactcatttgggtttgagcaatatgtggactatgcattagaagtccccatgtattttgtgtaccgaaataaaaagtatattgactgcaccggaatgtcgtttcgggattttatgcaaggaaagcttccacaggctcctggggagttgcccactcttaacgattgggagaaccatctaacaacaatttttcctgaggttaggctaaagaggtaccttgagatgagaggtgctgatggtggcccatggaggagattgtgtgcgttgcctgcattttgggttgggctgctgtacgacgaggaatcgttacaaagcattttagacatgacttttgattggacaaaggaggaaagagagatgctaagacggaaggtaccatcgactggtttgaagacgccgtttcgtgatggatatgtaagagatttagctgaggaagttctaaaactggccaagaatggactggaaagaagagggtacaaggaggttggtttccttagagaggtcgacgaagtagtgagaacaggagtgacgcctgcggagaggctgctgaacctgtacgagaccaagtggcaacgcaacgtcgaccatgttttcgagcatttgttatactgattactgaggatgacgccgccgaacgacgttggactgagcttgtagatgtaccccgtaccctaatacagagtctcgtcttgattcattcaatgcctgagccggaagggctcagtttcaggcacacaggagcagagctttcggttggttgttgacggggggcaaccgctgcacagcccggtgctgtgcctacaaataacttcgcctggaactggaacggatcactcatcactgtgctttgctttgacttgatctgcctgtctctccagggagatggaacaaactactgtttgtaccggcccgttttgttttgcagctatgaaaatcgccgtattgaaaataagtccgtcttctgcacgatggaactgtttgtttttcctttttttttggattgttgggacttgggatgtttgttcggggttaacatggcaaaagtgatctcatcgacgataaataaatgaactgatggtttgatccggaatctgcgatatctgcatgttcctttgtagccggtctttatggtctgctacctctgctacgataccttagggtacatgattttccgtacgcatcgtctcttagctgcatttgttgcatttgtgatttaggaa

SEQ ID NO: 208442 - DNA, 2693 bp, Zea Mays
ctgcagtctgagaagccacgcctctcgacagacagtcggcgtcggcgtcggcgtcggcgtcgagtgttgcgtgccggcttccaccgcagaggatcctcgcgcggcacccctctcatcatcgtcttcgtcatcagcgacgatccagtattggatccagccggccgttccaccactacacccccccaaaaaaaagtgactcccactgaaactcagtactactagtaatgaacggctcgcctctcgcaatcagcagggcacccgcgcccacacgccagtgacgaagccgccgccgccgccgccgcacgcacgcaccggcggcttctgccttctgctgccgatgccgctcgcccgctcctgcgattgatgcgcgcacttcaacgcgccgtcctgacgcccgggccccaccaccacaccgctttataaagtgaccagctcgcgctgctggccccgtctcttcttactcccttcttccgcggtggtagtaccgcgacggaagcagaggcggcggcagcagtggacgcggaggagccctagccagcctccgggtgccggcgcggcgaggttgtggattcgatggcggtggcgtcgcggctggcggtcgcgcgggtgtcgccggacggcgcgcgccccgcggcggcggcggcggcaggggggagggggaggagcgggctcgcggcggttcggctcccgtcgaccgccggttgggtgaggaggagggggcgcggcggggccgtcgcggccagccctcccacggaggaggccgtgcagatgacggagccgctcaccaaggaggacctcgtcgcctacctcgtctccgggtgcaagcccaaggagaattggagaattgggacggagcacgaaaagttcggtttcgaagtcgacactttacgccctataaaatatgatcagattcgtgacatactgaacggtcttgctgagagatttgattgggacaagataatggaagaaaacaatgttatcggtctcaagcagggaaagcaaagcatctcactagaacctggaggccaatttgaacttagtggcgctcctctcgaaacattacatcaaacttgtgctgaggtcaattcgcatctttatcaggttaaagcagttggagaggaaatgggaataggatttcttgggcttggctttcagccaaaatgggcactgagtgacataccaataatgccaaagggaagatacgaaataatgaggaattacatgcctaaagttggtactcttggccttgatatgatgttccggacatgtactgtgcaggttaatcttgacttcagttcagaacaggatatgataaggaaatttcgcgctggcctcgctttgcagcctattgcaactgcaatatttgccaattctccgttcaaagaaggaaaaccaaatggatttctcagcttaaggagccatatctggacagatactgataataatcgtgcagggatgctcccttttgtctttgacgactcatttgggtttgagcaatatgtggactatgcattagaagtccccatgtattttgtgtaccgaaataaaaagtatattgactgcaccggaatgtcgtttcgggattttatgcaaggaaagcttccacaggctcctggggagttgcccactcttaacgattgggagaaccatctaacaacaatttttcctgaggttaggctaaagaggtaccttgagatgagaggtgctgatggtggcccatggaggagattgtgtgcgttgcctgcattttgggttgggctgctgtacgacgaggaatcgttacaaagcattttagacatgacttttgattggacaaaggaggaaagagagatgctaagacggaaggtaccatcgactggtttgaagacgccgtttcgtgatggatatgtaagagatttagctgaggaagttctaaaactggccaagaatggactggaaagaagagggtacaaggaggttggtttccttagagaggtcgacgaagtagtgagaacaggagtgacgcctgcggagaggctgctgaacctgtacgagaccaagtggcaacgcaacgtcgaccatgttttcgagcatttgttatactgattactgaggatgacgccgccgaacgacgttggactgagcttgtagatgtaccccgtaccctaatacagagtctcgtcttgattcattcaatgcctgagccggaagggctcagtttcaggcacacaggagcagagctttcggttggttgttgacggggggcaaccgctgcacagcccggtgctgtgcctacaaataacttcgcctggaactggaacggatcactcatcactgtgctttgctttgacttgatctgcctgtctctccagggagatggaacaaactactgtttgtaccggcccgttttgttttgcagctatgaaaatcgccgtattgaaaataagtccgtcttctgcacgatggaactgtttgtttttcctttttttttggattgttgggacttgggatgtttgttcggggttaacatggcaaaagtgatctcatcgacgataaataaatgaactgatggtttgatccggaatctgcgatatctgcatgttcctttgtagccggtctttatggtctgctacctctgctacgataccttagggtacatgattttccgtacgcatcgtctcttagctgcatttgttgcatttgtgatttaggaa

SEQ ID NO: 208443 - DNA, 1752 bp, Zea Mays
ctaggtttgtttcgggtccccgcagccgcaagtaccgtcggccgcttgcttcccacggcaacaactcacctcccgggcctaccacgcagaaagaaacatctcctttgtatcggcctcggcaatcctgaccggatcaacaaagacgtagctaccccctcccgcgtccgtcgaattcgcctccgccgcctgctcgatccggtgggaattcgccgctgccgggttgttttcgctggggtgattaaggctcgggattcgagatctacgcgagtcgcgggcaagcagccatgagcgaggtgttcgagggctacgagcggcagtactgcgaggcctccgcctcgctctcccgcaagtgcaccgctgcctccgccctcgatggggagaagaagaagcagaagctgtccgagatccaatccggcgttgaggaagctgaatcgctgattcgtaagatggacctggaggcaaggaacctacagcctagcattaaggctggtttgcttgcaaagctgagggagtataaatctgacctcaacaacgtcaagagtgagcttaagaggatctcagcgcccaatgctaggcaggctacccgggaggagctcctggagtctggaatggctgatactctcgcggtgtctactgatcagagggggagattgatgatgacaactgaaagactgaatcagtcaactgacagaattaaagagagccgaagaactatgttggagacagaagagcttggtgtgtcaattcttcaggatcttcaccaacagcgacagtcactactacatgctcatactactttgcacggagttgatgacaacattggcaagagcaagaagatcctggctgcaatgtcaaagaggatggataggaacaagtggatcattgggggaattatcacggctctcgttctggccatccttctcatactctacttcaagctcgctaattaagcctgcctgcaggtaacagcaaaaggtttgaggacgctgaaacaagaaaagaggcgggacgggacgggacggggggctagcgcgtacgttttggtcttgtgcggttgtgccttcagccttgtgttgttgtgaagcagaagcctggaggtagtaacaagtaaaacctgtcacaacttgtcccctgtgacagcacgggcagcaacttgtgttacatcgatcgatcggatatccctttgtttgacgaaacattcaatgcgtaacgaccgtgatgcgacgcgcaagtgctctggagtctggacagatgcttcgccggcctcttctctcgacaggaaaaaaaagagtgcttcgccggcctcttctgtcgacaggaaaaaaaagagggaacgcgagtaggcaccaccagctgcgcgcccgtcgcttcatgggcggttctcttgatcgaatcagccgtgacgtcttgctaccccgactataggcggagcggagctacagctacagggtacggcaattgcgtcatagctaccccttatttagttcaattgtactaatagcagaagaatattaaaggccattttagtcttcttatgagccatttagtatatttttactatttttagcccctagaaccaaacatgttagggactaaactttagtcccctaaataaactttagtccctagactaaacaaaccaaacatggccttaattgataaattcattcattttcattgctaccagctgtaataaacctcgccatgtaagagccctgcttggaggaatttaggcacaagagtcagtcaaac

SEQ ID NO: 208444 - DNA, 777 bp, Zea Mays
ttgcttcccacggcaacaactcacctcccgggcctaccacgcagaaagaaacatctcctttgtatcggcctcggcaatcctgaccggatcaacaaagacgtagctaccccctcccgcgtccgtcgaattcgcctccgccgcctgctcgatccggtgggaattcgccgctgccgggttgttttcgctggggtgattaaggctcgggattcgagatctacgcgagtcgcgggcaagcagccatgagcgaggtgttcgagggctacgagcggcagtactgcgaggcctccgcctcgctctcccgcaagtgcaccgctgcctccgccctcgatggggagaagaagaagcagaagctgtccgagatccaatccggcgttgaggaagctgaatcgctgattcgtaagatggacctggaggcaaggaacctacagcctagcattaaggctggtttgcttgcaaagctgagggagtataaatctgacctcaacaacgtcaagagtgagcttaagaggatctcagcgcccaatgctaggcaggctacccgggaggagctcctggagtctggaatggctgatactctcgcggtgtctactgatcagagggggagattgatgatgacaactgaaagactgaatcagtcaactgacagaattaaagagagccgaagaactatgttggagacagaagagcttggtgtgtcaattcttcaggatcttcaccaacagcgacagtcactactacatgctcatactactgttgcaaagctgcaataattcttgc

SEQ ID NO: 208445 - DNA, 1636 bp, Zea Mays
cgaaatttcacaaacccgaatagaccgaaccgaattaccctaataaaccgaatgcccagacctaataaccgcccggcccgggcccggcccagcccagcgcaggcgtgcgaacacgaagctcccctggacggagctctatcgcgtagtacggagtccacagggcgaggaaagatgctagcaggcgcccccaccggcgatgcgggccccagctccggcgctgggagcaacccacccactcggccacggaggttccccggggcggcgcagccggagatcatgcgggcggcggagaaggacgatagctacgcagcccacgtcacggaggcatgccgcgacgcatttcggcacctcttcggtaccagggttgctgttgcttaccagaatgagataaaattgcttggtcagtccctttactacttgctaacaactggttcaggccagcaaacacttggtgaagaatattgtgatatatctcaggttgcaaccttgcatggacttccacctactcctgctaggcggattctattcattttgtaccaaactactgtgccctaccttgctgaacggatcagggttcagaggccgagttcatgccttgtggcaatgggttcttcagaaatggccttcaatgctgccatatgctcaagattttatacagttggctatccggacaaatctaatgttcttctattttgaaggtctgtattatcatttgccaaagcgagcagctggtattcgctatgtattcattggcaagccaatgaatcagagacctaggtatcagatcttgggtatttttctgttgattcagttgtgtattcttggagctgaaagactccgaagaagtaatatatcgtcaatagctagttccattaatcaaatatcatctggaggctatccatcgactacaggtcggggcatccctgttctaaatgaagatggaaatatcatcagtgacatccgcagtggtaaagctgcagatatagcttctcattcagagacctccaatggcaagagcaaatgcaccctttgtctcagcatccggcaaaatcctactgccacaacctgtggacatgttttctgctggaattgcataatggagtggtgcaatgagaagcctgagtgccccctatgcagaactccgattacccattcgagtttgatttgtatatatcattcagatttctagcaaatcatttcgcacagtaggagtccatatcatacttcactggcgtcaaaatttccagaccatatttcggcaagaaaactgcatgccaaaatggtttcgtatacttaagtgggagaagagtacgagaccatttcaagaggttaaagatcagagagttgcatacgataatttgttgtaggttgaaagtttagattgaattagggaccacaggtagtagaaattatttattggcagttcggatagtagataacttgtattggacaccgatgtgaattttattggttagaacaatgtccgactcgaatcatcgagctatttagcaatatgttgtgtccattttcgtcgcacttataccagcttgtatgttttgactaagttaggtgcaggtatgttactataattttcatttatgtttgagtatagaatataaaatagctgggtggacat

SEQ ID NO: 208446 - DNA, 1699 bp, Zea Mays
cccgggcccggcccagcccagcgcaggcgtgcgaacacgaagctcccctggacggagctctatcgcgtagtacggagtccacagggcgaggaaagatgctagcaggcgcccccaccggcgatgcgggccccagctccggcgctgggagcaacccacccactcggccacggaggttccccggggcggcgcagccggagatcatgcgggcggcggagaaggacgatagctacgcagcccacgtcacggaggcatgccgcgacgcatttcggcacctcttcgggttgctgttgcttaccagaatgagataaaattgcttggtcagtccctttactacttgctaacaactggttcaggccagcaaacacttggtgaagaatattgtgatatatctcaggttgcaaccttgcatggacttccacctactcctgctaggcggattctattcattttgtaccaaactactgtgccctaccttgctgaacggatcagctccagaattgttgcccgtagtattgtactcaacgaatctcagtttgatgaccatcctgaaagtgataattctagtagtgacattgcacaatccaccacaaatagtgacattccttcaagaagcttaagtgtttctgctctgtcagggttcagaggccgagttcatgccttgtggcaatgggttcttcagaaatggccttcaatgctgccatatgctcaagattttatacagttggctatccggacaaatctaatgttcttctattttgaaggtctgtattatcatttgccaaagcgagcagctggtattcgctatgtattcattggcaagccaatgaatcagagacctaggtatcagatcttgggtatttttctgttgattcagttgtgtattcttggagctgaaagactccgaagaagtaatatatcgtcaatagctagttccattaatcaaatatcatctggaggctatccatcgactacaggtcggggcatccctgttctaaatgaagatggaaatatcatcagtgacatccgcagtggtaaagctgcagatatagcttctcattcagagacctccaatggcaagagcaaatgcaccctttgtctcagcatccggcaaaatcctactgccacaacctgtggacatgttttctgctggaattgcataatggagtggtgcaatgagaagcctgagtgccccctatgcagaactccgattacccattcgagtttgatttgtatatatcattcagatttctagcaaatcatttcgcacagtaggagtccatatcatacttcactggcgtcaaaatttccagaccatatttcggcaagaaaactgcatgccaaaatggtttcgtatacttaagtgggagaagagtacgagaccatttcaagaggttaaagatcagagagttgcatacgataatttgttgtaggttgaaagtttagattgaattagggaccacaggtagtagaaattatttattggcagttcggatagtagataacttgtattggacaccgatgtgaattttattggttagaacaatgtccgactcgaatcatcgagctatttagcaatatgttgtgtccattttcgtcgcacttataccagcttgtatgttttgactaagttaggtgcaggtatgttactataattttcatttatgtttgagtatagaatataaaatagctgggtggacat

SEQ ID NO: 208447 - DNA, 1087 bp, Zea Mays
acatggaagggagacaggcgaatagaggacagctgagctgcagcatcccgtccaacagcaggaccagcgagggtgtacctccgcctcgcgagtcgggaccatgtggacgggcagcccgctgctccgggacgttggcgccgccgtgctcacgggagtgggcgcggctgccgtgctccgcttctgggaagagatcgccaaccgcgccctgctggaccagtgacagtgattggacttggtttcgtgaaagctgaaggtgtggttaactccatgactaggcatggagaccgcagagaacttctcaagggcccgctgtattatgcctgtgctataactctgacaacaatagttttctggaggacatctcccatctcaatcgcggtgatctgcaatttgtgtgccggagacggtgttgctgacatagctgggagacgattcgggcatgttaagctccctcacaaccctgaaaaatcatatgccgggagcatcgcaatgttcttggcaggtttcatcgcatcagtactgttcatgtgctacttcaacattttcgggtttgttgagaagagctggaccatggttgctgcctttggtgtgatatccctggctgcagcagttgtggagtcactcccgatcagcacacgccttgacgacaatctgacggtttctgtcgcatcagtgctagttggcgcccttgttttctattccattggagccagaaacctgtgctgcatgagcagcgaagtcaggagaagtatcccagcaaccgttggaatggtgtttgcaggcagcagctgaaacatgtagccacagtccaggagcagagttgagcagaaagtgcagagaaaggagttcttcaatcctgatgtgtgtgtatcttgtactgtaaccattttcctgtctaagcagacattcttgtaactttattaagaaagaggtaaagcgagaataagtttattagggaaaacagaggatgagctctcataagcaaatgcaaattacagcgtgaaagttatgcgattggtgaaaagggagatgaaactgagcaaaaagaaatctagaagagaaaggaaaatatataaaaaataaataa

SEQ ID NO: 208448 - DNA, 933 bp, Zea Mays
cggccatcgcttcactatctctgctatttgtcttatttctttgtctctctaaaattcacctcgcctccccatttctttgcttactccggccgactatctctgctatttgtccccttgggagggcgtgctgccgtcggtcggtgctccagcgactgtccctatcggcggcatgatcggatggtaagatgatggctagatgtggctagagttgctgaaagagctaagagtacttgccatcgccagattgttgaaacgcgactggaaactagtggtccggccttcaacaacggtagcgtggcaattcagcaatgtggtggcgtgtctctatctgtcctcaaatcgcggtgcagaggaggatgacccgaaagagggctctggaaagctttaggtgtgggaggcgttgaagggataacggaagattttaaggccacacgacgccgttgaagggataaagaagatcccaaagccacacaagctagagaacaatgcagaatggaagcggtggcggcggcggcctcgctgccggagtgcggctccaccggtggactgctcatcagtggtttcgcctattaacccccctctaggcgacttttaaggtcatcatcgccgctcgctccttggggaaccgccactgccgcacgaagggagcaccgtcgctcgcccgcacctccagggtcatcatctaaattacatgattatttaaattgtgtaaacttgagtaaattagacagaacattagaagattattttaaagtgtatttcataagggtcaaattaagtattttagatgcaggcttatgggggttattttgaactacttttttaaacaatgatggatgtaagaaatttatataaaaatataaggggtattttgaattgcctttgtaatgtcagaagtggttagtatagatgcaaaattagtgtgaaagggcc

SEQ ID NO: 208449 - DNA, 731 bp, Zea Mays
gataaagaagatcccaaagccacacaagctagagaacaatgcagaatggaagcggtggcggcggcggcctcgctgccggagtgcggctccaccggtggactgctcatcagtggcagcagaagtgcttcactgcagctgcccccgccgacgctcgcgcaagaaggcgttcgtgtccagagaggagctagaggagagcctcacaagaactggcccgtggacaccctatccctggacctcgccaggttcggcatggtcgacgaggccgtctcgtacctcgtcaggtccgtgtgtgtgctcgagatcgatggagacgttgggtccgtggagtggtaccaggtccagttggactagttgccaccctagcttggatgtatgtcagtgagaaacccattaagagcctttttcacgcccctcagcttctcgcctctagacggccaccccacgcagatatggcgacgcgaaccgtgagcttcccctcctttgcggtctcttaccagtgccgaggtgcgaggaggatgcatttacgttgcgagggacatgagaagttgcgagtagccgtcactgccaatgcgactttcttttaaagaagttactagcttttatggacacttgaaagtcaacttataaaaaaaatccatgagaaataaggtcaactccattgctccacgcgctatccaggagtggagtttcaagctctacgtctgcattcatggaagatccgtgaagtgttt

SEQ ID NO: 208450 - DNA, 874 bp, Zea Mays
cggccatcgcttcactatctctgctatttgtcttatttctttgtctctctaaaattcacctcgcctccccatttctttgcttactccggccgactatctctgctatttgtccccttgggagggcgtgctgccgtcggtcggtgctccagcgactgtccctatcggcggcatgatcggatggtaagatgatggctagatgtggctagagttgctgaaagagctaagagtacttgccatcgccagattgttgaaacgcgactggaaactagtggtccggccttcaacaacggtagcgtggcaattcagcaatgtggtggcgtgtctctatctgtcctcaaatcgcggtgcagaggaggatgacccgaaagagggctctggaaagctttaggtgtgggaggcgttgaagggataacggaagattttaaggccacacgacgccgttgaagggataaagaagatcccaaagccacacaagctagagaacaatgcagaatggaagcggtggcggcggcggcctcgctgccggagtgcggctccaccggtggactgctcatcagtgtcactcactgcctgctgccaggggccaagtgcttcatcgtcgtttgaccttgcgttccattgaagactcgttttctcaaaaattccttccgttctagattaagacctgctctagatcgtcacggctttggtaggagaccttgaagcgtcctttaatcgacatcttgaataattcatgtagtcagcttggtcataattgttcgtatttgtgcaactaaacagcacggctcgaagtcttttgactttctaagcgacatgtacaattgtggcatagcaagagccggctacaatctcatcgccggatagtttctctcgg

SEQ ID NO: 208451 - DNA, 792 bp, Zea Mays
cgtaatgttagcaggatacatgctctaagtctctgattcttgattcactaaatgatatattatttgttatatctgtaaaagaacataacgagacatgtcgtaaatacttagcatgatcagtgacaagttacctcctgtatctagatatcatttctctataagattttgtttcaagatgtaacagtaatttagtatgttgcctctgtaagaatgcatggtaatcaaacatatcctttgtttgaaaattttctatctccatgtttattaatccttgaatgaagtgtttgatttacagtaataaattgcaatcattaagggatacctagtaagagggagagtagtgatagatctaataacacatgagaagaagaatactcgtcaacatttcacatgttccttgtgtctttaactgttatcatttctcacttcgtggtaccacttctctacggatttatggaactactggggagaatatcttgcgtggttcatgttaatccacacaaccaaactatagtacatcaggactgctaccccgagtgaaatgcttacggcgtggaaggatgtgtgctatcttgcctcgcgaatgaatcgtttggttcgtttctaagcttcgcttggagccgttgtaaaagtaagaaacaactaaactctactggataatgtgcctattgtaaagccgttaacacgtcatgttaatatcaatcagtttccctacaatgagaaaattgatatttcgcattggtgttacgtacggtgatgtttgagttcactgcagagtctgcgatatttgtc

SEQ ID NO: 208452 - DNA, 1191 bp, Zea Mays
caacaacaaaaaaaagttaccaatcgcgagctcccttcggccactccaccatcatcagcaattcagggagcccgccggcccgccccgccccgcctcgttacccgcccacccaccgctgcttctgcccgactgctccatggaggggaccacgcaacccaccgcgggggcgcgggaaaagctgctccccacctccgccgccgcctctctgccgccctacctcgacccgcaccccgccgactcctcctcctacgcggtcctcctcgtccccgtccgccgccgcctgcgccgcggcggccgctgcatcgccccctgcctcaccgccctcctcctcgcgctcgcgggcttcctcctctggccggccgacccggacatctccctcgcccgcttccacctggggcacgtctccgtcgtggcgcgccccgccgtcgccgtcaccatatccgccgcgctcaaggtccgcgtccgcaacccggacctcttcgcgctcgactacacccgcctcgacgtcgccatcggctaccgcggcaagccgcttggcctggtaacgtccggcggcggacgggtccaggcgcgcgctgtctcgtacgtcgacgccaacctgcagctcgacggcatacgcgtcgtcgaggacgcgatctacctgctcaaggacctcgcgcggggatccgtgccctttgacgccctcgccgaggtcgagggtcaccttcacttcttcttcctcagtatcccggtcaaggtccatacgatgtctaatgcattatagagagaaaccaatacaggacggtgcagcacaaaaattgtgaggaaagaagatctacacaatcttcttgcattgatctagataccattcatctgtcagacatggggagaatatcttgcgtggttcatgttaatccacacaaccaaactatagtacatcaggactgctaccccgagtgaaatgcttacggcgtggaaggatgtgtgctatcttgcctcgcgaatgaatcgtttggttcgtttctaagcttcgcttggagccgttgtaaaagtaagaaacaactaaactctactggataatgtgcctattgtaaagccgttaacacgtcatgttaatatcaatcagtttccctacaatgagaaaattgatatttcgcattggtgttacgtacggtgatgtttgagttcactgcagagtctgcgatatttgtc

SEQ ID NO: 208453 - DNA, 1105 bp, Zea Mays
tggtagcacaatgctccatcactgctgaaatcaacctagtatgaagaacgcatatgctgtttcaaggctgaggaagaaaactgggtataccaaaaatcaattctacgatcaagcattaaaaatatacaaggaggttaacactttgatggcacatggagacacatcatcgcttcggaaaattctgacagagaggatgcattctactataaaaaatgaactaaagagaagacagtccatgtggaattctgtacactgggaactggtggagcctgctgttagtatcagaactttgagggctcgcatgattggcctcgataagaatgacctggataaagcttttatacagcttacacttgagtttgttaccaaacagaaatttgaagcctataattcaaagggtgcagttgtgtctggagacaagtcgaaggaggtacttgtgaaagacatttgggtgtttgagaggtccctttttcaccccggagcatattggcgtgtatgcggaagaattacactgtaaccatatctgttttggtgtccacgttcaatttctcaccctggagctgaacaagagctagttcaataaaattttgccctgaactcctttttttttcatccggttctaactgatgcctaacagggtctatgcagtgatgtagtatttatgcctttcttctttgtgttttttattagcagaaaatacaggttttctatttatgcttttgttagagaactagctcttggagagggggcatattgaccccatttggaagggtttgcatctcagcagcagcaggtatcagaattgagaatactgcctaatgtgctcgacaagtaaaagctggatctcttttgtctatggcactttcatgctattcatacgcggtcttctcctgcattggcattgcaaatctccgtttaattaaatttctggtggttatagtaaggctacaggaaaccttccatggccaggcacctctgtgtaactgtcacgtgacctggctctcactattctgaacattcatcttgtgctgactgctgaacgcctgggctctgttcagcgactgatgtaacacatcgtattttggagaaggcaaaaaaagaaaag

SEQ ID NO: 208454 - DNA, 455 bp, Zea Mays
catcactgctgaaatcaacctagtatgaagaacgcatatgctgtttcaaggctgaggaagaaaactgggtataccaaaaatcaattctacgatcaagcattaaaaatatacaaggaggttaacactttgatggcacatggagacacatcatcgcttcggaaaattctgacagagaggatgcattctactataaaaaatgaactaaagagaagacagtccatgtggaattctgtacactgggaactggtggagcctgctgttagtatcagaactttgagggctcgcatgattggcctcgataagaatgacctggataaagcttttatacagcttacacttgagtttgttaccaaacagaaatttgaagcctataattcaaagggtgcagttgtgtctggagacaagtcgaaggagggtgctttggggccactggccacagtagctgtaacagggct

SEQ ID NO: 208455 - DNA, 1609 bp, Zea Mays
ggaagcctgaaagcgcaaccaaaccaatcgcatctcccactcgaagaaggcaggcatccaaaagacctactgtccgtcagtagtacatacgtccgtacgtagagtagagaccaaaacaagcaagcgtttattttgtgctcgtttacgtttagttgtgtgtgatcaattagccagccgccgctgccgcggcgtccgcgtcctcctatatcagccccgcctcccttcctttgcagcagcaacctcccttcctttcccttccccacccctcctgctgcagtctctcctcctcagcggacccggtcctggatggccgccttcttcgctgctgctccgccgccggcggcgggtgctctcgcgtcgttccaccacgaggagcagcagcgtcaggacgccgccgaggagctgtaccacgtggacgacgacgtcggcgagggcggctgcggcgcaggacagcaggggaagctgtgcgccaggggccactggcgccccgccgaggacgccaagctcaaggagctcgtcgcgcagtacgggccccagaactggaacctcatcgccgagaggctggacggcagatcagggaagagctgccgcctgcggtggttcaaccagctggacccgcggatcaaccgccgggccttctccggcgaggaggaggagcggctgctggcggcgcaccgcgcgtacggcaacaagtgggcgctcatcgcgcgcctcttccccggccgcaccgacaacgccgtcaagaaccactggcacgtcctcatggcgcgcaagcagcgggagcacaccggcgcgctccgccggcgcaaaccctcgtcctcgccggacccggcgccgccgacgtcgcacttggcgcccgtcgtcgtcctccaccaccaccaccaccagcaccacgccggctcgcctccgcgcaccgtcgccgccgctcacgcgcagtacacggcagcggacacccgcgcgcacagcggcggcgagtccgacgagaccgcgtccacctgcaccaccgacctgtccctcggctccgccgccgccccctgcttctaccagagtggctacgacgcggctccgcgcgccgcggcgttcgcgcccagcgcgcgctccgccttctccgcgccgccggcgtcggcgcgccatggcgagtcacgctccgacgacaaggcgtcgccgcccttcttcgacttcctcggcgtcggcgcggcatgatcggggaggggggccccccgcggcggtgtacaggaggcgggccgaaagacgcgtagtttagctttagggtccagttaatgatcaagaacatggcctgagagaggagaaagaatgtatggcgatttgactgctcggcttgggttgggacttgggagacgagttgcaagcgctactacaccaagggcaagcgtgggagattgacatggatgaaggaaagaaaccgcttgcgagttgcgacacaaactgcaaggcgaaggcagatcagatcctctgctgccttgcctcttctgttcacaccctctctctctctctctatatatatattcttttcatgcgccgttctgttctggtctaggatatttatttatttctcgcctttctttttcctttctttctttttcctctc

SEQ ID NO: 208456 - DNA, 2297 bp, Zea Mays
gttaaccccaccttggatcgcggccgccgtgtgcgtgagcagcgacgtgccgacagccgaaggcccaaaccaattcgattcctcccccctgccggccgaatcaaatttctccgccgccgcccggagcaccgatccccgagagttccatggactcgccttccgcatcgaggtattagcaagcctcgccgcgtcgcgccgcactgccccgccccgacgcctgctgcgctggttttggaaggatccaagatgggtgtaatcagcacagtgcttggtttctttgggtttggatttgggttatctgctggcattgtaattggttacttcttcttcatctacgtacaaccaactgatgtcaaggatgtcaaggtccggccgcttgtagaatatgattcaaaatccttggagggcatccttcccgaaattcctttaactgcacaagatatcgcgaagccaattattgctgagaatactgctaagtataacatagacactgttgagtttgaaacacttactttgggtagcttgccacccacctttcaagggatgaaagtctacatcacagaggagcaagagctgataatggaaccatctcttaaatgggctgcaaacccaaatattactgttgttgtaaaagcctatggtttgaaagctactatccagattgtggatctacaagtctttgcatcacctcgcattactctgaagccattggtgcctacatttccttgctttgcaaaaatccttgtctcacttatggagaagccacacgttgactttgggctaaaacttcttggagcagatgtaatggctattcctggtctttacatatttgttcagaccatggacccaaatgatgtacaaaatgagaaatctcgtggtgagcttactctagagctcatatacaagcctttcaaggaagaagatatagagaaagaagatacagagagtgctgatgtgatagagaaagctccagatggtactccagctggtggtggcttgctttatgttattgttcatgaagcccaagatcttgaggggaagcaccatacaaacccatatgcaaaaattattttcaaaggcgaggagaagaaaacaaaggtcatcaagaagaatagggatccaagatgggaggatgaatttgagttcgtgtgtgaggagcctcctgtaaatgataaactgcatgttgatgtcctaagtaaagcctcgaagaaagggctaatacatggcaaggaaactttgggctacattgatattagcctcgcagacgtgatcagcaacaagcggattaatgaaaagtaccatctcatagactcaaaaaatggtcagatccaaatcgagttgcagtggagaacttcctagacaggaaaaagccagaatgcctgaatgtagtacacacgtatgttcctatattcagtttgcggatgtctgtgattgagattgagctcgtgtagatagtttctttgtttatggacatctttgttcagatctcctcttagttgctcaaatttccgacaagcactatgtatgcatgtttatggaactgaacctattctttgactaatggcagaccatacaagagcattctggcattggtgtggaatttgcatcaaatcaaaagacctcaaagtaaaactatagaactggaaaataaaactttaggaacatactctacttcatagctttcaaaccaggcgacggttccgattctagacctggtcgcttttagttttactttactttgactattgacaaacccttcttccattacctgcatcaaatcagaagacttcaaagccctataaggcgaatgctccaagacgtagcaggcgggtggctggaattggtgtggaatttgctatgcaggattggggtggaaaatcttccaagaaagctatgaaggccttgcacatcatcagtaatggagaaatcagtcaagaagcccaacgggagtatgctgcgcttttcaaacatcctctgtccccgtctgttagcaatactcactaatccctaaccgaacagcaggagtggaggaagatacacagcaggagtggaggaagatacaagagaaggtagggaagatcacaggaaggatggagtatcttctgcagagagaaaatagttgttcatgttttcgataatcctgacccttccatcaggtagtgcataagtactacttgcttacaagctgccaaaccaggcccagctatcctcgcgcacgcaggcgcccaacaggtcactttcttcggtctggcccatatacacgatcgctcagatgatgcacacgaggcggacgcgac

SEQ ID NO: 208457 - DNA, 3893 bp, Zea Mays
tggcagtgccgactgccgaggaatagatggagtcacacaaatggcactgacacacacttgacctcccggtgacgcagcgccgaccgcgcacacactccccagactccgcagggacccaacgcagcggtcaaacaaaggcagcggcagccggccggcagcggcaacggcgtaactcccaagtcacctccgcctcgggctccaaaaatccccacccgacctcgagactgagcggaccgacggtgatgtcgtcgtcggtgcccccgccaccgccccagcaggagctggagtcgccctccgccggcggcgacaaggtcctggccgcagcgcagcacatcgtcaagtccctcgccacctccaagaacgccgctgacgacatgatccgcatactctccggcttcgacaaccgcctctcctccatcaccaacgaccacctcttcccctcccccgaccttaccgccgcctccgcctccgagatctccgccgccgccgcctccttcgacgccgccgaccagctcatccagctctgggacgccaccccggacgcgctcgtcttcgaggcccccgaggacgacatcgcgcagtacctcgcggccgtggacgtcgccatcgaccacctcgcgcgcggcggccccggcggcgcgcgggccggcgtcgccgtccagctcgccatggtgcgcctcgaggaggagctgcgccacctcatggtccgccacgccgtccccatcgaccccacgggcctcttcttctcgctccgccgcctctcgctcgagtccatggacgacctcgacgcctgccccgacttcgacgccgccacgccgcacagcctcgacgccacccccgccggcccggagaccgcgcgcggcgcctccctcggatctaacccctttgaggaccaggtgttcgatcccgtgcgccccgaggccgtcgaagacctgcgcgccatcgcccaccggatggcgcgcgcgggatacgcccgcgagctcgccgacgcctactgtggcatccgccgcgacctgctcgacgagtacctctccgtgcttggcgtcgagcgcctcagcatcgacgatgtgcaacgcatcgagtggaagctgctcaacgacaagatgaagaagtgggtgcacggggtcaagacggtcgtgcgcgtgctgctggctggtgagcgtcgcctctgtgaccaggtgctcgatgcgtctgatgaacttatggatgcgtgcttccttgagtccaccaaaggatgcattatgcagattcttagctttgggggtgccgtggcggtgtgcccccgctcgccagagaaggtccctcggatccttgacatgtatgaggcacttgcagaggtgatccctgaaatgaaggacttgtgcataggaagttctggggatggcgtgatcagtgacgtgcaagccattcttgataggcttggggatgccgtgaggggtaacctgtttgagtttgggaagatgttacagcaggagacctcaaggagggcgatggcagctggagagatccacccaatgacacgctatgtcatgaactatttgaggttgctggttgtttacagtgagacacttgatgcactcttggccgatgacagcagtgatcatgatactttcagaagttctgatgatcaggatcaggaacacttggagagaatgaccccttttggaaggcgtcttctgaagctgatatcttacctggaggccaatttggaggaaaaatctaagctctatgacgatgctgccctggagtgcatatttgccatgaacaatttgctctatattgttcagaaggtaaaggattcagagctggggaaggttttgggtgatcactggataaagaggcggagtggcaagattcgacagtattcaaagagctacctaagggtttcgtggacgaagcctttgtcttatttcaaggaagatggacatggcagtgggagtgggagtggcagtggcagtggcagcggcagtgggcattcaagttcgaggatgtccatcaaggaaaggttcaaaaacttcaacatggcctttgaggaaatttacaggaaccagacactctggaaagttccagatcctcagctccgggaagaactgaagatatcaatatctgaaaacgtgattccagcttatcgtgcttttctgggcagatatggcaatcaagtggacgggggaagaaatccaggaaagtatataaagtacacaccggaagatttggagagccagctatccgatttatttgagggatcaccagtgtctgccaatcactctaggagaagagcatagttcgtggttggccggatccatgttgcagggtcgcactccagcacgccagggtgacaacagaacggagcagatgcaggagctgtacaacagcctgaccgcttccaacgagctggtcagggtcctggccaacgtcctgggccccgcgggcgcgctcaacccgacggcggcgtccgtgctcgcggcgctgcgctccgagctggacgccgcgcgccagctcgtgaagcagcagcgcaggcgcggcgtggacggcgaggagcgcctgctgcggaggcagctcgcggaggaggtgcgcgcgtggaagtgcaggcacagggagaaggcggcggcggccgcgcgcctcgtcgcctcggagctcgacggcgagcggcgggcgcggaggcgggcggagagggtggggacgaagctggcggaggcgctggcgggcgcggaggcgtcgctgcgggcggccacgcgggagcttgggctggagcgggcggcgagggcgcgcctggagaaggtgtgcgacgagctcgcctccagagacgttggcggcggcacggaggcggaggcggaggacgacgacggcctcaggcgggaggccgccgccaccgcgctggaggagttggaacgggagagggagatgctgcaggtcgccgacgagctgcgcgaggagcgggtccggatgaagctggcggaggcgaggctacacttcgaggagaagaacgccgccgtcgaccgcctgcgccaggagctcgaggccttcttgggcaacgaacgtcgagaacaaacgcctgcccaccatgaaatggccaaggaggaggaggaggaggatcaccagctgcagatcgtccttgcctccgaattcggtgtccacggcatcgatcctctggtcacagagaagagcggacaggaagaaaatgccgaagctggtgacgacgacgacgactcggaaggcagcgacatcgagctgaacatggacggcaacagctggagctacaccaccacctccaggtccagggacacgacggccaagaacgcaacgtcggcgcacggctcactttcggacagagcaacggaatgtggcgccgacgccggcgccttcgatcgtagatctgaagcgacgagagatgcgccggagcaggactgggcggctgacggatgcagcgacggcgggaccaccggcagggacgaggacgaggacgccgagaggtacgaggcgatcaagaacctcagggagcagatgctgaccggccacgccttcctcttcctgtccaagggcgaggcagacgatgacagcgatcggcgtcgccgtggtttcgcttctcattttgaagaagatggggacctctggtgagccaaattgcttggtgttcaaccgttgacagtaaaagcaccaatcctttgttcgaaatttgtgcatagttttggttttggtgctccatttgcacagcacagttatagagttctttatctctgggatttggattcatactcagttttggtgttttggcactggcattttgcgtttgatgtcacaataaaaaaaattaccaatgcattatttctgtatacagaactataaacttacaattgtaaagttacacgcttattgtaaacttcattgtatctatg

SEQ ID NO: 208458 - DNA, 906 bp, Zea Mays
gaacgacgaccacggtcgactgaaagagttcagagatgaagaaaatgaattggagggagaagacagcgttttgagcggccgtaagggcaaaatcggcagattgcaaagagggcccacctgccagagcagcaacttagagcgacccattttgccaaatccctcgggaagagaaatttgtcaaaatgggtcgccctcctcgcgacgcagtgcgaccacgccgccaccttcgcctgggaaccgcgaccgctccatgaagaggggatcagatttgctcatcgcgacctaccttggggggaagatgggggtcgaggagaggcaggcgcagaagagctcctaggaggagcatcccaagaacctcatcgtcgatgccatgatgctggactcccgcgctgtcaatctcgacaaggggccacctgtcgctctggacaagggggctgccctaagaatgaaagcattaaggtatgcagttggatattgcattcagagaggctcaagcgatagctgcaagtagttctaccttgtgcccagttttcttgttcttttaggtccatgaaagttcccatttttgtggtgttgcttagatggttggccctgttgactaccaaaatgacttggacttttggtgcatggataaatggactgcaagctttcttataacgtggcacatcataagaaacatacataactccaatttccgaaatatcttagtgcagaacaatgaatataagcctgtaacctctagcagagatacacaagagaagctctctttggcatttcactgaatttcctttagttggaagaatgtcgtatcactgtttatggttggcttctttaattaaaggagaacatctttctagtttctactcagttctttggttctatatagaccttaaatattgattccac

SEQ ID NO: 208459 - DNA, 8304 bp, Zea Mays
aaaactctgctcctcgcttaaacccgcgagcctccggacccggatgttgttccggttccgcccggccccctcgtagccatcgcctccttttagcgccgccatcccacctcgccggcggccatggcgaccccgtcttatgcggcggtgaagtgcctcaacacgtcctcgtccagccgcaagcgtttctcgtttaagagcttctcgcagcgggtggaggagatcgacatcgatgtgtaccgcagcctccacacactgaaggcggagccatccagcggatcgtccttcttcctcgacgcaattgtggagtggagggagcttaatactgcagaagacttcatctcattttatgaggagatgataccattggtacaaacacttcctcaaattgtcttgcaccgggacaagctcttttccgcacttctacaaagggtaaacatgagtgcaagattgtccctggagccaatactcatgttgattgcagctttctccagggatattctagaagattttttgccttttttaggaagacatgctagtgcacttttatctcttcttaacgacggaggtgatcgcgaccctgaaatcttggagcaggtcttcacatcctggtcgtatataatgatgtacttgcaaaagtatctagtgaaagatactgtccaaattcttaggatcacagcagcgttgagatatttcccgaaggactatgttagagaatttatggcagaatctgtttcatttttgctgaggaatgcacctaataatcagctaacgcaaggtctactgaaagttctacttgaggctgctaaacaaccatcacctgcacggatagacggggtggtctctttgctgtggcatgtcatgaaaggaacttccacaaagctacactcaaaagctgggcaggtcttgaagttcttgttgagcaagtcaattgtttccactctccgtgataaatttcctgatgataaggtgaagatgattaaacttgttgagttgctggttagtagatatgtgttccctggtagcaacataacaggatcttcttcaattgaggttcttggaagtattcttgactttatgctttctgttctggatgttccaaccattttgggcaatttgtccatcatatcacctttctatgccccagtgttcaaacttaaaaatccgagggtgattgtctttataaagaaacttttggtaaaaggtccccaagttgcacaacattttgaaagtcaaatattaagtgcaatggataatttcattgtaagttcacccgaggatgtcatatttatccttttaaatttctttaaaggatcaaagaagcaaatatttctttgtagcactgatggaaatcatctggattcagtggagaaaacttgcaagttctttgaatcaaaattttctttgtggatagagttattagatgatacagccggcactggtaatcgatctagtaaccaggtcagtgagaaggaagctgctatactgtggggatcttttttctgctaccctaacatgaaaggtgtacatcaagatagtttgtcactgctgaggaagttaatcatcaactttgatcggttgcttgaagtgggagaagggaacatgaatggtcttccaatgactacctggagaggtctacttggtgcagcattgtcatcgtaccacaaactactgttggtcaacaccagcagaaattcagaatttagttttttcttatcgcttgccaagagtcacagtacatgcccacaagtactgtctgctgtagctgaatatttggattccctgcaaggagtatcatccatggaagtgacaaaagaatttgatccacaaaatctcttggagctgttctccatctttgctttcaatttgagcagtccaaccaaggatgttcggattttaacattgaggattctatcatattttgtgaagatggatcaacgtctaatcacagatgaggagcgaccacacaagaggcagagaacagaagtttctggagaggaagctgttgctaaatacgctaatgttgtggatattcttttgattattgagtcaatgccaatttcagtatctactagccgtaaaattgctatcttcatttctcggatacaaatgagtttatcttccaagatggttcatgatgattacatacctcctctcttacatggtattattggcatattgtacaatagatttagtgatctatggccacaaacactggattgccttgctgttctcattagaaaacacaaggagcttgtttggggtcagtttgttccgttcattgcaattcaccaatcaaaaggactgactgtgaaaaatcaggagaagctggaagctgcaacccaaccacagtctatttttgactgcttcaacttgtatcttgctatggactttgattgcacaccagctgtgaccgtggctaccttattgcttcaatcgctccaaaggattcctgatgttgctgaatcccgctctcgacaacttataccgctatttctcaactttatgggctatgatgatagcagcatctttagtgctgattcatatatgcctgaaaaatgtaaaggcaaacaatggaaagcgattctaaaagaatggttaaacttattgaggttaatgcacaatgcaagatcgttatatcagggcaattttctccaggaagtactaactaaaagggttcttgatgacagtgatcctgaaatacaagcaaaagcattggattgccttttgaactggaaggatgaattcttgatcccgtacagtcagaaccttaaaaatctgattgatgtaaagactcttcgtgaagagctgaccacatgggcagtttcacatgactccttgtcaattctgaaagaccatagaagtcgtgtggttcctctggttatccgcgtgttggcaccgaaagtaaggaaactgaagctactaggttctcgaaagcacacaggtgccagtcatcgaaaggcaattcttcgtttccttttgcagtttgattcaaatgaacttgagctttttttttctttacttctgaggtccttgatccctggcagcctccagcttaaaatgtttggttctcagccagacaaccttcttggaagtttctctgacattgttggaacttcaacagaaatttgtgtagagaattttacatggaaaaaggcaaatggtttcattcatctggttgaagaaatttttggtacttttgatatgccacatataagcccatttcttaatgttttattaatcattgtcgctcgcttgctggagagttgcatgaggaatcttagaaatgagagtgatgggaaatatccttgcaaccaaacaaatgaccatggtaatggttgttccataaattctgaagtgggcaattctgtgaacgtggatgaatgctttaaagaaatgcatctagaaggccatatggagcaacctcactctatcacgcagacaagtgtatccatcaagcagttgaaggatttgaggtcttcatgtattagagttgtctcgtcagcccttagtcactatgaaagccatgagtttggagaaaacttctggggtgtttttttttcttctgtgaaacctctgatagactgctttacacaagaggcttccagtagtgagaaaccaagttcattatttgcttgttttatggctatgagccggagcccaaaattagcaccactgttggggtcaaataatcttgtaccagctattttttctattttgactgtgaagacagcgtcaggatccatcaccacctatgcacttgagttcattgagaatctgttgaggttggatattgatttgcagcagcaagatgaacatttagtgaagaaagttcttcttcaacatatggatgttcttatccatagtctccatgattttgttaatcatcgcaaagagctcaacaggagatctggtacatggcttgggcaacgtgaacttaggctgttcaaattattgctaaattacatcacagatccctcagctgctgataacttcatagaccttattcttccatttttcagcaagaaagatttgaactccgacgattgtttggaagcactatgtgttgtgaggggaataattcaaaatctgagatgcaaagtatctgaaaaagttctaaatgcactgaacccattacttgcaattgttggattggaactgcgactatgtatctgtgatatttatgctgggttgtcattgaatgatccttcgatgttgtttctggctgggttaataggagatctgaatgcagtttcagcttcagaacttggtgaactagattatgacacaagacttaacacctatgataaggttaggccacaattgtttcttggcttgacagaagagcatgtgggcgccatattatctcattgtgtgtatgatatgtcatctgaagaattaattttgcggcaaagtgcatctagggctctgcagtcgttcctggacttttccgcctcagttatgaataatgatgtgtccaaatactctattgatgataaatttagagagaataataccagaagcatttgcacgatgggctgtattcagaagatattggaaaaaacttatctgcacaatatgggagtagcaatgactaaagatgtatcaattcaaaaggaatggattattttacttagggagatggtctccaattttaatcatttagcatccttaagctcatttaggcctctctgtaaggtggatatagaagaggattttttccacaacataactcatttacaggctggtaaaagatcaaaagcactgttgctttttagacagggaatcaaggaaaacaacttttcagaggatatcactatgaaagtctttgttccactatttttcaatatgttttctgacgtaaaagctgggaaaggcgaacaagtcagagatatatgtttggatacactatctgctgttgctgccaaagtgcagtgggaacactatagaacaatattgaagagatgcttccgagaattaaaccttagacctgataagcagaagatcatattgaggctgatttgttccatattagatgcattccatttcatgaaacctgcaaatgatgcctcaggaaattctgatgctttgagtgaagatattgattcttcccttacattctctttggtcacagtctcttctgataagcaacagtacatgcaaaaggtagtgtttccacaggttcaaaagttgttaggatcagatccagagaaagtcaacgtcaacataaacctggtagcactgaaaatacttaagttgctaccggtggattattttgagtcccaactttcaagcatcattcatcgaatctgtaacttcctcaagaatcgtcttgaaagcatacgtgatgaagctaggtctgctttagctgcttctgttaaggaactggggattgggtatttgcagtttgtggtcaagatattaagagctatacttaaaagaggttttgagttacatgttctgggctacacacttcattatttgttgtcaaaaaacattactgctgatatgtatggtaggcttgactactgtttagaagatttgttggcagtggttgacagtgatttacttggagatgttgcagaacaaaaggaagttgaaaaacttgcctccaaaatgaaagagacaaagaagagaatgtcgtttgagactcttaagctgattgctcaaagtattacattcaagaccgatttactgaagaagataatctcacctgtttctttacatcttcagaagcaacttactccaaagttgaaaaccagacttgagatgatgctacacaacatagccttagggattgagtgcaactcatctactgaaacatcaaacttgtttatcttcgtatattgtcttattgaggatactattacaggaagcagatctgaatgcaaagagaatacacaatctagtcctgatcaagacagtactgtaagaaagaccttcctgggactaggtgagagtggatcacagaattcttatatacttaccaagtttgcacttgacttacttcgtaatcgtctgaagagcatcaagcttgacaaggaagatgaacaactcgtgaagatgttggatccttttgttgaccttctgcgaaagtgtatgagttcgaaacatgcaagtgtcctctcagccacatttagatgttttgccttgttggtgaaacttccgttgccatctctgagggacaatgcaattactataaaaaatgtacttatggagattttacagagagctggaaactccaatggtcatttagtcacatcttgttttaagctacttgctgatctacttagaggattcaggatttcactttcagataatgagcttcagatgcttgttcatacccctatgtttgtagatcttcagacaaacccttcccctgttgccttatcgcttctcaaaacaatagtcaggctaaaattggtttctcacgaaatttatgatatagttgttaagataggagagttgatggtaacaacattaactgaatctatacagcagcaatgcattcaaattatgctacaattttttctgaactatccactttctgagaagcgcttacagcaacatattgactttttcctggcaaacttaagttatgaacatccttcaggaagagaagcagtgcttgaaatgctccatgacattcttaccagatttccccagaggattattgatgagcagggtcaaaccttttttcttcatcttgtagttgctctagccaatgaacagcatcagaatgtgtcttcaatgatccttagagctattcaaaagctgttaggacgcattggtggtcagggaaagagttacatttatgagtattcactttcgtggtacactggtgagaagaaaagtttgtggagtgcttcagctcaggttattggtttacttgttggcgatcacacattacaaatgggcaagcaccttaaaagtattctggctgttgttaagaaaataatggaatcatctattattgcttctggagctatacaattaggcttatctgatgaagctgccctgccattgtggaaagagacttactactctgttgccatgatggagaggttacttcttcgctttccggagttgtattttgagaaaaacatggaggacatatggataatattatgcaagttgttgatccatcctcattcgatgttgcgtagtatttcaagctctctggtagcatcatattttgctacagtggagaagaggaaacatgaacagaaattggatgccccatcatggttgcttgttcaaccgagcaggctattcataatagctgtttccttgttgaaacaattgaggagtgagctgagtgatactacggcaaataatctgattgtacagaatgttgcatactcagtctgcaacttgcatatgttgattaggcaatcgacctccacacatcagttttggtctagcattagttctgatcgtggtgctttccttgagggttttgaattgcttggttcaagaaaagcaaaaaatatatttctcctttgtacttcaacatctagtgatgtatctggatctagcctcgacaccaacgaagagcctacatctttgttagtttcgtcaatcctaaagaagatgggaagaattgcaatgcaaatgcaggatacacagataaagaacgtgttcaattgcttcaatatgatttcatcagctcttggtcctgatgaatcactaacctatgctgatcacctcttggccccattgtataaagtttctgaaggatttgctgggaaagttgttagtgatgaagtgaagcaactggcccagggggtccagaacaagttacgtgacctgattggttccgagaaatttgttgaagtctacaagagcgttcggatgggcctgaaacagaagcgggacggtagaaagcaggcacagaagattgttgcagccgtggacccagaacgcaatgccaagcgaaagcagcgaatggcagccaagcaccgggaacacaagaggcgaaagataatggcgatgaagattggcaggtggatgagatagcttggtatttaggctctgcggaattcggtgaatcatataattgtagaggataatttttcgtgctacaagtgctggcataaaattatgtttctgttttatatgctgtctcactgacttactgcccgacgtaattttattgttgagttaccgaaccataccgtaagtaaaaattaagaggcataagcaatgaagacatagaattgattgaattatatttttttggggtggatggataagtaacaatatattattaaatgtgcaattaagagttttctggctgaggtttgc

SEQ ID NO: 208460 - DNA, 7655 bp, Zea Mays
ctgttcatgccgtcatgacagggctgattcaaagattatgcgatgaagtggatccaaaagaattaccattgatgtatacttgtttatgtgaagaaatcaactgctgtcttgaggatggctgtttggagcatttgaagtgcttgattgtttttcttgcatttgctttacaaaagaagcaaaacaatgcattcgataaggtgaagatgattaaacttgttgagttgctggttagtagatatgtgttccctggtagcaacataacaggatcttcttcaattgaggttcttggaagtattcttgactttatgctttctgttctggatgttccaaccattttgggcaatttgtccatcatatcacctttctatgccccagtgttcaaacttaaaaatccgagggtgattgtctttataaagaaacttttggtaaaaggtccccaagttgcacaacattttgaaagtcaaatattaagtgcaatggataatttcattgtaagttcacccgaggatgtcatatttatccttttaaatttctttaaaggatcaaagaagcaaatatttctttgtagcactgatggaaatcatctggattcagtggagaaaacttgcaagttctttgaatcaaaattttctttgtggatagagttattagatgatacagccggcactggtaatcgatctagtaaccaggtcagtgagaaggaagctgctatactgtggggatcttttttctgctaccctaacatgaaaggtgtacatcaagatagtttgtcactgctgaggaagttaatcatcaactttgatcggttgcttgaagtgggagaagggaacatgaatggtcttccaatgactacctggagaggtctacttggtgcagcattgtcatcgtaccacaaactactgttggtcaacaccagcagaaattcagaatttagttttttcttatcgcttgccaagagtcacagtacatgcccacaagtactgtctgctgtagctgaatatttggattccctgcaaggagtatcatccatggaagtgacaaaagaatttgatccacaaaatctcttggagctgttctccatctttgctttcaatttgagcagtccaaccaaggatgttcggattttaacattgaggattctatcatattttgtgaagatggatcaacgtctaatcacagatgaggagcgaccacacaagaggcagagaacagaagtttctggagaggaagctgttgctaaatacgctaatgttgtggatattcttttgattattgagtcaatgccaatttcagtatctactagccgtaaaattgctatcttcatttctcggatacaaatgagtttatcttccaagatggttcatgatgattacatacctcctctcttacatggtattattggcatattgtacaatagatttagtgatctatggccacaaacactggattgccttgctgttctcattagaaaacacaaggagcttgtttggggtcagtttgttccgttcattgcaattcaccaatcaaaaggactgactgtgaaaaatcaggagaagctggaagctgcaacccaaccacagtctatttttgactgcttcaacttgtatcttgctatggactttgattgcacaccagctgtgaccgtggctaccttattgcttcaatcgctccaaaggattcctgatgttgctgaatcccgctctcgacaacttataccgctatttctcaactttatgggctatgatgatagcagcatctttagtgctgattcatatatgcctgaaaaatgtaaaggcaaacaatggaaagcgattctaaaagaatggttaaacttattgaggttaatgcacaatgcaagatcgttatatcagggcaattttctccaggaagtactaactaaaagggttcttgatgacagtgatcctgaaatacaagcaaaagcattggattgccttttgaactggaaggatgaattcttgatcccgtacagtcagaaccttaaaaatctgattgatgtaaagactcttcgtgaagagctgaccacatgggcagtttcacatgactccttgtcaattctgaaagaccatagaagtcgtgtggttcctctggttatccgcgtgttggcaccgaaagtaaggaaactgaagctactaggttctcgaaagcacacaggtgccagtcatcgaaaggcaattcttcgtttccttttgcagtttgattcaaatgaacttgagctttttttttctttacttctgaggtccttgatccctggcagcctccagcttaaaatgtttggttctcagccagacaaccttcttggaagtttctctgacattgttggaacttcaacagaaatttgtgtagagaattttacatggaaaaaggcaaatggtttcattcatctggttgaagaaatttttggtacttttgatatgccacatataagcccatttcttaatgttttattaatcattgtcgctcgcttgctggagagttgcatgaggaatcttagaaatgagagtgatgggaaatatccttgcaaccaaacaaatgaccatggtaatggttgttccataaattctgaagtgggcaattctgtgaacgtggatgaatgctttaaagaaatgcatctagaaggccatatggagcaacctcactctatcacgcagacaagtgtatccatcaagcagttgaaggatttgaggtcttcatgtattagagttgtctcgtcagcccttagtcactatgaaagccatgagtttggagaaaacttctggggtgtttttttttcttctgtgaaacctctgatagactgctttacacaagaggcttccagtagtgagaaaccaagttcattatttgcttgttttatggctatgagccggagcccaaaattagcaccactgttggggtcaaataatcttgtaccagctattttttctattttgactgtgaagacagcgtcaggatccatcaccacctatgcacttgagttcattgagaatctgttgaggttggatattgatttgcagcagcaagatgaacatttagtgaagaaagttcttcttcaacatatggatgttcttatccatagtctccatgattttgttaatcatcgcaaagagctcaacaggagatctggtacatggcttgggcaacgtgaacttaggctgttcaaattattgctaaattacatcacagatccctcagctgctgataacttcatagaccttattcttccatttttcagcaagaaagatttgaactccgacgattgtttggaagcactatgtgttgtgaggggaataattcaaaatctgagatgcaaagtatctgaaaaagttctaaatgcactgaacccattacttgcaattgttggattggaactgcgactatgtatctgtgatatttatgctgggttgtcattgaatgatccttcgatgttgtttctggctgggttaataggagatctgaatgcagtttcagcttcagaacttggtgaactagattatgacacaagacttaacacctatgataaggttaggccacaattgtttcttggcttgacagaagagcatgtgggcgccatattatctcattgtgtgtatgatatgtcatctgaagaattaattttgcggcaaagtgcatctagggctctgcagtcgttcctggacttttccgcctcagttatgaataatgatgtgtccaaatactctattgatgataaatttagagagaataataccagaagcatttgcacgatgggctgtattcagaagatattggaaaaaacttatctgcacaatatgggagtagcaatgactaaagatgtatcaattcaaaaggaatggattattttacttagggagatggtctccaattttaatcatttagcatccttaagctcatttaggcctctctgtaaggtggatatagaagaggattttttccacaacataactcatttacaggctggtaaaagatcaaaagcactgttgctttttagacagggaatcaaggaaaacaacttttcagaggatatcactatgaaagtctttgttccactatttttcaatatgttttctgacgatatcactatgaaagtctttgttccactatttttcaatatgttttctgacgtaaaagctgggaaaggcgaacaagtcagagatatatgtttggatacactatctgctgttgctgccaaagtgcagtgggaacactatagaacaatattgaagagatgcttccgagaattaaaccttagacctgataagcagaagatcatattgaggctgatttgttccatattagatgcattccatttcatgaaacctgcaaatgatgcctcaggaaattctgatgctttgagtgaagatattgattcttcccttacattctctttggtcacagtctcttctgataagcaacagtacatgcaaaaggtagtgtttccacaggttcaaaagttgttaggatcagatccagagaaagtcaacgtcaacataaacctggtagcactgaaaatacttaagttgctaccggtggattattttgagtcccaactttcaagcatcattcatcgaatctgtaacttcctcaagaatcgtcttgaaagcatacgtgatgaagctaggtctgctttagctgcttctgttaaggaactggggattgggtatttgcagtttgtggtcaagatattaagagctatacttaaaagaggttttgagttacatgttctgggctacacacttcattatttgttgtcaaaaaacattactgctgatatgtatggtaggcttgactactgtttagaagatttgttggcagtggttgacagtgatttacttggagatgttgcagaacaaaaggaagttgaaaaacttgcctccaaaatgaaagagacaaagaagagaatgtcgtttgagactcttaagctgattgctcaaagtattacattcaagaccgatttactgaagaagataatctcacctgtttctttacatcttcagaagcaacttactccaaagttgaaaaccagacttgagatgatgctacacaacatagccttagggattgagtgcaactcatctactgaaacatcaaacttgtttatcttcgtatattgtcttattgaggatactattacaggaagcagatctgaatgcaaagagaatacacaatctagtcctgatcaagacagtactgtaagaaagaccttcctgggactaggtgagagtggatcacagaattcttatatacttaccaagtttgcacttgacttacttcgtaatcgtctgaagagcatcaagcttgacaaggaagatgaacaactcgtgaagatgttggatccttttgttgaccttctgcgaaagtgtatgagttcgaaacatgcaagtgtcctctcagccacatttagatgttttgccttgttggtgaaacttccgttgccatctctgagggacaatgcaattactataaaaaatgtacttatggagattttacagagagctggaaactccaatggtcatttagtcacatcttgttttaagctacttgctgatctacttagaggattcaggatttcactttcagataatgagcttcagatgcttgttcatacccctatgtttgtagatcttcagacaaacccttcccctgttgccttatcgcttctcaaaacaatagtcaggctaaaattggtttctcacgaaatttatgatatagttgttaagataggagagttgatggtaacaacattaactgaatctatacagcagcaatgcattcaaattatgctacaattttttctgaactatccactttctgagaagcgcttacagcaacatattgactttttcctggcaaacttaaggtatgatgaatatccatagttactttatcatgatatctcactgtatgctaacactctggaaaattgcagttatgaacatccttcaggaagagaagcagtgcttgaaatgctccatgacattcttaccagatttccccagaggattattgatgagcagggtcaaaccttttttcttcatcttgtagttgctctagccaatgaacagcatcagaatgtgtcttcaatgatccttagagctattcaaaagctgttaggacgcattggtggtcagggaaagagttacatttatgagtattcactttcgtggtacactggtgagaagaaaagtttgtggagtgcttcagctcaggttattggtttacttgttggcgatcacacattacaaatgggcaagcaccttaaaagtattctggctgttgttaagaaaataatggaatcatctattattgcttctggagctatacaattaggcttatctgatgaagctgccctgccattgtggaaagagacttactactctgttgccatgatggagaggttacttcttcgctttccggagttgtattttgagaaaaacatggaggacatatggataatattatgcaagttgttgatccatcctcattcgatgttgcgtagtatttcaagctctctggtagcatcatattttgctacagtggagaagaggaaacatgaacagaaattggatgccccatcatggttgcttgttcaaccgagcaggctattcataatagctgtttccttgttgaaacaattgaggagtgagctgagtgatactacggcaaataatctgattgtacagaatgttgcatactcagtctgcaacttgcatatgttgattaggcaatcgacctccacacatcagttttggtctagcattagttctgatcgtggtgctttccttgagggttttgaattgcttggttcaagaaaagcaaaaaatatatttctcctttgtacttcaacatctagtgatgtatctggatctagcctcgacaccaacgaagagcctacatctttgttagtttcgtcaatcctaaagaagatgggaagaattgcaatgcaaatgcaggatacacagataaagaacgtgttcaattgcttcaatatgatttcatcagctcttggtcctgatgaatcactaacctatgctgatcacctcttggccccattgtataaagtttctgaaggatttgctgggaaagttgttagtgatgaagtgaagcaactggcccagggggtccagaacaagttacgtgacctgattggttccgagaaatttgttgaagtctacaagagcgttcggatgggcctgaaacagaagcgggacggtagaaagcaggcacagaagattgttgcagccgtggacccagaacgcaatgccaagcgaaagcagcgaatggcagccaagcaccgggaacacaagaggcgaaagataatggcgatgaagattggcaggtggatgagatagcttggtatttaggctctgcggaattcggtgaatcatataattgtagaggataatttttcgtgctacaagtgctggcataaaattatgtttctgttttatatgctgtctcactgacttactgcccgacgtaattttattgttgagttaccgaaccataccgtaagtaaaaattaagaggcataagcaatgaagacatagaattgattgaattatatttttttggggtggatggataagtaacaatatattattaaatgtgcaattaagagttttctggctgaggtttgc

SEQ ID NO: 208461 - DNA, 4484 bp, Zea Mays
cgccatcactattgagatctggtacatggcttgggcaacgtgaacttaggctgttcaaattattgctaaattacatcacagatccctcagctgctgataacttcatagaccttattcttccatttttcagcaagaaagatttgaactccgacgattgtttggaagcactatgtgttgtgaggggaataattcaaaatctgagatgcaaagtatctgaaaaagttctaaatgcactgaacccattacttgcaattgttggattggaactgcgactatgtatctgtgatatttatgctgggttgtcattgaatgatccttcgatgttgtttctggctgggttaataggagatctgaatgcagtttcagcttcagaacttggtgaactagattatgacacaagacttaacacctatgataaggttaggccacaattgtttcttggcttgacagaagagcatgtgggcgccatattatctcattgtgtgtatgatatgtcatctgaagaattaattttgcggcaaagtgcatctagggctctgcagtcgttcctggacttttccgcctcagttatgaataatgatgtgtccaaatactctattgatgataaatttagagagaataataccagaagcatttgcacgatgggctgtattcagaagatattggaaaaaacttatctgcacaatatgggagtagcaatgactaaagatgtatcaattcaaaaggaatggattattttacttagggagatggtctccaattttaatcatttagcatccttaagctcatttaggcctctctgtaaggtggatatagaagaggattttttccacaacataactcatttacaggctggtaaaagatcaaaagcactgttgctttttagacagggaatcaaggaaaacaacttttcagaggatatcactatgaaagtctttgttccactatttttcaatatgttttctgacgtaaaagctgggaaaggcgaacaagtcagagatatatgtttggatacactatctgctgttgctgccaaagtgcagtgggaacactatagaacaatattgaagagatgcttccgagaattaaaccttagacctgataagcagaagatcatattgaggctgatttgttccatattagatgcattccatttcatgaaacctgcaaatgatgcctcaggaaattctgatgctttgagtgaagatattgattcttcccttacattctctttggtcacagtctcttctgataagcaacagtacatgcaaaaggtagtgtttccacaggttcaaaagttgttaggatcagatccagagaaagtcaacgtcaacataaacctggtagcactgaaaatacttaagttgctaccggtggattattttgagtcccaactttcaagcatcattcatcgaatctgtaacttcctcaagaatcgtcttgaaagcatacgtgatgaagctaggtctgctttagctgcttctgttaaggaactggggattgggtatttgcagtttgtggtcaagatattaagagctatacttaaaagaggttttgagttacatgttctgggctacacacttcattatttgttgtcaaaaaacattactgctgatatgtatggtaggcttgactactgtttagaagatttgttggcagtggttgacagtgatttacttggagatgttgcagaacaaaaggaagttgaaaaacttgcctccaaaatgaaagagacaaagaagagaatgtcgtttgagactcttaagctgattgctcaaagtattacattcaagaccgatttactgaagaagataatctcacctgtttctttacatcttcagaagcaacttactccaaagttgaaaaccagacttgagatgatgctacacaacatagccttagggattgagtgcaactcatctactgaaacatcaaacttgtttatcttcgtatattgtcttattgaggatactattacaggaagcagatctgaatgcaaagagaatacacaatctagtcctgatcaagacagtactgtaagaaagaccttcctgggactaggtgagagtggatcacagaattcttatatacttaccaagtttgcacttgacttacttcgtaatcgtctgaagagcatcaagcttgacaaggaagatgaacaactcgtgaagatgttggatccttttgttgaccttctgcgaaagtgtatgagttcgaaacatgcaagtgtcctctcagccacatttagatgttttgccttgttggtgaaacttccgttgccatctctgagggacaatgcaattactataaaaaatgtacttatggagattttacagagagctggaaactccaatggtcatttagtcacatcttgttttaagctacttgctgatctacttagaggattcaggatttcactttcagataatgagcttcagatgcttgttcatacccctatgtttgtagatcttcagacaaacccttcccctgttgccttatcgcttctcaaaacaatagtcaggctaaaattggtttctcacgaaatttatgatatagttgttaagataggagagttgatggtaacaacattaactgaatctatacagcagcaatgcattcaaattatgctacaattttttctgaactatccactttctgagaagcgcttacagcaacatattgactttttcctggcaaacttaaggtatgatgaatatccatagttactttatcatgatatctcactgtatgctaacactctggaaaattgcagttatgaacatccttcaggaagagaagcagtgcttgaaatgctccatgacattcttaccagatttccccagaggattattgatgagcagggtcaaaccttttttcttcatcttgtagttgctctagccaatgaacagcatcagaatgtgtcttcaatgatccttagagctattcaaaagctgttaggacgcattggtggtcagggaaagagttacatttatgagtattcactttcgtggtacactggtgagaagaaaagtttgtggagtgcttcagctcaggttattggtttacttgttggcgatcacacattacaaatgggcaagcaccttaaaagtattctggctgttgttaagaaaataatggaatcatctattattgcttctggagctatacaattaggcttatctgatgaagctgccctgccattgtggaaagagacttactactctgttgccatgatggagaggttacttcttcgctttccggagttgtattttgagaaaaacatggaggacatatggataatattatgcaagttgttgatccatcctcattcgatgttgcgtagtatttcaagctctctggtagcatcatattttgctacagtggagaagaggaaacatgaacagaaattggatgccccatcatggttgcttgttcaaccgagcaggctattcataatagctgtttccttgttgaaacaattgaggagtgagctgagtgatactacggcaaataatctgattgtacagaatgttgcatactcagtctgcaacttgcatatgttgattaggcaatcgacctccacacatcagttttggtctagcattagttctgatcgtggtgctttccttgagggttttgaattgcttggttcaagaaaagcaaaaaatatatttctcctttgtacttcaacatctagtgatgtatctggatctagcctcgacaccaacgaagagcctacatctttgttagtttcgtcaatcctaaagaagatgggaagaattgcaatgcaaatgcaggatacacagataaagaacgtgttcaattgcttcaatatgatttcatcagctcttggtcctgatgaatcactaacctatgctgatcacctcttggccccattgtataaagtttctgaaggatttgctgggaaagttgttagtgatgaagtgaagcaactggcccagggggtccagaacaagttacgtgacctgattggttccgagaaatttgttgaagtctacaagagcgttcggatgggcctgaaacagaagcgggacggtagaaagcaggcacagaagattgttgcagccgtggacccagaacgcaatgccaagcgaaagcagcgaatggcagccaagcaccgggaacacaagaggcgaaagataatggcgatgaagattggcaggtggatgagatagcttggtatttaggctctgcggaattcggtgaatcatataattgtagaggataatttttcgtgctacaagtgctggcataaaattatgtttctgttttatatgctgtctcactgacttactgcccgacgtaattttattgttgagttaccgaaccataccgtaagtaaaaattaagaggcataagcaatgaagacatagaattgattgaattatatttttttggggtggatggataagtaacaatatattattaaatgtgcaattaagagttttctggctgaggtttgc

SEQ ID NO: 208462 - DNA, 4524 bp, Zea Mays
attttttgggctatggacaagcacagtctatcaaatgagagtgatcttaaaaattaccaatatgagatctggtacatggcttgggcaacgtgaacttaggctgttcaaattattgctaaattacatcacagatccctcagctgctgataacttcatagaccttattcttccatttttcagcaagaaagatttgaactccgacgattgtttggaagcactatgtgttgtgaggggaataattcaaaatctgagatgcaaagtatctgaaaaagttctaaatgcactgaacccattacttgcaattgttggattggaactgcgactatgtatctgtgatatttatgctgggttgtcattgaatgatccttcgatgttgtttctggctgggttaataggagatctgaatgcagtttcagcttcagaacttggtgaactagattatgacacaagacttaacacctatgataaggttaggccacaattgtttcttggcttgacagaagagcatgtgggcgccatattatctcattgtgtgtatgatatgtcatctgaagaattaattttgcggcaaagtgcatctagggctctgcagtcgttcctggacttttccgcctcagttatgaataatgatgtgtccaaatactctattgatgataaatttagagagaataataccagaagcatttgcacgatgggctgtattcagaagatattggaaaaaacttatctgcacaatatgggagtagcaatgactaaagatgtatcaattcaaaaggtgcgcatatatatattttttattttgtagtctatcaaactgttggttgaagggctgcaattgatgttgtattcaggaatggattattttacttagggagatggtctccaattttaatcatttagcatccttaagctcatttaggcctctctgtaaggtggatatagaagaggattttttccacaacataactcatttacaggctggtaaaagatcaaaagcactgttgctttttagacagggaatcaaggaaaacaacttttcagaggatatcactatgaaagtctttgttccactatttttcaatatgttttctgacgtaaaagctgggaaaggcgaacaagtcagagatatatgtttggatacactatctgctgttgctgccaaagtgcagtgggaacactatagaacaatattgaagagatgcttccgagaattaaaccttagacctgataagcagaagatcatattgaggctgatttgttccatattagatgcattccatttcatgaaacctgcaaatgatgcctcaggaaattctgatgctttgagtgaagatattgattcttcccttacattctctttggtcacagtctcttctgataagcaacagtacatgcaaaaggtagtgtttccacaggttcaaaagttgttaggatcagatccagagaaagtcaacgtcaacataaacctggtagcactgaaaatacttaagttgctaccggtggattattttgagtcccaactttcaagcatcattcatcgaatctgtaacttcctcaagaatcgtcttgaaagcatacgtgatgaagctaggtctgctttagctgcttctgttaaggaactggggattgggtatttgcagtttgtggtcaagatattaagagctatacttaaaagaggttttgagttacatgttctgggctacacacttcattatttgttgtcaaaaaacattactgctgatatgtatggtaggcttgactactgtttagaagatttgttggcagtggttgacagtgatttacttggagatgttgcagaacaaaaggaagttgaaaaacttgcctccaaaatgaaagagacaaagaagagaatgtcgtttgagactcttaagctgattgctcaaagtattacattcaagaccgatttactgaagaagataatctcacctgtttctttacatcttcagaagcaacttactccaaagttgaaaaccagacttgagatgatgctacacaacatagccttagggattgagtgcaactcatctactgaaacatcaaacttgtttatcttcgtatattgtcttattgaggatactattacaggaagcagatctgaatgcaaagagaatacacaatctagtcctgatcaagacagtactgtaagaaagaccttcctgggactaggtgagagtggatcacagaattcttatatacttaccaagtttgcacttgacttacttcgtaatcgtctgaagagcatcaagcttgacaaggaagatgaacaactcgtgaagatgttggatccttttgttgaccttctgcgaaagtgtatgagttcgaaacatgcaagtgtcctctcagccacatttagatgttttgccttgttggtgaaacttccgttgccatctctgagggacaatgcaattactataaaaaatgtacttatggagattttacagagagctggaaactccaatggtcatttagtcacatcttgttttaagctacttgctgatctacttagaggattcaggatttcactttcagataatgagcttcagatgcttgttcatacccctatgtttgtagatcttcagacaaacccttcccctgttgccttatcgcttctcaaaacaatagtcaggctaaaattggtttctcacgaaatttatgatatagttgttaagataggagagttgatggtaacaacattaactgaatctatacagcagcaatgcattcaaattatgctacaattttttctgaactatccactttctgagaagcgcttacagcaacatattgactttttcctggcaaacttaaggaagagaagcagtgcttgaaatgctccatgacattcttaccagatttccccagaggattattgatgagcagggtcaaaccttttttcttcatcttgtagttgctctagccaatgaacagcatcagaatgtgtcttcaatgatccttagagctattcaaaagctgttaggacgcattggtggtcagggaaagagttacatttatgagtattcactttcgtggtacactggtgagaagaaaagtttgtggagtgcttcagctcaggttattggtttacttgttggcgatcacacattacaaatgggcaagcaccttaaaagtattctggctgttgttaagaaaataatggaatcatctattattgcttctggagctatacaattaggcttatctgatgaagctgccctgccattgtggaaagagacttactactctgttgccatgatggagaggttacttcttcgctttccggagttgtattttgagaaaaacatggaggacatatggataatattatgcaagttgttgatccatcctcattcgatgttgcgtagtatttcaagctctctggtagcatcatattttgctacagtggagaagaggaaacatgaacagaaattggatgccccatcatggttgcttgttcaaccgagcaggctattcataatagctgtttccttgttgaaacaattgaggagtgagctgagtgatactacggcaaataatctgattgtacagaatgttgcatactcagtctgcaacttgcatatgttgattaggcaatcgacctccacacatcagttttggtctagcattagttctgatcgtggtgctttccttgagggttttgaattgcttggttcaagaaaagcaaaaaatatatttctcctttgtacttcaacatctagtgatgtatctggatctagcctcgacaccaacgaagagcctacatctttgttagtttcgtcaatcctaaagaagatgggaagaattgcaatgcaaatgcaggatacacagataaagaacgtgttcaattgcttcaatatgatttcatcagctcttggtcctgatgaatcactaacctatgctgatcacctcttggccccattgtataaagtttctgaaggatttgctgggaaagttgttagtgatgaagtgaagcaactggcccagggggtccagaacaagttacgtgacctgattggttccgagaaatttgttgaagtctacaagagcgttcggatgggcctgaaacagaagcgggacggtagaaagcaggcacagaagattgttgcagccgtggacccagaacgcaatgccaagcgaaagcagcgaatggcagccaagcaccgggaacacaagaggcgaaagataatggcgatgaagattggcaggtggatgagatagcttggtatttaggctctgcggaattcggtgaatcatataattgtagaggataatttttcgtgctacaagtgctggcataaaattatgtttctgttttatatgctgtctcactgacttactgcccgacgtaattttattgttgagttaccgaaccataccgtaagtaaaaattaagaggcataagcaatgaagacatagaattgattgaattatatttttttggggtggatggataagtaacaatatattattaaatgtgcaattaagagttttctggctgaggtttgc

SEQ ID NO: 208463 - DNA, 1574 bp, Zea Mays
gtataacctagaacccacgtcttcaaatagactgtcatatggtgcatttaccaccctcgaaccatagatgatttggcagagatgtcttctgccggcatcagcggatgcgtgcctacaactgaacaccatatacaaacgaatcatggacctgtatctgttgcagtgtacggtgaccatgacaagcctgcccttgttacttatcccgatattgctttaaactatatgtcctgcttccaaggactattgttctgtcccgaagccgcttcgctgctgcttcataatttttgcatttaccatattagccccccaggacatgagttaggagctgctccaatttccccaaatgctcctataccgtctgttgacgatttggcagatcaggttgcggatgtcctcgatttctttggattaggctctgttatgtgcttcggtgtcactgcaggtgcctacattctaactctgttcgcggcaaagtatagggagcgggtactaggtcttatccttgtttcacctctgtgtaaaggccccacttggactgagtggttatacagtaaggtaacatccaatctgctgtattactatggcatgtgtgggttagtgaaggagtgcctacttcagcggtacttcagcaaggaagtgcgaggattctctgaactacccgaatcagacatagtgcaggcttgtaaaagcctgctagagcagcggcagagcatgaacgtgtggcgcttcgtacagacaatgaacgagagatacgacttgtctgagcatataaagcggctgcagtgcagaaccctgatttttgtgggcgacaattcccagttccacacggaggccgttcacttgacgtcgaagctggacaggagatactgcgctctagttgaggtgcaagcgtgcggttcactggtaaccgaggagcagccgcacgcgatgcttataccgatggagtacttcctgatgggatacggcctgtacaggccgcctagccaggtggtggagtgcagcccgcgcagccccctgagcccgttctgcatttcgccggatctcctgtcacctgagagcatgggggtgaagctaaagccgatcagaacgcgagtcaggcttgaggtgtagcagagggctaggctaacttttgcaggtctgtgtttagtttttggaggtatagttatactgccatgtatatataaatatataggaaacgctgttctttgatttgtagcctgaaagaaaataatagcagaagtttgggtgtacagtctctctattatgccattatacccgctggtttggttgggtggcaggattagatgtggttcccaaagaagcatatgtcttaagaagataagagatggaccagctgtagtatttgttcggtttgttgtttggtgtcgatttgattcctctgcgttgctttaggatcgggacaaggattggcttgcagttgtgtcttgttgatgtctgtctcctgctgttgtaataagcatatatgcaagctggtaaagaccatggtctggaccagaggtgagcatcacaagagacgatggcctggctgagtcgatgcacacaaagaaaaaaaa

SEQ ID NO: 208464 - DNA, 2020 bp, Zea Mays
ggcagtcctccgccccgaaaggcaacaatgagaggagagggagggaggccgcgcgcctggctcgtcctcccccttgcttccttccgtcgtttataagcgacggcaacacaggcgaagaagacggggggagaaaggggcgcacgaggcaatttatagggaggaagaggaggggccgggcctgagcagagcaggccggaccagccatctctcctctgaggcgtcgaggggaggcggcgcccgagatgggggactccggcggctccgtcgtgtcggtcgacgtcgagcgcatctcctttggcggcaagtgtacggtgaccatgacaagcctgcccttgttacttatcccgatattgctttaaactatatgtcctgcttccaaggactattgttctgtcccgaagccgcttcgctgctgcttcataatttttgcatttaccatattagccccccaggacatgagttaggagctgctccaatttccccaaatgctcctataccgtctgttgacgatttggcagatcaggttgcggatgtcctcgatttctttggattaggctctgttatgtgcttcggtgtcactgcaggtgcctacattctaactctgttcgcggcaaagtatagggagcgggtactaggtcttatccttgtttcacctctgtgtaaaggccccacttggactgagtggttatacagtaaggtaacatccaatctgctgtattactatggcatgtgtgggttagtgaaggagtgcctacttcagcggtacttcagcaaggtagataaaagcgcctgtttggatcatggttcaattattataatcggggttatggatttaggttggtttttaagtgaggaatccctattttatcctttatagtttagcaagttggataatcaattaggggcaatttggactttgagcatctataataccttttaacctggtttcacctggatcactatgatcacataatctggttatcataattggaggggtatccaaacgtgggctaagttgtttcgattttacccaactcagatttctttggtttttcttgaacaaatcttctactccttaggaagtgcgaggattctctgaactacccgaatcagacatagtgcaggcttgtaaaagcctgctagagcagcggcagagcatgaacgtgtggcgcttcgtacagacaatgaacgagagatacgacttgtctgagcatataaagcggctgcagtgcagaaccctgatttttgtgggcgacaattcccagttccacacggaggccgttcacttgacgtcgaagctggacaggagatactgcgctctagttgaggtgcaagcgtgcggttcactggtaaccgaggagcagccgcacgcgatgcttataccgatggagtacttcctgatgggatacggcctgtacaggccgcctagccaggtggtggagtgcagcccgcgcagccccctgagcccgttctgcatttcgccggatctcctgtcacctgagagcatgggggtgaagctaaagccgatcagaacgcgagtcaggcttgaggtgtagcagagggctaggctaacttttgcaggtctgtgtttagtttttggaggtatagttatactgccatgtatatataaatatataggaaacgctgttctttgatttgtagcctgaaagaaaataatagcagaagtttgggtgtacagtctctctattatgccattatacccgctggtttggttgggtggcaggattagatgtggttcccaaagaagcatatgtcttaagaagataagagatggaccagctgtagtatttgttcggtttgttgtttggtgtcgatttgattcctctgcgttgctttaggatcgggacaaggattggcttgcagttgtgtcttgttgatgtctgtctcctgctgttgtaataagcatatatgcaagctggtaaagaccatggtctggaccagaggtgagcatcacaagagacgatggcctggctgagtcgatgcacacaaagaaaaaaaa

SEQ ID NO: 208465 - DNA, 5162 bp, Zea Mays
gtcgtctctcgccggccacgccaccgcccgccaagccaatcaagggcctggagttgaagcacgaatcatcgaagcgcagcaaaactgagacacacgtcttacttcttcacaagttcttggacgatggacatcttcgggagcccattctgctccaagcaagccgtcgcctcatgcggcggatggacggacatactcgactcctccagctgcacgaaccatatcctggaaaccggcaccgccgctctgatcaccgtcgctctcgcgctgcacctcctcgtcgtcaggattactacgaagaccagagcgtccgcacgccgcccccctgtcgcgcccggcctgccgctgcagctggccggcgcggcgttcaccgcctgcttgggcctcgtctacctcggcctcgcgtcgtggatgctggggagcaacttcactcagcacgcttccgcttacctcccacactggtgggtgacggcactgtcccagggactctgcttggtcctcgccggcttcgctctcagcggcgtcggaggagcacgtctcctcgggccaatgtctgcgcgcgcgtggtcggctctgctggccgcgtacgccgcgttcgtcgcttgttcctcggtcgttcacatggttgcggatagggcactgaccatgaagggttttctggacgctctgttcctgccaggtgcactgctgcttgtctgtggcgcttggtgcgtcaaggaagaggacggtgatggcggaactggaactgctgcttctttgtataagcccttgaagactgacgacactgttgatgatgagaggggtgggtctgagagccatgtgaccccgttcgctaaagccggggttttcagcgtgatgtcgttctggtggatgaacccgatgatgaagacgggctacgagaagccgctcgaggagaaagacatgccgctcttgggtccctcggaccgagcgtacagccagtacctggtgttcctggagaagctcaacaggaagaagcagctgcgggcacacggcaacccgtcgatgttttggaccatcgtttcttgccagaaaactgggatcttggtctcgggtctctttgcactgctcaaggttctcacgctgtcttcgggcccggtgcttctgaaagcattcatcaacgtctcgctcgggaaagggtccttcaagtacgaaggctacgtgttggccgtagcgatgttcctctgcaaatgctgcgaatctctgtcgcagaggcagtggtacttccgcacgcggaggctagggctccaggtgcggtcgttcctgtcggccgccgtctacaagaagcatcagaggctgtccaactcggcgaagctgaagcactcttccggcgagatcatgaactacgtcaccgtcgacgcctaccggatcggcgagttcccgtactggttccaccagacgtggacgacgagcgtccagctctgcatcgctctagcgatcctgtacgacgcggtcggcctcgccacggtcgcggcgctggccgtcatcatcgccaccgtggtctgcaacgcgccgctggccaagctgcagcacaagttccagagcaggcttatggaggcgcaggacgtgaggttgaaggcgatgtcggagtccttggttcacatgaaggtcctgaagctttacgcgtgggagacccacttcaagaaggtcatcgaggggctgagggaggtcgagatcaaatggctgtcggcgttccagcttaggaaagcgtacaacagcttcctgttctggacgtcgcctatcttggtctcggctgcgaccttcctggcatgctatcttctgaagatccctcttgatgccagcaacgtcttcacttttgtggccaccctgcgcctcgttcaggatccgattcggcagataccagacgtgatcggagttgtgattcaggcgaaagttgccttcaccaggataaccaagttccttgacgcgcctgagctgagtggacaggtcaggaagaaaagctgtctgggggatgagtatccgatagtgatgaattgctgcagtttctcgtgggacgagaacccgtcgaaaccagctctaaagaatgtaaatctggtggtcaaaactggacagaaggttgcaatatgcggcgaggtaggatcaggaaagtctacactgctggctgcagttcttggagaggttccgaaaactgaaggcacgatccaagtttgcgggaaaacagcatatgtttctcagaacgcatggatccaaacaggaaccgtgcaggacaacattctctttgggtcttcgatggacaggcaaaggtaccaggaaacactcgagcggtgttctttagtgaaggatcttgagatgttgccgtatggagaccgtactcagatcggcgagcggggcataaatcttagcggcggtcagaagcagcgtgttcagcttgctcgtgcattgtaccagaatgcagacatctatctccttgatgaccctttcagcgctgttgatgcccacacagcaacgagtctgtttaatggatatgtcatgggagctctgtcagacaagactgttcttttggtgacccaccaagttgattttctgcctgtattcgattctattctgttaatgtcagatggtcaaattattcgttctgcatcttatcatgatctattggcatattgtcaagaatttcagaaccttgtaaatgcccataaagacactattggtgtttcagatcttaacagggtgcctccccatagagaaaatgaaatattgatcaaggagacaattgatgttcatggaagcagatacaaagagtctttgaagccatcaccaacagatcaactgattaagacagaagaaagagaaatgggtgatactggtctcaagccttatattctctacctgcgtcagaataaaggcttcttctatgcttctctgggtattatttcccatatagttttcgtatgtggccaaatatcacagaattcatggatggctactaatgtcgagaatcctgatgttagtactcttaagttgacttctgtgtacattgcaattggaatcttctcggtgttcttcttgctatttagatcattagcagttgttgttcttggggtcaagacatcaagatccttattttctcagttactaaactcattattccgtgcaccaatgtccttttatgattctacccctcttggaagaatacttagccgggtttcttcagatctgagtattgttgaccttgatattccgtttggcttcatgtttagcattggtgctggcataaatgcatatagcaatctaggagtattggctgttgttacatggcaagttctgttcgtctctgtgccaatgattgttttggcaatcaggttgcagaggtattatttagcctcatctaaggaattgatgaggatcaatggcactaccaaatctgctctcgctaatcacttgggcgagtcgattgcaggggctataacaataagggcttttcaggaagaagatcgtttctttgagaaaaacttggaacttgttgacaagaatgctggtccatatttctataattttgcagcaactgaatggctcattcaacgtttggagaccatgagtgctgcagttctttctttttctgcccttatcatggctcttcttcctcaaggaacttttaaccctggctttgtaggaatggcattatcttatggtctatccctgaatatatcctttgttttctctatccaaaaccaatgccagctagctagtcaaatcatctctgtggaaagggttcatcagtacatggacataccaagtgaagcagcagagattattgaagaaaatcgaccagcaccagactggccccaagttggcagggtggaccttaaagatttgaagattagatacagacaagatgctcctcttgtattacatggaatcacctgcagtttccacggtggagataagatcggtatagttgggcgaacaggaagtggaaagacaactttaattggtgcactgtttcgtcttgttgagccaactggagggaaaataattatagactctatagacatcaccacaataggcttacatgacctgcgttcacgtttgggtatcattccgcaagatccgacactctttcaaggaaccataagatataatctagaccctcttgggcaattctctgatcaacaaatatgggaggttctaggcaaatgtcagcttcttgaagctgtccaggagaaggagcagggattggactcacttgttgtggaagatggttcgaactggagcatgggtcaaaggcagctcttttgtttgggacgtgcacttctaagaagatgccgtatcttagttcttgatgaggccacggcatctatagacaacgctactgatgctatccttcagaagacgatcaggacagagtttagagattgcactgtcatcactgtcgcacaccgtatacccaccgttatggactgcgatatggtacttgcaatgagtgacgggaaagtagtggagtacgacaagcctacaaagctcgtggaaaccgaaggatctctcttccgtgatcttgtcaaggagtactggtcatacacatcgaattgaaatatctaggagaaactgtgacaatcacatgttcactcgttgcagtctcttaaaaaagagataacaggagcctgttctcacacacatccgatgaactattctatctcaagtccgaagtagaggtgtcaggcattgtcgggaagtgctttttgttaactagttgaacagggggaaacctgtcgtcccttaaaaaaaaggaaacctccagcgtttttttgctccgatattgagcgaataaaccgaaatatctagtggaaggcgcatcaagtatgcatccttgatactgcatgttcacagaaatgcttgtgcggcaggctgttccaaggctttaaactttatggtgctttacattcctaataaaccgaattgtgtatatgatgtttgggaaaatggtgatttttcaggtttcagctccctctcttgctcacgtttaatgtattatcagtgtaaattcatccgtgattggatttaaggcaaccaatttgttggtacgtagctctgttttcacagcgtgtgcccttcaaacttataactcttgggctccctcatatccagggtaagggtctgtttggtttgtggctaactgtgcgtctgtg

SEQ ID NO: 208466 - DNA, 5161 bp, Zea Mays
gtgaccactccctgccgccgccgccgccgccgccgcgctgaagggcctggagttgaagcacgaatcatcgaagcgcagcaaaactgagacacacgtcttacttcttcacaagttcttggacgatggacatcttcgggagcccattctgctccaagcaagccgtcgcctcatgcggcggatggacggacatactcgactcctccagctgcacgaaccatatcctggaaaccggcaccgccgctctgatcaccgtcgctctcgcgctgcacctcctcgtcgtcaggattactacgaagaccagagcgtccgcacgccgcccccctgtcgcgcccggcctgccgctgcagctggccggcgcggcgttcaccgcctgcttgggcctcgtctacctcggcctcgcgtcgtggatgctggggagcaacttcactcagcacgcttccgcttacctcccacactggtgggtgacggcactgtcccagggactctgcttggtcctcgccggcttcgctctcagcggcgtcggaggagcacgtctcctcgggccaatgtctgcgcgcgcgtggtcggctctgctggccgcgtacgccgcgttcgtcgcttgttcctcggtcgttcacatggttgcggatagggcactgaccatgaagggttttctggacgctctgttcctgccaggtgcactgctgcttgtctgtggcgcttggtgcgtcaaggaagaggacggtgatggcggaactggaactgctgcttctttgtataagcccttgaagactgacgacactgttgatgatgagaggggtgggtctgagagccatgtgaccccgttcgctaaagccggggttttcagcgtgatgtcgttctggtggatgaacccgatgatgaagacgggctacgagaagccgctcgaggagaaagacatgccgctcttgggtccctcggaccgagcgtacagccagtacctggtgttcctggagaagctcaacaggaagaagcagctgcgggcacacggcaacccgtcgatgttttggaccatcgtttcttgccagaaaactgggatcttggtctcgggtctctttgcactgctcaaggttctcacgctgtcttcgggcccggtgcttctgaaagcattcatcaacgtctcgctcgggaaagggtccttcaagtacgaaggctacgtgttggccgtagcgatgttcctctgcaaatgctgcgaatctctgtcgcagaggcagtggtacttccgcacgcggaggctagggctccaggtgcggtcgttcctgtcggccgccgtctacaagaagcatcagaggctgtccaactcggcgaagctgaagcactcttccggcgagatcatgaactacgtcaccgtcgacgcctaccggatcggcgagttcccgtactggttccaccagacgtggacgacgagcgtccagctctgcatcgctctagcgatcctgtacgacgcggtcggcctcgccacggtcgcggcgctggccgtcatcatcgccaccgtggtctgcaacgcgccgctggccaagctgcagcacaagttccagagcaggcttatggaggcgcaggacgtgaggttgaaggcgatgtcggagtccttggttcacatgaaggtcctgaagctttacgcgtgggagacccacttcaagaaggtcatcgaggggctgagggaggtcgagatcaaatggctgtcggcgttccagcttaggaaagcgtacaacagcttcctgttctggacgtcgcctatcttggtctcggctgcgaccttcctggcatgctatcttctgaagatccctcttgatgccagcaacgtcttcacttttgtggccaccctgcgcctcgttcaggatccgattcggcagataccagacgtgatcggagttgtgattcaggcgaaagttgccttcaccaggataaccaagttccttgacgcgcctgagctgagtggacaggtcaggaagaaaagctgtctgggggatgagtatccgatagtgatgaattgctgcagtttctcgtgggacgagaacccgtcgaaaccagctctaaagaatgtaaatctggtggtcaaaactggacagaaggttgcaatatgcggcgaggtaggatcaggaaagtctacactgctggctgcagttcttggagaggttccgaaaactgaaggcacgatccaagtttgcgggaaaacagcatatgtttctcagaacgcatggatccaaacaggaaccgtgcaggacaacattctctttgggtcttcgatggacaggcaaaggtaccaggaaacactcgagcggtgttctttagtgaaggatcttgagatgttgccgtatggagaccgtactcagatcggcgagcggggcataaatcttagcggcggtcagaagcagcgtgttcagcttgctcgtgcattgtaccagaatgcagacatctatctccttgatgaccctttcagcgctgttgatgcccacacagcaacgagtctgtttaatggatatgtcatgggagctctgtcagacaagactgttcttttggtgacccaccaagttgattttctgcctgtattcgattctattctgttaatgtcagatggtcaaattattcgttctgcatcttatcatgatctattggcatattgtcaagaatttcagaaccttgtaaatgcccataaagacactattggtgtttcagatcttaacagggtgcctccccatagagaaaatgaaatattgatcaaggagacaattgatgttcatggaagcagatacaaagagtctttgaagccatcaccaacagatcaactgattaagacagaagaaagagaaatgggtgatactggtctcaagccttatattctctacctgcgtcagaataaaggcttcttctatgcttctctgggtattatttcccatatagttttcgtatgtggccaaatatcacagaattcatggatggctactaatgtcgagaatcctgatgttagtactcttaagttgacttctgtgtacattgcaattggaatcttctcggtgttcttcttgctatttagatcattagcagttgttgttcttggggtcaagacatcaagatccttattttctcagttactaaactcattattccgtgcaccaatgtccttttatgattctacccctcttggaagaatacttagccgggtttcttcagatctgagtattgttgaccttgatattccgtttggcttcatgtttagcattggtgctggcataaatgcatatagcaatctaggagtattggctgttgttacatggcaagttctgttcgtctctgtgccaatgattgttttggcaatcaggttgcagaggtattatttagcctcatctaaggaattgatgaggatcaatggcactaccaaatctgctctcgctaatcacttgggcgagtcgattgcaggggctataacaataagggcttttcaggaagaagatcgtttctttgagaaaaacttggaacttgttgacaagaatgctggtccatatttctataattttgcagcaactgaatggctcattcaacgtttggagaccatgagtgctgcagttctttctttttctgcccttatcatggctcttcttcctcaaggaacttttaaccctggctttgtaggaatggcattatcttatggtctatccctgaatatatcctttgttttctctatccaaaaccaatgccagctagctagtcaaatcatctctgtggaaagggttcatcagtacatggacataccaagtgaagcagcagagattattgaagaaaatcgaccagcaccagactggccccaagttggcagggtggaccttaaagatttgaagattagatacagacaagatgctcctcttgtattacatggaatcacctgcagtttccacggtggagataagatcggtatagttgggcgaacaggaagtggaaagacaactttaattggtgcactgtttcgtcttgttgagccaactggagggaaaataattatagactctatagacatcaccacaataggcttacatgacctgcgttcacgtttgggtatcattccgcaagatccgacactctttcaaggaaccataagatataatctagaccctcttgggcaattctctgatcaacaaatatgggaggttctaggcaaatgtcagcttcttgaagctgtccaggagaaggagcagggattggactcacttgttgtggaagatggttcgaactggagcatgggtcaaaggcagctcttttgtttgggacgtgcacttctaagaagatgccgtatcttagttcttgatgaggccacggcatctatagacaacgctactgatgctatccttcagaagacgatcaggacagagtttagagattgcactgtcatcactgtcgcacaccgtatacccaccgttatggactgcgatatggtacttgcaatgagtgacgggaaagtagtggagtacgacaagcctacaaagctcgtggaaaccgaaggatctctcttccgtgatcttgtcaaggagtactggtcatacacatcgaattgaaatatctaggagaaactgtgacaatcacatgttcactcgttgcagtctcttaaaaaagagataacaggagcctgttctcacacacatccgatgaactattctatctcaagtccgaagtagaggtgtcaggcattgtcgggaagtgctttttgttaactagttgaacagggggaaacctgtcgtcccttaaaaaaaaggaaacctccagcgtttttttgctccgatattgagcgaataaaccgaaatatctagtggaaggcgcatcaagtatgcatccttgatactgcatgttcacagaaatgcttgtgcggcaggctgttccaaggctttaaactttatggtgctttacattcctaataaaccgaattgtgtatatgatgtttgggaaaatggtgatttttcaggtttcagctccctctcttgctcacgtttaatgtattatcagtgtaaattcatccgtgattggatttaaggcaaccaatttgttggtacgtagctctgttttcacagcgtgtgcccttcaaacttataactcttgggctccctcatatccagggtaagggtctgtttggtttgtggctaactgtgcgtctgtg

SEQ ID NO: 208467 - DNA, 5191 bp, Zea Mays
cttcctcctcgcggccggggcgggggcgtgctgctctctcctctccagggagttttctgcgggggttttgaagggcctggagttgaagcacgaatcatcgaagcgcagcaaaactgagacacacgtcttacttcttcacaagttcttggacgatggacatcttcgggagcccattctgctccaagcaagccgtcgcctcatgcggcggatggacggacatactcgactcctccagctgcacgaaccatatcctggaaaccggcaccgccgctctgatcaccgtcgctctcgcgctgcacctcctcgtcgtcaggattactacgaagaccagagcgtccgcacgccgcccccctgtcgcgcccggcctgccgctgcagctggccggcgcggcgttcaccgcctgcttgggcctcgtctacctcggcctcgcgtcgtggatgctggggagcaacttcactcagcacgcttccgcttacctcccacactggtgggtgacggcactgtcccagggactctgcttggtcctcgccggcttcgctctcagcggcgtcggaggagcacgtctcctcgggccaatgtctgcgcgcgcgtggtcggctctgctggccgcgtacgccgcgttcgtcgcttgttcctcggtcgttcacatggttgcggatagggcactgaccatgaagggttttctggacgctctgttcctgccaggtgcactgctgcttgtctgtggcgcttggtgcgtcaaggaagaggacggtgatggcggaactggaactgctgcttctttgtataagcccttgaagactgacgacactgttgatgatgagaggggtgggtctgagagccatgtgaccccgttcgctaaagccggggttttcagcgtgatgtcgttctggtggatgaacccgatgatgaagacgggctacgagaagccgctcgaggagaaagacatgccgctcttgggtccctcggaccgagcgtacagccagtacctggtgttcctggagaagctcaacaggaagaagcagctgcgggcacacggcaacccgtcgatgttttggaccatcgtttcttgccagaaaactgggatcttggtctcgggtctctttgcactgctcaaggttctcacgctgtcttcgggcccggtgcttctgaaagcattcatcaacgtctcgctcgggaaagggtccttcaagtacgaaggctacgtgttggccgtagcgatgttcctctgcaaatgctgcgaatctctgtcgcagaggcagtggtacttccgcacgcggaggctagggctccaggtgcggtcgttcctgtcggccgccgtctacaagaagcatcagaggctgtccaactcggcgaagctgaagcactcttccggcgagatcatgaactacgtcaccgtcgacgcctaccggatcggcgagttcccgtactggttccaccagacgtggacgacgagcgtccagctctgcatcgctctagcgatcctgtacgacgcggtcggcctcgccacggtcgcggcgctggccgtcatcatcgccaccgtggtctgcaacgcgccgctggccaagctgcagcacaagttccagagcaggcttatggaggcgcaggacgtgaggttgaaggcgatgtcggagtccttggttcacatgaaggtcctgaagctttacgcgtgggagacccacttcaagaaggtcatcgaggggctgagggaggtcgagatcaaatggctgtcggcgttccagcttaggaaagcgtacaacagcttcctgttctggacgtcgcctatcttggtctcggctgcgaccttcctggcatgctatcttctgaagatccctcttgatgccagcaacgtcttcacttttgtggccaccctgcgcctcgttcaggatccgattcggcagataccagacgtgatcggagttgtgattcaggcgaaagttgccttcaccaggataaccaagttccttgacgcgcctgagctgagtggacaggtcaggaagaaaagctgtctgggggatgagtatccgatagtgatgaattgctgcagtttctcgtgggacgagaacccgtcgaaaccagctctaaagaatgtaaatctggtggtcaaaactggacagaaggttgcaatatgcggcgaggtaggatcaggaaagtctacactgctggctgcagttcttggagaggttccgaaaactgaaggcacgatccaagtttgcgggaaaacagcatatgtttctcagaacgcatggatccaaacaggaaccgtgcaggacaacattctctttgggtcttcgatggacaggcaaaggtaccaggaaacactcgagcggtgttctttagtgaaggatcttgagatgttgccgtatggagaccgtactcagatcggcgagcggggcataaatcttagcggcggtcagaagcagcgtgttcagcttgctcgtgcattgtaccagaatgcagacatctatctccttgatgaccctttcagcgctgttgatgcccacacagcaacgagtctgtttaatggatatgtcatgggagctctgtcagacaagactgttcttttggtgacccaccaagttgattttctgcctgtattcgattctattctgttaatgtcagatggtcaaattattcgttctgcatcttatcatgatctattggcatattgtcaagaatttcagaaccttgtaaatgcccataaagacactattggtgtttcagatcttaacagggtgcctccccatagagaaaatgaaatattgatcaaggagacaattgatgttcatggaagcagatacaaagagtctttgaagccatcaccaacagatcaactgattaagacagaagaaagagaaatgggtgatactggtctcaagccttatattctctacctgcgtcagaataaaggcttcttctatgcttctctgggtattatttcccatatagttttcgtatgtggccaaatatcacagaattcatggatggctactaatgtcgagaatcctgatgttagtactcttaagttgacttctgtgtacattgcaattggaatcttctcggtgttcttcttgctatttagatcattagcagttgttgttcttggggtcaagacatcaagatccttattttctcagttactaaactcattattccgtgcaccaatgtccttttatgattctacccctcttggaagaatacttagccgggtttcttcagatctgagtattgttgaccttgatattccgtttggcttcatgtttagcattggtgctggcataaatgcatatagcaatctaggagtattggctgttgttacatggcaagttctgttcgtctctgtgccaatgattgttttggcaatcaggttgcagaggtattatttagcctcatctaaggaattgatgaggatcaatggcactaccaaatctgctctcgctaatcacttgggcgagtcgattgcaggggctataacaataagggcttttcaggaagaagatcgtttctttgagaaaaacttggaacttgttgacaagaatgctggtccatatttctataattttgcagcaactgaatggctcattcaacgtttggagaccatgagtgctgcagttctttctttttctgcccttatcatggctcttcttcctcaaggaacttttaaccctggctttgtaggaatggcattatcttatggtctatccctgaatatatcctttgttttctctatccaaaaccaatgccagctagctagtcaaatcatctctgtggaaagggttcatcagtacatggacataccaagtgaagcagcagagattattgaagaaaatcgaccagcaccagactggccccaagttggcagggtggaccttaaagatttgaagattagatacagacaagatgctcctcttgtattacatggaatcacctgcagtttccacggtggagataagatcggtatagttgggcgaacaggaagtggaaagacaactttaattggtgcactgtttcgtcttgttgagccaactggagggaaaataattatagactctatagacatcaccacaataggcttacatgacctgcgttcacgtttgggtatcattccgcaagatccgacactctttcaaggaaccataagatataatctagaccctcttgggcaattctctgatcaacaaatatgggaggttctaggcaaatgtcagcttcttgaagctgtccaggagaaggagcagggattggactcacttgttgtggaagatggttcgaactggagcatgggtcaaaggcagctcttttgtttgggacgtgcacttctaagaagatgccgtatcttagttcttgatgaggccacggcatctatagacaacgctactgatgctatccttcagaagacgatcaggacagagtttagagattgcactgtcatcactgtcgcacaccgtatacccaccgttatggactgcgatatggtacttgcaatgagtgacgggaaagtagtggagtacgacaagcctacaaagctcgtggaaaccgaaggatctctcttccgtgatcttgtcaaggagtactggtcatacacatcgaattgaaatatctaggagaaactgtgacaatcacatgttcactcgttgcagtctcttaaaaaagagataacaggagcctgttctcacacacatccgatgaactattctatctcaagtccgaagtagaggtgtcaggcattgtcgggaagtgctttttgttaactagttgaacagggggaaacctgtcgtcccttaaaaaaaaggaaacctccagcgtttttttgctccgatattgagcgaataaaccgaaatatctagtggaaggcgcatcaagtatgcatccttgatactgcatgttcacagaaatgcttgtgcggcaggctgttccaaggctttaaactttatggtgctttacattcctaataaaccgaattgtgtatatgatgtttgggaaaatggtgatttttcaggtttcagctccctctcttgctcacgtttaatgtattatcagtgtaaattcatccgtgattggatttaaggcaaccaatttgttggtacgtagctctgttttcacagcgtgtgcccttcaaacttataactcttgggctccctcatatccagggtaagggtctgtttggtttgtggctaactgtgcgtctgtg

SEQ ID NO: 208468 - DNA, 5174 bp, Zea Mays
cgccagccgtggatgtgtttaacgcaacagtattagtttcttcatgatcagctaagggcctggagttgaagcacgaatcatcgaagcgcagcaaaactgagacacacgtcttacttcttcacaagttcttggacgatggacatcttcgggagcccattctgctccaagcaagccgtcgcctcatgcggcggatggacggacatactcgactcctccagctgcacgaaccatatcctggaaaccggcaccgccgctctgatcaccgtcgctctcgcgctgcacctcctcgtcgtcaggattactacgaagaccagagcgtccgcacgccgcccccctgtcgcgcccggcctgccgctgcagctggccggcgcggcgttcaccgcctgcttgggcctcgtctacctcggcctcgcgtcgtggatgctggggagcaacttcactcagcacgcttccgcttacctcccacactggtgggtgacggcactgtcccagggactctgcttggtcctcgccggcttcgctctcagcggcgtcggaggagcacgtctcctcgggccaatgtctgcgcgcgcgtggtcggctctgctggccgcgtacgccgcgttcgtcgcttgttcctcggtcgttcacatggttgcggatagggcactgaccatgaagggttttctggacgctctgttcctgccaggtgcactgctgcttgtctgtggcgcttggtgcgtcaaggaagaggacggtgatggcggaactggaactgctgcttctttgtataagcccttgaagactgacgacactgttgatgatgagaggggtgggtctgagagccatgtgaccccgttcgctaaagccggggttttcagcgtgatgtcgttctggtggatgaacccgatgatgaagacgggctacgagaagccgctcgaggagaaagacatgccgctcttgggtccctcggaccgagcgtacagccagtacctggtgttcctggagaagctcaacaggaagaagcagctgcgggcacacggcaacccgtcgatgttttggaccatcgtttcttgccagaaaactgggatcttggtctcgggtctctttgcactgctcaaggttctcacgctgtcttcgggcccggtgcttctgaaagcattcatcaacgtctcgctcgggaaagggtccttcaagtacgaaggctacgtgttggccgtagcgatgttcctctgcaaatgctgcgaatctctgtcgcagaggcagtggtacttccgcacgcggaggctagggctccaggtgcggtcgttcctgtcggccgccgtctacaagaagcatcagaggctgtccaactcggcgaagctgaagcactcttccggcgagatcatgaactacgtcaccgtcgacgcctaccggatcggcgagttcccgtactggttccaccagacgtggacgacgagcgtccagctctgcatcgctctagcgatcctgtacgacgcggtcggcctcgccacggtcgcggcgctggccgtcatcatcgccaccgtggtctgcaacgcgccgctggccaagctgcagcacaagttccagagcaggcttatggaggcgcaggacgtgaggttgaaggcgatgtcggagtccttggttcacatgaaggtcctgaagctttacgcgtgggagacccacttcaagaaggtcatcgaggggctgagggaggtcgagatcaaatggctgtcggcgttccagcttaggaaagcgtacaacagcttcctgttctggacgtcgcctatcttggtctcggctgcgaccttcctggcatgctatcttctgaagatccctcttgatgccagcaacgtcttcacttttgtggccaccctgcgcctcgttcaggatccgattcggcagataccagacgtgatcggagttgtgattcaggcgaaagttgccttcaccaggataaccaagttccttgacgcgcctgagctgagtggacaggtcaggaagaaaagctgtctgggggatgagtatccgatagtgatgaattgctgcagtttctcgtgggacgagaacccgtcgaaaccagctctaaagaatgtaaatctggtggtcaaaactggacagaaggttgcaatatgcggcgaggtaggatcaggaaagtctacactgctggctgcagttcttggagaggttccgaaaactgaaggcacgatccaagtttgcgggaaaacagcatatgtttctcagaacgcatggatccaaacaggaaccgtgcaggacaacattctctttgggtcttcgatggacaggcaaaggtaccaggaaacactcgagcggtgttctttagtgaaggatcttgagatgttgccgtatggagaccgtactcagatcggcgagcggggcataaatcttagcggcggtcagaagcagcgtgttcagcttgctcgtgcattgtaccagaatgcagacatctatctccttgatgaccctttcagcgctgttgatgcccacacagcaacgagtctgtttaatggatatgtcatgggagctctgtcagacaagactgttcttttggtgacccaccaagttgattttctgcctgtattcgattctattctgttaatgtcagatggtcaaattattcgttctgcatcttatcatgatctattggcatattgtcaagaatttcagaaccttgtaaatgcccataaagacactattggtgtttcagatcttaacagggtgcctccccatagagaaaatgaaatattgatcaaggagacaattgatgttcatggaagcagatacaaagagtctttgaagccatcaccaacagatcaactgattaagacagaagaaagagaaatgggtgatactggtctcaagccttatattctctacctgcgtcagaataaaggcttcttctatgcttctctgggtattatttcccatatagttttcgtatgtggccaaatatcacagaattcatggatggctactaatgtcgagaatcctgatgttagtactcttaagttgacttctgtgtacattgcaattggaatcttctcggtgttcttcttgctatttagatcattagcagttgttgttcttggggtcaagacatcaagatccttattttctcagttactaaactcattattccgtgcaccaatgtccttttatgattctacccctcttggaagaatacttagccgggtttcttcagatctgagtattgttgaccttgatattccgtttggcttcatgtttagcattggtgctggcataaatgcatatagcaatctaggagtattggctgttgttacatggcaagttctgttcgtctctgtgccaatgattgttttggcaatcaggttgcagaggtattatttagcctcatctaaggaattgatgaggatcaatggcactaccaaatctgctctcgctaatcacttgggcgagtcgattgcaggggctataacaataagggcttttcaggaagaagatcgtttctttgagaaaaacttggaacttgttgacaagaatgctggtccatatttctataattttgcagcaactgaatggctcattcaacgtttggagaccatgagtgctgcagttctttctttttctgcccttatcatggctcttcttcctcaaggaacttttaaccctggctttgtaggaatggcattatcttatggtctatccctgaatatatcctttgttttctctatccaaaaccaatgccagctagctagtcaaatcatctctgtggaaagggttcatcagtacatggacataccaagtgaagcagcagagattattgaagaaaatcgaccagcaccagactggccccaagttggcagggtggaccttaaagatttgaagattagatacagacaagatgctcctcttgtattacatggaatcacctgcagtttccacggtggagataagatcggtatagttgggcgaacaggaagtggaaagacaactttaattggtgcactgtttcgtcttgttgagccaactggagggaaaataattatagactctatagacatcaccacaataggcttacatgacctgcgttcacgtttgggtatcattccgcaagatccgacactctttcaaggaaccataagatataatctagaccctcttgggcaattctctgatcaacaaatatgggaggttctaggcaaatgtcagcttcttgaagctgtccaggagaaggagcagggattggactcacttgttgtggaagatggttcgaactggagcatgggtcaaaggcagctcttttgtttgggacgtgcacttctaagaagatgccgtatcttagttcttgatgaggccacggcatctatagacaacgctactgatgctatccttcagaagacgatcaggacagagtttagagattgcactgtcatcactgtcgcacaccgtatacccaccgttatggactgcgatatggtacttgcaatgagtgacgggaaagtagtggagtacgacaagcctacaaagctcgtggaaaccgaaggatctctcttccgtgatcttgtcaaggagtactggtcatacacatcgaattgaaatatctaggagaaactgtgacaatcacatgttcactcgttgcagtctcttaaaaaagagataacaggagcctgttctcacacacatccgatgaactattctatctcaagtccgaagtagaggtgtcaggcattgtcgggaagtgctttttgttaactagttgaacagggggaaacctgtcgtcccttaaaaaaaaggaaacctccagcgtttttttgctccgatattgagcgaataaaccgaaatatctagtggaaggcgcatcaagtatgcatccttgatactgcatgttcacagaaatgcttgtgcggcaggctgttccaaggctttaaactttatggtgctttacattcctaataaaccgaattgtgtatatgatgtttgggaaaatggtgatttttcaggtttcagctccctctcttgctcacgtttaatgtattatcagtgtaaattcatccgtgattggatttaaggcaaccaatttgttggtacgtagctctgttttcacagcgtgtgcccttcaaacttataactcttgggctccctcatatccagggtaagggtctgtttggtttgtggctaactgtgcgtctgtg

SEQ ID NO: 208469 - DNA, 3529 bp, Zea Mays
cgcgtttccccgcatttctgcggcttggcacttctttacctttttcttaaaaagagagagaaaaaggaactcctttcatgcgttccccgggcgctctggttctgttggtgtcccgtcattttcagcacaaattagagtgaccaacagttggtgttatacttgaggcatttgaggttgggactgagagctatcagtttgatctcgatgtcaacttggctgcgtgcctgcgtggggagaaatgtgctaatgccatccttgccagcatggaggtcgatctctccatgtccattaggactagtttgggaatctcattttctcatgagattttcatttttccaagggaatttagtttattttcccttgggaaaacagaaattccttggaaaaatggagttcccaaactagtcctcagaggtcttgccactccataccttatgtgggaccgcctccgtcacatttacgatattcatcacagttaatttcttccaaggcacatacataggcccacaatagattcttaatctccaaactcagtgttgtctttccaccattagtttaagagggggtgctagatgtatagaggtgtgtggtattttccctctactttggagagtccctttgcatatgcacactcgctcactctcttgtatatctctgcctttgggcctggtaatagaagttggttggactcattatagcaatcctattatctctttatgtctttcgactttctttctgatgatcgaacattattttgttaaaaatcatattgttctactaaatcaaaaggtcatccattgtccatcatcaattgatagtttcagaatcaaagaaagacttaaggaaaaaagtgctatgcaaagatattactccctccatgtttatatgtattttagttatcatatattttttgtggttgatgtcatctaagaataagtgtttcttggcagttaatgtcagatggtcaaattattcgttctgcatcttatcatgatctattggcatattgtcaagaatttcagaaccttgtaaatgcccataaagacactattggtgtttcagatcttaacagggtgcctccccatagagaaaatgaaatattgatcaaggagacaattgatgttcatggaagcagatacaaagagtctttgaagccatcaccaacagatcaactgattaagacagaagaaagagaaatgggtgatactggtctcaagccttatattctctacctgcgtcagaataaaggcttcttctatgcttctctgggtattatttcccatatagttttcgtatgtggccaaatatcacagaattcatggatggctactaatgtcgagaatcctgatgttagtactcttaagttgacttctgtgtacattgcaattggaatcttctcggtgttcttcttgctatttagatcattagcagttgttgttcttggggtcaagacatcaagatccttattttctcagttactaaactcattattccgtgcaccaatgtccttttatgattctacccctcttggaagaatacttagccgggtttcttcagatctgagtattgttgaccttgatattccgtttggcttcatgtttagcattggtgctggcataaatgcatatagcaatctaggagtattggctgttgttacatggcaagttctgttcgtctctgtgccaatgattgttttggcaatcaggttgcagaggtattatttagcctcatctaaggaattgatgaggatcaatggcactaccaaatctgctctcgctaatcacttgggcgagtcgattgcaggggctataacaataagggcttttcaggaagaagatcgtttctttgagaaaaacttggaacttgttgacaagaatgctggtccatatttctataattttgcagcaactgaatggctcattcaacgtttggagaccatgagtgctgcagttctttctttttctgcccttatcatggctcttcttcctcaaggaacttttaaccctggctttgtaggaatggcattatcttatggtctatccctgaatatatcctttgttttctctatccaaaaccaatgccagctagctagtcaaatcatctctgtggaaagggttcatcagtacatggacataccaagtgaagcagcagagattattgaagaaaatcgaccagcaccagactggccccaagttggcagggtggaccttaaagatttgaagattagatacagacaagatgctcctcttgtattacatggaatcacctgcagtttccacggtggagataagatcggtatagttgggcgaacaggaagtggaaagacaactttaattggtgcactgtttcgtcttgttgagccaactggagggaaaataattatagactctatagacatcaccacaataggcttacatgacctgcgttcacgtttgggtatcattccgcaagatccgacactctttcaaggaaccataagatataatctagaccctcttgggcaattctctgatcaacaaatatgggaggttctaggcaaatgtcagcttcttgaagctgtccaggagaaggagcagggattggactcacttgttgtggaagatggttcgaactggagcatgggtcaaaggcagctcttttgtttgggacgtgcacttctaagaagatgccgtatcttagttcttgatgaggccacggcatctatagacaacgctactgatgctatccttcagaagacgatcaggacagagtttagagattgcactgtcatcactgtcgcacaccgtatacccaccgttatggactgcgatatggtacttgcaatgagtgacgggaaagtagtggagtacgacaagcctacaaagctcgtggaaaccgaaggatctctcttccgtgatcttgtcaaggagtactggtcatacacatcgaattgaaatatctaggagaaactgtgacaatcacatgttcactcgttgcagtctcttaaaaaagagataacaggagcctgttctcacacacatccgatgaactattctatctcaagtccgaagtagaggtgtcaggcattgtcgggaagtgctttttgttaactagttgaacagggggaaacctgtcgtcccttaaaaaaaaggaaacctccagcgtttttttgctccgatattgagcgaataaaccgaaatatctagtggaaggcgcatcaagtatgcatccttgatactgcatgttcacagaaatgcttgtgcggcaggctgttccaaggctttaaactttatggtgctttacattcctaataaaccgaattgtgtatatgatgtttgggaaaatggtgatttttcaggtttcagctccctctcttgctcacgtttaatgtattatcagtgtaaattcatccgtgattggatttaaggcaaccaatttgttggtacgtagctctgttttcacagcgtgtgcccttcaaacttataactcttgggctccctcatatccagggtaagggtctgtttggtttgtggctaactgtgcgtctgtg

SEQ ID NO: 208470 - DNA, 2718 bp, Zea Mays
cgcatttctgcggcttggcacttctttacctttttcttaaaaagagagagaaaaaggaactcctttcatgcgttccccgggcgctctggttctgttggtgtcccgtcattttcagcacaaattagagtgaccaacagttttaatgtcagatggtcaaattattcgttctgcatcttatcatgatctattggcatattgtcaagaatttcagaaccttgtaaatgcccataaagacactattggtgtttcagatcttaacagggtgcctccccatagagaaaatgaaatattgatcaaggagacaattgatgttcatggaagcagatacaaagagtctttgaagccatcaccaacagatcaactgattaagacagaagaaagagaaatgggtgatactggtctcaagccttatattctctacctgcgtcagaataaaggcttcttctatgcttctctgggtattatttcccatatagttttcgtatgtggccaaatatcacagaattcatggatggctactaatgtcgagaatcctgatgttagtactcttaagttgacttctgtgtacattgcaattggaatcttctcggtgttcttcttgctatttagatcattagcagttgttgttcttggggtcaagacatcaagatccttattttctcagttactaaactcattattccgtgcaccaatgtccttttatgattctacccctcttggaagaatacttagccgggtttcttcagatctgagtattgttgaccttgatattccgtttggcttcatgtttagcattggtgctggcataaatgcatatagcaatctaggagtattggctgttgttacatggcaagttctgttcgtctctgtgccaatgattgttttggcaatcaggttgcagaggtattatttagcctcatctaaggaattgatgaggatcaatggcactaccaaatctgctctcgctaatcacttgggcgagtcgattgcaggggctataacaataagggcttttcaggaagaagatcgtttctttgagaaaaacttggaacttgttgacaagaatgctggtccatatttctataattttgcagcaactgaatggctcattcaacgtttggagaccatgagtgctgcagttctttctttttctgcccttatcatggctcttcttcctcaaggaacttttaaccctggctttgtaggaatggcattatcttatggtctatccctgaatatatcctttgttttctctatccaaaaccaatgccagctagctagtcaaatcatctctgtggaaagggttcatcagtacatggacataccaagtgaagcagcagagattattgaagaaaatcgaccagcaccagactggccccaagttggcagggtggaccttaaagatttgaagattagatacagacaagatgctcctcttgtattacatggaatcacctgcagtttccacggtggagataagatcggtatagttgggcgaacaggaagtggaaagacaactttaattggtgcactgtttcgtcttgttgagccaactggagggaaaataattatagactctatagacatcaccacaataggcttacatgacctgcgttcacgtttgggtatcattccgcaagatccgacactctttcaaggaaccataagatataatctagaccctcttgggcaattctctgatcaacaaatatgggaggttctaggcaaatgtcagcttcttgaagctgtccaggagaaggagcagggattggactcacttgttgtggaagatggttcgaactggagcatgggtcaaaggcagctcttttgtttgggacgtgcacttctaagaagatgccgtatcttagttcttgatgaggccacggcatctatagacaacgctactgatgctatccttcagaagacgatcaggacagagtttagagattgcactgtcatcactgtcgcacaccgtatacccaccgttatggactgcgatatggtacttgcaatgagtgacgggaaagtagtggagtacgacaagcctacaaagctcgtggaaaccgaaggatctctcttccgtgatcttgtcaaggagtactggtcatacacatcgaattgaaatatctaggagaaactgtgacaatcacatgttcactcgttgcagtctcttaaaaaagagataacaggagcctgttctcacacacatccgatgaactattctatctcaagtccgaagtagaggtgtcaggcattgtcgggaagtgctttttgttaactagttgaacagggggaaacctgtcgtcccttaaaaaaaaggaaacctccagcgtttttttgctccgatattgagcgaataaaccgaaatatctagtggaaggcgcatcaagtatgcatccttgatactgcatgttcacagaaatgcttgtgcggcaggctgttccaaggctttaaactttatggtgctttacattcctaataaaccgaattgtgtatatgatgtttgggaaaatggtgatttttcaggtttcagctccctctcttgctcacgtttaatgtattatcagtgtaaattcatccgtgattggatttaaggcaaccaatttgttggtacgtagctctgttttcacagcgtgtgcccttcaaacttataactcttgggctccctcatatccagggtaagggtctgtttggtttgtggctaactgtgcgtctgtg

SEQ ID NO: 208471 - DNA, 2786 bp, Zea Mays
ctcctttcatgcgttccccgggcgctctggttctgttggtgtcccgtcattttcagcacaaattagagtgaccaacagttgtgagttcctgttatgttctccccacgacacccatatacctactgaatgctgatggtgatgccaaaagtgttttacttgaggaatgctgatgatgatacacagggtgttatacttgaggcatttgagttaatgtcagatggtcaaattattcgttctgcatcttatcatgatctattggcatattgtcaagaatttcagaaccttgtaaatgcccataaagacactattggtgtttcagatcttaacagggtgcctccccatagagaaaatgaaatattgatcaaggagacaattgatgttcatggaagcagatacaaagagtctttgaagccatcaccaacagatcaactgattaagacagaagaaagagaaatgggtgatactggtctcaagccttatattctctacctgcgtcagaataaaggcttcttctatgcttctctgggtattatttcccatatagttttcgtatgtggccaaatatcacagaattcatggatggctactaatgtcgagaatcctgatgttagtactcttaagttgacttctgtgtacattgcaattggaatcttctcggtgttcttcttgctatttagatcattagcagttgttgttcttggggtcaagacatcaagatccttattttctcagttactaaactcattattccgtgcaccaatgtccttttatgattctacccctcttggaagaatacttagccgggtttcttcagatctgagtattgttgaccttgatattccgtttggcttcatgtttagcattggtgctggcataaatgcatatagcaatctaggagtattggctgttgttacatggcaagttctgttcgtctctgtgccaatgattgttttggcaatcaggttgcagaggtattatttagcctcatctaaggaattgatgaggatcaatggcactaccaaatctgctctcgctaatcacttgggcgagtcgattgcaggggctataacaataagggcttttcaggaagaagatcgtttctttgagaaaaacttggaacttgttgacaagaatgctggtccatatttctataattttgcagcaactgaatggctcattcaacgtttggagaccatgagtgctgcagttctttctttttctgcccttatcatggctcttcttcctcaaggaacttttaaccctggctttgtaggaatggcattatcttatggtctatccctgaatatatcctttgttttctctatccaaaaccaatgccagctagctagtcaaatcatctctgtggaaagggttcatcagtacatggacataccaagtgaagcagcagagattattgaagaaaatcgaccagcaccagactggccccaagttggcagggtggaccttaaagatttgaagattagatacagacaagatgctcctcttgtattacatggaatcacctgcagtttccacggtggagataagatcggtatagttgggcgaacaggaagtggaaagacaactttaattggtgcactgtttcgtcttgttgagccaactggagggaaaataattatagactctatagacatcaccacaataggcttacatgacctgcgttcacgtttgggtatcattccgcaagatccgacactctttcaaggaaccataagatataatctagaccctcttgggcaattctctgatcaacaaatatgggaggttctaggcaaatgtcagcttcttgaagctgtccaggagaaggagcagggattggactcacttgttgtggaagatggttcgaactggagcatgggtcaaaggcagctcttttgtttgggacgtgcacttctaagaagatgccgtatcttagttcttgatgaggccacggcatctatagacaacgctactgatgctatccttcagaagacgatcaggacagagtttagagattgcactgtcatcactgtcgcacaccgtatacccaccgttatggactgcgatatggtacttgcaatgagtgacgggaaagtagtggagtacgacaagcctacaaagctcgtggaaaccgaaggatctctcttccgtgatcttgtcaaggagtactggtcatacacatcgaattgaaatatctaggagaaactgtgacaatcacatgttcactcgttgcagtctcttaaaaaagagataacaggagcctgttctcacacacatccgatgaactattctatctcaagtccgaagtagaggtgtcaggcattgtcgggaagtgctttttgttaactagttgaacagggggaaacctgtcgtcccttaaaaaaaaggaaacctccagcgtttttttgctccgatattgagcgaataaaccgaaatatctagtggaaggcgcatcaagtatgcatccttgatactgcatgttcacagaaatgcttgtgcggcaggctgttccaaggctttaaactttatggtgctttacattcctaataaaccgaattgtgtatatgatgtttgggaaaatggtgatttttcaggtttcagctccctctcttgctcacgtttaatgtattatcagtgtaaattcatccgtgattggatttaaggcaaccaatttgttggtacgtagctctgttttcacagcgtgtgcccttcaaacttataactcttgggctccctcatatccagggtaagggtctgtttggtttgtggctaactgtgcgtctgtg

SEQ ID NO: 208472 - DNA, 2668 bp, Zea Mays
tcatgcgttccccgggcgctctggttctgttggtgtcccgtcattttcagcacaaattagagtgaccaacagttgtgagttcctgttatgttctccccacgacacccatatacctactgaatgctgatggtgatgccaaaagtgttttacttgaggaatgctgatgatgatacacagggtgttatacttgaggcatttgagatcttaacagggtgcctccccatagagaaaatgaaatattgatcaaggagacaattgatgttcatggaagcagatacaaagagtctttgaagccatcaccaacagatcaactgattaagacagaagaaagagaaatgggtgatactggtctcaagccttatattctctacctgcgtcagaataaaggcttcttctatgcttctctgggtattatttcccatatagttttcgtatgtggccaaatatcacagaattcatggatggctactaatgtcgagaatcctgatgttagtactcttaagttgacttctgtgtacattgcaattggaatcttctcggtgttcttcttgctatttagatcattagcagttgttgttcttggggtcaagacatcaagatccttattttctcagttactaaactcattattccgtgcaccaatgtccttttatgattctacccctcttggaagaatacttagccgggtttcttcagatctgagtattgttgaccttgatattccgtttggcttcatgtttagcattggtgctggcataaatgcatatagcaatctaggagtattggctgttgttacatggcaagttctgttcgtctctgtgccaatgattgttttggcaatcaggttgcagaggtattatttagcctcatctaaggaattgatgaggatcaatggcactaccaaatctgctctcgctaatcacttgggcgagtcgattgcaggggctataacaataagggcttttcaggaagaagatcgtttctttgagaaaaacttggaacttgttgacaagaatgctggtccatatttctataattttgcagcaactgaatggctcattcaacgtttggagaccatgagtgctgcagttctttctttttctgcccttatcatggctcttcttcctcaaggaacttttaaccctggctttgtaggaatggcattatcttatggtctatccctgaatatatcctttgttttctctatccaaaaccaatgccagctagctagtcaaatcatctctgtggaaagggttcatcagtacatggacataccaagtgaagcagcagagattattgaagaaaatcgaccagcaccagactggccccaagttggcagggtggaccttaaagatttgaagattagatacagacaagatgctcctcttgtattacatggaatcacctgcagtttccacggtggagataagatcggtatagttgggcgaacaggaagtggaaagacaactttaattggtgcactgtttcgtcttgttgagccaactggagggaaaataattatagactctatagacatcaccacaataggcttacatgacctgcgttcacgtttgggtatcattccgcaagatccgacactctttcaaggaaccataagatataatctagaccctcttgggcaattctctgatcaacaaatatgggaggttctaggcaaatgtcagcttcttgaagctgtccaggagaaggagcagggattggactcacttgttgtggaagatggttcgaactggagcatgggtcaaaggcagctcttttgtttgggacgtgcacttctaagaagatgccgtatcttagttcttgatgaggccacggcatctatagacaacgctactgatgctatccttcagaagacgatcaggacagagtttagagattgcactgtcatcactgtcgcacaccgtatacccaccgttatggactgcgatatggtacttgcaatgagtgacgggaaagtagtggagtacgacaagcctacaaagctcgtggaaaccgaaggatctctcttccgtgatcttgtcaaggagtactggtcatacacatcgaattgaaatatctaggagaaactgtgacaatcacatgttcactcgttgcagtctcttaaaaaagagataacaggagcctgttctcacacacatccgatgaactattctatctcaagtccgaagtagaggtgtcaggcattgtcgggaagtgctttttgttaactagttgaacagggggaaacctgtcgtcccttaaaaaaaaggaaacctccagcgtttttttgctccgatattgagcgaataaaccgaaatatctagtggaaggcgcatcaagtatgcatccttgatactgcatgttcacagaaatgcttgtgcggcaggctgttccaaggctttaaactttatggtgctttacattcctaataaaccgaattgtgtatatgatgtttgggaaaatggtgatttttcaggtttcagctccctctcttgctcacgtttaatgtattatcagtgtaaattcatccgtgattggatttaaggcaaccaatttgttggtacgtagctctgttttcacagcgtgtgcccttcaaacttataactcttgggctccctcatatccagggtaagggtctgtttggtttgtggctaactgtgcgtctgtg

SEQ ID NO: 208473 - DNA, 2655 bp, Zea Mays
gtttgatctcgatgtcaacttggctgcgtgcctgcgtggggagaaatgtgctaatgccatccttgccagcatggagttaatgtcagatggtcaaattattcgttctgcatcttatcatgatctattggcatattgtcaagaatttcagaaccttgtaaatgcccataaagacactattggtgtttcagatcttaacagggtgcctccccatagagaaaatgaaatattgatcaaggagacaattgatgttcatggaagcagatacaaagagtctttgaagccatcaccaacagatcaactgattaagacagaagaaagagaaatgggtgatactggtctcaagccttatattctctacctgcgtcagaataaaggcttcttctatgcttctctgggtattatttcccatatagttttcgtatgtggccaaatatcacagaattcatggatggctactaatgtcgagaatcctgatgttagtactcttaagttgacttctgtgtacattgcaattggaatcttctcggtgttcttcttgctatttagatcattagcagttgttgttcttggggtcaagacatcaagatccttattttctcagttactaaactcattattccgtgcaccaatgtccttttatgattctacccctcttggaagaatacttagccgggtttcttcagatctgagtattgttgaccttgatattccgtttggcttcatgtttagcattggtgctggcataaatgcatatagcaatctaggagtattggctgttgttacatggcaagttctgttcgtctctgtgccaatgattgttttggcaatcaggttgcagaggtattatttagcctcatctaaggaattgatgaggatcaatggcactaccaaatctgctctcgctaatcacttgggcgagtcgattgcaggggctataacaataagggcttttcaggaagaagatcgtttctttgagaaaaacttggaacttgttgacaagaatgctggtccatatttctataattttgcagcaactgaatggctcattcaacgtttggagaccatgagtgctgcagttctttctttttctgcccttatcatggctcttcttcctcaaggaacttttaaccctggctttgtaggaatggcattatcttatggtctatccctgaatatatcctttgttttctctatccaaaaccaatgccagctagctagtcaaatcatctctgtggaaagggttcatcagtacatggacataccaagtgaagcagcagagattattgaagaaaatcgaccagcaccagactggccccaagttggcagggtggaccttaaagatttgaagattagatacagacaagatgctcctcttgtattacatggaatcacctgcagtttccacggtggagataagatcggtatagttgggcgaacaggaagtggaaagacaactttaattggtgcactgtttcgtcttgttgagccaactggagggaaaataattatagactctatagacatcaccacaataggcttacatgacctgcgttcacgtttgggtatcattccgcaagatccgacactctttcaaggaaccataagatataatctagaccctcttgggcaattctctgatcaacaaatatgggaggttctaggcaaatgtcagcttcttgaagctgtccaggagaaggagcagggattggactcacttgttgtggaagatggttcgaactggagcatgggtcaaaggcagctcttttgtttgggacgtgcacttctaagaagatgccgtatcttagttcttgatgaggccacggcatctatagacaacgctactgatgctatccttcagaagacgatcaggacagagtttagagattgcactgtcatcactgtcgcacaccgtatacccaccgttatggactgcgatatggtacttgcaatgagtgacgggaaagtagtggagtacgacaagcctacaaagctcgtggaaaccgaaggatctctcttccgtgatcttgtcaaggagtactggtcatacacatcgaattgaaatatctaggagaaactgtgacaatcacatgttcactcgttgcagtctcttaaaaaagagataacaggagcctgttctcacacacatccgatgaactattctatctcaagtccgaagtagaggtgtcaggcattgtcgggaagtgctttttgttaactagttgaacagggggaaacctgtcgtcccttaaaaaaaaggaaacctccagcgtttttttgctccgatattgagcgaataaaccgaaatatctagtggaaggcgcatcaagtatgcatccttgatactgcatgttcacagaaatgcttgtgcggcaggctgttccaaggctttaaactttatggtgctttacattcctaataaaccgaattgtgtatatgatgtttgggaaaatggtgatttttcaggtttcagctccctctcttgctcacgtttaatgtattatcagtgtaaattcatccgtgattggatttaaggcaaccaatttgttggtacgtagctctgttttcacagcgtgtgcccttcaaacttataactcttgggctccctcatatccagggtaagggtctgtttggtttgtggctaactgtgcgtctgtg

SEQ ID NO: 208474 - DNA, 4979 bp, Zea Mays
cgcggcttgatttcacttggccctctagcgttgtttggtcaatcctctctctcccttccccatctccccgtaccccaaaccctaggacgcagcgccgccgccgtagcacccccacacgcagcaagatgaggccgcgcggcaggggcgacgacgtcgaagacgacgaggatgagtacgaggacatcacgccccctcgaagaacgccagagcctgaggccgaccccgtccgctcgccctcgccctcgcccgctcctgcccccgccccaccacatcccgcgcgtgcccctctcagcagtctcgttgtcaggccgccgccgcagcaacaggagaacggcggcggatcctccccgccctcatcctccgcccgctcgctttctcccagcaccggcggacaccgaggccgcggggcctcgcccccgcggcgacggcgggacttctcaccgccgcctccccgtggttgggtgaggcgccggtcgccgctgccgccaccgccggagaggcggcgtcctgggagcccgccgccccagcgccgacgcttcagcccaccgccccggtcccacctaccgcggcatccgcgcttccacgatgagcaggaaggtttgttgcaaatcctccaatctttctcttttcttgcaaaatgtttattataagtcattggaagctcgatccagtttaagtcgatttgtacatctccttatgtactatattgctgttttcgcacacccgtattttctttactttatttttatttgattctgattaatgcgcgttctgtgcgatgctgatgattccttaccttgaaggatacatctcttttttcgttttgaaggattaatcttctttattacaactaaatgcacggttgtatttcttgtggtgatattgattggaagtcatgtgattttacatagttatgtggcgactggcgatatatgtggaggacatgatgcttgttttaagctatgcaacacatgtatttaaattgctatcaacttattccatggctgttccaatagcagcacctttttattcttttagggcttctgtgctatgttcagatttcatcaagtgaaagttatgcaatggtggtttagttatgtatttgctcacatatatattgtccagagatgattttggctccagaacttcaactctctttttgattgcaatcgcaaagtttacaaacaacagttgctgttgcttgtaattgctaatacatattggaaatctaatgaccagcttgttgttggaatatactaatattgtatgggatggatataaatacttttgtgtgcattagtagctgaagtttgaaagatcaactgcatggaccaggagcaaaaacagaacagatatgacatagtttgatgatcatttttatatgtttcaagttgttattgcaattgggttctgttgcttctaatgggttgaagcagctagcaaatgctatctgaacaatctcttatattggtctaaagctcagaacggtatttgtggttcatgttgcttgatatatttaatatgaaattgccatgactcttagatgtgttttcctcttttgggtcatttcatgccttatttgcaagaagccatagaagatatgaatcatatagtttgtgtcatatttcatattaataatgtcaagtttgtttccacaagatttgcatgatatgttgttatccttgtattatgcatgattcctcatatcttaggtgctaatgtgctgtacaatttgcatcactcaaacaatgaaccatttagtgaaattcttttacctgcttctctcttctgttgattttattttattgtaaatgtagaactgtgcttttttttgtttgaactgttcgctaaacagactgctcatcatctttgaagtataatatgcataaatagactgcccgttacctttatttgaagtatagtatgcataaatagttatattgatcttgtgtgcaaatgctcatcatctttgaagtatagtatgcacacaagatctagcatttgaggaattgtcatggagtacagttaagacctttatttaatagtatattagtattgtgttatcatcatgatagttttatggatactttataactatattatatatttttactaatttctagttcagtttattctcagcatttcagcttccttcatttaccaaatataagtggtaccatgatttcatcatgttacacagtatgtctcttgacatctagcagtatcctgccgctatataactgctaaatggtttattttatataactagatatattattgttaattgttaaagaaccataattctaggaaaatgtttcacacagtgtgaatgtctgaaaccacctgatatgcttgaaaagttgttaatatcttctaatactctgctggcttggatgtccagtgtaattgccaagcactgcaatctccagtaaaatatcaaatgaagtatggagtttgctgttgtactggaacactttccaacttgagttgcttggatgccattccttttcaaggaggacattattgctgatgctttgacatttgcatgtgcagtatgtcgcgctctgaagttttggagttttgagaattgagataacatcgagtgaaggaatgagatggacttgaggtcatagtattaacacaacttgggcgtgttagtgtttaggcaatgcctagcaacataatgagtggaattagcttgaccatggatacgtagaaacttgaggaggacatcatcactcgccagttggtccgtactgtcatcaatatttcaaccgttgatttttggagatcagggcagaaatcaggaagctgtggttccagtgcttatctaaactaaagttgcatgcttgatgttgttagtatggaactgggtttagacatttataatatgaattcgaaaatgaccaacccaccctttcgagtttttttttggtaatttgtgttttctgcacaagccaagtcatcaggtatattttagacgtaggattatgccattttgtttgccagtctttgaacaacttgttagatgcttcagaggctgggacaatgacgttgggagaagaatgtaactagctgttctagaggcttatttgcaagtgaattgctgggcatattcacatcttcatgatttgaagcctcaaggatgttcatatagcatcgatattggagctgtctcctgtgcaatgtgagacattccaactactacttggtatacttttcaggttggaagttggaactcttcaagtaggtcccagtggggattagcttcgtggcacttggtgctttcttaatcttgtgcagtcatgtggagggagaagtattcggtcttgaagcgacctccttgattctaatatttgagatgccatcaagaatctgttgcagtggtctatatgtcattgacctgtcaaatgtttgtttgagttaacttgcaaatggaattgtgggatcctacattggctaaaggaattaagattttcttagcaacatcaactccactctttggacacgtagctactaattacaccgtgaactaccagaaggccgctattcagttgagctgcagtggcaatggatatggaatgcatgcaggcccttcgccaccacgcagagcagaagccagcaaatttgatgatgatgttagtccacgttacactcatggatatcaagggggtggtagaggaggtgcaaggttccgagagggtcctccaccatatggaagaggtagatcatatgggagaggttatggtgctccacatggaaaggatttgattaatattgatggagaatatgttcaccgaaatgacccaaatctgtcgccaagagaaggtgattggatatgccagaaccctaattgtggaaatctcaattttgctcggcgaactcactgtaacaactgcaacaagttccgctattcagcacgtgaagcatatgaacctaggcgcagccctcccttcaggagttaccccagccctccacgagggcctccaaggatggttggtccacctggtgatcgagcccctgcaagagagatggccaggtacagatccccacctcatggttggggagcaagtgatcccagggcatatgcaggtcgatcccctccagaacgtgcaggacggtttacagatccatcaactaagggaagaatgggcttccgtggtgagcgtgacccaagggaccgtgtgaaatatgagtggtctgccactgatgactacgttcagagggagcgcccatatgatggttatcttgacaggagtcggcgtcgctcaggatctcctcgtggtaactggggaaatgatctgcgtgacagaagccgctctcctgcacggaacaggcctatgaagagttccttcaccggaagaggtcgacctgacgactatgctgctgatccatatggcagccgagggagacccaatggtatggaggccggccgtgggcgtgggcatgcttacagagcaggcagtggtccgtaccctggtgagactcgaggtgaccaacgcgctgctccacgcgctaggaacgaggatggctattagatcttcatgaagctgagtgacgtcattttgtctttgttggtcaggaaaggagaaccttagtcaagctggagcttgagaatatctgcagcttgtaatattaaagatcgtgcacacatcctgttcctgcatgttgtggagttatggttggcttctctcatgctcagtggtgggatctattaaagggtcatgggtggacacatatacacccaataatttctgcaaaaaaaattagtactcatcaagtagcaaataacgttctattgccgtgattctaagcgtctgtttagaagtatccagtttttaagaaactggtttatgtaaattgaggtggtttatagaaattggattcccatttcttaaaaaccaagaagctggccacttctaactaaaaaataaaattgcttccaaataggaccaaaatattttgaccttaccatttgt

SEQ ID NO: 208475 - DNA, 1625 bp, Zea Mays
ggccgacgggtcgtgcggtcgtgcccaacggccttctcagcccatctcgtgcccacgtccctcttcccatttctgaccaacccctcttcatccctcggactacaaatgcggcgcaaccgtgagcgcagctgcagttggggagtgtgcagcagtatgttctcggtctcgccatcgcatctcgcagagtagacactcaaatccgattgtcgagggggagaaggtggagatcgttgtaacggctagttgcgtcggcccgatggacccgtcgtaccatggcggcggcgccgccggtggaagcgccgacgaccatggccaaattctttgggattggacagaacagcattgtgaacctaacgattcaagtcatgcagatgctactaaatttgtgtgggattgcctcaatcaagatgacaatgagctgttgggattgcttggaaatcaaaccccattgagatactgccgtgatttcttcgctgaccttgatgatatcacatgcaaggagaccctggacctggaggaatctcgggaatcaaagcggcggcgcacattggagtaccctttggagtctagtcagtcagaagttgggactcatgaaaccggttcacctttcgtcacacctgaggtagcagaaatttcattgctctgcactgataaaccacagagcttaaattgtgatacaataaattccttgtcagatgaagcaccctaccagcaagaagatatccttttggaacattgctcttatggaacggcagtgtaccttgagccagatcaaacaccttgtagccagcagagcattgcatgtacaaatgatcaagctggtatttcaggaacaagtgagattgcaccaatgacagaaagtttcataatgcaggaaactaggaagctttctacactcaaagtctccaatggagcaagctcgtcactagttacgaaggacaacttaactacctcagtagcatatccttttactctcatcaaaccatcctggcaagaaggcgatgttaccttgcaggatataaatcggcgaatccgtcctcctaagaaggccccagagatccttggaacttcagcattctctggcaagccagtgattaacaagacaagaatcagaacagaaggagggaaaggaagcatcacaatactaagaacaaagggctgagaaccggaaaatacctttgatccttatttatctgctcctttgtggtcaattgtacaggtctgagcacttgaggctgccattgattcacagttcatggaacagagggcttagagcttgaggatgccattgattcttatttatctgccattctctcgattgcttttggcactctggtcaatgtgcaggcctcttagctttccagctgttactttttttctttcagttttgtaccgtgactttgtcttgtgaatagtattatgacatgtggatgtggtcaacgatatatacaaagcactaaagttaatggaattagtgtgttaaattccatgtacttgagtctgttcaagctctgtgccgagaaaatttcttatatgacactagcaaactcacttattgcttctattgccctcaaactcaattatttcttatatgacgctttggttacttctgctggacatctccg

SEQ ID NO: 208476 - DNA, 1628 bp, Zea Mays
ggccgacgggtcgtgcggtcgtgcccaacggccttctcagcccatctcgtgcccacgtccctcttcccatttctgaccaacccctcttcatccctcggactacaaatgcggcgcaaccgtgagcgcagctgcagttggggagtgtgcagcagtatgttctcggtctcgccatcgcatctcgcagagtagacactcaaatccgattgtcgagggggagaaggtggagatcgttgtaacggctagttgcgtcggcccgatggacccgtcgtaccatggcggcggcgccgccggtggaagcgccgacgaccatggccaaattctttgggattggacagaacagcattgtgaacctaacgattcaagtcatgatgctactaaatttgtgtgggattgcctcaatcaagatgacaatgagctgttgggattgcttggaaatcaaaccccattgagatactgccgtgatttcttcgctgaccttgatgatatcacatgcaaggagaccctggacctggaggaatctcgggaatcaaagcggcggcgcacattggagtaccctttggagtctagtcagtcagaagttgggactcatgaaaccggttcacctttcgtcacacctgaggtagcagaaatttcattgctctgcactgataaaccacagagcttaaattgtggtatgcaccacactttaaataatctagatgaagcaccctaccagcaagaagatatccttttggaacattgctcttatggaacggcagtgtaccttgagccagatcaaacaccttgtagccagcagagcattgcatgtacaaatgatcaagctggtatttcaggaacaagtgagattgcaccaatgacagaaagtttcataatgcaggaaactaggaagctttctacactcaaagtctccaatggagcaagctcgtcactagttacgaaggacaacttaactacctcagtagcatatccttttactctcatcaaaccatcctggcaagaaggcgatgttaccttgcaggatataaatcggcgaatccgtcctcctaagaaggccccagagatccttggaacttcagcattctctggcaagccagtgattaacaagacaagaatcagaacagaaggagggaaaggaagcatcacaatactaagaacaaagggctgagaaccggaaaatacctttgatccttatttatctgctcctttgtggtcaattgtacaggtctgagcacttgaggctgccattgattcacagttcatggaacagagggcttagagcttgaggatgccattgattcttatttatctgccattctctcgattgcttttggcactctggtcaatgtgcaggcctcttagctttccagctgttactttttttctttcagttttgtaccgtgactttgtcttgtgaatagtattatgacatgtggatgtggtcaacgatatatacaaagcactaaagttaatggaattagtgtgttaaattccatgtacttgagtctgttcaagctctgtgccgagaaaatttcttatatgacactagcaaactcacttattgcttctattgccctcaaactcaattatttcttatatgacgctttggttacttctgctggacatctccg

SEQ ID NO: 208477 - DNA, 1652 bp, Zea Mays
ggccgacgggtcgtgcggtcgtgcccaacggccttctcagcccatctcgtgcccacgtccctcttcccatttctgaccaacccctcttcatccctcggactacaaatgcggcgcaaccgtgagcgcagctgcagttggggagtgtgcagcagtatgttctcggtctcgccatcgcatctcgcagagtagacactcaaatccgattgtcgagggggagaaggtggagatcgttgtaacggctagttgcgtcggcccgatggacccgtcgtaccatggcggcggcgccgccggtggaagcgccgacgaccatggccaaattctttgggattggacagaacagcattgtgaacctaacgattcaagtcatgcagatgctactaaatttgtgtgggattgcctcaatcaagatgacaatgagctgttgggattgcttggaaatcaaaccccattgagatactgccgtgatttcttcgctgaccttgatgatatcacatgcaaggagaccctggacctggaggaatctcgggaatcaaagcggcggcgcacattggagtaccctttggagtctagtcagtcagaagttgggactcatgaaaccggttcacctttcgtcacacctgaggtagcagaaatttcattgctctgcactgataaaccacagagcttaaattgtggtatgcaccacactttaaataatctagatacaataaattccttgtcagatgaagcaccctaccagcaagaagatatccttttggaacattgctcttatggaacggcagtgtaccttgagccagatcaaacaccttgtagccagcagagcattgcatgtacaaatgatcaagctggtatttcaggaacaagtgagattgcaccaatgacagaaagtttcataatgcaggaaactaggaagctttctacactcaaagtctccaatggagcaagctcgtcactagttacgaaggacaacttaactacctcagtagcatatccttttactctcatcaaaccatcctggcaagaaggcgatgttaccttgcaggatataaatcggcgaatccgtcctcctaagaaggccccagagatccttggaacttcagcattctctggcaagccagtgattaacaagacaagaatcagaacagaaggagggaaaggaagcatcacaatactaagaacaaagggctgagaaccggaaaatacctttgatccttatttatctgctcctttgtggtcaattgtacaggtctgagcacttgaggctgccattgattcacagttcatggaacagagggcttagagcttgaggatgccattgattcttatttatctgccattctctcgattgcttttggcactctggtcaatgtgcaggcctcttagctttccagctgttactttttttctttcagttttgtaccgtgactttgtcttgtgaatagtattatgacatgtggatgtggtcaacgatatatacaaagcactaaagttaatggaattagtgtgttaaattccatgtacttgagtctgttcaagctctgtgccgagaaaatttcttatatgacactagcaaactcacttattgcttctattgccctcaaactcaattatttcttatatgacgctttggttacttctgctggacatctccg

SEQ ID NO: 208478 - DNA, 1482 bp, Zea Mays
ggccgacgggtcgtgcggtcgtgcccaacggccttctcagcccatctcgtgcccacgtccctcttcccatttctgaccaacccctcttcatccctcggactacaaatgcggcgcaaccgtgagcgcagctgcagttggggagtgtgcagcatctttgggattggacagaacagcattgtgaacctaacgattcaagtcatgatgctactaaatttgtgtgggattgcctcaatcaagatgacaatgagctgttgggattgcttggaaatcaaaccccattgagatactgccgtgatttcttcgctgaccttgatgatatcacatgcaaggagaccctggacctggaggaatctcgggaatcaaagcggcggcgcacattggagtaccctttggagtctagtcagtcagaagttgggactcatgaaaccggttcacctttcgtcacacctgaggtagcagaaatttcattgctctgcactgataaaccacagagcttaaattgtggtatgcaccacactttaaataatctagatacaataaattccttgtcagatgaagcaccctaccagcaagaagatatccttttggaacattgctcttatggaacggcagtgtaccttgagccagatcaaacaccttgtagccagcagagcattgcatgtacaaatgatcaagctggtatttcaggaacaagtgagattgcaccaatgacagaaagtttcataatgcaggaaactaggaagctttctacactcaaagtctccaatggagcaagctcgtcactagttacgaaggacaacttaactacctcagtagcatatccttttactctcatcaaaccatcctggcaagaaggcgatgttaccttgcaggatataaatcggcgaatccgtcctcctaagaaggccccagagatccttggaacttcagcattctctggcaagccagtgattaacaagacaagaatcagaacagaaggagggaaaggaagcatcacaatactaagaacaaagggctgagaaccggaaaatacctttgatccttatttatctgctcctttgtggtcaattgtacaggtctgagcacttgaggctgccattgattcacagttcatggaacagagggcttagagcttgaggatgccattgattcttatttatctgccattctctcgattgcttttggcactctggtcaatgtgcaggcctcttagctttccagctgttactttttttctttcagttttgtaccgtgactttgtcttgtgaatagtattatgacatgtggatgtggtcaacgatatatacaaagcactaaagttaatggaattagtgtgttaaattccatgtacttgagtctgttcaagctctgtgccgagaaaatttcttatatgacactagcaaactcacttattgcttctattgccctcaaactcaattatttcttatatgacgctttggttacttctgctggacatctccg

SEQ ID NO: 208479 - DNA, 1485 bp, Zea Mays
ggccgacgggtcgtgcggtcgtgcccaacggccttctcagcccatctcgtgcccacgtccctcttcccatttctgaccaacccctcttcatccctcggactacaaatgcggcgcaaccgtgagcgcagctgcagttggggagtgtgcagcatctttgggattggacagaacagcattgtgaacctaacgattcaagtcatgcagatgctactaaatttgtgtgggattgcctcaatcaagatgacaatgagctgttgggattgcttggaaatcaaaccccattgagatactgccgtgatttcttcgctgaccttgatgatatcacatgcaaggagaccctggacctggaggaatctcgggaatcaaagcggcggcgcacattggagtaccctttggagtctagtcagtcagaagttgggactcatgaaaccggttcacctttcgtcacacctgaggtagcagaaatttcattgctctgcactgataaaccacagagcttaaattgtggtatgcaccacactttaaataatctagatacaataaattccttgtcagatgaagcaccctaccagcaagaagatatccttttggaacattgctcttatggaacggcagtgtaccttgagccagatcaaacaccttgtagccagcagagcattgcatgtacaaatgatcaagctggtatttcaggaacaagtgagattgcaccaatgacagaaagtttcataatgcaggaaactaggaagctttctacactcaaagtctccaatggagcaagctcgtcactagttacgaaggacaacttaactacctcagtagcatatccttttactctcatcaaaccatcctggcaagaaggcgatgttaccttgcaggatataaatcggcgaatccgtcctcctaagaaggccccagagatccttggaacttcagcattctctggcaagccagtgattaacaagacaagaatcagaacagaaggagggaaaggaagcatcacaatactaagaacaaagggctgagaaccggaaaatacctttgatccttatttatctgctcctttgtggtcaattgtacaggtctgagcacttgaggctgccattgattcacagttcatggaacagagggcttagagcttgaggatgccattgattcttatttatctgccattctctcgattgcttttggcactctggtcaatgtgcaggcctcttagctttccagctgttactttttttctttcagttttgtaccgtgactttgtcttgtgaatagtattatgacatgtggatgtggtcaacgatatatacaaagcactaaagttaatggaattagtgtgttaaattccatgtacttgagtctgttcaagctctgtgccgagaaaatttcttatatgacactagcaaactcacttattgcttctattgccctcaaactcaattatttcttatatgacgctttggttacttctgctggacatctccg

SEQ ID NO: 208480 - DNA, 1562 bp, Zea Mays
cgcaaacacgcacgcacaccgtacccctcagctcgcgccaccggccaccgcacacagaacgcgtgctccgtccgtcctccctctgcctcgcgcgcgcagggttagcgtgagctgatcgagcaacgagagctagctagctagaggacacgacacgatggccttgcaggtcaccggcggcgtgggctgctgctgccctccgggcagtgcccggcggttgccgcaagcggcggcgctgtgtcgcccgccccgcgcggtagtgtccggcgcaaccagggtggtggaggaggacgagggcaaggtgaggctgggcggctcaggcgtcgcggtcaccaagctcggcatcggcgcgtggtcctggggcgacaccacctactggaacgactccgagtgggatgacaggagactgagggaagcacaggacgcgttcgatgcgagcatcgataacgggatgaccttcttcgatactgcagaagtttacgctgatgggagcagtcaattctgaaactttactaggaggattcatcaaggaaaggcaacagaaggaccagatcgaggtgtccgttgcaacaaagttcgctgcccttccttggagatttggaaggggtagcgttctttcggcgctgaagaaatcgctagaccgtctaggcctagcgtctgtcgagctctatcaactccactggccagggatttgggggaacgaaggatatcttgatggtctcgcggatgcttatgagcaaggcctagtcaaggctgttggagtctcaaactacaatgagaagcgccttcgggatgcacatgctcgcctgaagaagcggggggttccacttgctgcaaaccaggtgaactacagcctcatatatagaacccctgagttgaatggcgtgaaagcagcatgtgatgagctcggcatcaccttgattgcttattccccgatagcgcaaggtgttctgacaggtaagtacactccagaaaacccccctactggtcctcgagcaaacacatacacccctgagttcctcgccaagctccaaccacttatgaacaggattaaagagatcggagcaagctatggcaagagtccaacccaggtgtctctgaactggctgacctgccaggggaacgtggtgccaatccccggagccaagaatgccagccaggccaaggagttcgccggtgcactcggctggagcctgacgggggacgaggtggaagagctacggactctggcacgcgagatcaagggcatcaggatgcccatcgaggagtcgtagatactctgtatttcaccaacccatgtcgtagcaggcgctgacggagaagacgacgcaaggatctagaaataaaccaggttgtgtaagtagaatagcttccaacgaatctcaggcctaagcattgtaagtatgcaatattcatttgccgaaaccagggctgtacctctgctgcctgttctctgctgaaaaaaaagttaggatggaaagatagagactattgtgccgcaaaacaacacaaaggaaattactgaaaatgaaagaaaagttacaacctgtccatttgattcacat

SEQ ID NO: 208481 - DNA, 1163 bp, Zea Mays
ttttcttcttcttcttccaaattataattctgggtttaagttattgctgcagtttgattcagcattgaactgttcctaatttctctccatctaggttgcaatattgcaattagatttgttcccaagattgtctgatctcgattttcctgttgacctttccccagctacttatagttattcggacgaaaaatcagatcttggtttctgaccatcactacgttgttcgtggtcccgattgcactgcggagtttcattttgttcgatctgtatttgaattgggctgccaccgctcaccgtcaattgtgaaactcgtggccgtagattattattgcttgctgcgttggatgtttaggtacttactaatggaatagaggtaaagctgcagcggaatgctttaagtgtgattgaacctccgacaggcaacgaggatgatgataaatttgattgtgaaaacctgcggtggaatagttcagacttggtctccgatgatgcacaatcaccaaagccacaaaggtcaaggagcaggcagcataggggtttccacagaaaatcctttagccgttcaatgtcatgtgactcccaatctaagacgtctgtttcatcttcctcgagagctcacacgaaagttgacctgagcaagttagaactgactgcactgttgagatattggcgccacttcaatctcgatgcatgccctaatccatccagggagcagttagttgatgctgttcaaaggcacttcacggcccaggtcattgtcagctttgtgcaagctgcaaagaggctgaagacaactatgaaagtggcctgacagtgaagcatgaagttcaactaacagattcaagataggatgcagcatgtttgatgaatgttgccgtgctatgtaatatatatgcatgaagttctttagattcaggtggtaatggacaactagactatgttagcctcatctgatgtagatatgcagtatcctgtctaaagatgtttcaacctctagctcagttctttcctgctgactggatgtgaatcgaaatggcaagcttaaaacaagttctttttgtcatccttttcgaagtttcattatatttagcccatgcttttcccaaattgcatgcagaactaatcaggaatgcagaatatggtgcctaaaagtgccagagaat

SEQ ID NO: 208482 - DNA, 854 bp, Zea Mays
ctagattgcaatatcgccattaaatgtacttactaatggaatagaggtaaagctgcagcggaatgctttaagtgtgattgaacctccgacaggcaacgaggatgatgataaatttgattgtgaaaacctgcggtggaatagttcagacttggtctccgatgatgcacaatcaccaaagccacaaaggtcaaggagcaggcagcataggggtttccacagaaaatcctttagccgttcaatgtcatgtgactcccaatctaagacgtctgtttcatcttcctcgagagctcacacgaaagttgacctgagcaagttagaactgactgcactgttgagatattggcgccacttcaatctcgatgcatgccctaatccatccagggagcagttagttgatgctgttcaaaggcacttcacggcccagcaattggatgagttgcaggtcattgtcagctttgtgcaagctgcaaagaggctgaagacaactatgaaagtggcctgacagtgaagcatgaagttcaactaacagattcaagataggatgcagcatgtttgatgaatgttgccgtgctatgtaatatatatgcatgaagttctttagattcaggtggtaatggacaactagactatgttagcctcatctgatgtagatatgcagtatcctgtctaaagatgtttcaacctctagctcagttctttcctgctgactggatgtgaatcgaaatggcaagcttaaaacaagttctttttgtcatccttttcgaagtttcattatatttagcccatgcttttcccaaattgcatgcagaactaatcaggaatgcagaatatggtgcctaaaagtgccagagaat

SEQ ID NO: 208483 - DNA, 2265 bp, Zea Mays
aaacaatcatactcaggcccgcagcctcaactccaaggcgacctcagacctcaactcctcatcgccggaggaccaggccaacccatcagatgcgcggaggtgctcgtcgcggcacaccgcaacatcgagccgccactactaagctgctgcctgctggttgctagacgtgacggcgcgtgcactagagggcggggagaacccctagtcggttcctcaccgaccgccatgctccgttacagccgccggttcctcaccagaacacctcgccgccgccaacccaaaaccgccgggaaaacagagccatctcccacagccgcgccgacctatacccgtgacgtggtccgccgcgccactgccatcctccgcgaccagccctggtcggcggcgcgcccgctcctcctctccctccccggcctcgcctgggactcccacaccgtggcgcgcgtgctcaagacccacccgccgctccagaaggccttcctcttcttccgcctggcgaccaccgcctcgcgcaccttccgccacgaccgcttcacctacacctccatgatccacctcctcggggaggccggccgcgttccggccatgctccgcctccttgccgagatgctccgcgccgggatcgcgcccgacgccgccaccttcaccaccgtcatgcactggctcgcgcgggccggtgacgtcgacggcgccatgcgggtgtgggcggagatgaaagcgaggagcaggcctaccgtcgtcagctacaccgcgtgcattaagattctgttcgacgctcggaaggcagaggaggcgcggggggtgcttagagagatggtggctgaagggctgcgccccacctgcaagacctacacggtgctcatcgagcatctcgccgacacaggaaaatttgaagctactcttgagattatggacaagatgaaagaagcatgtgtacaaccagataaagcactctgcaatattttagtacagaaatgttccagggctggtgagacatcagttcttacttgcattcttcagtacatgaaggagcatttcattgtccttcgccgacctatttttttggaagcactacaagctctaaaagctagtggtgatagtgatgaacttcttcgggaagtaaaccctcacctttcatacgaaggcattgagaatgatccaatattgtctgatcaaggctatcttactgacaggagtattattctctaccttatgtctgcaaacaaatggtctgctatagaacaaatggttaatcaaatggccccaaagaatgtgaaaatggagacccatatcctgtctgatgttattgaggccagctgtgccgaccgtaaaccgtcttgtgggctcgcagttatgcgttatggtttaggagtaggctgtgaacttggtaggtctgcatattgttctcttcttggccagtacattagaactgattcatttgatttagtcttagagattgttgaggaattgattaaatctggttgcaatcttgggacatatgtatcatctgttttaatactcagattgggctatgctgggcagtctgcatgtgcagctcatatttttggattgttgactgcagacaagaatgtagtttcgtacacagcccttatcaatgcctattttcaagctggcaaagttgatggtgctcttgatctattcacacaaatgagaactaatagaatatctgcttgcttgggtacatatgaagtcctgatacatggcttagaaaaggctggcctgaaacaggaatcagattactaccgaagagaaagaatgaatatgcaatggcatcttcagtatcatggcccgcagtcacctgaagataccttatgtaaccatctgttttgtggcattcatgggtgatttttcaagatggattgatatacaatgttcttatcattagcacaattgttccagcttcatccttcctcagccttgaaggtaattgtggggaaacacccagtgtcctggaagcctggatcaacaaatagaggactaatagcttctcttatggtgatcgatttgtcttggtgctaactgcaacccaccttccaaaagcattcaactgcttgaggttgcaacaaaagctccacgtgatgaaggttggtgctactcagcagtctttccacaggctcaattaaacagttcccggctactattgcagaagggttttgccatgagactcagcttgcacaaagctgacaatgacctgcaactcatccaattgcttccgcatgggcaaaagcatatattggaattaac

SEQ ID NO: 208484 - DNA, 2276 bp, Zea Mays
aaacaatcatactcaggcccgcagcctcaactccaaggcgacctcagacctcaactcctcatcgccggaggaccaggccaacccatcagatgcgcggaggtgctcgtcgcggcacaccgcaacatcgagccgccactactaagctgctgcctgctggttgctagacgtgacggcgcgtgcactagagggcggggagaacccctagtcggttcctcaccgaccgccatgctccgttacagccgccggttcctcaccagaacacctcgccgccgccaacccaaaaccgccgggaaaacagagccatctcccacagccgcgccgacctatacccgtgacgtggtccgccgcgccactgccatcctccgcgaccagccctggtcggcggcgcgcccgctcctcctctccctccccggcctcgcctgggactcccacaccgtggcgcgcgtgctcaagacccacccgccgctccagaaggccttcctcttcttccgcctggcgaccaccgcctcgcgcaccttccgccacgaccgcttcacctacacctccatgatccacctcctcggggaggccggccgcgttccggccatgctccgcctccttgccgagatgctccgcgccgggatcgcgcccgacgccgccaccttcaccaccgtcatgcactggctcgcgcgggccggtgacgtcgacggcgccatgcgggtgtgggcggagatgaaagcgaggagcaggcctaccgtcgtcagctacaccgcgtgcattaagattctgttcgacgctcggaaggcagaggaggcgcggggggtgcttagagagatggtggctgaagggctgcgccccacctgcaagacctacacggtgctcatcgagcatctcgccgacacaggaaaatttgaagctactcttgagattatggacaagatgaaagaagcatgtgtacaaccagataaagcactctgcaatattttagtacagaaatgttccagggctggtgagacatcagttcttacttgcattcttcagtacatgaaggagcatttcattgtccttcgccgacctatttttttggaagcactacaagctctaaaagctagtggtgatagtgatgaacttcttcgggaagtaaaccctcacctttcatacgaaggcattgagaatgatccaatattgtctgatcaaggctatcttactgacaggagtattattctctaccttatgtctgcaaacaaatggtctgctatagaacaaatggttaatcaaatggccccaaagaatgtgaaaatggagacccatatcctgtctgatgttattgaggccagctgtgccgaccgtaaaccgtcttgtgggctcgcagttatgcgttatggtttaggagtaggctgtgaacttggtaggtctgcatattgttctcttcttggccagtacattagaactgattcatttgatttagtcttagagattgttgaggaattgattaaatctggttgcaatcttgggacatatgtatcatctgttttaatactcagattgggctatgctgggcagtctgcatgtgcagctcatatttttggattgttgactgcagacaagaatgtagtttcgtacacagcccttatcaatgcctattttcaagctggcaaagttgatggtgctcttgatctattcacacaaatgagaactaatagaatatctgcttgcttgggtacatatgaagtcctgatacatggcttagaaaaggctggcctgaaacaggaatcagattactaccgaagagaaagaatgaatatgcaatggcatcttcagtatcatggcccgcagtcacctgaagataccttatgtaaccatctgttttgtggcattcatgggtgatttttcaagatggattgatatacaatgttcttatcattagcacaattgttccagcttcatccttcctcagccttgaaggtaattgtggggaaacacccagtgtcctggaagcctggatcaacaaatagaggactaatagcttctcttatggtgatcgatttgtcttggtgctaactgcaacccaccttccaaaagcattcaactgcttgaggttgcaacaaaagctccacgtgatgaaggttggtgctactcagcagtctttccacaggctcaattaaacagttcccggctactattgcagaagggttttgccatgagactcagcctctttgcagcttgcacaaagctgacaatgacctgcaactcatccaattgcttccgcatgggcaaaagcatatattggaattaac

SEQ ID NO: 208485 - DNA, 4335 bp, Zea Mays
cctcaactccaaggcgacctcagacctcaactcctcatcgccggaggaccaggccaacccatcagatgcgcggaggtgctcgtcgcggcacaccgcaacatcgagccgccactactaagctgctgcctgctggttgctagacgtgacggcgcgtgcactagagggcggggagaacccctagtcggttcctcaccgaccgccatgctccgttacagccgccggttcctcaccagaacacctcgccgccgccaacccaaaaccgccgggaaaacagagccatctcccacagccgcgccgacctatacccgtgacgtggtccgccgcgccactgccatcctccgcgaccagccctggtcggcggcgcgcccgctcctcctctccctccccggcctcgcctgggactcccacaccgtggcgcgcgtgctcaagacccacccgccgctccagaaggccttcctcttcttccgcctggcgaccaccgcctcgcgcaccttccgccacgaccgcttcacctacacctccatgatccacctcctcggggaggccggccgcgttccggccatgctccgcctccttgccgagatgctccgcgccgggatcgcgcccgacgccgccaccttcaccaccgtcatgcactggctcgcgcgggccggtgacgtcgacggcgccatgcgggtgtgggcggagatgaaagcgaggagcaggcctaccgtcgtcagctacaccgcgtgcattaagattctgttcgacgctcggaaggcagaggaggcgcggggggtgcttagagagatggtggctgaagggctgcgccccacctgcaagacctacacggtgctcatcgagcatctcgccgacacaggaaaatttgaagctactcttgagattatggacaagatgaaagaagcatgtgtacaaccagataaagcactctgcaatattttagtacagaaatgttccagggctggtgagacatcagttcttacttgcattcttcagtacatgaaggagcatttcattgtccttcgccgacctatttttttggaagcactacaagctctaaaagctagtggtgatagtgatgaacttcttcgggaagtaaaccctcacctttcatacgaaggcattgagaatgatccaatattgtctgatcaaggctatcttactgacaggagtattattctctaccttatgtctgcaaacaaatggtctgctatagaacaaatggttaatcaaatggccccaaagaatgtgaaaatggagacccatatcctgtctgatgttattgaggccagctgtgccgaccgtaaaccgtcttgtgggctcgcagttatgcgttatggtttaggagtaggctgtgaacttggtaggtctgcatattgttctcttcttggccagtacattagaactgattcatttgatttagtcttagagattgttgaggaattgattaaatctggttgcaatcttgggacatatgtatcatctgttttaatactcagattgggctatgctgggcagtctgcatgtgcagctcatatttttggattgttgactgcagacaagaatgtagtttcgtacacagcccttatcaatgcctattttcaagctggcaaagttgatggtgctcttgatctattcacacaaatgagaactaatagaatatctgcttgcttgggtacatatgaagtcctgatacatggcttagaaaaggctggcctgaaacaggaatcagattactaccgaagagaaagaatgaatatgcaatggcatcttcagtatcatggcccgcagtcacctgaagataccttatgtaaccatctgttttgtggcattcatgggtgatttttcaagatggattgatatacaatgttcttatcattagcacaattgttccagcttcatccttcctcagccttgaaggtaacacatgcccctttatatttgatttgatatgaaatcagataaaaaacatggattcatttaatctaaatgtataattggagcttcatgctgcggaaaactatgaatagtgaaattaaggaatgatttggaattgaatgcaaaactacaataaattggaaatcctgatgttggcttagggcgtccccaacaattgtcgaagtcgctagctgactcggattctcactgacatggaggagagagagaaaacagaaaaataacctcgctggcgacttgttcatcgctggtctcactaaaaaaacaaggtgagagaagatcaggtagaatgtggaaagaaagtgaaccagactccagtggtgcctcttggctacaaatgctggcatgtgctcgctggaggagtagcagcggacgatgcgtgcgcatgggtggccaccaactgcacgggcgtcctaccatcgccctgccccaactacaaatccaaatttctatgaaatgcctatgggagtggagtgagcggcaaggccaagggtgcatgggtctggaagtgcggcggtgcaagaagagacaaggccagcacacctggtgtcctgatcgcaaggttattaaaacgataaaacgttggaacgctcatgggtgaaattttgacttttaaacgtttaaacttgtttaaacgtagttttaaacagcatatgaaaaataccaatatatcataatttcagacaataatatgaagttaaatactaaaacagagaggtcagtggcttaccaaaacttcacccatgagctggattgaaccccaaaagtaactaatagactggacccaaaaataactaatggtctaaaatgcataaaacactgcgttttacagtttagaacgccaaaacgctaaaacgtgatttcaacctctaattagagttttgacgtttaaacgtagtttaaacatcgtttaaacgtagttttaatcacactgcctgatcggtagcagcgatggggctggcagtagcgacgtagagcaaacccgctcgcccgtgcctgggttcacacaatgggagagagacggttagagagaaaggattttttttaaaaaaaatacttacatgtgggtgctacatggtgacatggagcttaaatagctaacagagggtgatttccattgaggacgcccttactgatcttgtgggagaaaatccatttaagagttaaagaactggctgtaagtctgcaagtccatgacactggaatttgacatctcaccatgcagtcatccacatcactcctggatctccaaggtttatctctttctgtttcccctaaggagataaggaaaaggcgaagatggaaatagaagaatgccaaaatgttaaccataggcaccgttatatatttgttattgctatttactttgatttatcaccacctctcatgcggcatgcgtgtgggggttatttctgattagtgacataagcgcttacatgtcaaagtcaaactgattaaatgtcagtgccacatcagtggaaaacatcctttgagtggaatcagaaggctaatttggccagtttcagtagttgagggctgttggatgtcagtattatacttcagtggcagtttgagggtgtaaaatgtgctttaccctagagtttaagacaaaattagaaaacatgtttttccagagagtgaaaataagatttcatcgactttcctttcctcaacattttcactttacgtttggaagaactgttgcttcggtttctagccagtatggtaaatatgataggatcgccttacctattatgagttctcctaagaccgtatccagcagtttacccatagtttaccaaaatcattgatttacaatgttctgcactgtagacttcactgttcatagagtgaatatgggtatgaggatgaataagctattgaagatagtctaagtgattagaaaacttctgttgattttgacctttagtggtctgtgcatccttcagttagttgtaaggttgtttcataatgtcacatggaactgcagttaatcaagataaatttgaaaaattataggaacttctagaaagtaccatttttgcaggtaattgtggggaaacacccagtgtcctggaagcctggatcaacaaatagaggactaatagcttctcttatggtgatcgatttgtcttggtgctaactgcaacccaccttccaaaagcattcaactgcttgaggttgcaacaaaagctccacgtgatgaaggttggtgctactcagcagtctttccacaggctcaattaaacagttcccggctactattgcagaagggttttgccatgagactcagcctctttgcagcttgcacaaagctgacaatgacctgcaactcatccaattgcttccgcatgggcaaaagcatatattggaattaac

SEQ ID NO: 208486 - DNA, 572 bp, Zea Mays
tgtgggatttttcaatggttattggggttaagcaggcagatgaattggagaacattcttgccaagaagttccttaggtttttgtcaatgagggcagaggcattccaagtgttgaggagaaaaccggttcagggctatgatatcagtttcctgataacaaactaccattgtgaggacatgcataagcacaagctcatagatttcatcgtgcaatttatggaggatattgacaaggagatcagcgagctgaagctgtcagtaaacactcgtggccggctagtggccactgaattcttgaagcagttcttatgactcggccatggccgtagtcagtgttgattatcatggcctgcaactaagctgccgttctgcaacagctttaagtttttttttatacgacagctcttgtaaatgccttgccaaagatgcattcgtggccctgggccacctgattaacagctgacaattgcagtatcaggacgcacatagcgctctgagattgttcatgtgatcaattcctgtgttttttaattattctttcatttgcaaggccttcattgtttttcaccgact

SEQ ID NO: 208487 - DNA, 2399 bp, Zea Mays
ttcccgccatcccccagcccaacacggtgccgcctccctcccgcaccccggccttctctgcctcccactcactcgacgcctccgccgccgccgccgccgggatgaagaaccccgacttcactgcagacaaagcgctcgccaaggacttcctgtccaacttcgtcggccctcacggcgaccccaagtacctgaacatcctgcaagatgtcgccaacaggaagatacgcgcggtccagatcgagctggacgacctgtttcatcacaaggacgtcgatgaggagttcctgcagcgtgtcactgagaacacgcggcgctacgtcggcatcttcgcggaggccatggacgagatcatgccggagcccactgaggcgtacaccgtcgacgaggaccgggacatcctgatgacgcagcgtgtggacgagggggtggacggcggcgcggacggcacggacccgctgcagagaatgccaccagatatcaaacggttctttgaggtttacatcaagacattctcaaaggcaactccactcaccattagacaagtaaaggcatccaacattgggcagcttgtgaaaatatctgggattgttactcgctgctcggatgtgaagcccttgatgcaggttgctgtttatacatgtgaagaatgtggctttgagatataccaggaagtgactgctagagtgtttatgcccctcattgaatgtccatctcaacgatgcaagctgaacaaagcaaaggggaatctaatccttcaattgcgtgcatcgaagtttttgaaatttcaggagcttcaagagttagcagagcatgtacccaagggccacattcctcgttctctgactgttcatctaagaggagagctgactagaaaggttgcacctggagatgtggttgagatgtcaggaatttttctccctatgccttactatgggtttagagcaatgcgtgcaggattagttgctgatacttacttggaagcaatgtctgtcacacatttcaagaaaaaatatgaggagtatgatctcaaaggtgatgaacaagaacaaattgacagattggctgaggacggtgatatctacagtaagttggcaaggtccttggcacctgaaatatttggccatgaagacgtcaaaaaagcactgctgttactacttgttggtgcaccccataggaagctcgcagatggcatgaagatcagaggcgacctgcatatatgcatgatgggagatcctggtgttgcaaagagtcaacttctgaagcatattatcaatgttgcaccaagaggagtgtacaccactggacgtgggagcagtggtgttggtcttaccgctgccgtccaaaaggatccagtaacaaatgagtttgtcctcgagggtggagcactggtactggcagatatgggcatttgtgctatagatgagtttgacaagatggaagagtcagaccggacagcaatccatgaggtaatggagcagcaaacagttagcattgccaaggctggcatcaccacctctctcaatgcgagaactgcaattctggctgctgcaaatccagcatggggaaggtacgacatgaggaggactccagcagaaaatataaatctacctccggcactcctgtcccgtttcgacctgctttggttgatcctggatcgcgcggacatggaaaccgatctcgaaatggcgaggcacattgttcatgttcatcaaaaccttgaatcgccggcgctggggttcacaccactcgagccatctgtgctcagggcatacatatctgcagctagaagagtgattccttccgttcctagagagctcgaggaatacattgcgactgcatattccagcatccgccaagaggaggcgaagtcgaacgcgccaacctcctacacaaccatcaggacgcttctgagcatactccgtatctctatcgccttggcaaggcttaggttctcagaaaccgtggcccagagcgacgtcgacgaagcactgcggctgatgcagatgtccaagtactcgttgtactcggacgaccgccagcggtctggcctcgatgcgatatctgacatatattccatcctgagagacgaggccgcgaggacgagcagcatggacgtgagatatgctcatgctcttaacttgatctccagaaagggatacagcgaggctcaattgaaggagtgcttggaggaatacgcttccctgaatgtgtggcagatccatccgagcacctttgacatccacttcatcgatgcctgatgctgaagccggcaccgatcaccaaacaaatttcatcatgagtttgtggcttcatgatttgtgacgggagggatgaacaccgtcgactgaagcctaacaggatctaaaagttttagcccagttcgggcttgttcctttttg

SEQ ID NO: 208488 - DNA, 877 bp, Zea Mays
aagagtcacaaagaagatgaagggaggcaaaaggttcaaccattgatatggcaatctgatttagactaaagggaacgaaggtccagcccagataactcctctgaggccaaaagagaatcccggcccgtgtccagaagacgcctcagccaccgcaaaatccccaaatccgcggcggagaggagagagccggagagaggggcgcagccagagagatcggagaaggggaagaagatggtgcgggtggcgacctacttcgcgatgaccttcggggcgttcctcttctggcagtccatggacagggtccacgtctggatcgcccttcaccaggacgagaagaaagaaaggatggaaagggagctggagataaagagaatgcaggcagagttactggcccaagctaaagagaatgaatcatgattgtcatttgtccaatggtttcaggcagttcctttatcgtatttcctctgctgtattttccatgcaatatcttgactgatgtatgctcatgctcagcacctccaataaagcgagacatgctatagcattgttgaatgcaagtgggtatgcagtttgcagtatgcttatgttgaattgatgtaacttagccgaactgaaagaggctgccccagcttgattggaacagaggaatttgctgctgtttttgttcttattacggaacaacacaagtcaactctaaaaaaaaattgtttatgagtctggttataaggtgttgttttgtactgagatttcattgttcacttgaagaaacctctgtcggaggagcagaatgcttggtgctgtttaagttggctcgtgttatattgctcatgttctaagtatacatatccaacatgtcagtcacttttctgttgtgcca

SEQ ID NO: 208489 - DNA, 240 bp, Zea Mays
gtatgtgtgggaagcggaggccgacgacagctcttacgttatcaaggaacaaacttatcctgagaaagtgctcacacgtggaacacagactactctttatttgagagatgatgacaagtatgagtttactgaccctgcaagaattgaaagcttagttaagaactgctcacaatttgtgtcattccccatatatacatggaaggagaaatcaagaacatttgggggtgttgtactgtttct

SEQ ID NO: 208490 - DNA, 554 bp, Zea Mays
gcaacgcacgggcactgacctaccaccttcctccgctcgccgtgcttctgcttcctccgccaccaccgccggcatggctgcgcgctgcccctacttcgccgtcgaggagtcctcccgcggcatccgctcgggggagtccccggccgcggcgctccgccggatcctcgcgacgcctggtgcgcaccaggcgccctgctgctacgacgcgctcggcgcgcgcctcgtcgagcgcgcggggtttccgatcgggttcatgggcggtttctgtgtttctgccgcgcgacttggcttgcctgatgttggcctcatttcctatggagaaatggtagatcaagggcgtctcatcaatgaagctgtttcaatcccagtgattggtgatggagacaatggttacggaaactctatgaatatcaagagaaccataaaaggatatatcaatgctggttttgctggaattatgcttgaggatcaggtggcaaagaagactgcaaagcgagctgtgagtgaggcaaagggtcgagcctatgatgatctttaccgaagactaagtacaa

SEQ ID NO: 208491 - DNA, 784 bp, Zea Mays
cacactttttctaagcctttgatggaatctttgaagaaagctatggctgatgcaaaaaagcccaggtccatacaagacttgctgaaggagcaggtggctaaactcagagaacaagcatccggtggaggcggagggaatgggaatcgccgtggaggcagtggtggttctggtggcccagatgatgagtccttcaaggaagcattggatgaagtagtccaagttatcttagccactgttgctttcatacttgtgtacatccacataatcagaggggaggagctttaccgtcttgccagggactacaccagatatctcgtcactggtaagagaactgcccgactgaagcgttccatgcaaaagtggcacaacttctccgaaagcttcatgcagaaggaaggctcagaagaggaccaatatgagaaacctacatggtggcaacagcctcagaaacttgtgcatcttatggaggagctttgcaggggaaattggcgtccccatgcccaggagtcgtagttgatggtgtaccatcacgcccctcttttttttttgacccattgcagaatgcaaaataggaacgtgggctggtgcagtggagtaaggtcgcctggaccagtgttttttgttgttgttctttatcggctatttgtctctggtttcttaaaagtatgtagagagtgagtgaattcgtggcatttttgcagttgatgggaccgtgttttgagactgtaacctgccaatcaaacgttggagatacctttgcatctggtcgatcaaaactcagctg

SEQ ID NO: 208492 - DNA, 1197 bp, Zea Mays
tttggatcggccgtcgacgtcggggcttcgcggcgactgtctctcggtggttgagggagttatcggcgacagggtgcgcgcgtcttctgggagcgcgttgcggccggagcaagctcgctagggaatcagatatgccacaggctgcgcgatggtgttgtgggtcttcggctacggctccctcatctggaacctcggcttcgacttcgacgacaaaatcctcggcttcatcaagggctacaaccgcacctttaatctcgcttgtattgaccacagaggcacaacagagcatccggcgaggacctgcacgcttgaaaccgacggcgaggcgacgacgaggccatatgcgtcagcatggtacaagcctacaaggagaaagtttatccaaaaaacaagttgaactgctgcagcatgagccagaagttggttatgaactaccatataaggttcccttccagagtctcccatgctatatcgtgaattttcccaagcaaagcacctgccaggcgccaatatgccaccggggtagccattaaaatacttaaaatcaactccaaggctcatcgaacgttatccagtgcttcaccgtgtttctgaactccctaaagcagatgttgtcatgttggtcagtttggtgttggtttaatttctacgggtgtcgtatatcagagtttgactagcaactaatggtgcctatacatgtatttatggagcttcttctggtcatatgtgtagtggatctctcctcctgttgttcccttcaatcatgtccaaggtcaagaaccattcaggtcataaacccctacgacaggggccacgagggctcatcttcgccactgcccctactcccaccttctgcatgtcctgctcggtgctgttccattccctagcgatgttctccggctaaagacgcttggagtttgtggtgtggtgacacttaatgaatcatacgagaggcttgttcccacatccctatacgaggataaaagaagtaggcgcaatgaggagtcgtgttcattcacaagctctaacagagaaagttggggcagatgttcatctttaggtgcagccagtgatgaattattctcaggcaataataatgataagcagatatgagcccttgggcctccagttcgggcaacaagcatatggcaaagagaactgtgatgatgtgtagaggcaaaggatccttcagagttc

SEQ ID NO: 208493 - DNA, 1442 bp, Zea Mays
gcccgcatctcgcaaccgtcccgcacgagcaaagagccctcgttcccctccccttccgctcgagttcgtcgccgtcgccctgccctcgtatctcctcccacgacaccggtgacaaccacaggccaccgtcctgatcctcatccgggtgatccccaggcaggcaggtcggcgaggagggcagcaagaccgagccgtgcgggggctcgggacgggaacgggacaggaccccaaaatctcagatccttcctgctcgcccgcccgtgcccgtcggcgcgtcgttcttgccgtccgcgccccacctccgccctctcctcctccaggggaatcagatatgccacaggctgcgcgatggtgttgtgggtcttcggctacggctccctcatctggaacctcggcttcgacttcgacgacaaaatcctcggcttcatcaagggctacaaccgcacctttaatctcgcttgtattgaccacagaggcacaacagagcatccggcgaggacctgcacgcttgaaaccgacggcgaggcgacgacgaggccatatgcgtcagcatggtacaagcctacaaggagaaagtttatccaaaaaacaagttgaactgctgcagcatgagccagaagttggttatgaactaccatataaggttcccttccagagtctcccatgctatatcgtgaattttcccaagcaaagcacctgccaggcgccaatatgccaccggggtagccattaaaatacttaaaatcaactccaaggctcatcgaacgttatccagtgcttcaccgtgtttctgaactccctaaagcagatgttgtcatgttggtcagtttggtgttggtttaatttctacgggtgtcgtatatcagagtcaatcaaaaagtttgactagcaactaatggtgcctatacatgtatttatggagcttcttctggtcatatgtgtagtggatctctcctcctgttgttcccttcaatcatgtccaaggtcaagaaccattcaggtcataaacccctacgacaggggccacgagggctcatcttcgccactgcccctactcccaccttctgcatgtcctgctcggtgctgttccattccctagcgatgttctccggctaaagacgcttggagtttgtggtgtggtgacacttaatgaatcatacgagaggcttgttcccacatccctatacgaggataaaagaagtaggcgcaatgaggagtcgtgttcattcacaagctctaacagagaaagttggggcagatgttcatctttaggtgcagccagtgatgaattattctcaggcaataataatgataagcagatatgagcccttgggcctccagttcgggcaacaagcatatggcaaagagagtgagggggcatgatattgttttccaattccaaactgtgatgatgtgtagaggcaaaggatccttcagagttc

SEQ ID NO: 208494 - DNA, 1326 bp, Zea Mays
gcccgcatctcgcaaccgtcccgcacgagcaaagagccctcgttcccctccccttccgctcgagttcgtcgccgtcgccctgccctcgtatctcctcccacgacaccggtgacaaccacaggccaccgtcctgatcctcatccgggtgatccccaggcaggcaggtcggcgaggagggcagcaagaccgagccgtgcgggggctcgggacgggaacgggacaggaccccaaaatctcagatccttcctgctcgcccgcccgtgcccgtcggcgcgtcgttcttgccgtccgcgccccacctccgccctctcctcctccaggggaatcagatatgccacaggctgcgcgatggtgttgtgggtcttcggctacggctccctcatctggaacctcggcttcgacttcgacgacaaaatcctcggcttcatcaagggctacaaccgcacctttaatctcgcttgtattgaccacagaggcacaacagagcatccggcgaggacctgcacgcttgaaaccgacggcgaggcgacgacgaggccatatgccatggtacaagcctacaaggagaaagtttatccaaaaaacaagttgaactgctgcagcatgagccagaagttggttatgaactaccatataaggttcccttccagagtctcccatgctatatcgtgaattttcccaagcaaagcacctgccaggcgccaatatgccaccggggtagccattaaaatacttaaaatcaactccaaggctcatcgaacgttatccagtgcttcaccgtgtttctgaactccctaaagcagatgttgtcatgttggtcagtttggtgttggtttaatttctacgggtgtcgtatatcagagcttcttctggtcatatgtgtagtggatctctcctcctggtcaagaaccattcaggtcataaacccctacgacaggggccacgagggctcatcttcgccactgcccctactcccaccttctgcatgtcctgctcggtgctgttccattccctagcgatgttctccggctaaagacgcttggagtttgtggtgtggtgacacttaatgaatcatacgagaggcttgttcccacatccctatacgaggataaaagaagtaggcgcaatgaggagtcgtgttcattcacaagctctaacagagaaagttggggcagatgttcatctttaggtgcagccagtgatgaattattctcaggcaataataatgataagcagatatgagcccttgggcctccagttcgggcaacaagcatatggcaaagagaactgtgatgatgtgtagaggcaaaggatccttcagagttc

SEQ ID NO: 208495 - DNA, 1515 bp, Zea Mays
gcccgcatctcgcaaccgtcccgcacgagcaaagagccctcgttcccctccccttccgctcgagttcgtcgccgtcgccctgccctcgtatctcctcccacgacaccggtgacaaccacaggccaccgtcctgatcctcatccgggtgatccccaggcaggcaggtcggcgaggagggcagcaagaccgagccgtgcgggggctcgggacgggaacgggacaggaccccaaaatctcagatccttcctgctcgcccgcccgtgcccgtcggcgcgtcgttcttgccgtccgcgccccacctccgccctctcctcctccaggggaatcagatatgccacaggctgcgcgatggtgttgtgggtcttcggctacggctccctcatctggaacctcggcttcgacttcgacgacaaaatcctcggcttcatcaagggctacaaccgcacctttaatctcgcttgtattgaccacagaggcacaacagagcatccggcgaggacctgcacgcttgaaaccgacggcgaggcgacgacgaggccatatgcgtcagcatggtacaagcctacaaggagaaagtttatccaaaaaacaagttgaactgctgcagcatgagccagaagttggttatgaactaccatataaggttcccttccagagtctcccatgctatatcgtgaattttcccaagcaaagcacctgccaggcgccaatatgccaccggggtagccattaaaatacttaaaatcaactccaaggctcatcgaacgttatccagtgcttcaccgtgtttctgaactccctaaagcagatgttgtcatgttggtcagtttggtgttggtttaatttctacgggtgtcgtatatcagagtcaatcaaaaagtttgactagcaactaatggtgcctatacatgtatttatggagcttcttctggtcatatgtgtagtggatctctcctcctgttgttcccttcaatcatgtccaaggtcaagaaccattcaggtcataaacccctacgacaggggccacgagggctcatcttcgccactgcccctactcccaccttctgcatgtcctgctcggtgctgttccattccctagcgatgttctccggctaaagacgcttggagtttgtggtgtggtgacacttaatgaatcatacgagaggcttgttcccacatccctatacgaggataaaagaagtaggcgcaatgaggagtcgtgttcattcacaagctctaacagagaaagttggggcagatgttcatctttaggtgcagccagtgatgaattattctcaggcaataataatgataagcagatatgagcccttgggcctccagttcgggcaacaagcatatggcaaagagagtgagggggcatgatattgttttccaattccaagatctaaggagcaaagactattaattatcataaacaagatttctaattggtgaaagctttttatatatagcagactgtgatgatgtgtagaggcaaaggatccttcagagttc

SEQ ID NO: 208496 - DNA, 1597 bp, Zea Mays
gcccgcatctcgcaaccgtcccgcacgagcaaagagccctcgttcccctccccttccgctcgagttcgtcgccgtcgccctgccctcgtatctcctcccacgacaccggtgacaaccacaggccaccgtcctgatcctcatccgggtgatccccaggcaggcaggtcggcgaggagggcagcaagaccgagccgtgcgggggctcgggacgggaacgggacaggaccccaaaatctcagatccttcctgctcgcccgcccgtgcccgtcggcgcgtcgttcttgccgtccgcgccccacctccgccctctcctcctccaggggaatcagatatgccacaggctgcgcgatggtgttgtgggtcttcggctacggctccctcatctggaacctcggcttcgacttcgacgacaaaatcctcggcttcatcaagggctacaaccgcacctttaatctcgcttgtattgaccacagaggcacaacagagcatccggcgaggacctgcacgcttgaaaccgacggcgaggcgacgacgaggccatatgcgtcagcatggtacaagcctacaaggagaaagtttatccaaaaaacaagttgaactgctgcagcatgagccagaagttggttatgaactaccatataaggttcccttccagagtctcccatgctatatcgtgaattttcccaagcaaagcacctgccaggcgccaatatgccaccggggtagccattaaaatacttaaaatcaactccaaggctcatcgaacgttatccagtgcttcaccgtgtttctgaactccctaaagcagatgttgtcatgttggtcagtttggtgttggtttaatttctacgggtgtcgtatatcagaggtaaacaatattagatgtttatttatttgtttggaggtatcagttttctatgaatgtacaactgtttgctttgtgctttatttagacttctaatttatatcgatatttatgacatgtgtttacctgttttgtaagtcaatcaaaaagtttgactagcaactaatggtgcctatacatgtatttatggagcttcttctggtcatatgtgtagtggatctctcctcctgttgttcccttcaatcatgtccaaggtcaagaaccattcaggtcataaacccctacgacaggggccacgagggctcatcttcgccactgcccctactcccaccttctgcatgtcctgctcggtgctgttccattccctagcgatgttctccggctaaagacgcttggagtttgtggtgtggtgacacttaatgaatcatacgagaggcttgttcccacatccctatacgaggataaaagaagtaggcgcaatgaggagtcgtgttcattcacaagctctaacagagaaagttggggcagatgttcatctttaggtgcagccagtgatgaattattctcaggcaataataatgataagcagatatgagcccttgggcctccagttcgggcaacaagcatatggcaaagagagtgagggggcatgatattgttttccaattccaagtactctatgtttgggtttgactgtgatgatgtgtagaggcaaaggatccttcagagttc

SEQ ID NO: 208497 - DNA, 1510 bp, Zea Mays
gcccgcatctcgcaaccgtcccgcacgagcaaagagccctcgttcccctccccttccgctcgagttcgtcgccgtcgccctgccctcgtatctcctcccacgacaccggtgacaaccacaggccaccgtcctgatcctcatccgggtgatccccaggcaggcaggtcggcgaggagggcagcaagaccgagccgtgcgggggctcgggacgggaacgggacaggaccccaaaatctcagatccttcctgctcgcccgcccgtgcccgtcggcgcgtcgttcttgccgtccgcgccccacctccgccctctcctcctccaggggaatcagatatgccacaggctgcgcgatggtgttgtgggtcttcggctacggctccctcatctggaacctcggcttcgacttcgacgacaaaatcctcggcttcatcaagggctacaaccgcacctttaatctcgcttgtattgaccacagaggcacaacagagcatccggcgaggacctgcacgcttgaaaccgacggcgaggcgacgacgaggccatatgccatggtacaagcctacaaggagaaagtttatccaaaaaacaagttgaactgctgcagcatgagccagaagttggttatgaactaccatataaggttcccttccagagtctcccatgctatatcgtgaattttcccaagcaaagcacctgccaggcgccaatatgccaccggggtagccattaaaatacttaaaatcaactccaaggctcatcgaacgttatccagtgcttcaccgtgtttctgaactccctaaagcagatgttgtcatgttggtcagtttggtgttggtttaatttctacgggtgtcgtatatcagagtcaatcaaaaagtttgactagcaactaatggtgcctatacatgtatttatggagcttcttctggtcatatgtgtagtggatctctcctcctgttgttcccttcaatcatgtccaaggtcaagaaccattcaggtcataaacccctacgacaggggccacgagggctcatcttcgccactgcccctactcccaccttctgcatgtcctgctcggtgctgttccattccctagcgatgttctccggctaaagacgcttggagtttgtggtgtggtgacacttaatgaatcatacgagaggcttgttcccacatccctatacgaggataaaagaagtaggcgcaatgaggagtcgtgttcattcacaagctctaacagagaaagttggggcagatgttcatctttaggtgcagccagtgatgaattattctcaggcaataataatgataagcagatatgagcccttgggcctccagttcgggcaacaagcatatggcaaagagagtgagggggcatgatattgttttccaattccaagatctaaggagcaaagactattaattatcataaacaagatttctaattggtgaaagctttttatatatagcagactgtgatgatgtgtagaggcaaaggatccttcagagttc

SEQ ID NO: 208498 - DNA, 1363 bp, Zea Mays
gcccgcatctcgcaaccgtcccgcacgagcaaagagccctcgttcccctccccttccgctcgagcaggcaggtcggcgaggagggcagcaagaccgagccgtgcgggggctcgggacgggaacgggacaggaccccaaaatctcagatccttcctgctcgcccgcccgtgcccgtcggcgcgtcgttcttgccgtccgcgccccacctccgccctctcctcctccaggggaatcagatatgccacaggctgcgcgatggtgttgtgggtcttcggctacggctccctcatctggaacctcggcttcgacttcgacgacaaaatcctcggcttcatcaagggctacaaccgcacctttaatctcgcttgtattgaccacagaggcacaacagagcatccggcgaggacctgcacgcttgaaaccgacggcgaggcgacgacgaggccatatgccatggtacaagcctacaaggagaaagtttatccaaaaaacaagttgaactgctgcagcatgagccagaagttggttatgaactaccatataaggttcccttccagagtctcccatgctatatcgtgaattttcccaagcaaagcacctgccaggcgccaatatgccaccggggtagccattaaaatacttaaaatcaactccaaggctcatcgaacgttatccagtgcttcaccgtgtttctgaactccctaaagcagatgttgtcatgttggtcagtttggtgttggtttaatttctacgggtgtcgtatatcagagcttcttctggtcatatgtgtagtggatctctcctcctgttgttcccttcaatcatgtccaaggtcaagaaccattcaggtcataaacccctacgacaggggccacgagggctcatcttcgccactgcccctactcccaccttctgcatgtcctgctcggtgctgttccattccctagcgatgttctccggctaaagacgcttggagtttgtggtgtggtgacacttaatgaatcatacgagaggcttgttcccacatccctatacgaggataaaagaagtaggcgcaatgaggagtcgtgttcattcacaagctctaacagagaaagttggggcagatgttcatctttaggtgcagccagtgatgaattattctcaggcaataataatgataagcagatatgagcccttgggcctccagttcgggcaacaagcatatggcaaagagagtgagggggcatgatattgttttccaattccaagatctaaggagcaaagactattaattatcataaacaagatttctaattggtgaaagctttttatatatagcagactgtgatgatgtgtagaggcaaaggatccttcagagttc

SEQ ID NO: 208499 - DNA, 1482 bp, Zea Mays
gcccgcatctcgcaaccgtcccgcacgagcaaagagccctcgttcccctccccttccgctcgagttcgtcgccgtcgccctgccctcgtatctcctcccacgacaccggtgacaaccacaggccaccgtcctgatcctcatccgggtgatccccaggcaggcaggtcggcgaggagggcagcaagaccgagccgtgcgggggctcgggacgggaacgggacaggaccccaaaatctcagatccttcctgctcgcccgcccgtgcccgtcggcgcgtcgttcttgccgtccgcgccccacctccgccctctcctcctccaggggaatcagatatgccacaggctgcgcgatggtgttgtgggtcttcggctacggctccctcatctggaacctcggcttcgacttcgacgacaaaatcctcggcttcatcaagggctacaaccgcacctttaatctcgcttgtattgaccacagaggcacaacagagcatccggcgaggacctgcacgcttgaaaccgacggcgaggcgacgacgaggccatatgcgtcagcatggtacaagcctacaaggagaaagtttatccaaaaaacaagttgaactgctgcagcatgagccagaagttggttatgaactaccatataaggttcccttccagagtctcccatgctatatcgtgaattttcccaagcaaagcacctgccaggcgccaatatgccaccggggtagccattaaaatacttaaaatcaactccaaggctcatcgaacgttatccagtgcttcaccgtgtttctgaactccctaaagcagatgttgtcatgttggtcagtttggtgttggtttaatttctacgggtgtcgtatatcagagtcaatcaaaaagtttgactagcaactaatggtgcctatacatgtatttatggagcttcttctggtcatatgtgtagtggatctctcctcctgttgttcccttcaatcatgtccaaggtcaagaaccattcaggtcataaacccctacgacaggggccacgagggctcatcttcgccactgcccctactcccaccttctgcatgtcctgctcggtgctgttccattccctagcgatgttctccggctaaagacgcttggagtttgtggtgtggtgacacttaatgaatcatacgagaggcttgttcccacatccctatacgaggataaaagaagtaggcgcaatgaggagtcgtgttcattcacaagctctaacagagaaagttggggcagatgttcatctttaggtgcagccagtgatgaattattctcaggcaataataatgataagcagatatgagcccttgggcctccagttcgggcaacaagcatatggcaaagagagatctaaggagcaaagactattaattatcataaacaagatttctaattggtgaaagctttttatatatagcagactgtgatgatgtgtagaggcaaaggatccttcagagttc

SEQ ID NO: 208500 - DNA, 4007 bp, Zea Mays
gaaaccgagtgagagcgggggcgtattatgtaggagtaattgaaggggaaggaaggtgtgaagcggaagcagcagcagaagcactgcgcggcattgcagcgatcgagcgggaggaatttggggcatggtggtcgccaacgccgctcggatctagaggcccgcacgggccgattggtctccgcccgcctcgtcggtgttggtgtcgttggcgtgtggagccgtctcggtgggagcagcggggagggagcggagatggcggccaacaaggggatggtggcgggctcgcacaaccgcaacgagttcgtcatgatccgccacgacggcgatgcgccgggctcggctaagcccacaaagagtgcgaatgggcaggtctgccagatttgtggtgactctgtgggtgtttcagccactggtgatgtctttgttgcctgcaatgagtgtgccttccctgtctgccgcccatgctatgagtatgagcgcaaggaggggaaccaatgctgcccccagtgcaagactagatacaagagacagaaaggtagccctcgagttcatggtgatgaggatgaggaagatgttgatgacctagacaatgaattcaactacaagcaaggcaatgggaaaggcccagagtggcaactgcaaggagatgatgctgatctgtcttcatctgctcgccatgagccacatcatcggattccacgcctgacaagcggtcaacagattcctgatgcttcccctgaccgtcattctatccgcagtccaacatcgagctatgttgatccaagcgtcccagttcctgtgaggattgtggacccctcgaaggacttgaattcctatgggcttaatagtgttgactggaaggaaagagttgagagctggagggttaaacaggacaaaaatatgatgcaagtgactaataaatatccagaggctagaggaggagacatggaggggactggctcaaatggagaagatatgcaaatgttgatgatgcacggctacctttgagccgtatcgtgccaatttcctcaaaccagctcaacctttaccgggtagtgatcattctccgtcttatcatcctgtgcttcttcttccagtatcgtgtcagtcatccagtgcgtaatgcttatggattatggctagtatctgttatctgcgaggtctggtttgccttgtcttggcttctagatcagttcccaaaatggtatccaatcaaccgtgagacatatcttgacaggcttgcattgaggtatgatagagagggagagccatcacagctggctcccattgatgtcttcgtcagtacagtggatccattgaaggaacctccactgatcacagccaacactgttttgtccattctttctgtggattaccctgttgacaaagtgtcatgctatgtttctgatgatggttcagctatgctgacttttgagtctctctcagaaaccgcagaatttgctagaaagtgggttcccttttgtaagaagcacaatattgaaccaagagctccagaattttactttgctcaaaaaatagattacctgaaggacaaaattcaaccttcatttgttaaggaaagacgcgcaatgaagagggagtatgaagaattcaaagtaagaatcaatgcccttgttgccaaagcacagaaagtgcctgaagaggggtggaccatggctgatggaactgcatggcctgggaataatcctagggaccatcctggcatgattcaggttttcttggggcacagtggtgggctcgacactgatggaaatgagttaccacgtcttgtctatgtctctcgtgaaaagagaccaggctttcagcatcacaagaaggctggtgcaatgaatgcgctgattcgtgtatctgctgtgctgacaaatggtgcctatcttctcaatgtggattgcgaccattacttcaatagcagcaaagctcttagagaagcaatgtgcttcatgatggatccggctctaggaaggaaaacttgttatgtacaatttccacagagatttgatggcattgacttgcacgatcgatatgctaatcggaacatagttttctttgatatcaacatgaaaggtctggatggcattcagggtccagtttacgtgggaacaggatgctgtttcaatagacaggctttgtatggatacgatcctgttttgactgaagctgatctggagccaaacattgttattaagagctgctgtggtagaaggaagaaaaagaacaagagttatatggatagtcaaagccgtattatgaagagaacagaatcttcagctcccatcttcaatatggaagacatcgaagagggtattgaaggttatgaggatgaaaggtcagtgcttatgtcccagaggaaattggagaaacgctttggtcagtctcctattttcattgcatccacctttatgacacaaggtggcataccaccttcaacaaacccagcttctctactaaaggaagctatccatgtcatcagttgtggatatgaggacaaaactgaatggggaaaagagattggctggatctatggttcagtaacggaggatattctgactgggtttaaaatgcatgcaaggggctggcaatcaatctactgcatgccaccacgaccttgtttcaagggttctgcaccaatcaatctttccgatcgtcttaatcaggtgctccgttgggctcttgggtcagtggaaattctgcttagtagacattgtcctatctggtatggttacaatggacgattgaagcttttggagaggctggcttacatcaacactattgtatatccaatcacatccattccgcttattgcctattgtgtgcttcccgctatctgcctccttaccaataaatttatcattcctgagattagcaattatgctgggatgttcttcattcttcttttcgcctccatttttgccactggtatattggagcttagatggagtggtgttggcattgaagattggtggagaaatgagcagttttgggttattggtggcacctctgcccatctcttcgcagtgttccagggtctgctgaaagtgttggctgggattgataccaacttcacagttacctcaaaggcatctgatgaggatggcgactttgctgagctatatgtgttcaagtggaccagtttgctcattcctccgaccactgttcttgtcattaacctggtcggaatggtggctggaatttcttatgccattaacagtggctaccaatcctggggtccgctctttggaaagctgttcttctcgatctgggtgatcctccatctctaccccttcctcaagggtctcatgggaaggcagaaccgcacaccaacaatcgtcattgtctggtccatccttcttgcatctatcttctccttgctgtgggtgaagatcgatcctttcatctccccgacacagaaagctgctgccttggggcaatgtggcgtcaactgctgatcgagacagtgactcttatttgaagaggctcaatcaagatctgccccctcgtgtaaatacctgtcacctgaggaggctagatgggaattccttttgttgtaggtgaggatggatttgcatctaagttatgcctctgttcattagcttcttccgtgccggtgctgcagcggactaagaatcacggagcctttctaccttgcatgtagcgctagccagcagcgtaagatgtgaattttgaagttttgttatgcgtgcagtttattgttttagagtaaattatcatttgtttgtgggaactgttcacacgagcttatattggcaatgctgttatttatacacaaagactacattctttggaatgtgtgcagacagtcagaacactgtaatctattagcacaactatataaggcagctgttgtatcatctctattgtttctgatgggccctggggatatgtaattgcgaatgactagcaacattatattgttggctgattatcagctgttacatgtaattcctgaaaagcatggaggattggag

SEQ ID NO: 208501 - DNA, 1869 bp, Zea Mays
ttcatattcaactgatatgggatgaggttggcgaaagtgatgaagatcgtgacaagatgttacttcagctagagcaagagtgcttagatgtttataggagaaaggttgatcaggcttctagctccaggtcatgtctcctccaacagctttccaactccaaatcggaactgactagactcctttctgcattaggagagtcatctatttctggtgctcctgacaagacatctggtacaatcaaggagcaactagcagctatatcaccatctttagagacactccgcaggaaaaaagagagtagggtgaaagagtttgctcatgtacaacttcagattcagatacttcgtgatgaaattgctggggatctacatattggtgaacagttggaaacaccccatgttaatgcggatgatctttcagtgaggagattaaatgaatatctttctgaactacaagccctgcaaaaggaaaagagtactaggctctcaaggattcttgaatccgtgagttcagtgcacgatctctgttctgtacttggcatggattttgtgggcactgttactaaagttcatccaagtcttgatgactctgttggtgtccaatccaagagcattagtggcgaaacaatatccaagctgtctaaaatggtgattgtacttgaagaagaaaaatcgaagaggtttgcaaagcaaccttttcgtcacgtaacatgcataatgtcctcaacattggatgatgtgatagttccaggagctctggctcttgatgtaattcagcaggcggaactcgaagttgaaaggcttgatcagctaaaagctagtaggatgaaggatattgcattcaagaaacagactgaacttgaagatatatatgcccgggctcatgttgcagtagattctagtgctgcaagagataggataatgtctattattgagtccagtagtttcgagccttcagaactactggctgatatggagaaccagatacttaaagcaaatgaggagtccttaagcagaaaggacatattggagagggttgataggtggatgtcagcatgtgaagaagaaagctggcttgaagactacagccgggacgataacaggtacagtgcaactcggggtgcacatctgaatctgaagcgtgcagaaaaggcccgtgttttggtcaataaaattccggctattgttgacacactgcttgcaaagacccgggcatgggaacaagagcatggcgtggccttcacctacgacggcgtccctcttcttgcgatgctggacgaatacaaaatcctgaggcaggagaaggaagacgagaagcgacgaatgagggaccagaaaaagatgaacgaacagctagccgccgaacaggagaagctgttcgggtcaaaaccgagccccgcgcggccgcagtcgtcctcgaggaaggtggctggcgcacggaccaacggcggtggcacgccagctcgcaggctgtcggccctccagagcggcggcaggaccgctagccgggatgggaggagggatgcgagcaggcccgtggcccccgtgaactacgtcgccatcgccaaggaggacgtggcctcgcaggcgtccagcaaccacactgggccgtccaccccctgaccggccgtgccagcagtaactgaactgttgtggcggtgcttagatatatatataccagtgcagtgcagtagtcagagctgattgtagatcggataatggaaaaaaacaaacgaagctggatatggtatcacacattatcagttgtcactggttgttcgtctggtcgtcctatctagcgaactcgtcctcgtgtagccgtgacaatttgctcgtcgctgagttggagacagggaatgtcaagttagag

SEQ ID NO: 208502 - DNA, 3618 bp, Zea Mays
gctcgcggagccggtagcaccccagacgcggccaaccgctagctaggccggtgccgccatggctgcgtcctcctgctgccaggcccgctggctgctccccctgctgctgcttgctgctgccgcgggtgctcttggtgcagagggcgcctcctccattgtgcagctggacgtggagtccctgctcccgtccgcagccgctccttgccccacccctcaagcagagcaaaaacaaggtgccgcgccgcccacaaggatgcccgtcgtgcaccagcacggcccgtgctcgccgctggccgacaacaggaacgggaaggcgccgtcccacgcggagatcctcgccgcggaccagcgccgcgccgagtacatccaccgccgcgtggccgagaccaccgggcgggcgagacgacggaagcagggcgcaccggtcgagctccggcccggcacgccgccgtcgtcgatcgtcgtcccctcgtcgtcctccgccacgtcgacgacggacctgccggcgtcgtacggggtcgcgctgggcacgggaaactacgtggtgcccgtccgcctcggcacgccggcggagcggttcacggtggtgttcgacaccggcagcgacacgacgtgggtgcagtgccagccgtgcgtggcctactgctaccggcagaaggagcctctcttcgaccccaccaagtccgccacctacgccaacatctcctgctcctcgtcctactgctccgacctctacgtcagcggctgctccggcggccactgcctgtacggcatccagtacggcgacggctcctacaccatcggcttctacgcccaagacaccctcaccctggcctacgacaccatcaagaatttccggttcgggtgcggcgagaagaaccgtgggctgttcgggagggcggcggggctgctgggcctcggccgcggcaagacgtcgctgccggtgcaggcgtacgacaagtacggcggcgtgttcgcgtactgcctcccggcgacgtcggccgggacggggttcctggacctggggccgggcgcgccggcggcgaacgcgcgcctgacgccgatgctggtggacaggggcccgacgttctactacgtggggatgacgggcatcaaggtgggcgggcacgtgctgcccatcccgggctccgtcttctccaccgccggcacgctggtggactccggcacggtgatcacgcggctcccgccgtcggcgtacgcgccgctgcggtcggcgttctccaaggcgatgcagggcctggggtacagcgcggccccggcgttctcgatcctcgacacctgctacgacctgacggggcacaagggggggagcatcgcgctgcccgcggtgtcgctggtgttccagggcggcgcgtgcctggacgtggacgcgtcggggatcctgtacgtggcggacgtgtcgcaggcgtgcctggcgttcgcgcccaacgctgacgacaccgacgtggccatcgtcgggaacacgcagcagaagacgcacggcgtactgtacgacattggcaagaagatcgtcgggttcgccccgggagcttgctgatccggccatggtttgtgaaaaactccagatcatctgcatccaccaaagtggctgctgagtgaaaatgggagtggcaggtcacaacgatccattgttaggtgaaacgacatgtgggtctttgctgcagcaacttcagctgatatgggatgaggttggcgaaagtgatgaagatcgtgacaagatgttacttcagctagagcaagagtgcttagatgtttataggagaaaggttgatcaggcttctagctccaggtcatgtctcctccaacagctttccaactccaaatcggaactgactagactcctttctgcattaggagagtcatctatttctggtgctcctgacaagacatctggtacaatcaaggagcaactagcagctatatcaccatctttagagacactccgcaggaaaaaagagagtagggtgaaagagtttgctcatgtacaacttcagattcagatacttcgtgatgaaattgctggggatctacatattggtgaacagttggaaacaccccatgttaatgcggatgatctttcagtgaggagattaaatgaatatctttctgaactacaagccctgcaaaaggaaaagagtactaggctctcaaggattcttgaatccgtgagttcagtgcacgatctctgttctgtacttggcatggattttgtgggcactgttactaaagttcatccaagtcttgatgactctgttggtgtccaatccaagagcattagtggcgaaacaatatccaagctgtctaaaatggtgattgtacttgaagaagaaaaatcgaagaggtttgcaaagattcaagctctagcttcccagctatctgatctttggaacttaatggattctcctgtggaggaacagcaaccttttcgtcacgtaacatgcataatgtcctcaacattggatgatgtgatagttccaggagctctggctcttgatgtaattcagcaggcggaactcgaagttgaaaggcttgatcagctaaaagctagtaggatgaaggatattgcattcaagaaacagactgaacttgaagatatatatgcccgggctcatgttgcagtagattctagtgctgcaagagataggataatgtctattattgagtccagtagtttcgagccttcagaactactggctgatatggagaaccagatacttaaagcaaatgaggagtccttaagcagaaaggacatattggagagggttgataggtggatgtcagcatgtgaagaagaaagctggcttgaagactacagccgggacgataacaggtacagtgcaactcggggtgcacatctgaatctgaagcgtgcagaaaaggcccgtgttttggtcaataaaattccggctattgttgacacactgcttgcaaagacccgggcatgggaacaagagcatggcgtggccttcacctacgacggcgtccctcttcttgcgatgctggacgaatacaaaatcctgaggcaggagaaggaagacgagaagcgacgaatgagggaccagaaaaagatgaacgaacagctagccgccgaacaggagaagctgttcgggtcaaaaccgagccccgcgcggccgcagtcgtcctcgaggaaggtggctggcgcacggaccaacggcggtggcacgccagctcgcaggctgtcggccctccagagcggcggcaggaccgctagccgggatgggaggagggatgcgagcaggcccgtggcccccgtgaactacgtcgccatcgccaaggaggacgtggcctcgcaggcgtccagcaaccacactgggccgtccaccccctgaccggccgtgccagcagtaactgaactgttgtggcggtgcttagatatatatataccagtgcagtgcagtagtcagagctgattgtagatcggataatggaaaaaaacaaacgaagctggatatggtatcacacattatcagttgtcactggttgttcgtctggtcgtcctatctagcgaactcgtcctcgtgtagccgtgacaatttgctcgtcgctgagttggagacagggaatgtcaagttagag

SEQ ID NO: 208503 - DNA, 2023 bp, Zea Mays
gatgaaatttaacgttatagatactcacctagaaacgaaaaccaattcagtttttattttggtttaaaatttgaaaagtaaaagtcaaaatttggtctttttcaaaattatcgagctgaacctcgacctcctatggtgaaaaaaaaaaacagatcatcatcacaatcgacgattgcatttcacacgcgaaatttccccttttccaacgccacagcaaacagcatccacagcggagagcgtctctttctccttcccctccctctttccacgacaccaaaagaaaccgaaaaccatcgacgcgctccgtccaccctcccctaccccgcgtcctcctcccctacgcctcccagcccagcggcaaaacctaaccctagatgggcgccgtcacctctacggtcgcggcgcgctttgcctttttcccgccgagcccgccgtcgtacgggttcgagcagccggcgccgcttccggcccctgccacacccgagcctccggccccggccacatccaagccgccgcctccggccccggccacacccaagccgccgccagcgggggaggagaagggcggtggcgcggtggtggagctcacgggcgtcccgcggagggttaacgtggaggcgcggcggctgcggacgaagcggggcacggaggtggtcgcgatgcacgtgcgccaggcgggggccaagctcacgctgctctactcccacggcaacgccgccgacctcggccagatgtacgagctcttcgtcgagctcagcgcccacctcaacgtcaacctcatggggtatgactattctggttatgggcaatctactgggaagcctagtgaacaaaacacttattctgacatagaagctgtatacagatgcctcatagaaacctatggagcttctgaggataatatcattctttatggacaatcagtgggcagtggtcctactttggatttagcatcccgattaactcgtttaagagcagttgttctacatagcccaattttgtctggcttaagagtgatgtatcctgtaaaacatacatactggtttgacatatacaagaacatcgacaaaattccattagtcaggtgtcctgtgttagtgatacatcagatgaggttgttgactgttcccatgggcggtcactgtgggaacttgctgaagtgaagtacgagccgctgtggatcaaaggcggaaaccactgcaacctagaactgtacccggaatacatcaaacatctgaagaagttcgttggagccatagagaaatcgccacccccacctccgatcgacgagtgcatggagagctcaggcccgtcggattgtaccccagcagaacccgagtgtacagcggactcaaggaagagcacggactgcagggacaaagcaaggccaagcatagatcagagacaaagcacggaccggcgggacaagccgaggggcagtacggataggagggacaagacgaggaagagcgtggaccatcccgagaagccgcgggctagcgtcgatcaaccggatcggccgaggaaaagcatcgaccggtaccgtttacccctactaacctggcacatgttttccgatcatcattaggatgcttttatgtattattgcccacgatcaacatgctaatgctttgttgatctctgtgatgaatggtggtggtggtggtggtgtgtgtgtgtgtgtgcataacaaacaggtttggaggcatgatgaagtcggtgaggctgtgcaatatcgactgcttcaaagtgacagcaacctctgggagctgaagagaaggaacggatggatagtagcaggaaaggttagtgttgggtgccgtctgtatgtattcttcccttcgtgtaacttattcaattgggtgattggtttggccgcagtagaaggcgtgtttttgttttctttttcttcgctccttcctcatacaattacaatggtgttgtttccgttgggctgttctttttaacatgagatgaaataataatcttgttgataaacaatacaatgcttgcgaacttccat

SEQ ID NO: 208504 - DNA, 2549 bp, Zea Mays
ctcaaagcctcgatatatacgctcgagacagcgcgcgcctctctccttattgctcaccccaaagcaaagcaatcacgagcaatgggcgagataggcacggaccaccgcggcctagccgaggccgaggccggcgtcggcggcaaggaggagggcatcgtcctcggcggccacgaggaggaggaggagacttcgccggtggagcaggtgcggctgacggtgccgtcgacggacgacccgtcgctgccggtgtggacgttccggatgtggagcatcgggctgctgtcgtggcgtcgctgccgctgggccacttcatggcccgcgcgctgccgcgcgccaggttccgggcgcccgcgctgctgggcggcggggagtggagcctcaacccggggcccttcaacgtcaaggagcacgtgctcatctccatcttcgccaacgccggcttcgcgttcggcaacggcagcgcctacgccgtcgccatcatcgacatcatccgcgccttctaccaccgccacatctccttcttcaccgcctggctcctcgtcgtcaccacgcaggtgctcgggtacgggtgggcagggctgctgcgcaagtacgtggtgcagccggcgcacatgtggtggccgggcacgctcgtccaggtctccctcttccgggcattgcacgagaaggacgaatccgccaaagcctcgcgccagatctctcgctccaagttcttcctggtggtgctggcgtgcagcttcgcctggtacgccgtgccgggctacctcttcccgacgctgacgtccatctcgtgggtgtgctgggtcttctccaggtccgtgacggcgcagcagctggggtcgggcatgagcggcctcggcctcggcgccttcacgctcgactggtccaccgtctcctccttcctcttcagccccctcatctcgcccttcttcgctaccgccaacatcttctttggctacgtgttcttcgtctacgtcatcatgcctgcagcgtactgggggtttgacttgtacagcgccaagacgttccccatcttttcctcgcacctgttcatgtcgaacggcagcagctacgacgtccaatcgatcgtgaacaaccggtttgagcttgacctggacgcttatggtaagaacggcaaagtcagcctcagcgtgttctttgcactcagttacggcttcagcttcgccaccattgccgccaccatcactcatgtcgggctcttctatggaaaggaaatctactaccgtttcagatcgtcgcagaaggagaagcctgacatccacacgaagctgatggagaggtacagcgaaatcccagcatggtggttctactcgttgatggcgctatcaattgtagtgtcccttctcctctgtaccgtgctgaagcgtgaggtacagctcccatggtggggcctcatcttcgcatgtggcatggcattcgtcttcacacttcccatcagcatcatcactgcgacgaccaaccagacgccaggtctgaatgtgatcactgagtatgctatgggtctaattatgccgggctctcctatcgccgtcgtctgcttcaaagtctatggctacatgagcatggcacaggctgttgccttcctctcggacttcaaacttggccactacatgaagatccctcccaagtccatgttccttgtccagtttgtcggtaccattgtggctggcacggtgaacatcgggacggcatggtggctgctgggctccatcgacggcatctgctccgactcactcccaccagacagcccctggacatgtcctaacgaccgcgtcttcttcgacgcgtcagtcatctggggcctcgtgggtccacggcgcatcttcgggccagacgggaactacggcgccctcaactggttcttcctcatcggcgcggcgggcccggtcatcgtgtacgccctccacaggacgtttcccggccagaggtggataccgctgatcaacctcccggtgctcttcggcgcgacggcctacatgcccccggcgacggctgtcaactacaactcgtggctgctcgtcggcaccgtcttcaacttcttcgtcttccggtaccggaagaagtggtggacgcggtacaactacatcctctccgccgctctcgacgccggcgtcgcgttcatgggggtggtgctgtacttctcgttgaccatgcagaacaagagcatcgactggtggggcaccgcaggagagcactgccctctcgccaggtgccccaccgcgaaaggggtggacttgggtgacggcgtctgcccagtgttctgatcgagcttggagtttgatgtcttcacttcaggtacatcgacaggttaagcagtgatcggtttgcagttatgctgccattagatttgtggtgtatatgtggagggtaatgcgacacttctcttatgtgtaaaaaaggtcatattctcatgtatttatcagctgcagaaaacaatgggaataggttgatccttttgggcaatgcaaagcagcaggctagtccctcctgaaatgctacaaatttctcgtcctatgataataccatcc

SEQ ID NO: 208505 - DNA, 1924 bp, Zea Mays
gtagcagtagcaagtagcagcatactctcctacgcgaatcgattaacgggcggcactcacccaccgtgtggcctgccaaactgtcccctaggccccggccccgcccgcgcctggccagtggccatccatcccttcccttcgcttcgacgcaccaatcttgtcccggcgcctgccaaatccagcaaggccacacagcccgaggcaggaagggcagcgcaggaacagggagcgagcagcgcacgggcaatggcggcttcttccgggacgcgctccgtgcgcctgctggtgctgctgctctgccttctcgggttctgcgtcgcgctgagccaccaggagtcggcggcggactcgtgcgccagggccaaggtcgcggtcgccagcctcgtgcccttcgactccacgtccttccgctgcaccgccgcctggaagcagcaggacttcgtcctcaggtacaagaacacggggcccagcgagtggagcttcatcctctcggcgccggacaggggctcgtacgtggcggtcggcttctcgggcaagggcgccatggtggggagcagcgccgtcgtcgggtgggcggccaacggcaggggcaccgtcaagcagtactacctcggcgggaagagccccgaggagtgcgcccccaacaggggcctcctcaagctcgtcaggaacaggaccgccgtcgcctcgcgctccggccgcctctacctcgccttccagctcagcaccgactacccgcagccgtacctgatctacgccgtcgggccggacggcagcctgccgcagtccgactcgctgcggctgccggcgcaccagaacatggcctcccgctccttcaactacacctccgggctgtcgtacaacgtcgccgggtccggcgacgccgcgttcccgccggagaggaagcacgggctgctgggcatgatggggtggggcgtgctgatgcccatcggcatgatcaccgcgcgctacttccggcagctggacccgtgctggttctacacccacatggccatccaggtggctggctacgccgtcggcatcgcgggcatcgtcctcggcttccgcctcagcgaggacgggctcaggaacgtggacgtgcacaaggcgctcggcatcgccatcttggccatggcgtctcttcaggtgatggcgatcctggcgcggccggacaagacgtccaaggtgcggcggttctggaactggtaccaccacaacatcgggcgcgcggcgatcctgctggccatcggcaacatcttcctgggcctctccatcgcgcaggagaccagcgcctacatcgtctcctacggcgtgttcgtcgccgtctgggtgctcgccgtcgccgccttcgagatgaagcgctgctacgccgacgacgactgatgagctagcgacacgtaagagtcacagttcggtcccaacagctgacggcgaagtttggtgtcgttaaactgagcgttccacggccagctgggacgtgacagacacacgagcgccgagcgcgcgcgcgcgcacacacacaccattcttgttgttccgtagctcgcagctggacagtgcattattggttcgaggagggcgtgctttggttggctaattaaaaaaaaaatgtttttttttttaggtataggatgtgaggaaggggacggtctgctgtttctaggctagctggacgctctgattcataaatttgtacattgattgcaccaaccaggatgctgtggtgtggtgcgtaccagcaccgaccacagatggaagtatcaaacccggattcgccgctgggggcgcccggcgcggcgacattccataccgtgatgcggcggtcggacgcacgcccaagtgttgtgttgtgtctcaacgaaggcaggcgaagttggatgcggggaagggaaccagtgcggtccgcggaatttcgctgtcgtcc

SEQ ID NO: 208506 - DNA, 1295 bp, Zea Mays
gagaccacgtcgccttcgacccttctccgtcctcccggaacgcccgtcccgtccgtcctccccccatccacatccatcccgtgtgcttctactgctcctcgatttgatcaccgattaggggaggcggtttaccagtgagcacgcgcgagagataggataggaggaaagggaagctagcggcttcgctctcgcggggagatggcgcaggcggtggaggagtggtaccggcagatgcccatcatcacgcgctcctacctcaccgccgctgtcgtcaccaccgtcggctgcaccctcgaaatcatttcgccgtatcacctgtaccttaacccgaagctcgtggtgcagcactacgagatttggcgcctcgtcactaacttcctctacttccgcaagatggatttggattttctattccacatgttctttcttgcacggtactgcaagcttctggaggaaaactcatttagaggaagaactgctgactttttttacatgctcttgtttggtgctactgtcctaactggcattgttctgatcggagggatgataccttacatttctgagacatttgccagaattctgttcttgagcaattcattgacatttatgatggtttatgtctggagcaagcacaacccttttatccatatgagctttctgggcctgtttacctttacggctgcgtacttaccatgggttcttttgggcttctctatcctcgttggaagcagcacatgggtggacctcttgggtatgattgctggacatgtgtactacttcctggaagatgtatacccacgtatgactgggcgtcgccccctaaagacaccgtccttcattaaggcgctatttgctgatgacaatgttgtggtggcacagccacccaatgctgggattggtgctggtgcaaggttcggtgctattggtgtagatccccaggctcaatgatgaattactttcagtgacctgagggccgaggctgtgactgatctgggatgcggcagtttgtattctctgcgcaaattgcggaactgtacaagccattgttcttgtgtatttatacaggctagatgagagttattgtgcataacaaaaagattagtagtatcggaggcggctaagtttgtcacctgttggcagggcccggaggaaaatggatcgtgatgggcaaacaggccaacccctgttgcagaaacttgttcatgtgacggtttaacatctgacctgctaccctttcatgcatcggtgaatttagtctaggaaactgtttgaagtggggaaatttggtgccagag

SEQ ID NO: 208507 - DNA, 1258 bp, Zea Mays
gtcagtgacacgcgcgcggccatggagaaaggattgagaccacgtcgccttcgacccttctccgtcctcccggaacgcccgtcccgtccgtcctccccccatccacatccatcccgtgtgcttctactgctcctcgatttgatcaccgattaggggaggcggtttaccagtgagcacgcgcgagagataggataggaggaaagggaagctagcggcttcgctctcgcggggagatggcgcaggcggtggaggagtggtaccggcagatgcccatcatcacgcgctcctacctcaccgccgctgtcgtcaccaccgtcggctgcaccctcgaaatcatttcgccgtatcacctgtaccttaacccgaagctcgtggtgcagcactacgagatttggcgcctcgtcactaacttcctctacttccgcaagatggatttggattttctattccacatgttctttcttgcacggtactgcaagcttctggaggaaaactcatttagaggaagaactgctgactttttttacatgctcttgtttggtgctactgtcctaactggcattgttctgatcggagggatgataccttacatttctgagacatttgccagaattctgttcttgagcaattcattgacatttatgatggtttatgtctggagcaagcacaacccttttatccatatgagctttctgggcctgtttacctttacggctgcgtacttaccatgggttcttttgggcttctctatcctcgttggaagcagcacatgggtggacctcttgggtatgattgctggacatgtgtactacttcctggaagatgtatacccacgtatgactgggcgtcgccccctaaagacaccgtccttcattaaggcgctatttgctgatgacaatgttgtggtggcacagccacccaatgctgggattggtgctggtgcaaggttcggtgctattggtgtagatccccaggctcaatgatgaattactttcagtgacctgagggccgaggctgtgactgatctgggatgcggcagtttgtattctctgcgcaaattgcggaactggcccggaggaaaatggatcgtgatgggcaaacaggccaacccctgttgcagaaacttgttcatgtgacgtctttgtccatttttccttcatcagctgctctttaaccgtaaaatcggcgttcgtcatttcaagtgttgtgaccgtatcccttttctgttatataaataaaatgtttcagttaaaaaata

SEQ ID NO: 208508 - DNA, 1459 bp, Zea Mays
gagaccacgtcgccttcgacccttctccgtcctcccggaacgcccgtcccgtccgtcctccccccatccacatccatcccgtgtgcttctactgctcctcgatttgatcaccgattaggggaggcggtttaccagtgagcacgcgcgagagataggataggaggaaagggaagctagcggcttcgctctcgcggggagatggcgcaggcggtggaggagtggtaccggcagatgcccatcatcacgcgctcctacctcaccgccgctgtcgtcaccaccgtcggctgcaccctcgaaatttggattttctattccacatgttctttcttgcacggtactgcaagcttctggaggaaaactcatttagaggaagaactgctgactttttttacatgctcttgtttggtgctactgtcctaactggcattgttctgatcggagggatgataccttacatttctgagacatttgccagaattctgttcttgagcaattcattgacatttatgatggtttatgtctggagcaagcacaacccttttatccatatgagctttctgggcctgtttacctttacggctgcgtacttaccatgggttcttttgggcttctctatcctcgttggaagcagcacatgggtggacctcttgggtatgattgctggacatgtgtactacttcctggaagatgtatacccacgtatgactgggcgtcgccccctaaagacaccgtccttcattaaggcgctatttgctgatgacaatgttgtggtggcacagccacccaatgctgggattggtgctggtgcaaggttcggtgctattggtgtagatccccaggctcaatgatgaattactttcagtgacctgagggccgaggctgtgactgatctgggatgcggcagtttgtattctctgcgcaaattgcggaactgtacaagccattgttcttgtgtatttatacaggctagatgagagttattgtgcataacaaaaagattagtagtatcggaggcggctaagtttgtcacctgttggcagggcccggaggaaaatggatcgtgatgggcaaacaggccaacccctgttgcagaaacttgttcatgtgacggtttaacatctgacctgctaccctttcatgcatcggtgaatttagtctaggaaactgtttgaagtggggaaatttggtgctttggcagcgagaatttggatggagcgctgtaattgcagaatggtgcaaggaatgactcctaacattgtggacgcctggatggtgttcgttttccttcctgattctgctgtgttcaccgatccggatgatctggtctcctggaagcagtctttgtccatttttccttcatcagctgctctttaaccgtaaaatcggcgttcgtcatttcaagtgttgtgaccgtatcccttttctgttatataaataaaatgtttcagttagctgtttt

SEQ ID NO: 208509 - DNA, 2581 bp, Zea Mays
gttccggccacgaaaggacagatgttccgctcggttccacgtcatcacctatctccgtttgcatatccatcacgcaaaatgaataaaaaattaaaacaaaggaaaacagaaaagctgcggaagttgtcaagaactccgacgatcccacatatccgtcaatcgatcgactcccgttcccctcggaatcgaaatggccccgagaattccaacgcacaagaaggggaacaagggaaccaggcatcgcgaagagagcccggggtgatgaattgttacggttcatggacggagcaagcaaggagcctctccgcaaggactactacaaagttctggaggttgactatgacgcatctgatgacaccatcaaattgagttatagaagattagctttgatgtggcatccggacaagcataagggcaatagcaatgccacaactaaatttcaggagattaatgaagcatacaaagttttgagtgacccagctaagcgactagaatacgatgtttccggttgctacgagatcgaccaatatactttgcgtgagtaccttacaaaatttaagggtatgatacttacctgtaatggccttggcatagaccattcttctaagtgggcccgacatttgagggaactgaaaccccattgatcaacgggtatggatttactactctatgtaagacacaatgtgctgtatcacaattcacaaacaatggccccctactccccttagccactttctgccaaaaagatgcatgtatgtttactaattccagatggaggatggtctgggctccattctcaatgtttagtgagttgtgctggaaattaggtcgggtcgggctagctcggcccaacccaagcgcatcatggttcgagccaagaaagactacaaacttttgggtcgtgtcataccagcccaaagggtagaaacagtggctcagctcgatcctaaaccacgttatgttttcgttgggccgtgacgatcagtccgacccattacccatatatttgaacaatataaaatctaaatattacaactaaataaagtccatagcttactaaattaaagatattaaacaatactaacatcatttaaccacataaagtgcaaatattacaacaatgtaaagtatatagcttactaaattaaaaaattaaacaattactagttagatgcccgtgcgttgcaacggcaatacaaaatatttttacacaataattacataaaaatgaacaccacatatataatcgaacccaatatctcaaaaaaaaattggcaacaatcaatacagaaataaactgatacaaattaaattatacaatacaaatatcacaaaacaaagttttagaagcatgttatttaagaatctcacaaattacatgtccgttgtcgtctcgccaccgaagtacagcacacctcaatgagaacttattctataagataagtgataatctagttaatttagctaagctggacataatcgtttaagtcgttactccctcccgaccgtggcgcccactcgatgctcgtcgataagtcgctccgccaactcattctacgccttgaacaacctcaaagtgggcctgcgttcacttgctctcaacgtcgggtaggatagaaatgaaatccaataagggactaaaataaacaaacaaaacatgacacaaaaattgactgtttcttggattgcagataaactacgcctctgctcatgacaatgaaacactatttgatattattagtgtaaaggaaaaataatttgtccacaagcatgattgcattatcccaggtttgaacttagaagatggccctgcacactctgcctcgacgtcatcttcaccagagcagactactgatgttgatggaagtaccaccggtgatgtcaccttctaagtataacttgggtaaccttattacctcttctcttactccaaatgctggttcggtgttatccatgttctcatcattaacctcttaaagttctgaaaagacaaggatgaatgcacactgcacttcctactgcacttcttttgaacctatcatgcaatgtccttctgcttgggtgtgagcttcaaaaacacactgaaatctactaagctagtagttcatctaaaagaaaaggtgtgtgctctgttctttctatccagcataattggcttctaattagagataaactccaatactaagaaccttctgaggaagaaaaacaaggcattgaatggttacagttatgttctgtgtaataatggttgtgtgggaaccagcatccaccttccctctgaatgcagttttggctaatcatgctggaacacaattcccatccaatgtgatctgagtctgccacctctagacatgatgattgaagccaggacaaacttcggtgatttaatttaaagagaaataaatattaaaggtggtttgattatttggactactctcaattaatagcattatctttaacaatgctacctgtaacttcaatatttggaaaagacgaaacaggagcttagcttggtgcgtcgaagcgaatcagagtagaagagatcccctcaccctttggagagacactactcttgtatctt

SEQ ID NO: 208510 - DNA, 2616 bp, Zea Mays
gttccggccacgaaaggacagatgttccgctcggttccacgtcatcacctatctccgtttgcatatccatcacgcaaaatgaataaaaaattaaaacaaaggaaaacagaaaagctgcggaagttgtcaagaactccgacgatcccacatatccgtcaatcgatcgactcccgttcccctcggaatcgaaatggccccgagaattccaacgcacaagaaggggaacaagggaaccaggcatcgcgaagagagcccggggtgatgaattgttacggttcatggacggagcaagcaaggagcctctccgcaaggactactacaaagttctggaggttgactatgacgcatctgatgacaccatcaaattgagttatagaagattagctttgatgtggcatccggacaagcataagggcaatagcaatgccacaactaaatttcaggagattaatgaagcatacaaagttttgagtgacccagctaagcgactagaatacgatgtttccggttgctacgagatcgaccaatatactttgcgtgagtaccttacaaaatttaagggtatgatacttacctgtaatggccttggcatagaccattcttctaagtgggcccgacatttgagggaactgaaaccccattgatcaacgggtatggatttactactctatgtaagacacaatgtgctgtatcacaattcacaaacaatggccccctactccccttagccactttctgccaaaaagatgcatgtatgtttactaattccagatggaggatggtctgggctccattctcaatgtttagtgagttgtgctggaaattaggtcgggtcgggctagctcggcccaacccaagcgcatcatggttcgagccaagaaagactacaaacttttgggtcgtgtcataccagcccaaagggtagaaacagtggctcagctcgatcctaaaccacgttatgttttcgttgggccgtgacgatcagtccgacccattacccatatatttgaacaatataaaatctaaatattacaactaaataaagtccatagcttactaaattaaagatattaaacaatactaacatcatttaaccacataaagtgcaaatattacaacaatgtaaagtatatagcttactaaattaaaaaattaaacaattactagttagatgcccgtgcgttgcaacggcaatacaaaatatttttacacaataattacataaaaatgaacaccacatatataatcgaacccaatatctcaaaaaaaaattggcaacaatcaatacagaaataaactgatacaaattaaattatacaatacaaatatcacaaaacaaagttttagaagcatgttatttaagaatctcacaaattacatgtccgttgtcgtctcgccaccgaagtacagcacacctcaatgagaacttattctataagataagtgataatctagttaatttagctaagctggacataatcgtttaagtcgttactccctcccgaccgtggcgcccactcgatgctcgtcgataagtcgctccgccaactcattctacgccttgaacaacctcaaagtgggcctgcgttcacttgctctcaacgtcgggtaggatagaaatgaaatccaataagggactaaaataaacaaacaaaacatgacacaaaaattgactgtttcttggattgcagataaactacgcctctgctcatgacaatgaaacactatttgatattattagtgtaaagactctgatgaacctctcaattgacgagcgatgcaggaaaaataatttgtccacaagcatgattgcattatcccaggtttgaacttagaagatggccctgcacactctgcctcgacgtcatcttcaccagagcagactactgatgttgatggaagtaccaccggtgatgtcaccttctaagtataacttgggtaaccttattacctcttctcttactccaaatgctggttcggtgttatccatgttctcatcattaacctcttaaagttctgaaaagacaaggatgaatgcacactgcacttcctactgcacttcttttgaacctatcatgcaatgtccttctgcttgggtgtgagcttcaaaaacacactgaaatctactaagctagtagttcatctaaaagaaaaggtgtgtgctctgttctttctatccagcataattggcttctaattagagataaactccaatactaagaaccttctgaggaagaaaaacaaggcattgaatggttacagttatgttctgtgtaataatggttgtgtgggaaccagcatccaccttccctctgaatgcagttttggctaatcatgctggaacacaattcccatccaatgtgatctgagtctgccacctctagacatgatgattgaagccaggacaaacttcggtgatttaatttaaagagaaataaatattaaaggtggtttgattatttggactactctcaattaatagcattatctttaacaatgctacctgtaacttcaatatttggaaaagacgaaacaggagcttagcttggtgcgtcgaagcgaatcagagtagaagagatcccctcaccctttggagagacactactcttgtatctt

SEQ ID NO: 208511 - DNA, 694 bp, Zea Mays
ggattctggaccttttaacctaccatgtaaaggtctggtcatgaggaagggttttaaaggatcatttcctgatgctgcttcgtctgctaagatatttgctgtccttgctggcgtacaaagtttggtagcctgctctttgcgaaaactacgtggaaaagatgatggtatcaatgcaggagtggcaggctgttgcactggccttgcgctgagctttccaggtgcaccgcaaactctgattcagagctgcctgacctttgggactttctcgtacatcatagagacgctaaacaagcagcagcccgcactggcgctaccactggctacagagattaaggatcaaaaggctggacaaagtgttcttcctcccttcacgctccctcttccgcaggatgcgatggatggattttctaagttccagaactttttgtcgtcgaaatttcagggaaaatgagtcaccttatggagtgacgtttagttgccttgtaaatgcctcaatctgagcccttttttgggtttatttctctgcaaatgtatgtttctaaggtagtgtgttgttaatgttaatgattctacacctttctgtgacagttttgcgaataagaggagcacctcatcctttgttcagctgttgtagtatttgttggggcattcgatgccgaaaatcacttgcctaacctttttacctccgcacaag

SEQ ID NO: 208512 - DNA, 579 bp, Zea Mays
gtgcttcatatgctgtccaatttgacttttgaggaggcagacacaaagcatgatgggaaaattgacaaagaagaatggcgcaatttagtagtgaggcatccctctttattgaagaacatgacactacaatatctcaaggacatcaccactacatttccgagctttgtcttccattctcaggtcgatgatacctgaatttctgaaaactaatgaatgtcagaaggtggactgcttgctttgctaagcaaactttcagtgcctgtttgatggttcaaaaatctcatcgtcctgaaggcatcaaatcatcgtttgttgttaataatctttttccttgttttttatttggaattcttgctggatcctgtgtgaatcctcttctattttccctctcaattgttcctttattctatttcggttttgatggccagtacttgagtcagttaatgtgtacaaagttgcgtctgatgctgcccgtcattgaattgtatggcatgtgaggaagatttaaattgtatattcaacttttgtggtcatgatagttgcacatatttttaccatcctttctaatttatatttgtt

SEQ ID NO: 208513 - DNA, 2546 bp, Zea Mays
agccaggcacggctccagcaacgacacccgagtacggagtacccgacccgcctgcctgcctcctgcctgcctgtggtcgcctgtatcacaagctcccaaaaccgccgcgcacgctgccaccaccggtacccaacgaacatggcggcggcgccgtcctccctcgcctcctcgtcgcatatcccccgccgcgccacagccacggccccagcacagtcgcactcgcctccgttgccgcagcagctccgccccgccaggtccttcaaacgcggggcgctcgcgcagcacgtccggtacagctttgccggcagggaggcatcgaggcggcgcacaccaggtgcttgcttcgtggtctcatccagccagccaggccttgctgccatcgatgtgccggcagcgactattcctgatgccacgacgacaagcgtcactgagcggacttcggtttcatctcttttagaggttgtatcggaggacttgctcagccttaacaacaatctgaaatcgaaaatccagttttggtttctgcagctgaacaaatttttggtgctggtggaaaaagattaaggccagcattggttttcctggtgtctagagcaactgctgaattagctggtttgtcggagttaactgcagaacatcgacggttggcagagataatcgagatgattcacactgcgagtttaatacatgatgatgtcatagatgatagtgggatgagaagaggtacatgatgatataatgctattatctaatatgccaaaagtactatcaataaaaccatgtcattttgggaatagatgaatgttatattcttcttagaaacatttctagctatagaaacatggattactacgaaagggcctctatctgagttggttatacggtccgagtagtacttctcatgtcctaagtttacccctttgtaggagtgaatttcagactgggggttaaaaaatcccctcgtctgagaaatattctcttaatacaatactaggggttgtcttacccctgtaggtcgagtttttagaaacatggattatttgctgcactctttttcaagtgctctttagggaacatttgattattgtaataacataatataagtagcacagttccgttttcgttttccttcttttctgaaaattggccagtaacttttaaattgattgagatagagatgagcattcacttcggttctaagtgttgggcctaaagcaggcagaggttaaccaggcatcccaccatcacaataggatattgcttgttttgaatgtaaggccactctcgtttttttcacacgggagagtggggggtgggggtggggggctggatctcacaacttgaccagtttattctaatgtagagctaactgtttcagggaaggaaactattcaccaactatatggtacacgtgtggctgtacttgctggtgattttatgtttgcacaatcttcttggtttcttgcaaacctagaaaatattgaagttataaaattgatcagtcaggtcatcaaggactttgcaagcggcgagataaaacaagcttccactctttttgattgtgacatcacacttgacgactaccttctcaagagctactacaagactgcatctttgattgcagccagcacaaaatcagcttccatattcagtggcgtcagcaccactatttgtgaaaaaatgtatgcatatggcaggaatcttggtctatccttccaggttgtcgatgacatcctggatttcacccagtcagccgaacaacttggcaaaccagcagcaagtgacttggcaaagggaaacctgactgctccagtcatcttcgctttgcaaagtgaaccagagctaagggagatcattgattctgagttcagtgacacggattcgttagctactgcaatagagctcgttcatagaagtggtgggatacggagggcacatgagcttgcaagagagaagggtgacttggcaatccaaaatctgcagtgccttccaagaagtgacttcagaagtgcccttgagaagatggtggaatacaatcttgagaggattgagtagtggattttacttgaatgctccatcaggtacatatctccatttggggtttggggtagttctcatatagatctttatattcagcccctttgggaagatacatttcactgaaaaatcagatgaatcacactatttcatacaaattctggggatagcctttgagcaggccactactatcaagttgattttgtaacagcttgtgcagaatcataagaaaccctaggacttgaccgcagccccttgcgcctacatgtatccgagcattctacttggcagttcttgtaaataatagaaccatacagtaacttagcattcttttttgttttgcaatctgagcatgcttacaagcaacaaagtgtgtgctatatttgtacggatctacgtgcacctaacatcatgcacttgtacaattgctttgcactattatgtactatttccgatttaacagtaatacggatttaacagtaataataccgttcattttctacataaga

SEQ ID NO: 208514 - DNA, 2022 bp, Zea Mays
ccagaatgaggaaccaaaaccaaacaacaccaatgggcggcgcggcgatatagctagggtagagtagttcacttccccatcaccctctctcggtctcggtctctcctcccctcctacgccaattgctacccgtcgtcgcgtcgcccccctcctaccgtcctacgtcttccacctctccccgcttcctcttcctccctgctgagcggaagcgcgcaagcaatcgctgccttttcttggcgtgcgcagctcctggtcggcacggcagccccccgcgggatctcgcttgctggcctggccgcgcgacattgaggcggggcgcctggagctcggagccgccgtagctggtgttggtgcctcggagccgatcgggtgtctggttcctgatttgatctgcagctgcagctgcggcggcggcggccgacatggcggcttcgggagggctcgagcagtggcagaaggacgggttcttccaggcggccgaggaggtgcaggagtccgcggacttttggagcagtttgagagggctgtaagttcaagcaacgataagtattcattggaagaaggtacagtagcacggcgtcggcagtttgttgtagccattgaggatcagatatctcgtgtagagaaagaaataaatggttctttaatggacaatggcgggcaagggctcaactgggtgaagttagatgacgaagagcgagatgatctagttgctttcctttcagcacctgcagagttctattcagaaatgaagagcacagacatcagtgaccgtgttctatctagacaaaagaatgtgccagttggcaggaacgatcagagtgatccacctttaatcattaaagacatatatgaagtggcacgcacagaaatttctactgttaagagtgatgtttgtggtctagctgaggagttacatggccttagaaggaatttgagttcagggaatgatcattggaagattgacattggtaacaagatggatgatgatagaaaattgtcaactggggttcaggccgcaagtcagacaactccttcatcaagcatccggagaagcgcagaatctataacaagagtgagatggttttggaatagcttgtggaaatccaagagggatgaacaacgcccattaagatatgatatgtcatataatcttgacctcagggttgtatccttattaacacagagatttaatgggctagcggagagaagcagaaattatttgacaagttggaaggaaaattccaggacttctggaaggacgggtgggcttcatatacaaggccaacaacagaacattcagtttggccgttctattcggatcaccctcttactggtgctgagtatctttctgattgtgccatttctcgcctcggcatgacaaggcatgtattgcttcaccggtgaggaacattggggcagcttaccatggtcctgctcgtactacatacagatcatgactggtggtgttctctcgccggcaaatgcagcaaaccaaccatgtctttcctgtgtggtgtggctgctgcatatgtgacaggaaaagaagcacggcggtgaaggtttcaactgtgcaatgcgtgatgctccgataccatgaactcctcaccgggcgcataaccatgctaagatttatcagggttatgataaatttgtgatggctgattgctgccaaaggaggtggctgttctcatctcactactctatatcccacgagtgaaagcaattgtaaaaagttctagagccactctatatcccacgaacgaaagcaactgtaaaaagttctagagctggtaggataagtcctgaatactgttattgataataatacatttaatactgtatttgccaaaccgttcgccgccgctcgtatggttttctgtttagaggtgctcttttgatccaggtttctgcacttgtcctcattttatggtatgcttgccattacccacgaactataattatatgtgccgtttggttaatgaaatgtaatgtaaatggtaatggtaatgattcatgctc

SEQ ID NO: 208515 - DNA, 2274 bp, Zea Mays
aaaatgcccacaaaactgtggaagcagaaaacttccctgctaaaaaaataatatatgaagtaacttgagtacttgacaactagtagtactgaaaatatagttgaggctagtagtggtggggaagaaagaggctgacatcctgaagccaccagaatgaggaaccaaaaccaaacaacaccaatgggcggcgcggcgatatagctagggtagagtagttcacttccccatcaccctctctcggtctcggtctctcctcccctcctacgccaattgctacccgtcgtcgcgtcgcccccctcctaccgtcctacgtcttccacctctccccgcttcctcttcctccctgctgagcggaagcgcgcaagcaatcgctgccttttcttggcgtgcgcagctcctggtcggcacggcagccccccgcgggatctcgcttgctggcctggccgcgcgacattgaggcggggcgcctggagctcggagccgccgtagctggtgttggtgcctcggagccgatcgggtgtctggttcctgatttgatctgcagctgcagctgcggcggcggcggccgacatggcggcttcgggagggctcgagcagtggcagaaggacgggttcttccaggcggccgaggaggtgcaggagtccgcggactttctatagaacttggatgcgtgagcgtagtaatggatctggctcagaggaggtagacgatttgcaaagggagcttcagacagctttaggaactgcaaaatggcagttggagcagtttgagagggctgtaagttcaagcaacgataagtattcattggaagaaggtacagtagcacggcgtcggcagtttgttgtagccattgaggatcagatatctcgtgtagagaaagaaataaatggttctttaatggacaatggcgggcaagggctcaactgggtgaagttagatgacgaagagcgagatgatctagttgctttcctttcagcacctgcagagttctattcagaaatgaagagcacagacatcagtgaccgtgttctatctagacaaaagaatgtgccagttggcaggaacgatcagagtgatccacctttaatcattaaagacatatatgaagtggcacgcacagaaatttctactgttaagagtgatgtttgtggtctagctgaggagttacatggccttagaaggaatttgagttcagggaatgatcattggaagattgacattggtaacaagatggatgatgatagaaaattgtcaactggggttcaggccgcaagtcagacaactccttcatcaagcatccggagaagcgcagaatctataacaagagtgagatggttttggaatagcttgtggaaatccaagagggatgaacaacgcccattaagatatgatatgtcatataatcttgacctcagggttgtatccttattaacacagagatttaatgggctagcggagagaagcagaaattatttgacaagttggaaggaaaattccaggacttctggaaggacgggtgggcttcatatacaaggccaacaacagaacattcagtttggccgttctattcggatcaccctcttactggtgctgagtatctttctgattgtgccatttctcgcctcggcatgacaaggcatgtattgcttcaccggtgaggaacattggggcagcttaccatggtcctgctcgtactacatacagatcatgactggtggtgttctctcgccggcaaatgcagcaaaccaaccatgtctttcctgtgtggtgtggctgctgcatatgtgacaggaaaagaagcacggcggtgaaggtttcaactgtgcaatgcgtgatgctccgataccatgaactcctcaccgggcgcataaccatgctaagatttatcagggttatgataaatttgtgatggctgattgctgccaaaggaggtggctgttctcatctcactactctatatcccacgagtgaaagcaattgtaaaaagttctagagccactctatatcccacgaacgaaagcaactgtaaaaagttctagagctggtaggataagtcctgaatactgttattgataataatacatttaatactgtatttgccaaaccgttcgccgccgctcgtatggttttctgtttagaggtgctcttttgatccaggtttctgcacttgtcctcattttatggtatgcttgccattacccacgaactataattatatgtgccgtttggttaatgaaatgtaatgtaaatggtaatggtaatgattcatgctc

SEQ ID NO: 208516 - DNA, 3057 bp, Zea Mays
ctttttttttttcctccagttgcctttcacaggctccatccacagtttcacatttcggttagtgtacaccaagccacacacagtgacacgtcgctacggttgcagtgcagctggtgcgtcctagcacgatttcaatgcctgcattgcagtgtgcgctgcctgcgcctcttttgcaccttcctttccttgtgtcgcactcgcgccatttaaacgctactacgagctcactagctggtagtactccagaaacgacacctcgccaactagtccagtccagtgccaaagagcgcggcagccgttttggcaagcatggcggtggtggtggcgggcagcagggcgagagcggagcaggcgaggcggcagtggcgggagcaggagcccagaagccccgagatggccgcgccaccgccaaggtcgaccatgccgcggccggcgagggcggcggcggtcgtctactacctggccaggaacgggcacctcgagcacccgcacttcatggaggtcgcgctttcctgccccgacggcctccacctccgagatgtgatggatcggctcgacgcgctgagaggcaaagggatggcgcgcatgtactcgtgggcgtccaagaggagctaccggaacggcttcgtgtggcacgacctggcggaggacgattacatccacccggtggtcgcccgggagtacgtgctcaagggcaccgagcgcctgcacccggcgctgctcgacgcggcggccgcgtcctcctcgtcctccgccggctcgcaggagacgcccaccacgtcgtcctccgccaggtgggaggcgcaccggatgacgatgaagggcgcgtgcggcggggctgaccttggcgagtacgtggcggcgtacatgggcgaggagcgcggcgcggacgccgcgacgcagaccgaggacgacggccgcggccgccagaggcgcgtccagtcccccgccgcgcaggaggagctgagcagggcggagacgtcgccgccgacggcgtcgacgagccccgaggcgctggccaaggcggacgggcgcgccgtgctggagggcgccgtcagcggaagcggccgggccagggcgtcctccgtgctgatgcagctcatctcgtgcgggtccgtatccgtgcgggacgcgcgcgcctccccggtgatgccgcgcgcgcaccaccaccaccgcccaccccggccgccggccgtggaggcaccgtcgtaccgccgcgccaagctcgtggtggaggacaaggagtacttcagcgggagcatcgtggagaccgcgacgaagcgctcgccggccgacggtgtgacgtcccgggacgacctggccgttctccggcggtcggcgtcgtacaacgcggaaagacgacatggcagcagcaggatgataaagctggagctggcgaaggaggccggggacatgcacggccgctgcatcccgcggaaggcccaagcgcaaggacgacgacggatacctggtcatctcctgcagcgcgcaggggaataacaagggatgacgcggggccgtcttggttcgttggtagctagcgcatggccatcatcatgcggcgcggcgacgagcttaggctagctagctggtcccccggcggccggcgagaacggcgacctggcgagcgtgcatgtgtgcctttctttcttgcgtcgggaacagtaagtagatgagtgtccaccactgctactccagtttggtgtcgtctgctttctttagatgctctgatagcgattggtgaaatgcctgtgattttacgtgtgagctagcaccttcatgtcgatacgtgttactgcgtgtctgcctcgtgctcgttcgtggtctgagctgtttagtgcctactgcctagtcatcatctcattctctctttttgtgctactgggtttcaaaaggctattcttcacgtgttcacggactgtaccgtacaggcgtgcgtgatgagcccgcccaggccgtgctgctgcgtgaatccgtgaccgtgatggatgtagtgcaatctgcaatggtagcacggcgccgacgcgttatgctatcattacttacctcccgtcctcagattcctcccagcagtccccagttctttgatacgtagaatctggatgctcgattgcgtcagttcattcccctctgatctgaggtgaggttcttgatcgagtgtaaaaataaaataaaaaatgaagcctgaccagacagttcggtccctactattactgcttcaccttacaatttgtctgcctccaaaccagcacggtccccaacgatgggatcagctccctcctcctgaacctgaagcctgatccaatttctctcacaccagtctctttccagactgatgttagcgactactgtacagtgtttttttttagcttgcaaaggtggcaatctcggggaagatgtggcaaattgagtgacgagttgagaccgtcaccaacgcctgagcctcgaggaagcacggcgtggcggcatgctgtgccattcaaacaaagagcttatggttccatgttccagcttgcaacaagttcctacggcaaaactcagggttagctaatgccagtagcagtagttgggccggaacagattccctgaaacctgcaacggcccacttttcaggtggtttgggcatttgggctctcttcaagtctggacgaactatcacatcacatcagttgaggaactagtacaactaccttctcaactctggctcagtggtcagtggcggagagtcggagacagtggggcaagacccatacctacaatttctatagactttttttttttgcaatcgatctgcaccctttttttgtctaaacaaatttcattcgcatggattgttgcacagagggaccatttcccttaattttttgtacgccatctcaaattttaatacgaggataacgccgatcaattgctcgctatacaattcacgtaagttttccgtggtgaatggcagctacttctgtaatatatctacctaacatatgaatccggcttgtgaagctttaaaagcttacgacatatgaatccggcaggcggcagctacttcatatgttttgg

SEQ ID NO: 208517 - DNA, 2022 bp, Zea Mays
gcgacgagatgtcatcgggatgaggaacatggtggtgaccttaatcgagcaataaattcgcatttcaatgatggagacagcatattgaatgggatcagtcaaaacaccatgcccactagtcatgatgatatgatggacctggatggaccccttgataatacatttcaaagatctttgttcccagagaattttcgtgacccttttgctctaatggatccaaattttcagcaccaattttttgacagggttggctccactgatggtgtcactcgtggaccgctagtttcacaccctagagaggtgagggagattcctatagaagttaaggatagtgatcctcaaacaagtccatctggccaggcccctgttattgaggatgttactggacatgagtcttcaaatggccttgaagttcatgaaactatcataattgatgatgaggacagcggattgttatctgcgccatctgctccacatgctagtgttcctagcaatacatcttctgagcccactgctcctccactggttcatgttaatgactatgatgatgacatagaagaggaaatgattagggcagcaattgaagcttcaaagaaggattctgaaggactggcaaatatagcagagcaaggagaccagcatcaagagggagtgaatttgggggaacattcttctgataaagcagtcatgagaaccacagatggaatagttgagaggcaagtactagcttcaggaaaggctggaacatctaggcaaccaatagatgaagagagcttccaagaggagactgaagatgtagaagaacaaccgctagttagacgtcgttctcggcgtgccccctctgagaacaccgagctagcacaaatgccgcacccaggagctagccctgttctgaacaatcaccagtctagtggaggtgatttcccatctgagtggggtggcatttcttctgaggaacatgatgaagctgttatgcttgaggctgcaatgttcggcggagtttttggaagaccaatgcatcctttctccatgccttctcacagaagctctacttattatccccaaataactcattcttcatcaccagcattagctgaacagcggttattaagagagcagcaggacgatgagtaccttgcgtcactacaagctgatcaagaaaaagagttgaaggccttacaggatgctgagctccatcgcctagaagaaacaactacaagagaagttgctcttaagaaacagaagcaagagcaggaggaaaggcgtaaaaagcaacttgaggaagaggagctagagtccagtctcgcttccaagcaagcatcattaccatcagaaccgcctccagacgcagagggtgccgtgacagttgtagtccgcatgcctgatggcagtcgacaggggcgttgctttctcaaaactgataaacttaagttcctatttgatttcttagacattgggaggatttgcaagccagggacctacagattggtgaggacatacccgaggcgcacgtttacgagcagtgagggggacgtatcgttcagtgatcttggcttaacaagcaagcaggaagccctatttctagaacagatcacagagtagaggataagtgtttaggcagcatggttatagacaccacagctggagccggagaattttttttacattttatacttgcagcttttgctagtaaaaactcggtctgtgaaaatggttgggttggtcgaagaaaggcgtcacgttacctatacaatgtggacagctacgcatggccgttcattcgcacgagtctcagagtggctctgtacatactgtcggttctgtgaatcaaagcaatgttgcgtatatataagcaaactgcgcagcaacgggagatgatgcgaaacggccgtcagagtttgctgctttcgcatcactggtcactggtgtctcagagacagaactggctgaacgtgtattgaaaaaactgagaaaaatgaaccaaacgaatgcgaatgtagacactggagttgacggtctttt

SEQ ID NO: 208518 - DNA, 354 bp, Zea Mays
cacaagttttgttgagtgcttgcacatttgttcctgttccatgttttggaactggaaacatttcatccatggaatactgccagcagcagtgggttggaagctccggagaattggagaaggatttgcttccacctttaagtcaagacatccaggaatatatatgtaccaagaaatttacactaccagaaacttctttccagttgcttggaagttttggagaattggaggatttgctttccacctttcagtcaagacatccaggaaaatatatgtacaaagaaatttacactaccagaaacttctttccagttgagttccagcgccgcttaagccccgcgccttgttccccggttt

SEQ ID NO: 208519 - DNA, 300 bp, Zea Mays
gtcggggtactctgtaaaaaaaaaaaaattggggtcctccgcctcccgcaatgcctcccccttccgcctccgcctcccgcttggcgacccactggatagctgacgccctcgccgacgacgagtccctcgacttctccgtgctgaagggttggaagctccggagaattggagaaggatttgcttccacctttaagtcaagacatccaggaatatatatgtaccaagaaatttacactaccagaaacttctttccagttgagttccagcgccgcttaagccccgcgccttgttccccggttt

SEQ ID NO: 208520 - DNA, 1257 bp, Zea Mays
ggcccattcgttgttcacccagccacccaggaggccaggaatattcggtcttccgtcggccaggaatctcaggtcacgtcttcggtcttccgtcggccgcctgctaccgccggccgccccacatcccaccgcgccaccgcggcatcgccccacaccacatcccacagagcaaatgagaaggtttttccaaccactttcaagaggctctgacactagtgctaataataatgtgaataacacaccaactgttggagggacgttcaatccggatgagatagttgcagatcccactttaaggaggcaaatttatgaatatgataaagatgtccaagaccaagtgagaagggcatatgttctgaatggtccatgccaaccaaagggtttagatttccctcgtagacagtatggacaaagttcaaggccttttaaagaggaatggtatgacaagtatgattggttggagtatagtgaatcaaaagatgtagtgtattgcttttattgctttctttttgagcaagcagtgaagggtgataaatatgaagctttcactaaaattgggtataataattggaaagatgcagttgaaaggttgaaatcacatgttggtggtgttaacaatatccacaacaatgctaggttacattttgatgattctaacaacaaaagacaaagcatatctactatcatgtctagtgctagtcgtgaggctgaagacctttataaaattcgtttgacttcttcattggcttgttcaagatttcttttgatgcaaggtttggcttttcgtggtcatgatgaatcatctagtccgttaaataagggaaattttctagaattgatttattggatgaaagataaaattaaagaagtgagagatgcttttgagcatgctccaagaaattgcattatgatatcaccacatattcaaaaagatcttgcaaagtgttgtgctcaatagatcacagagaacatcctaggagaaataggagatagaaacttctctattcttattgatgaatcacgtgatgtttctgttaaagaacaaatggcggtgatattgagatatgtgaattatcaaggacatgtgatggaatggtttcttgccctcaagcatgtcaaggatactacatcagaagccttgaaggaagttatttttggccttcttgatcgccatggattatctatatccaagatcagggggcaaggatatgatggagcatcgaatatgcgagagaaacttgttcgacttggtactct

SEQ ID NO: 208521 - DNA, 627 bp, Zea Mays
aggctgacccatccccatcacacagcgggcgacatctgccatcaatgcggccctccacagcctaccccgctcgcattcattgcacatcttgtcctcatacctctcctttccaacacctaattaatggcgcgcccatacgtgcctgatgctggctccaaaccccgacccttttcatccctccctccctccctcgtcgtctcctgactttgctcgccggccgccccgcccacaccctcctcctgcgctaccactgtcagcaagtgcacacccttcgaggacagctgctgtcgccgccaaggccgcaaccggccgtcgctccatgctgcggtagaatttagaaacgagaagggagatggcggccgaggcgctggggttcatggcgcggggagccaacggtgggagggcggcggagctcgtcacaagggactttctcggcgggtgcgccgccaccggcgacgccagggacgcgtccgccaggaatggcaccgtgcccgggagggtggctcagcagaagcacgcgtgcccggcaacgccgatggacctcaacctgttaacaataaaactctttcatacctctcttcattaaattgtataatatcgttggcaaaatatgttttgaaatggaca

SEQ ID NO: 208522 - DNA, 767 bp, Zea Mays
agcccgatgcgaaaatgcttgaagcctccaagaatctgggtgcaccgctgaggcgctgaccaccacgcaccacctcaccagatctttcttcctgttgcttcctcggctggtttccttctctcgccgcgtcgcctgcttcttcccccaaccaaagacacgaatcagccatggcgctcgcctccgccacgtcccgccccctcctcggtcgcccccgccggcaccgcgcggccccacctcgccgtttcctcatcctcccccgcctcctcgatccgcttcccccgcggcgccgacggcggcgccagcagagcggccgtctctctccgcgcccccacgcctccagtctgtgaccccaaaagccttcttttcatgtttggaatggagctggactacagcgacgccctcattggtggcggcttcttgttccagaatccaaacgcaacaaaaacctgtgggtgcggcaaatctttcgcgactggaaaggagaccgaggccgcggcaaccacttgcaacaactagagtagagaaatattgttagctaaacgtgatgtggcatgttgtatagcttgctcatgttgaagccctgtggctacaccacagatacataaagaggcatagttcaaaggaattacaccattaccaatggcctaattcagattttcttgtttggtgatcattccgaagtccttaaacttgtggtatggtctctcaaaatgcattgtattttcaggtatccaaacttgtcttgacgtgtcgtccaggcctacaag

SEQ ID NO: 208523 - DNA, 1034 bp, Zea Mays
tatcaccatatctgtttgtctcccttcccttcccttggatccatacagtacgtgtgcgtgccgtgccaagcttctccctcacctacctaaatccaatccacttcctttctttcatctgcatgcacacttcctctctctctctctctctctctctctctctctctctctctctctctctccttcctgggagccgtgttaattgctctcttgttgtggagcagcaggagccgaggaggacggcggcggcggcggcgagaagagatggccgacggcagcagcaactcatcggcgtcggtggccatgggacaggaggctttcgttgagaacaagtatggtggaatggtgcctaagaagcctctgatttcaaaggatcaggagcgcgcctattttgattctgcagactgggtccttggcaagcaagctgcaaacagcggcaccgcacgggctgcgactgctatcgaattcttgaagccaaagctaaagaggacgccccatcaccagcttccccctcgcaagccgacctgtgcgtccagctgagctcaagacagtgcgaaaatccaaagggccaggcttacaaaagctccctggctgggagagacgatgaagagcgttatcaagttttttttagttggttgcattggttaggaaggcaaattcaggattgatgagccctgcatttggctttgttcgcagcactcgctgaattattaatttaagcatgtgggggacatagataaaactagactcctgctattatatgcttaattgtggaagtggtagatgacacccatctgtttcaatgtatctttggtcggcagatgaaatgtatcctctctatctacttggcttctccctttctttactagacctcatatataatattcaccgaaaagagaatgaacgaatggatattccaatttgggatgaaaatgctaaatcatttagaaggagcttattttttttattaagggaatccttttggaggagctgagaatggtacggtatatgctactctcgtcgtaggatgattttac

SEQ ID NO: 208524 - DNA, 2731 bp, Zea Mays
gtcttctcaacgcagttccccctagcaatccatagcaaaagcaattgaagaaaagattagtggagatcagcgacgttatttattgaacgagcaacttaaggcaatcaagaaggagttgggtttggagactgatgacaaaacagcattgtctgcaaaatttagagaacgtatagaatcaaagaaggacaaatgtcctcctcatgttttacaagtcattgaagaagagcttaccaagcttcagcttttagaagccagctctagtgagttcagtgtaactcgtaattatttggactggctgacagtgttgccatggggaaattatagtgatgaaaacttcgatgtccaccatgctcagaaaattctcgatgaagaccattatggtttgagtgatgtgaaagagaggatactggaattcatagcagttgggaagttaagagggacttcacaaggcaagatcatatgtctttctgggccaccgggagttggaaaaaccagtattggtcgttcaattgcacgtgcactgaaccgtcagttctacaggttttctgttggaggtttggctgatgtggctgaaatcaagggccatcgacgcacatatgttggtgcaatgccagggaagatggtgcagtgtcttaaatcagttggtacagcaaatcctctagtgttgatagatgagattgacaagcttgggaagggtcattctggcgatccagctagtgcattgttggaactccttgaccctgagcagaatgttaatttcttagatcactaccttgatgttcctattgacctatccaaggttctatttgtttgcacagcaaacgtaatagagatgataccaaatccattactggataggatggagatcattgctatagctgggtatataactgatgagaagatgcatattgctcgggactatctagagaagaatacaagacaggcttgtggcattaagcctgagcaggttgaagttacagatactgctcttcttgctctcattgaaaactactgtcgagaagctggagtgaggaaccttcaaaagcagattgagaaaatttaccgtaagatagctctgcagcttgttcgccaaggagtatcgaatgagccagaccatgagtctgtcagtgcctctgtaactgaggaatctggtaatggtgataacaccacaacaaaagatgagattttgaaggatcctgctgtagaagatgcttcagtcaccaacaatgttacaaatcctgcctccgaggaagctaatgaagaaaatttgacaagtgaagcagcaaaagaagacagcacatctaagggcaacaagggcactgatggagcagcggacaaggcaattgagaaggttgtggtcgattcatcaaaccttggtgattttgttgggaaacctgtgttccaggctgagcgtatatatgagcatactccagttggagtggtcatgggtttagcttggactgctatgggtggttctactttgtacatcgaaacaaaaaaagtggaggaaagggaagggaaaggtgcacttgtgcttacaggacagcttggagatgtcatgaaagagagtgctcagattgcgcacacagttggcagagctgtattactggagaaagagccagataaccatttttttgcaaactcgaaggtgcacttgcatgttcctgcagggtccacccctaaggatggccctagtgctggatgcaccatgataacatctatgctgtccttagctatgggaaagcctgtcaagaaggacctcgcaatgacgggtgaagtaacactaaccggaagaatcctcccaatcggcggggtaaaagagaaaacaattgcggcaaggagaagtgcgataaagacactcatatttccggcagcgaataaaagggatttcgatgagcttgcttctaatgtgaaggaaggcctcgaagttcattttgttgacacatacagtgaaatatatgatttagctttccagagtgacgccgggacagaaacaagctgagatgatttagctttatgggattgagattttttccccctagacccacgacagaaacaagtccgtcaagaggcaggcaaaccagaccattgtaaccaagatgggtggagttaattgatattcacgagaaaaatgaaatcctttttttttgcccccaatataacatcattgaatttaagagatttttggctaggttgtacgtactagtgtggttgcccatctaggtggtatagcctatattattagtaggaataagaaaagcagcatggatgcaccatctgttatttatatttattgatttaagagtgttctctaaaagcagcaggtatgccccagttgttattcattaaatttgtttcagtgagtgttagttacctttggatactgtactgtgcgtcatcaatttataggatgttttgattttttttggatacacaaacttctatcattatgcatctaatttgtggccgattttgattttgtagtccttcctctgtttcaatttattggatgttttgagtttttttttatacataaatttttattgttatgtatccaatttatggatggttttagacatataacgtttattatgtatctagtaaaaatggcgatctgtaatttagaagagggtggtaaaaacagttgggcgtttaaactcgttctgtacatttacgtgagtgtggtgctgttcgggattgaacttagggtgccaggagaagtaaaagtgac

SEQ ID NO: 208525 - DNA, 1402 bp, Zea Mays
gccaattctcattttggcgggaacatactctgggtctagcctgtttggtaattggtactcggctccactcggcgagattcgggagcgcgcttccaaacgccgccgcgattcggcatcctgctcgcgtgagaagcgctcatccggcattccggctccaaccgtccattctccgccccgcttcgccttttttcccgtcgcttccttctccgctgctcccgccgcccttctccggcaggattcgacggcggcggcggtctctgcgagcctcctcttacttcacggctgcctggagggcttcccgagccgcggcgatctctcacagctcgccttcctcgtcatcctgcaccgctgcggcctcccgcgccgtcgagagtgagcgagttcgggagcgctaccgctaccaaacatggagcttagctggagcgggagcccgtgtgagctggttgggagtcctaccaaacaggcattctaaccctaatcgagtggtgccttccctagccgtcggctatggacaagttcctcgtgccggcgccgcctcattgtggcgaggagcccgcgccgcctcctaggagacaccggtggaggcgcatcatcgcggagctggacggccgcatagactccaggttccagcacagagattcgcgcctccttcttgattccttcaccgaggttggggccttcgatcacaagtattacattcatggcgaggaaaggtgtcggacatacgtggatcgaataattagtgcttcaactataaattttcatccagtaagggagggtgtttcagcaatagaattcgatagaaagggaatatacattgcatcagtgacactctcagggtgtctgacggtgcatgactttgagactttgtactgctctaaatatggcccaccatgcagtatgccagatgaatcatcaaattatgtgctccatatatctaaccgaattcccctaaatgctgtccgatggaatccaggaaaccaagacgagattgcttgcacatcaaatcaaagtgataacgttttcctctttgatattggctatgtctcatctacaccaactgaagttttgcataaaggaaaatcgaaattcccctcgctctactctgaatcctgcaagagtttgactgatataacttttacttcagatgataagtcacggatatttgcatctggccttgatggggcagtgtacatgtgggacaggcgatcaagtaagacacactgtcttgagcttgtggcatctccagaagctcagttcaacactgtcaagttaactgtggataatcggactgtgtttggtgcaactaaaaatggcacaattcatgttgggatctccgtggagggagggcatcagctgcttttcaaagccacaacgaggttcagcaattgatgtcagtgcc

SEQ ID NO: 208526 - DNA, 1351 bp, Zea Mays
gcctgtttggtaattggtactcggctccactcggcgagattcgggagcgcgcttccaaacgccgccgcgattcggcatcctgctcgcgtgagaagcgctcatccggcattccggctccaaccgtccattctccgccccgcttcgccttttttcccgtcgcttccttctccgctgctcccgccgcccttctccggcaggattcgacggcggcggcggtctctgcgagcctcctcttacttcacggctgcctggagggcttcccgagccgcggcgatctctcacagctcgccttcctcgtcatcctgcaccgctgcggcctcccgcgccgtcgagagtgagcgagttcgggagcgctaccgctaccaaacatggagcttagctggagcgggagcccgtgtgagctggttgggagtcctaccaaacaggcattctaaccctaatcgagtggtgccttccctagccgtcggctatggacaagttcctcgtgccggcgccgcctcattgtggcgaggagcccgcgccgcctcctaggagacaccggtggaggcgcatcatcgcggagctggacggccgcatagactccaggttccagcacagagattcgcgcctccttcttgattccttcaccgaggttggggccttcgatcacaagtattacattcatggcgaggaaaggtggatcgaataattagtgcttcaactataaattttcatccagtaagggagggtgtttcagcaatagaattcgatagaaagggaatatacattgcatcagtgacactctcagggtgtctgacggtgcatgactttgagactttgtactgctctaaatatggcccaccatgcagtatgccagatgaatcatcaaattatgtgctccatatatctaaccgaattcccctaaatgctgtccgatggaatccaggaaaccaagacgagattgcttgcacatcaaatcaaagtgataacgttttcctctttgatattggctatgtctcatctacaccaactgaagttttgcataaaggaaaatcgaaattcccctcgctctactctgaatcctgcaagagtttgactgatataacttttacttcagatgataagtcacggatatttgcatctggccttgatggggcagtgtacatgtgggacaggcgatcaagtaagacacactgtcttgagcttgtggcatctccagaagctcagttcaacactgtcaagttaactgtggataatcggactgtgtttggtgcaactaaaaatggcacaattcatgttgggatctccgtggagggagggcatcagctgcttttcaaagccacaacgaggttcagcaattgatgtcagtgcc

SEQ ID NO: 208527 - DNA, 1072 bp, Zea Mays
catcgattaccttcagaaaaccgcgaccaattcaaggtgtctggaaagccaattaaatttgtaggacaaggagagcgtattgaagatcttgagcctttctacccagatcgtatggcacaacgtatcttgggaatgggagatgtactttcatttgttgaaaaagcacaagaagtgatgcgccaagaagatgctgatgaattacagaagaagatcttgagtgcaaaattcaactttaatgacttcctgaagcaaacacaaatgattgcaaaaatgggttcattcagtcgtttgattggcatgattccgggcatgaacaaggttactcctgcacaaatccgtgaagctgagaagaatctcaagtttatggaatcaatgatcaatgtgatgactcttgaggaaagggaacgaccagagcttcttgctgaatcacgcgagagaaggaaacgagtggccaaggactctggaaagactgaacagcaggtgagccaattggtcgcgcaactcttccaaatgcgtgcaaaaatgcagaaaatgatgggcgctatgcaaggaaaagagtcaccagacatggacgagctcatgggatcgatgaaagctgaggagcagtctgctgccggtactggacggcgtagaaggaagtatggcaacctgaggcagcggcaactggatgccatgcgtggtttccgcagacggtgagatgttcattgccgactagcactggcggtgcctgcacgaacgatggcatttagggacttgggctcggatatagaagtggaagaagatgaagtgcttttgggtgcaatggcaatcatctgggtacattgagttgagtttgcatattcatgtgcagtgtcctattttgtcatattagctgtattattatctttcttcggagcaagaactcgcaaaattgcgtcatctgaaccctgtccaccgtcgtggaaacgagtgcacttcggccatgctagcaaatacaaattcggatctggatcatacatgtggcacataactctgtggaagaattttgcgagaaaaaaaaatcaccaataagcatagctaactttgcttttag

SEQ ID NO: 208528 - DNA, 1160 bp, Zea Mays
caagcataaggcgcacaatataaggttggtcagctccttcaatgatgagattggtataactggtgctatactgacaaaactggatggtgactcaagaggtggagcagcactgagcgttaaagaggtgtctggaaagccaattaaatttgtaggacaaggagagcgtattgaagatcttgagcctttctacccagatcgtatggcacaacgtatcttgggaatgggagatgtactttcatttgttgaaaaagcacaagaagtgatgcgccaagaagatgctgatgaattacagaagaagatcttgagtgcaaaattcaactttaatgacttcctgaagcaaacacaaatgattgcaaaaatgggttcattcagtcgtttgattggcatgattccgggcatgaacaaggttactcctgcacaaatccgtgaagctgagaagaatctcaagtttatggaatcaatgatcaatgtgatgactcttgaggaaagggaacgaccagagcttcttgctgaatcacgcgagagaaggaaacgagtggccaaggactctggaaagactgaacagcaggtgagccaattggtcgcgcaactcttccaaatgcgtgcaaaaatgcagaaaatgatgggcgctatgcaaggaaaagagtcaccagacatggacgagctcatgggatcgatgaaagctgaggagcagtctgctgccggtactggacggcgtagaaggaagtatggcaacctgaggcagcggcaactggatgccatgcgtggtttccgcagacggtgagatgttcattgccgactagcactggcggtgcctgcacgaacgatggcatttagggacttgggctcggatatagaagtggaagaagatgaagtgcttttgggtgcaatggcaatcatctgggtacattgagttgagtttgcatattcatgtgcagtgtcctattttgtcatattagctgtattattatctttcttcggagcaagaactcgcaaaattgcgtcatctgaaccctgtccaccgtcgtggaaacgagtgcacttcggccatgctagcaaatacaaattcggatctggatcatacatgtggcacataactctgtggaagaattttgcgagaaaaaaaaatcaccaataagcatagctaactttgcttttag

SEQ ID NO: 208529 - DNA, 1270 bp, Zea Mays
aagggcaactatgtaatatcttggatccaggtagataaagcaatgatgaatgagttgaaagaagtaaaaaaagcagtgaatcctacagaagttcttcttgtggttgatgccatgactggccaagaagctgcagggttggtcagctccttcaatgatgagattggtataactggtgctatactgacaaaactggatggtgactcaagaggtggagcagcactgagcgttaaagaggtgtctggaaagccaattaaatttgtaggacaaggagagcgtattgaagatcttgagcctttctacccagatcgtatggcacaacgtatcttgggaatgggagatgtactttcatttgttgaaaaagcacaagaagtgatgcgccaagaagatgctgatgaattacagaagaagatcttgagtgcaaaattcaactttaatgacttcctgaagcaaacacaaatgattgcaaaaatgggttcattcagtcgtttgattggcatgattccgggcatgaacaaggttactcctgcacaaatccgtgaagctgagaagaatctcaagtttatggaatcaatgatcaatgtgatgactcttgaggaaagggaacgaccagagcttcttgctgaatcacgcgagagaaggaaacgagtggccaaggactctggaaagactgaacagcaggtgagccaattggtcgcgcaactcttccaaatgcgtgcaaaaatgcagaaaatgatgggcgctatgcaaggaaaagagtcaccagacatggacgagctcatgggatcgatgaaagctgaggagcagtctgctgccggtactggacggcgtagaaggaagtatggcaacctgaggcagcggcaactggatgccatgcgtggtttccgcagacggtgagatgttcattgccgactagcactggcggtgcctgcacgaacgatggcatttagggacttgggctcggatatagaagtggaagaagatgaagtgcttttgggtgcaatggcaatcatctgggtacattgagttgagtttgcatattcatgtgcagtgtcctattttgtcatattagctgtattattatctttcttcggagcaagaactcgcaaaattgcgtcatctgaaccctgtccaccgtcgtggaaacgagtgcacttcggccatgctagcaaatacaaattcggatctggatcatacatgtggcacataactctgtggaagaattttgcgagaaaaaaaaatcaccaataagcatagctaactttgcttttag

SEQ ID NO: 208530 - DNA, 1905 bp, Zea Mays
tctcctccgcagaacacactgctcccgtacctcgtctcctgcccaaacccaatggaggccacgacagcgctcgcgctctcctcctcgtcccttgccaccgcacgtcgctcgccggagaaggcgaccgctgcgtccctcagcctccgccgtttctcagctaccacctcgctccacctccgcgctgcccggagcccagcgcttcgctcgcaccagtcacccttccagggatggaggcggcgggggagggcgggcgggctggtggttcgggcggagatgtttggccagctcaccaccggcctcgagtccgcctggaacaagctgaggggagtcgatgtattgacaaaggaaaacatagctgaaccaatgcgggatatcagaagagcacttttggaggccgatgtctgcaaggtgttggaaaaactactgtttgtgcgaagcttgccttctatctcaaaaaactgggcaagagctgtatgctagttgctgcagatgtttacaggcctgctgctattgatcaactcactattctgggtaaaaaggttggtgtaccagtttactcagaaggaactgaagcaaaaccttcacaaatagccaaaaacggtttgaaggaggcaaaagtcaataaggctgatgtaattatagtggacacggctggaagactgcaggtagataaagcaatgatgaatgagttgaaagaagtaaaaaaagcagtgaatcctacagaagttcttcttgtggttgatgccatgactggccaagaagctgcagggttggtcagctccttcaatgatgagattggtataactggtgctatactgacaaaactggatggtgactcaagaggtggagcagcactgagcgttaaagaggtgtctggaaagccaattaaatttgtaggacaaggagagcgtattgaagatcttgagcctttctacccagatcgtatggcacaacgtatcttgggaatgggagatgtactttcatttgttgaaaaagcacaagaagtgatgcgccaagaagatgctgatgaattacagaagaagatcttgagtgcaaaattcaactttaatgacttcctgaagcaaacacaaatgattgcaaaaatgggttcattcagtcgtttgattggcatgattccgggcatgaacaaggttactcctgcacaaatccgtgaagctgagaagaatctcaagtttatggaatcaatgatcaatgtgatgactcttgaggaaagggaacgaccagagcttcttgctgaatcacgcgagagaaggaaacgagtggccaaggactctggaaagactgaacagcaggtgagccaattggtcgcgcaactcttccaaatgcgtgcaaaaatgcagaaaatgatgggcgctatgcaaggaaaagagtcaccagacatggacgagctcatgggatcgatgaaagctgaggagcagtctgctgccggtactggacggcgtagaaggaagtatggcaacctgaggcagcggcaactggatgccatgcgtggtttccgcagacggtgagatgttcattgccgactagcactggcggtgcctgcacgaacgatggcatttagggacttgggctcggatatagaagtggaagaagatgaagtgcttttgggtgcaatggcaatcatctgggtacattgagttgagtttgcatattcatgtgcagtgtcctattttgtcatattagctgtattattatctttcttcggagcaagaactcgcaaaattgcgtcatctgaaccctgtccaccgtcgtggaaacgagtgcacttcggccatgctagcaaatacaaattcggatctggatcatacatgtggcacataactctgtggaagaattttgcgagaaaaaaaaatcaccaataagcatagctaactttgcttttag

SEQ ID NO: 208531 - DNA, 2030 bp, Zea Mays
gtcgcttccctctcctccgcagaacacactgctcccgtacctcgtctcctgcccaaacccaatggaggccacgacagcgctcgcgctctcctcctcgtcccttgccaccgcacgtcgctcgccggagaaggcgaccgctgcgtccctcagcctccgccgtttctcagctaccacctcgctccacctccgcgctgcccggagcccagcgcttcgctcgcaccagtcacccttccagggatggaggcggcgggggagggcgggcgggctggtggttcgggcggagatgtttggccagctcaccaccggcctcgagtccgcctggaacaagctgaggggagtcgatgtattgacaaaggaaaacatagctgaaccaatgcgggatatcagaagagcacttttggaggccgatgtaagtttgccagtagtaagaagatttattgagtctgtaagtgaaaaggctgtaggcaccgatgtgatccgaggtgtccgacctgaccagcagttggtgaaggttgtgagtgatgaactggtacaactgatgggcggggaggtatcagatttggtgtttgcaaaatctgggccaactattatattattggcaggtctgcaaggtgttggaaaaactactgtttgtgcgaagcttgccttctatctcaaaaaactggttggtgtaccagtttactcagaaggaactgaagcaaaaccttcacaaatagccaaaaacggtttgaaggaggcaaaagtcaataaggctgatgtaattatagtggacacggctggaagactgcaggtagataaagcaatgatgaatgagttgaaagaagtaaaaaaagcagtgaatcctacagaagttcttcttgtggttgatgccatgactggccaagaagctgcagggttggtcagctccttcaatgatgagattggtataactggtgctatactgacaaaactggatggtgactcaagaggtggagcagcactgagcgttaaagaggtgtctggaaagccaattaaatttgtaggacaaggagagcgtattgaagatcttgagcctttctacccagatcgtatggcacaacgtatcttgggaatgggagatgtactttcatttgttgaaaaagcacaagaagtgatgcgccaagaagatgctgatgaattacagaagaagatcttgagtgcaaaattcaactttaatgacttcctgaagcaaacacaaatgattgcaaaaatgggttcattcagtcgtttgattggcatgattccgggcatgaacaaggttactcctgcacaaatccgtgaagctgagaagaatctcaagtttatggaatcaatgatcaatgtgatgactcttgaggaaagggaacgaccagagcttcttgctgaatcacgcgagagaaggaaacgagtggccaaggactctggaaagactgaacagcaggtgagccaattggtcgcgcaactcttccaaatgcgtgcaaaaatgcagaaaatgatgggcgctatgcaaggaaaagagtcaccagacatggacgagctcatgggatcgatgaaagctgaggagcagtctgctgccggtactggacggcgtagaaggaagtatggcaacctgaggcagcggcaactggatgccatgcgtggtttccgcagacggtgagatgttcattgccgactagcactggcggtgcctgcacgaacgatggcatttagggacttgggctcggatatagaagtggaagaagatgaagtgcttttgggtgcaatggcaatcatctgggtacattgagttgagtttgcatattcatgtgcagtgtcctattttgtcatattagctgtattattatctttcttcggagcaagaactcgcaaaattgcgtcatctgaaccctgtccaccgtcgtggaaacgagtgcacttcggccatgctagcaaatacaaattcggatctggatcatacatgtggcacataactctgtggaagaattttgcgagaaaaaaaaatcaccaataagcatagctaactttgcttttag

SEQ ID NO: 208532 - DNA, 2120 bp, Zea Mays
ctcttatccgcctcgtcgcttccctctcctccgcagaacacactgctcccgtacctcgtctcctgcccaaacccaatggaggccacgacagcgctcgcgctctcctcctcgtcccttgccaccgcacgtcgctcgccggagaaggcgaccgctgcgtccctcagcctccgccgtttctcagctaccacctcgctccacctccgcgctgcccggagcccagcgcttcgctcgcaccagtcacccttccagggatggaggcggcgggggagggcgggcgggctggtggttcgggcggagatgtttggccagctcaccaccggcctcgagtccgcctggaacaagctgaggggagtcgatgtattgacaaaggaaaacatagctgaaccaatgcgggatatcagaagagcacttttggaggccgatgtaagtttgccagtagtaagaagatttattgagtctgtaagtgaaaaggctgtaggcaccgatgtgatccgaggtgtccgacctgaccagcagttggtgaaggttgtgagtgatgaactggtacaactgatgggcggggaggtatcagatttggtgtttgcaaaatctgggccaactattatattattggcaggtctgcaaggtgttggaaaaactactgtttgtgcgaagcttgccttctatctcaaaaaactgggcaagagctgtatgctagttgctgcagatgtttacaggcctgctgctattgatcaactcactattctgggtaaaaagtagaaaacatttgaatgttgataggttggtgtaccagtttactcagaaggaactgaagcaaaaccttcacaaatagccaaaaacggtttgaaggaggcaaaagtcaataaggctgatgtaattatagtggacacggctggaagactgcaggtagataaagcaatgatgaatgagttgaaagaagtaaaaaaagcagtgaatcctacagaagttcttcttgtggttgatgccatgactggccaagaagctgcagggttggtcagctccttcaatgatgagattggtataactggtgctatactgacaaaactggatggtgactcaagaggtgtctggaaagccaattaaatttgtaggacaaggagagcgtattgaagatcttgagcctttctacccagatcgtatggcacaacgtatcttgggaatgggagatgtactttcatttgttgaaaaagcacaagaagtgatgcgccaagaagatgctgatgaattacagaagaagatcttgagtgcaaaattcaactttaatgacttcctgaagcaaacacaaatgattgcaaaaatgggttcattcagtcgtttgattggcatgattccgggcatgaacaaggttactcctgcacaaatccgtgaagctgagaagaatctcaagtttatggaatcaatgatcaatgtgatgactcttgaggaaagggaacgaccagagcttcttgctgaatcacgcgagagaaggaaacgagtggccaaggactctggaaagactgaacagcaggtgagccaattggtcgcgcaactcttccaaatgcgtgcaaaaatgcagaaaatgatgggcgctatgcaaggaaaagagtcaccagacatggacgagctcatgggatcgatgaaagctgaggagcagtctgctgccggtactggacggcgtagaaggaagtatggcaacctgaggcagcggcaactggatgccatgcgtggtttccgcagacggtgagatgttcattgccgactagcactggcggtgcctgcacgaacgatggcatttagggacttgggctcggatatagaagtggaagaagatgaagtgcttttgggtgcaatggcaatcatctgggtacattgagttgagtttgcatattcatgtgcagtgtcctattttgtcatattagctgtattattatctttcttcggagcaagaactcgcaaaattgcgtcatctgaaccctgtccaccgtcgtggaaacgagtgcacttcggccatgctagcaaatacaaattcggatctggatcatacatgtggcacataactctgtggaagaattttgcgagaaaaaaaaatcaccaataagcatagctaactttgcttttag

SEQ ID NO: 208533 - DNA, 489 bp, Zea Mays
cagaaaaccgcgaccaattcaaggtgtctggaaagccaattaaatttgtaggacaaggagagcgtattgaagatcttgagcctttctacccagatcgtatggcacaacgtatcttgggaatgggagatgtactttcatttgttgaaaaagcacaagaagtgatgcgccaagaagatgctgatgaattacagaagaagatcttgagtgcaaaattcaactttaatgacttcctgaagcaaacacaaatgattgcaaaaatgggttcattcagtcgtttgattggcatgattccgggcatgaacaaggttactcctgcacaaatccgtgaagctgagaagaatctcaagtttatggaatcaatgatcaatgtgatgactcttgaggaaagggaacgaccagagcttcttgctgaatcacgcgagagaaggaaacgagtggccaaggactctggaaagactgaacagcagattaactgttcctccactatca

SEQ ID NO: 208534 - DNA, 2472 bp, Zea Mays
gacgaccacaaaatcgtagtagtcacagaagttggaagaacaacaactgtgtataatacaagtgatcaatggaaccatgtttagcttaaaaaaagaccgcagacccgcagactgtcagccgttaaaaaaaagaaaaaggaaaaaataaaaaccagacagccagccccgagccccaaacggccaaacctccttggacacgactcgccgcacccatccccatccgccgccgctgccatggccgacgagattgacacgaggccggcctccgcgggctcccgcggccgtcctgcgcacgctaccgaggacgacgaccgggaggagggcgagatcgccgccgacgccccctcgcccgccctccccgccgcgcacccgctcgagcactcgtggaccttctggttcgacaacccgcacggcaagaacaagatggccgcctgggggagctccatccgacccatccacaccttctccaccgtagaggacttctgggggtgcgtccgactatctctctctgacacatgcacacctcttaacctcctttccctcctctcacactctcacaactactggtacaagtccagattcacaatatacgagccaaatctgccatggtttacggatcttggatctctagattaattaacgcattagtttctgactatgcctaatccatagcactctcattcagcttctaacacttgtttatacagcgggaaagatcaattctgagagcatagttactgtcttagcttcatttgcaaggcgcctatccgaagcagatattcattttcacatgttttttgctcacctagttattctagccatttagagatttatccccgaaaccacgcaaacctgttgttctgatgttgcgagctgtctctgcactttttacatgtttttgcccctgctatatcatagatattagccttctcatttgcctttttagaagcagctgtcgatcaatcttacacctctttcggtttgattcatgcacatactgtatgaaatctttattgggtaagcatggtatgtttccattctcaaacatctccagacctacctgctagtccttgttcatactcaaacacacgccttgacaagtctacagtcagtggtggatccaggaatggatcaaaagaggggctataaggcacacttgacggagacgccagcgtatgcggcggacgtcttaggggcagccagcggtgtgctgcaggcttggcgtgctgcagcagcctgcctgcagcttgtgccttgcattggtcgctgagcacctgtgcgctgctagctgctgtagctgctttaggtgtgtcggccatccacactgctagctgctgtggatgcccgcgctgccgcgctggtactagcggcgtggacggaggccggacgcaggtgctgaatggcgcggccaggaaggaggttgtgacctattttagttggactttgtgggctaaaatgatggtatagtataggtgctattgggctgcgactggggcttcaaccctagccctagattcgcccctgtctacagctacagttggtattaagtcaaagtgacacccgcctcatggatctagtttatatgagaaaattcaatctctgtcatgacgcaaaatctgtaatgtatatttttttatattcagaacccgagattcgatttgatctgatgaactgagcttcataggttattggctctcttgcttgacttcctgtcgagtttcttaacggttgtggtgcgtgatcgaaagttggaaggtctgatatttaataacccttcctctcttccttgtgataagtgctcttggtctaatcccgtgtcagacatgtgctgatctatctttggtttggtccttttgtgtccccgtccaactttggctttcgtctataaatatattccatctaatggatctgtgatttcgcagcctctacaataatatccatcaccctagcaagttgatcggtggagctgacttccattgcttcaagaacaagattgagccaaaatgggaagaccctatttgtgctaatggcggtaaatggaccatcagctgtggaagaggaaaatctgacacgctgtggctgcacaccctgttggctatgatcggcgaacaattcgactatggtgatgaaatttgtggagcagtagtcagcgtgcgtagcaagcaggaaagaatagctatctggacaaaaaatgctgctaatgaagctgctcaggtacggtcgtatgggtgctgcagcctgcagtcgcatctctttctaagttgcttttaaaaacagcttgtttcctttctcctatgcaatcatcacacttttatgatagttttcggtttcacgatgaatacttgtacaacaacctatatattttccatgtttacaaataatatactttttccctgatacaattccaatattatcatacatgcaaattgtcaggtttgagttattattccatataagcgtgctgtgttactg

SEQ ID NO: 208535 - DNA, 3331 bp, Zea Mays
ctgccggcgcaaccgacggctgccttttgaggacgtggccgaggcgggttcgctttttcatgttcctcctctcccttcccctggcttcccaagtcccgtcccgtctcctgggctggctgaccagtgaccagccctctcccacgtcgcacgcctgtggctcctgacctttccaccaccggagttaatgcctccgcctctccgtcagcgccgcctggcctcgccgtctcgctgtgcgcggcgtgggtggtagcagtaccacgcgtggtggttgattgagccattggatgggcggaattgccgttggcgaggtgaggcgtggagactgagggggagctgttgtggcgcgtgtctccctgtcgctcacagcttctttttattcactccgcgcccggttccgttccggggaatgggttctgcggaaggattctgagccgcggagtcgggggagggaggaggcgcgacgctggtgcggccgctgctgcctcgatctcttgccgcctgggctctcgtacgtacgtcctcgtagtcgtcgccgcggcgcaatttggcggcgtgcgcgttccttgcctagattggtgcgatccaatttctgagaggcgtagaggtgcggcgccacagaacacgagcgcgcgcgcctggtgcttgctgagaagcatctgcaaccgtcattccaggctcacgaggaaactcatttactcgaatcatgtcggactttgtcaggagtagatatgataagcaagaagatttccaagttttgttgagcaagaaagatcctggagaacaacctcagcacaaggattacctgtggatggctcactggaccaaagcaagcagcgctgcagaaccccgaaacaatgacagcaatcctttggaggataccaacaatggcactactacgaaagatagcgagaccttgccttatgaattcatgaaatctacagttgctgaaaggctcatggtaggagtacgccatggaagtgcctccatgcagcatgtccgacaattcaagtctagtatgcggggtatgccacgactttccaatgaattgggaccaaagaatagtgaacaggttgatgagtcttttgaaaaatctttgaaaaacgatgctatgaacttgagaactaggcaagttgtgtcagaaacatattctattcacaagctttcagagttaccgttggattttcagaaccttgggagctcagatgatccaagtccagattggagccactttccaatgttcgaaattaatcaaaagattgacagtattgtcaaccgtaaacgaaggtctccacctctggatctaaatgtgtctgcatcccatgtgatggccctatcgtcacaagaatacatgatgcactcacatcaaacagctgatgagaacatggatacgtgcaaacctgcagaaggctttgcatctcgtgtagaagatcatgctggcttcaattcagatcctccagggccaaagttaaaagggcaattgttggataccatgtcatgttcttgcagcaaggatgacaacaactcagcagattgtccaatagatgagcagcacacaagccactattttgcaaactcaaagcatgaactaccctctgtatctaacaaaaagaagttcaagtttgcaggaaacaaccacaatcgaattgttgcaagtgcgtcccacgatctgaagacaaaaagatctgctgtccataaacaacaaagtgctgcagaggcagtgttctgtgcaccagtacttgatagtgagtttcagaatgaacctataactatttccaacatcgacaagaaggatggtgaaaattttcatgatatgtataaatgtcttggcaaggctgtttcatgtcctttgttaccttatgagcatcgtcatctgaatacacagagaacggaatctgcagaaaatttgaaagtctgcacgcttcctgatcatcaaactgcaaataaattgacagaaaagagtcatggtgagctgctgacatatggaccaaagtcaaaggaaatgtatacaggttcttgtaaccaaagaaggaaaatctagcgactttggagtttgtatgtatggcaccaatattggcagtcagttattcagagcacagaatcaatcttcagctaagactgaaacattgcacagcgatactctcattgggtccaaatccccagcaggcatcgcttcattgtcggcacaaaaggactatggttgcacggacgaagcaaaaagtgagcagctcgtagctccgtccaggagaggagattcaggatacggtaaagaagatggatttcataatgtcaatgaaggtcatgatgtttggtccaaagcaactattggtagtaagcaatcatgcatgcccggaacgggaatcacgaacctagatctgatactttcccagatgagcagaatgagaaatcaaatttccattggtagaattcaaccaccaataggtgccgagccaagtgacagatggctcaagcgcctacagcctgacataccagatcctgacatccctggttccaggaggccaaacgttggaggcagccctccactcaggcaaagaaatcgttcgtttgacatggcacttccttgcaacaggactgacactggaacaactgactgtgttatggaggaccagagcttggataaagtggaaaaaacgcaagaaaagcaagaaagtaccccaattccagcgaagagcgtgaatagctggataggaagatggtgccagggaggcactcctgttttccatgaaggcccaggccagggaaggcaagcaacaaagcctggccggccatctgaagaactcgaaggtcggttcccaagcattgcagcgatggcgatgatggggcgagcgatgaacaagcttcggccgtgcgagcatcagaagatggggccacttgtggtgtggaagacagattgacctcatatatatatgtttttgggtgtaatatagtggtttctttccaaaaaaagaaaaaaaaatgaaaagcaacagtgaattttgcctggtttattgtttatggtgtaataaaccatatgatggctcatggtttattgttttctgaagtgaaagtagctaggtgtagtggatactggtgatgtaatggtctggtctcatataccaacaatataataatattttactgtttactgtgtcgttatgatgatgtgttgaggcattgtcaagatgaatttgtgaattatccctgaacagaaacatcagtcttcgtttttgttttgataggggaaccgtcatgcgccaacatgttgtagaacagctaatgatgaagcaaaatatatataaaaaaagatgatgaaatcacaatccgtgtaactggg

SEQ ID NO: 208536 - DNA, 3720 bp, Zea Mays
cccaagtcccgtcccgtctcctgggctggctgaccagtgaccagccctctcccacgtcgcacgcctgtggctcctgacctttccaccaccggagttaatgcctccgcctctccgtcagcgccgcctggcctcgccgtctcgctgtgcgcggcgtgggtggtagcagtaccacgcgtggtggttgattgagccattggatgggcggaattgccgttggcgaggtgaggcgtggagactgagggggagctgttgtggcgcgtgtctccctgtcgctcacagcttctttttattcactccgcgcccggttccgttccggggaatgggttctgcggaaggattctgagccgcggagtcgggggagggaggaggcgcgacgctggtgcggccgctgctgcctcgatctcttgccgcctgggctctcgtacgtacgtcctcgtagtcgtcgccgcggcgcaatttggcggcgtgcgcgttccttgcctagattggtgcgatccaatttctgagaggcgtagaggtgcggcgccacagaacacgagcgcgcgcgcctggtgcttgctgagaagcatctgcaaccgtcattccaggctcacgaggaaactcatttactcgaatcatgtcggactttgtcaggagtagatatgataagcaagaagatttccaagttttgttgagcaagaaagatcctggagaacaacctcagcacaaggattacctgtggatggctcactggaccaaagcaagcagcgctgcagaaccccgaaacaatgacagcaatcctttggaggataccaacaatggcactactacgaaagatagcgagaccttgccttatgaattcatgaaatctacagttgctgaaaggctcatggtaggagtacgccatggaagtgcctccatgcagcatgtccgacaattcaagtctagtatgcggggtatgccacgactttccaatgaattgggaccaaagaatagtgaacaggttgatgagtcttttgaaaaatctttgaaaaacgatgctatgaacttgagaactaggcaagttgtgtcagaaacatattctattcacaagctttcagagttaccgttggattttcagaaccttgggagctcagatgatccaagtccagattggagccactttccaatgttcgaaattaatcaaaagattgacagtattgtcaaccgtaaacgaaggtctccacctctggatctaaatgtgtctgcatcccatgtgatggccctatcgtcacaagaatacatgatgcactcacatcaaacagctgatgagaacatggatacgtgcaaacctgcagaaggctttgcatctcgtgtagaagatcatgctggcttcaattcagatcctccagggccaaagttaaaagggcaattgttggataccatgtcatgttcttgcagcaaggatgacaacaactcagcagattgtccaatagatgagcagcacacaagccactattttgcaaactcaaagcatgaactaccctctgtatctaacaaaaagaagttcaagtttgcaggaaacaaccacaatcgaattgttgcaagtgcgtcccacgatctgaagacaaaaagatctgctgtccataaacaacaaagtgctgcagaggcagtgttctgtgcaccagtacttgatagtgagtttcagaatgaacctataactatttccaacatcgacaagaaggatggtgaaaattttcatgatatgtataaatgtcttggcaaggctgtttcatgtcctttgttaccttatgagcatcgtcatctgaatacacagagaacggaatctgcagaaaatttgaaagtctgcacgcttcctgatcatcaaactgcaaataaattgacagaaaagagtcatggtgagctgctgacatatggaccaaagtcaaaggaaatgtatacaggttcttgtaaccaaagaaggtcttatttctttgaaaagttaacgattccttccaaatcacaaagtacatatcctaaaaattctgcgtcttcaggaaaatctagcgactttggagtttgtatgtatggcaccaatattggcagtcagttattcagagcacagaatcaatcttcagctaagactgaaacattgcacagcgatactctcattgggtccaaatccccagcaggcatcgcttcattgtcggcacaaaaggtatcagtgtaccataatctgcagcaatcttatctcctgtcttgtgcataaagagtgttcctggactacttatattgctcgatactaaaaactaaacagcagcatatggtttggaactgtttttctattgtttggatggttttgaaagaaaaaaatcctgaaaagacttataaattttattgtcagaactgcattttgatgcatgggtttttagtgttagtagatctttcgtgtttacgctctttagttaaaatcttggaattttatcatatttaggttggtttggatatatgttcactggtttcacatgataattatttcaagctctgctcatagttatggacccgtatcagttgatagatctatgtactgattctttcattaccaataaatgtactacaggactatggttgcacggacgaagcaaaaagtgagcagctcgtagctccgtccaggagaggagattcaggatacggtaaagaagatggatttcataatgtcaatgaaggtcatgatgtttggtccaaagcaactattggtagtaagcaatcatgcatgcccggaacgggaatcacgaacctagatctgatactttcccagatgagcagaatgagaaatcaaatttccattggtagaattcaaccaccaataggtgccgagccaagtgacagatggctcaagcgcctacagcctgacataccagatcctgacatccctggttccaggaggccaaacgttggaggcagccctccactcaggcaaagaaatcgttcgtttgacatggcacttccttgcaacaggactgacactggaacaactgactgtgttatggaggaccagagcttggataaagtggaaaaaacgcaagaaaagcaagaaagtaccccaattccagcgaagagcgtgaatagctggataggaagatggtgccagggaggcactcctgttttccatgaaggcccaggccagggaaggcaagcaacaaagcctggccggccatctgaagaactcgaaggtcggttcccaagcattgcagcgatggcgatgatggggcgagcgatgaacaagcttcggccgtgcgagcatcagaagatggggccacttgtggtgtggaagacagattgacctcatatatatatgtttttgggtgtaatatagtggtttctttccaaaaaaagaaaaaaaaatgaaaagcaacagtgaattttgcctggtttattgtttatggtgtaataaaccatatgatggctcatggtttattgttttctgaagtgaaagtagctaggtgtagtggatactggtgatgtaatggtctggtctcatataccaacaatataataatattttactgtttactgtgtcgttatgatgatgtgttgaggcattgtcaagatgaatttgtgaattatccctgaacagaaacatcagtcttcgtttttgttttgataggggaaccgtcatgcgccaacatgttgtagaacagctaatgatgaagcaaaatatatataaaaaaagatgatgaaatcacaatccgtgtaactggg

SEQ ID NO: 208537 - DNA, 3502 bp, Zea Mays
cagtgaccagccctctcccacgtcgcacgcctgtggctcctgacctttccaccaccggagttaatgcctccgcctctccgtcagcgccgcctggcctcgccgtctcgctgtgcgcggcgtgggtggtagcagtaccacgcgtggtggttgattgagccattggatgggcggaattgccgttggcgaggtgaggcgtggagactgagggggagctgttgtggcgcgtgtctccctgtcgctcacagcttctttttattcactccgcgcccggttccgttccggggaatgggttctgcggaaggattctgagccgcggagtcgggggagggaggaggcgcgacgctggtgcggccgctgctgcctcgatctcttgccgcctgggctctcgtacgtacgtcctcgtagtcgtcgccgcggcgcaatttggcggcgtgcgcgttccttgcctagattggtgcgatccaatttctgagaggcgtagaggtgcggcgccacagaacacgagcgcgcgcgcctggtgcttgctgagaagcatctgcaaccgtcattccaggctcacgaggaaactcatttactcgaatcatgtcggactttgtcaggagtagatatgataagcaagaagatttccaagttttgttgagcaagaaagatcctggagaacaacctcagcacaaggattacctgtggatggctcactggaccaaagcaagcagcgctgcagaaccccgaaacaatgacagcaatcctttggaggataccaacaatggcactactacgaaagatagcgagaccttgccttatgaattcatgaaatctacagttgctgaaaggctcatggtaggagtacgccatggaagtgcctccatgcagcatgtccgacaattcaagtctagtatgcggggtatgccacgactttccaatgaattgggaccaaagaatagtgaacaggttgatgagtcttttgaaaaatctttgaaaaacgatgctatgaacttgagaactaggcaagttgtgtcagaaacatattctattcacaagctttcagagttaccgttggattttcagaaccttgggagctcagatgatccaagtccagattggagccactttccaatgttcgaaattaatcaaaagattgacagtattgtcaaccgtaaacgaaggtctccacctctggatctaaatgtgtctgcatcccatgtgatggccctatcgtcacaagaatacatgatgcactcacatcaaacagctgatgagaacatggatacgtgcaaacctgcagaaggctttgcatctcgtgtagaagatcatgctggcttcaattcagatcctccagggccaaagttaaaagggcaattgttggataccatgtcatgttcttgcagcaaggatgacaacaactcagcagattgtccaatagatgagcagcacacaagccactattttgcaaactcaaagcatgaactaccctctgtatctaacaaaaagaagttcaagtttgcaggaaacaaccacaatcgaattgttgcaagtgcgtcccacgatctgaagacaaaaagatctgctgtccataaacaacaaagtgctgcagaggcagtgttctgtgcaccagtacttgatagtgagtttcagaatgaacctataactatttccaacatcgacaagaaggatggtgaaaattttcatgatatgtataaatgtcttggcaaggctgtttcatgtcctttgttaccttatgagcatcgtcatctgaatacacagagaacggaatctgcagaaaatttgaaagtctgcacgcttcctgatcatcaaactgcaaataaattgacagaaaagagtcatggtgagctgctgacatatggaccaaagtcaaaggaaatgtatacaggttcttgtaaccaaagaaggtcttatttctttgaaaagttaacgattccttccaaatcacaaagtacatatcctaaaaattctgcgtcttcaggaaaatctagcgactttggagtttgtatgtatggcaccaatattggcagtcagttattcagagcacagaatcaatcttcagctaagactgaaacattgcacagcgatactctcattgggtccaaatccccagcaggtgaggtctaccatctctacaatacagtatcagctaagagcgtgtttaagtattgttgttagtgttaaaaggtgcttcttagttatgcaaaacatatatgctaacggagcagcatcactggactgttttgtctaatacatatcctttttttttctgttgctgatggtagcaatatcattctcagactcacatgttttcctttttctggattgttgtaggcatcgcttcattgtcggcacaaaaggactatggttgcacggacgaagcaaaaagtgagcagctcgtagctccgtccaggagaggagattcaggatacggtaaagaagatggatttcataatgtcaatgaaggtcatgatgtttggtccaaagcaactattggtagtaagcaatcatgcatgcccggaacgggaatcacgaacctagatctgatactttcccagatgagcagaatgagaaatcaaatttccattggtagaattcaaccaccaataggtgccgagccaagtgacagatggctcaagcgcctacagcctgacataccagatcctgacatccctggttccaggaggccaaacgttggaggcagccctccactcaggcaaagaaatcgttcgtttgacatggcacttccttgcaacaggactgacactggaacaactgactgtgttatggaggaccagagcttggataaagtggaaaaaacgcaagaaaagcaagaaagtaccccaattccagcgaagagcgtgaatagctggataggaagatggtgccagggaggcactcctgttttccatgaaggcccaggccagggaaggcaagcaacaaagcctggccggccatctgaagaactcgaaggtcggttcccaagcattgcagcgatggcgatgatggggcgagcgatgaacaagcttcggccgtgcgagcatcagaagatggggccacttgtggtgtggaagacagattgacctcatatatatatgtttttgggtgtaatatagtggtttctttccaaaaaaagaaaaaaaaatgaaaagcaacagtgaattttgcctggtttattgtttatggtgtaataaaccatatgatggctcatggtttattgttttctgaagtgaaagtagctaggtgtagtggatactggtgatgtaatggtctggtctcatataccaacaatataataatattttactgtttactgtgtcgttatgatgatgtgttgaggcattgtcaagatgaatttgtgaattatccctgaacagaaacatcagtcttcgtttttgttttgataggggaaccgtcatgcgccaacatgttgtagaacagctaatgatgaagcaaaatatatataaaaaaagatgatgaaatcacaatccgtgtaactggg

SEQ ID NO: 208538 - DNA, 2722 bp, Zea Mays
gcaggattacccactctttgtgatggaaagcttcttattagaagcatctgcaaccgtcattccaggctcacgaggaaactcatttactcgaatcatgtcggactttgtcaggagtagatatgataagcaagaagatttccaagttttgttgagcaagaaagatcctggagaacaacctcagcacaaggattacctgtggatggctcactggaccaaagcaagcagcgctgcagaaccccgaaacaatgacagcaatcctttggaggataccaacaatggcactactacgaaagatagcgagaccttgccttatgaattcatgaaatctacagttgctgaaaggctcatggtaggagtacgccatggaagtgcctccatgcagcatgtccgacaattcaagtctagtatgcggggtatgccacgactttccaatgaattgggaccaaagaatagtgaacaggttgatgagtcttttgaaaaatctttgaaaaacgatgctatgaacttgagaactaggcaagttgtgtcagaaacatattctattcacaagctttcagagttaccgttggattttcagaaccttgggagctcagatgatccaagtccagattggagccactttccaatgttcgaaattaatcaaaagattgacagtattgtcaaccgtaaacgaaggtctccacctctggatctaaatgtgtctgcatcccatgtgatggccctatcgtcacaagaatacatgatgcactcacatcaaacagctgatgagaacatggatacgtgcaaacctgcagaaggctttgcatctcgtgtagaagatcatgctggcttcaattcagatcctccagggccaaagttaaaagggcaattgttggataccatgtcatgttcttgcagcaaggatgacaacaactcagcagattgtccaatagatgagcagcacacaagccactattttgcaaactcaaagcatgaactaccctctgtatctaacaaaaagaagttcaagtttgcaggaaacaaccacaatcgaattgttgcaagtgcgtcccacgatctgaagacaaaaagatctgctgtccataaacaacaaagtgctgcagaggcagtgttctgtgcaccagtacttgatagtgagtttcagaatgaacctataactatttccaacatcgacaagaaggatggtgaaaattttcatgatatgtataaatgtcttggcaaggctgtttcatgtcctttgttaccttatgagcatcgtcatctgaatacacagagaacggaatctgcagaaaatttgaaagtctgcacgcttcctgatcatcaaactgcaaataaattgacagaaaagagtcatggtgagctgctgacatatggaccaaagtcaaaggaaatgtatacaggttcttgtaaccaaagaaggaaaatctagcgactttggagtttgtatgtatggcaccaatattggcagtcagttattcagagcacagaatcaatcttcagctaagactgaaacattgcacagcgatactctcattgggtccaaatccccagcaggcatcgcttcattgtcggcacaaaaggactatggttgcacggacgaagcaaaaagtgagcagctcgtagctccgtccaggagaggagattcaggatacggtaaagaagatggatttcataatgtcaatgaaggtcatgatgtttggtccaaagcaactattggtagtaagcaatcatgcatgcccggaacgggaatcacgaacctagatctgatactttcccagatgagcagaatgagaaatcaaatttccattggtagaattcaaccaccaataggtgccgagccaagtgacagatggctcaagcgcctacagcctgacataccagatcctgacatccctggttccaggaggccaaacgttggaggcagccctccactcaggcaaagaaatcgttcgtttgacatggcacttccttgcaacaggactgacactggaacaactgactgtgttatggaggaccagagcttggataaagtggaaaaaacgcaagaaaagcaagaaagtaccccaattccagcgaagagcgtgaatagctggataggaagatggtgccagggaggcactcctgttttccatgaaggcccaggccagggaaggcaagcaacaaagcctggccggccatctgaagaactcgaaggtcggttcccaagcattgcagcgatggcgatgatggggcgagcgatgaacaagcttcggccgtgcgagcatcagaagatggggccacttgtggtgtggaagacagattgacctcatatatatatgtttttgggtgtaatatagtggtttctttccaaaaaaagaaaaaaaaatgaaaagcaacagtgaattttgcctggtttattgtttatggtgtaataaaccatatgatggctcatggtttattgttttctgaagtgaaagtagctaggtgtagtggatactggtgatgtaatggtctggtctcatataccaacaatataataatattttactgtttactgtgtcgttatgatgatgtgttgaggcattgtcaagatgaatttgtgaattatccctgaacagaaacatcagtcttcgtttttgttttgataggggaaccgtcatgcgccaacatgttgtagaacagctaatgatgaagcaaaatatatataaaaaaagatgatgaaatcacaatccgtgtaactggg

SEQ ID NO: 208539 - DNA, 4050 bp, Zea Mays
cccgggcctcgccaggcaggcgcctgccccacacggccacgcccacccaccaggagccaaagccccacacgggacgggcggggacacgggcagcgaagcgcgccgcgcaggcgcaacgcaacaaagggaaaccccagccggaggagcaaaagctagcaagcgtgtccctccccctccctcactcccgtttcattccattcccccccagacgccgctaccgccgccgccgcacgcacgcttgccccgggatctggagatctggtagcgccagggggatggaggccagcgccgggctggtcgccggctcgcacaaccggaacgagctcgtcgtcatccgccgcgatggcgagccagggccgaagcccatggaccagcggaacggccaggtgtgccagatttgcggcgacgacgtggggcgcaaccccgacggggagccgttcgtggcctgcaacgagtgcgccttccccatctgccgggactgctacgagtacgagcgccgcgagggcacgcagaactgcccccagtgcaagacccgcttcaagcgcctcaaggggtgcgcgcgcgtgcccggggacgaggaggaggacggcgtcgacgacctggagaacgagttcaactggagcgacaagcacgactcccagtacctcgccgagtccatgctccacgcccacatgagctacggccgcggcgccgacctcgacggcgtgccgcagccattccaccccatccccaatgttcccctcctcaccaacggacagatggtcgatgacatcccgccggaccagcacgcccttgtgccctcgttcgtgggtggcggggggaagaggattcaccctctcccgtacgcggatcccaaccttcctgtgcaaccgaggtctatggacccttccaaggatctcgccgcatatggctacgggagcgtagcatggaaggagaggatggagagctggaagcagaagcaggagaggatgcaccagacgaggaacgatggcggcggcgatgatggtgatgatgcagatctaccactaatggatgaagctagacagccattgtccagaaagatcccgcttccttcaagccaaatcaacccctataggatgattataataattcggctagtggttttgtgtttcttcttccactaccgagtgatgcatccggtgcctgatgcatttgctttatggctcatatctgtgatctgtgaaatttggtttgccatgtcttggattcttgaccagtttccaaagtggtttcctatcgagagggaaacctatcttgaccggctgagtttaaggtttgacaaggaagggcatccttctcaactcgcccctgtcgatttctttgtcagtacggttgatcccttgaaggaacctccattggtcactgctaatactgttctatctatcctttcggtggattatccagttgataaggtttcatgctacgtttctgatgatggtgctgccatgctgacatttgaagcattgtctgaaacatctgaatttgcaaagaaatgggttcctttctgcaaaagatatagccttgagcctcgtgctccagagtggtacttccaacagaagatagactacctgaaagacaaggtggcgccaaactttgttagagaacggagagcaatgaagagagagtatgaggaattcaaggtcagaatcaatgccttggttgctaaagcccaaaaggttcctgaggaaggatggacaatgcaggatggaactccatggcccggaaataatgtccgtgatcatcctggaatgattcaggttttccttggtcaaagtggtggccatgatgtggaaggaaatgagctgcctcgattggtttatgtttcaagagaaaaacggccaggctacaaccatcacaagaaggctggtgctatgaatgcattggtccgagtctctgctgtactaactaatgctccttatttgctgaacttggattgtgatcactatatcaataatagtaaggctataaaggaagcaatgtgttttatgatggatcctttgcttggaaataaagtttgctatgtgcagtttcctcaaagatttgatgggattgatcgccatgatcgatatgctaacagaaatgttgtctttttcgatatcaacatgaaaggtttggatggtatccagggcccaatttatgtgggtactggatgtgtcttcagaaggcaggcattatatggctacgatgctcccaaaacaaagaagccaccatcaagaacttgcaactgctggccaaagtggtgcatttgctgttgctgttttggtaacaggaagaccaagaagaagaccaagacctctaaacctaaatttgagaagataaagaaactttttaagaaaaaggaaaatcaagcccctgcatatgctcttggtgaaattgatgaagctgctccaggagctgaaaatgaaaaggctagtattgtaaatcaacagaagttggaaaagaaatttggccagtcttcagtttttgttgcatccacacttcttgagaatggtggaaccctgaagagtgccagtccagcttctcttctgaaggaagctatacatgtcatcagctgtggatatgaagacaaaacaggctggggaaaagatattggttggatttatggatcagtcacagaagatattcttactgggtttaagatgcactgccatggttggcggtcaatttactgcatacctaaacgggccgccttcaaaggttccgcacctctcaatctttccgatcgtcttcaccaggttcttcggtgggctcttggttcaattgaaattttcttcagcaaccactgccctctctggtatgggtatggtggtggactaaagttcctggaaaggttttcgtacattaactccatcgtatacccttggacatctatcccgctcttggcctattgcacattgcctgccatctgcttgctgacagggaaatttatcacgccagagggactcctcaaggtcatagctggtgtagacacgagcttcactgtgacatccaagggcggagacgacgaggagttctcagagctgtacacattcaaatggacgacccttctgatacctccgacaaccctgctcctactgaacttcattggagtggtagctggcatctccaatgcgatcaacaacggatatgaatcatggggccccctgttcgggaagctcttctttgcattttgggtgatcgtccatctttacccgttcctcaagggtctggttgggaggcagaacaggacgccaacgattgtcattgtctggtccatcctcctggcttcgatcttctcgctgctttgggtccggatcgacccgttccttgcgaaggatgatggtcccctgttggaggagtgtggtctggattgcaactaggaggtcagcacgtggacttccccgtcagtgtgtggtcgaagaagtatttttgcagatgttttgtgcccatatttcttttttcaatttttgtccctctgtagatagaaacaaggggagaaggggaaaaaaagtacttgtatttcttttgttccatggtggtggtggtggtgggcggctcagcctcgtgagtgcagtattgggcaaaccggaggctgcggcaaccttgtgcagttcggccacgaatatactagggaagatcgcgaccaatcaatcaatcgatgaccgagttcaattgttcagcattctttattagttttggtgggtggatacttcaatcggtgagccgaacagacagttgttttgagtatgaattgctctgcatctgcaaagttgttgtttgtcatccgtcgtctcaatgaggcgagggtggaactggaatagatggtgctgtctggaacaggggaagcgcattgtttgtttgttttgtttatgtagtaagatgcgtgcgttccttcccttgctcctcgtcctggtgcatttctcctttactaggacacacaaactccattggtgagtgtctagtgatctagcgtagcagcgtcgtcaggcaatgtaatatgtaaacgtgccattttgtcgatcaacttcatgcgcaaagaaccgaatggaa

SEQ ID NO: 208540 - DNA, 2053 bp, Zea Mays
gagtctttgtcccatccaacatctcgatccatcccagcatcatccccacaattgaggcgattgaagcagaaaaaatcaatcgcgttccccagcacggggcagggagcggaggggaacgccgccacgcaggcggagttccccagagcggaggaagggttcgcctgctagggcacggtctcctgctgcgaagtcaagtgcgtcgcatagggacagggagaggtcgcctccgagggagaaggtgaaggagcgtgtcaggtcgccagagtctcctgctaaggtcagcctgttgcacaaggggagagagaggtcgtctcccagggagaaggcgaaggaccagcgggtcaggtcgccgaaacgtaagcaggagcagtcacgatcaccctcacctgctaggcgacacttctctaggtcgccctcgccgcgctccaagaggacgaggggagcgcagggtgagcgggaggcggtgcagtttactggcagtgatcgccggaaggcaagtcacagggaggagcaggatacactgaggcacagggagcatgatgaggggagggatgcttcaagagacaggaaagtggatcgggaggcagtgcatgtaacaaatggtgatcgccgcaagccctctcatggggaagagagggactcatggggcaagcacagggaacatgatgaagggagggttgcatcgatagataggaagtcggatcgagaggataccagaggtactgcaaaagataagaaatatgttcgtgatgatgagaaggatcattctagggagaggggggctgggagggatgataagtatggtgcttcaaaggtggcattgccggtctgggatgatgatagacatggaaggcctaatcggggtgactggaaatctgcttcttcaagggagcaaaggctggactctggtgacagaagggattcaacaagagtgaaaccaacagatcatgatgggagcaatgggggatcgggaaggtctttcaggcatggtcgttcaatgtctccagaagagcacaggcatcggggcaggcatgaatctcatccatcatcgagagtgtccagaagtgcagcacatatcgaggatattaactcgagaggaggtgaagcatcccggaatggagatcctgatgctttggcaacaatgaacgcaactgcagaagctcttgaagcaaaagaaaagcaaaagccatcgtttgaattgtctggaaagcttgctgaggagaccaacagagttgcaggtgtaaatctattatattcagaacccccagaggctcgaaagtcagagattagatggaggctctatgtatttaaagatggtgaaccactgaatgaaccactgtatgttcatcggatgacctgctacctttttggaagagaaaggaaagttgcagatgtccccacagatcatccctcctgcagcaagcaacatgcagttcttcaatacagacttgtggagaaggagcaactagatggcatgatgacaaagaaaataaggccttatctgatggatcttgatagtacaaatggaactttcatcaatggaaatcgcattgagcctcggcgatattatgagttatttgaaaaggacacaatcaagtttggcaatagtagccgggagtatgttttgctccacgaaaattcaacagaatgagttttgagaaaattcaacagaatgaggattgaaacaatcagccttttatgctgtagaagaaaaatacagcaaaaacatgaggttttgcatgttttaaaatttttagactggagattggccggcttgaacttctggtctgtgatttcttcacgtgttcaagtctataaggatattttgtgaaccaacatgtagtgctattgtaatgaaaagagctagctgcctgtagcagatagccctggggtattgtttgtattcaagcatgttttgcaccgctggcattcacatcattcggtatcggaggcagctgtttatggatcaatgccatagtaatcttaatgagttaatcatggatttactagttcgataatttaaactttatcacagatgtgtccacctttcaat

SEQ ID NO: 208541 - DNA, 2999 bp, Zea Mays
ggagggcgagcggaacaatgccactgctcttgccaatcgaggagaagtaccagacaagggcgacatcgacgacaacgacgacgacgacacgcgagatcgcctcagaaatctcgcaaccacaaggcagctggcctgctgttctgacgacagccattgcacgcaccagccagagaagttgaggttgcgccttctcctctcgggctcgggctcggtaggtatatgcctgcattcccattcccaaccaggtctggtctggtctgctccggtccggtcttctctcccgaccccgacctggcctcctccctcccctctccagcagagctctccctccccctccccctgaggtgaggtggctgaagtcgggggacatggtttctttctccgcttcctaagattcctcttcttccccccaacccaccacctacaccttttgctgcgccgcacctgcacggccgctccatgcgccgccgtatctcagtctcaggtcagcatcaccaaccgcagttccacctcccgaccccagccgcaatctaggaggagggccgccgctctcccctcggccgcatcgcatggtaaccaccaccagcagggcaggatgttcaagcttcaccgccaccgctcctccgaccgcgtcggcgagcgcttcgacttcagattctccaacttccgcgccgtccaggtccccgccatttcagacaggctcttcctttccatagtctccgtagacaatggaaaaacaattgcaaagtccactaaagtagcttctcgtagtggaatatgccagtggcccgacaccatcttggaacccatatggttctccaaggaccaagtctccaaagaatttcaagagtgccagtacaggattattgtttccctgggatcggcaaaatctggcattcttggggagattcttctaaatctctctaattttctgaatttggccgatccaaccgctatctctttgccactgaagagatgcaactctggaacagttttgcagcttaaggttcaatgtcttggcacaaaatctaagctgagtggtgtcagatcattgagggacatggctcctcgtcttgatgaccgtagtccaacgccaaccaatgacgagctggacaacaggtcagattgctctgatggtatgttcaacaagggtgttcattcttcatctgaaaatcatctgggtggaacttatcaagatgaatctggaaacatggaaacaggtttctcagcatcagggtcccatcggagttctaattctggagatagtactgcagatagaacaaacttctctcctagagtcaactctaatggagggctttttgtgggaaggcaggattctgctagttcctatgctagttatgttagtgccggcggtggtgatgatgggcttagatccaacaattcatcttttagttctcggacttcaggcccaaatttgctgcaagggagtactccaaaaacattttcgaatgacctttctcagttatctatgggggcgtctgactcatccaaagattttcttgaagctgctgaagaaacaattgaggagctccgtgacgaggcaaaaatgtgggaacgccactctcgcaagttgaaggctgatctagagatgctgaaaaaggagtgttctgaaaaatcaaagcaacatgctgaactagcagttgagctgtctgctgcacaagctgaacgggattcatataggcatgaaatagaagaattaaagtcatccttacaagatgtaaacacacgacagacaattacaggaacacctaaacgttcagactggatagacctgcagaaggaacttgaaggagaccttgagaaatggtgaagaagaaaaccgaaacagaatagctatgcatgcaaagctcatgaggttggagagtgatctaacagcattagaagcatcacatgtacatgaagcagaattaaagaacgaactcagtaggatcaagagatcaaacagtgagtatcagaggaagatacaatctctcgggcaggaaaatgaggatctcactaggcgagttcaaattatggaaaagggttttgagcgaatgtcccacgctaaagagaaccttggaaagcaggagattggaggagataaccaggaagccatccagtcaacaattcagttactggaaattaagcttgcagaggcattggaggaaaataagatatacagagctcaacagaagagttcgatgtctgaggggcaacctgctggtggagatggcaaggagggcaataccgacaggattttgcagttggaaggagagctgagagatatgaaggaacgattactcaacatgagcttgcagtacgcagaggtagaggctcagagggaacggttagtgatggagcttaaagctatcaagaaaggcaggtggttttagcaggatgcggagttgttgcctgacataaaacatgaggctgacaccacaggtgggcatcatcaagccgtgctatgctccagcaccagtgagactaagagcaagcaagtgcaagtgcagagtcagacagtgatatagcctggacgtgctaactggtgctggagcatgtgtctctcactgaagctccgtatgatgcggtacccagcccttgtttaactggacgtgctaacttgcgttgtcccctagagtcatgatcccgttcttattggtatttatttttaatggtatataattaatatatacaccagtatgtattgagtttgactggagagtgatggtcagttgttgataccatccgatccctctgttttacatgattgattacgttggaaagagtcaacccattaagggctagtttgaaagccacaaaaccggaggggttggaggggctaaaatcccctctttattcaattttaaataaaaagtggattttagcccctataatcacctctgtttttttggactcccaaactagccctaataatagtcgataaatgtagttactccgtcctttattttgttgtagttaataatattgctgtagtttgg

SEQ ID NO: 208542 - DNA, 5014 bp, Zea Mays
ggagggcgagcggaacaatgccactgctcttgccaatcgaggagaagtaccagacaagggcgacatcgacgacaacgacgacgacgacacgcgagatcgcctcagaaatctcgcaaccacaaggcagctggcctgctgttctgacgacagccattgcacgcaccagccagagaagttgaggttgcgccttctcctctcgggctcgggctcggtaggtatatgcctgcattcccattcccaaccaggtctggtctggtctgctccggtccggtcttctctcccgaccccgacctggcctcctccctcccctctccagcagagctctccctccccctccccctgaggtgaggtggctgaagtcgggggacatggtttctttctccgcttcctaagattcctcttcttccccccaacccaccacctacaccttttgctgcgccgcacctgcacggccgctccatgcgccgccgtatctcagtctcaggtcagcatcaccaaccgcagttccacctcccgaccccagccgcaatctaggaggagggccgccgctctcccctcggccgcatcgcatggtaaccaccaccagcagggcaggatgttcaagcttcaccgccaccgctcctccgaccgcgtcggcgagcgcttcgacttcagattctccaacttccgcgccgtccaggtccccgccatttcagacaggctcttcctttccatagtctccgtagacaatggaaaaacaattgcaaagtccactaaagtagcttctcgtagtggaatatgccagtggcccgacaccatcttggaacccatatggttctccaaggaccaagtctccaaagaatttcaagagtgccagtacaggattattgtttccctgggatcggcaaaatctggcattcttggggagattcttctaaatctctctaattttctgaatttggccgatccaaccgctatctctttgccactgaagagatgcaactctggaacagttttgcagcttaaggttcaatgtcttggcacaaaatctaagctgagtggtgtcagatcattgagggacatggctcctcgtcttgatgaccgtagtccaacgccaaccaatgacgagctggacaacaggtcagattgctctgatggtatgttcaacaagggtgttcattcttcatctgaaaatcatctgggtggaacttatcaagatgaatctggaaacatggaaacaggtttctcagcatcagggtcccatcggagttctaattctggagatagtactgcagatagaacaaacttctctcctagagtcaactctaatggagggctttttgtgggaaggcaggattctgctagttcctatgctagttatgttagtgccggcggtggtgatgatgggcttagatccaacaattcatcttttagttctcggacttcaggcccaaatttgctgcaagggagtactccaaaaacattttcgaatgacctttctcagttatctatgggggcgtctgactcatccaaagattttcttgaagctgctgaagaaacaattgaggagctccgtgacgaggcaaaaatgtgggaacgccactctcgcaagttgaaggctgatctagagatgctgaaaaaggagtgttctgaaaaatcaaagcaacatgctgaactagcagttgagctgtctgctgcacaagctgaacgggattcatataggcatgaaatagaagaattaaagtcatccttacaagatgtaaacacacgacagacaattacaggaacacctaaacgttcagactggatagacctgcagaaggaacttgaaggtgaggtgaagtttcttaaagaatcgaatacagacttaaccatacaactaaacaggactcaagagtcaaatatagagcttctttctattcttcaggaactggaggaaaccattgaagaacagagagttgaaatatctaagatttcaaaggtcaagcagactgcttatcctgagaatgggctgttagtaaaaaaagacagagagtgggctaagaaactgtcaatgaaagaggatgaaatcacaattccgagggagaaatcggatcgtgctctcaacattggaaatgcagatggtgcagcttccaatgccatttatcttgatttggagaaagaaaatgaaattttaagggctaaaatacaagagcttgagaaggactgctctgaactaacagatgaaaatttggagcttatatataagctgaaagaaaatggtctgacaaaaggtcaggttcctcatattgcaaacaacaatgagctgcaattcaaaaagcttacatcccggattcatcaactggaggaggatcttaggaataaggaaatgttaagagatgacagtttttctgagtcatcaatgtctaatgcagatgagatacagagaaaatgtgctgaccttgagctgaaggtgctaaattttaggtctcaaacctgtgagctagaagaaaagttccgaaaatgccaagaggagctggaacaaagaaatcttgagttatctgcgctgagaagaaagataaatggtttacattctaatgaactggaagtttgtgaatctggtgcgacatggaagtaccaagctagaatagcagatctagaggatactgaacctgagacagatacacttaaggctaggtttgaactgcagctacaggaaaatgatgaccttcgtcgttccaaggttgagatgcagaattttatttctgagtttcaggcagagaagagtcagcttgaggaacgcctgtccgcgtcgcttaaagaaagcagcatcacatctaaatgtctggatgaagtgcggaaagatatccttgtgctttccagcagtatagattcccatgtttcaaccaataaacttcttgagaggaacttagttgagctagagagctgcaaagctgaactagagttgcatgtatcggagctggaacaggaaaacatcgagttgtcagaacggatatctggacttgaaacacaactgacttacgtgacaaatgaaaaggagtcaagcgagctgcagttgcatgactccagatctctcatcatcaatctcaaagataaagtagagtgtcagcaatcagagatggaaactcaaaggctccagtttaagcagaaacaacaagaatctcaaagaagattgtgcgaagcacaagatgattctgaagttctgagaagatctaattgtaaactacaatctacggttgagagtcttattgaagagtgcagttctcttcagaatctaattgctgatctgaaaaggcagaagttggaattacatggtcatcttacgcaaaaagagcaggaattggatgagtcgaaaaaaaagaactttgagtttagcaaaacagtggagttccttgaggcaaaacttttgtcactacagaaggacatttcttctaaagaacaatctttattgtcagaattggagaatattttccaggagcacatggaacaagaagaaagaattaatcgcgcacatttcatgctcaataagatcgagaaagaaaagactcttgaagtagagaatcttgaaagggaggtcgtcagcctcgctgcacaggtctcctccacacacgaggagcgagaaagtgccactctgaatgctattcaagaggtatctgtcctgcgagcagacaatgctaaacttgaggctaatctccaagatgttagtgaacagctgagatgttacgagtctcaattggaagaccttcgtaaggagtctaaaagtaaaattaaaggattggttgattcccttaatgcctccaaacaaagcgaggaaatgttgacatcagatgctgaacatatgaaaaagttgatggaagctgctaaatccaatgaagatgcactaaggaagacttctaacgaactagaactgaagcttaaatccagtgattatgtgaaacaacaaatgctggaagaaatatctggcctgaaacttcaggttcagaaaataatgaatcttcaagatgaggtttccaaacttcagagttctcttgatgaggccaagttcgaaaaagggaaacttgaggagtttgtgcgctcggtgactgaggaatgtcaagaactaaaagcacagaaggctatgctaacagataaagtttcttatatgcaggagaccttgagaaatggtgaagaagaaaaccgaaacagaatagctatgcatgcaaagctcatgaggttggagagtgatctaacagcattagaagcatcacatgtacatgaagcagaattaaagaacgaactcagtaggatcaagagatcaaacagtgagtatcagaggaagatacaatctctcgggcaggaaaatgaggatctcactaggcgagttcaaattatggaaaagggttttgagcgaatgtcccacgctaaagagaaccttggaaagcaggagattggaggagataaccaggaagccatccagtcaacaattcagttactggaaattaagcttgcagaggcattggaggaaaataagatatacagagctcaacagaagagttcgatgtctgaggggcaacctgctggtggagatggcaaggagggcaataccgacaggattttgcagttggaaggagagctgagagatatgaaggaacgattactcaacatgagcttgcagtacgcagaggtagaggctcagagggaacggttagtgatggagcttaaagctatcaagaaaggcaggtggttttagcaggatgcggagttgttgcctgacataaaacatgaggctgacaccacaggtgggcatcatcaagccgtgctatgctccagcaccagtgagactaagagcaagcaagtgcaagtgcagagtcagacagtgatatagcctggacgtgctaactggtgctggagcatgtgtctctcactgaagctccgtatgatgcggcttataccccccaactcagtctattgagctctattgcctatttcaactattagaggatctgtatgagtgaggaagagtctttacctggtgaggaactcaatagctaataat

SEQ ID NO: 208543 - DNA, 4789 bp, Zea Mays
aattcttctctcatatcttatctactggagtaatcgctttgctgcttgcctttcatctgctgatttgctctctcccgctaggccaaggccgctgctgatgtgatggcagacactcgtcatccaacctacattccttcacctttgctacatcaatgtccccgccatttcagacaggctcttcctttccatagtctccgtagacaatggaaaaacaattgcaaagtccactaaagtagcttctcgtagtggaatatgccagtggcccgacaccatcttggaacccatatggttctccaaggaccaagtctccaaagaatttcaagagtgccagtacaggattattgtttccctgggatcggcaaaatctggcattcttggggagattcttctaaatctctctaattttctgaatttggccgatccaaccgctatctctttgccactgaagagatgcaactctggaacagttttgcagcttaaggttcaatgtcttggcacaaaatctaagctgagtggtgtcagatcattgagggacatggctcctcgtcttgatgaccgtagtccaacgccaaccaatgacgagctggacaacaggtcagattgctctgatggtatgttcaacaagggtgttcattcttcatctgaaaatcatctgggtggaacttatcaagatgaatctggaaacatggaaacaggtttctcagcatcagggtcccatcggagttctaattctggagatagtactgcagatagaacaaacttctctcctagagtcaactctaatggagggctttttgtgggaaggcaggattctgctagttcctatgctagttatgttagtgccggcggtggtgatgatgggcttagatccaacaattcatcttttagttctcggacttcaggcccaaatttgctgcaagggagtactccaaaaacattttcgaatgacctttctcagttatctatgggggcgtctgactcatccaaagattttcttgaagctgctgaagaaacaattgaggagctccgtgacgaggcaaaaatgtgggaacgccactctcgcaagttgaaggctgatctagagatgctgaaaaaggagtgttctgaaaaatcaaagcaacatgctgaactagcagttgagctgtctgctgcacaagctgaacgggattcatataggcatgaaatagaagaattaaagtcatccttacaagatgtaaacacacgacagacaattacaggaacacctaaacgttcagactggatagacctgcagaaggaacttgaaggtgaggtgaagtttcttaaagaatcgaatacagacttaaccatacaactaaacaggactcaagagtcaaatatagagcttctttctattcttcaggaactggaggaaaccattgaagaacagagagttgaaatatctaagatttcaaaggtcaagcagactgcttatcctgagaatgggctgttagtaaaaaaagacagagagtgggctaagaaactgtcaatgaaagaggatgaaatcacaattccgagggagaaatcggatcgtgctctcaacattggaaatgcagatggtgcagcttccaatgccatttatcttgatttggagaaagaaaatgaaattttaagggctaaaatacaagagcttgagaaggactgctctgaactaacagatgaaaatttggagcttatatataagctgaaagaaaatggtctgacaaaaggtcaggttcctcatattgcaaacaacaatgagctgcaattcaaaaagcttacatcccggattcatcaactggaggaggatcttaggaataaggaaatgttaagagatgacagtttttctgagtcatcaatgtctaatgcagatgagatacagagaaaatgtgctgaccttgagctgaaggtgctaaattttaggtctcaaacctgtgagctagaagaaaagttccgaaaatgccaagaggagctggaacaaagaaatcttgagttatctgcgctgagaagaaagataaatggtttacattctaatgaactggaagtttgtgaatctggtgcgacatggaagtaccaagctagaatagcagatctagaggatactgaacctgagacagatacacttaaggctaggtttgaactgcagctacaggaaaatgatgaccttcgtcgttccaaggttgagatgcagaattttatttctgagtttcaggcagagaagagtcagcttgaggaacgcctgtccgcgtcgcttaaagaaagcagcatcacatctaaatgtctggatgaagtgcggaaagatatccttgtgctttccagcagtatagattcccatgtttcaaccaataaacttcttgagaggaacttagttgagctagagagctgcaaagctgaactagagttgcatgtatcggagctggaacaggaaaacatcgagttgtcagaacggatatctggacttgaaacacaactgacttacgtgacaaatgaaaaggagtcaagcgagctgcagttgcatgactccagatctctcatcatcaatctcaaagataaagtagagtgtcagcaatcagagatggaaactcaaaggctccagtttaagcagaaacaacaagaatctcaaagaagattgtgcgaagcacaagatgattctgaagttctgagaagatctaattgtaaactacaatctacggttgagagtcttattgaagagtgcagttctcttcagaatctaattgctgatctgaaaaggcagaagttggaattacatggtcatcttacgcaaaaagagcaggaattggatgagtcgaaaaaaaagaactttgagtttagcaaaacagtggagttccttgaggcaaaacttttgtcactacagaaggacatttcttctaaagaacaatctttattgtcagaattggagaatattttccaggagcacatggaacaagaagaaagaattaatcgcgcacatttcatgctcaataagatcgagaaagaaaagactcttgaagtagagaatcttgaaagggaggtcgtcagcctcgctgcacaggtctcctccacacacgaggagcgagaaagtgccactctgaatgctattcaagaggtatctgtcctgcgagcagacaatgctaaacttgaggctaatctccaagatgttagtgaacagctgagatgttacgagtctcaattggaagaccttcgtaaggagtctaaaagtaaaattaaaggattggttgattcccttaatgcctccaaacaaagcgaggaaatgttgacatcagatgctgaacatatgaaaaagttgatggaagctgctaaatccaatgaagatgcactaaggaagacttctaacgaactagaactgaagcttaaatccagtgattatgtgaaacaacaaatgctggaagaaatatctggcctgaaacttcaggttcagaaaataatgaatcttcaagatgaggtttccaaacttcagagttctcttgatgaggccaagttcgaaaaagggaaacttgaggagtttgtgcgctcggtgactgaggaatgtcaagaactaaaagcacagaaggctatgctaacagataaagtttcttatatgcaggagaccttgagaaatggtgaagaagaaaaccgaaacagaatagctatgcatgcaaagctcatgaggttggagagtgatctaacagcattagaagcatcacatgtacatgaagcagaattaaagaacgaactcagtaggatcaagagatcaaacagtgagtatcagaggaagatacaatctctcgggcaggaaaatgaggatctcactaggcgagttcaaattatggaaaagggttttgagcgaatgtcccacgctaaagagaaccttggaaagcaggagattggaggagataaccaggaagccatccagtcaacaattcagttactggaaattaagcttgcagaggcattggaggaaaataagatatacagagctcaacagaagagttcgatgtctgaggggcaacctgctggtggagatggcaaggagggcaataccgacaggattttgcagttggaaggagagctgagagatatgaaggaacgattactcaacatgagcttgcagtacgcagaggtagaggctcagagggaacggttagtgatggagcttaaagctatcaagaaaggcaggtggttttagcaggatgcggagttgttgcctgacataaaacatgaggctgacaccacaggtgggcatcatcaagccgtgctatgctccagcaccagtgagactaagagcaagcaagtgcaagtgcagagtcagacagtgatatagcctggacgtgctaactggtgctggagcatgtgtctctcactgaagctccgtatgatgcggtacccagcccttgtttaactggacgtgctaacttgcgttgtcccctagagtcatgatcccgttcttattggtatttatttttaatggtatataattaatatatacaccagtatgtattgagtttgactggagagtgatggtcagttgttgataccatccgatccctctgttttacatgattgattacgttggaaagagtcaacccattaagggctagtttgaaagccacaaaaccggaggggttggaggggctaaaatcccctctttattcaattttaaataaaaagtggattttagcccctataatcacctctgtttttttggactcccaaactagccctaataatagtcgataaatgtagttactccgtcctttattttgttgtagttaataatattgctgtagtttgg

SEQ ID NO: 208544 - DNA, 1199 bp, Zea Mays
gcatgcaacagataatcagcgctagctatcccctcatcgtcttctcttatcctcactcgcgtagtcgcctccctcctcttctcttccgcggcctggtgcaagaccaagagggaggaggaggccacgatggccggcagcgtcagcaacggcagcgggaagagcctggcgcgctggctgcgggagaacgggttcgacgacgacgccgtggcgcgcatgtccaggcggtgcaggaacctgcacagcctcgacgccggcgaggccccgggcgtgtgggactacctcctgaccggcgtcaagatggagcggcggaagctgcggcacgtggtggccaagtgccccaagctgctcaccctgtccgtggacggcaagctcgcgcccacggtgcagtgcctcgccacgctgcaggccaggcccggggaggtggcgcaggccatcgccaagttcccccagatactgttccacagcgtcgaggagaagctctgcccgctcctcgccttcttccagacgctcggcgtctccgagaggcagctcgccaagctgctcatggtcaacccgcgcctcatcagctacagcatcgaggccaagttctcgcagaccgtcggcttcctcgccggcctcggcgtcgacagggaaggcatgatcggcaagatcctcaccaaggagccgtatatcatggggtacagcgtcgacaagcggttgcgccccactgccgagttcctcaagtcggaagtcgggttacaggggccagatctccagagggtggtcatgaccttccccgatatactgtcgcgagacgtggataagatcctgcggcccaatctggcgttcctacagagccgcggattcagcagggatcaggtcacggcactggtagctggttaccctcctgttctcatcaagagcatcaaacattgcctggagccaaggatcaagttcctggtcgaagagatggggcgggacatgggcgaggtggtaggttacccccagttctttcgccatggcctcaagaggagcctggagtaccgccacaaggtgcttaagcagatgaactcgagctgcagcctcagcgagatgctagactgtaaccacaagaagtttgccatgaaattcggtttggtcgcagcagtttagaggtgacgggtggttgtggttgcgtacctgagcagacgcgcgaggggagacgccgaggtactggtcga

SEQ ID NO: 208545 - DNA, 4559 bp, Zea Mays
cacagccgcacaggaacccacccggcctctccaccgctgcacctgcagtcctgcacccatttaaatttaaacatttaaaaaaaaaacccaccccacgaaattcgcagaccaccttaattcccattacatcaattattttctcttcccgacccagtccgccgctgcctgcttccttccttccttctctctcctccctctcctccagcgacagagacagggaaggaggcggaggaggaggccgcgtggctgcggaggcgggcagccgcggcccgtgcgattcgcggcgcctctctcgccgtatctgcggtggcgcgggcgggttggcggccggccagcgagatcggctgttgtttttggtggtatttttttttctttccccacggcggtttttgggagttggagcgtggattgaagacggctgacggccggaggggtttggggggtccagttgaggccgtcggggcggagatcccgcggggagctgcggttccgccgcggcccgtgagttggattccgggcgcagcgccgcgccgacgatggcgtcggtggaggtgcgcaagtccagggccctgcgggcgcgcagcgggcccagcaagctgcagccggcgcggtcgatgccgctcgactacaggtactcggccggggcgtcgccggcgaacggcgccggcggcgggccggacgcgaacggcgtcgggcggcgggcggctgcggcggaggcggagaacggaggggaggtggtggtgcggttggaggggggcgatgcggactccccgtacagctccacggcggtcacagcggcggaggaggaggaagtgggggagagaggtggaggaggagacgaggtggattcagcggccacggcgacgccgaggcggttgtcgccgagggcagcagcgagccccacggaaggcgacgcccggtggggtgacaccagctcgtacggcgctaagaagaagcatagagttttttgtcagcttccgaatggcgattgggcattatgcacagtaattacaacctctggtgatgagtcggttgtaaaggtttctgaagggaaggtactgagattgaaaaccgagtgtctacaacctgcaaatcctgaaattcttgatggagtggatgatcttatgcagctaagttatctaagtgaaccatcagtactgtacaatctgcagtacagatactccaaggatatgatttatgtccagttttggtggctgtcaatcctttcaagaaagtttcactgtatggtaacgagtacatcgatgcatatagaaataaatcaatggatagtccacatgtttatgcaatagcagatgcagcactttgtgaaatgaaaagagatgaagtcaaccaatctataattataagtggtgagagtggagcaggaaaaacagaaaccgcaaaaattgctatgcagtacctggcttcccttggaggtggaagtggcattgaatacgaaattcttcagacaaatccaatactcgaggcttttggcaatgcaaagacattgagaaatgataactcaagtcgttttggaaagcttatagaaattcatttcagtaccactggaagaatatgtggtgccatgattcaaacatttttgcttgagaagtccagagttgtgcaatgtgcagttggtgagcgatcataccatatattttatcagctgtgcgctggtgcacctgcctctctaaaagagaagttgaatttgaaaaaggtggatggatacaaatatcttaagcagagctgttgctattcaattgcgggtgtggatgatgcccaaatgtttcgaactgtgacgcaagctatgaacattgttcatatcagcaaagaggaccaagagagtgtttttgcaatggtctctgctgttctttggctgggggatgtctcgttcacagtaattgacaatgaaaatcatgttgaaatcatagtagatgaagcttcgaaaacggtttcagaacttcttggctgcagtattgaagatctcaatttagctttatcaaagcgccacatgaaagttaataatgaaaacattgtccagaaacttacccttgctcaggcaactgacacaagagatgctctggccaaatcagtgtatgccagtttgtttgagtggcttgtagaacaaattaataagtctctctcagttggcaagcgtcgaactgggagatctatcagtattcttgatatctatggctttgaatcatttgataagaacagttttgaacagttctgcattaattatgctaatgaaaggttgcagcaacatttcaatcgtcatttgtttaagcttgagcaagaggaatatgtggaggatggcatcgactgggcaaaggttgacttcgaggataatcaggactgtttgagcctctttgagaaaaaaccactgggactattgtctctgctggatgaggaatctactttcccgaatgccacagatcttacttttgcaaacaagcttaagcaacatcttgactcgaattcttgcttcagaggagaaagaggcaaggcatttgctgtccgtcactatgcaggagaggtggcttatgatacttcgggttttctggagaagaatagagatttattgcacatggactcgattcagctccttgccaaatgcaaaacttctctgccaaaaatgtttgcatcgaagatgctagttcaatcagataattctatgtctgttccatatagatctagtgctgctgattctcaaaaactaagtgttgccatgaagttcaagggtcaactgttccaacttatgcaaagactggaaagtacaacgccacactttattcgttgcattaaaccaaacaatttacaacttcctgcaatttatgaacaaggacttgtgcttcaacaacttaaatgttgtggggttcttgaggttgtccggatttcaagatctgggtatccaacaagaatgactcaccagaagtttgctcggcggtatggttttcttcttgaggatgttgcatctcaagatccactcagtgtttcagttgcaattcttcatcagttcaacattttacctgagatgtatcaagttggctacacaaagttgttcttccgaactggtcagattggcaaccttgaagatactcggaatcgtactctgcatggtattttaagggttcaaagctgtttcagggggcatcaagcccgtcatcatgcaagagaacgaacaagaggagttttgactcttcaatcattcattcgtggtgagaatgcacggcaaatttactcctctttgttgaggaaacatagagccgcagttgttttgcagagaaatgtgagatgttggcttgcaagaaggtatttcataaatgtccggaaggcctcagtgataatacagtctggtattcgtggcagtcttgttcgaagatgtaatggcaatattgatctaataaatgtgctaagagagtttgaatcaaaacaggaggcacatggtgaccaaattttgatcaaggcctcagtcctggctgagttacagaggcggatactaaaagccgaggccacagtacgtgaaaaggatgaagagaacgagatgcttcatcagcggcttcagcaatatgaaaaccgctggttagagtacgaacagaaaatgaaagctatggaggaaatgtggcagaagcaaatgcgttcgctgcaatcgagcctttccgtagcaaagaagagccttgttttggatgaaacgcctaggatgtcggactcatcagtggatcagagctgggaaagcaatgggaaccaccatgtcagcagcggttctcagctggtgccacacactggtggacgtgaaatgaacgctggcctcagcgtcatcagccgcctggcagaagaattcgagcagcggagccaggttttcgctgatgacgccaagttcctggtcgaggtcaagtctgggcaggcggacgccagcctaaacccagacatggagctccggaggttgaagcagaacttcgactcgtggaagaaagatttcagtggacggatgagggagacgaaggtgatcctgaacaagctcggcaatggcaacgagtcatcgcccaactctgtgaagcggaagtggtggggcaggctgaacacctccaagttttcgtgagtttattatgtattgattggtaatttgtagatgtaaccggtattttacacgccggtgtggttctagcttcctagagtttctactctacgggtgctgtgaaagtccagtgtgttggactggatttgtattccacggagggcgagttgtatagttctcccacaatggcttccttttgaggggtcaaggaccactgaattgtgatgtaattacttgctgaagtagctgtcgaaggggggagattgtgagtgcttaatattccactatccttgtgctttactttctgcctgttgtagattcatagatttaaatgttggtatggtgtgacataatctatcatccgatgactcgtagcatgtttggtttgagaaataagatagtttattatttctcacttattttttgtttagtgtgacgaatgagatagttcattatttctcacttttttgtttggtttgtg

SEQ ID NO: 208546 - DNA, 4055 bp, Zea Mays
cacagccgcacaggaacccacccggcctctccaccgctgcacctgcagtcctgcacccatttaaatttaaacatttaaaaaaaaaacccaccccacgaaattcgcagaccaccttaattcccattacatcaattattttctcttcccgacccagtccgccgctgcctgcttccttccttccttctctctcctccctctcctccagcgacagagacagggaaggaggcggaggaggaggccgcgtggctgcggaggcgggcagccgcggcccgtgcgattcgcggcgcctctctcgccgtatctgcggtggcgcgggcgggttggcggccggccagcgagatcggctgttgtttttggtgttgaggccgtcggggcggagatcccgcggggagctgcggttccgccgcggcccgtgagttggattccgggcgcagcgccgcgccgacgatggcgtcggtggaggtgcgcaagtccagggccctgcgggcgcgcagcgggcccagcaagctgcagccggcgcggtcgatgccgctcgactacaggtactcggccggggcgtcgccggcgaacggcgccggcggcgggccggacgcgaacggcgtcgggcggcgggcggctgcggcggaggcggagaacggaggggaggtggtggtgcggttggaggggggcgatgcggactccccgtacagctccacggcggtcacagcggcggaggaggaggaagtgggggagagaggtggaggaggagacgaggtggattcagcggccacggcgacgccgaggcggttgtcgccgagggcagcagcgagccccacggaaggcgacgcccggtggggtgacaccagctcgtacggcgctaagaagtggtgagagtggagcaggaaaaacagaaaccgcaaaaattgctatgcagtacctggcttcccttggaggtggaagtggcattgaatacgaaattcttcagacaaatccaatactcgaggcttttggcaatgcaaagacattgagaaatgataactcaagtcgttttggaaagcttatagaaattcatttcagtaccactggaagaatatgtggtgccatgattcaaacatttttgcttgagaagtccagagttgtgcaatgtgcagttggtgagcgatcataccatatattttatcagctgtgcgctggtgcacctgcctctctaaaagagaagttgaatttgaaaaaggtggatggatacaaatatcttaagcagagctgttgctattcaattgcgggtgtggatgatgcccaaatgtttcgaactgtgacgcaagctatgaacattgttcatatcagcaaagaggaccaagagagtgtttttgcaatggtctctgctgttctttggctgggggatgtctcgttcacagtaattgacaatgaaaatcatgttgaaatcatagtagatgaagcttcgaaaacggtttcagaacttcttggctgcagtattgaagatctcaatttagctttatcaaagcgccacatgaaagttaataatgaaaacattgtccagaaacttacccttgctcaggcaactgacacaagagatgctctggccaaatcagtgtatgccagtttgtttgagtggcttgtagaacaaattaataagtctctctcagttggcaagcgtcgaactgggagatctatcagtattcttgatatctatggctttgaatcatttgataagaacagttttgaacagttctgcattaattatgctaatgaaaggttgcagcaacatttcaatcgtcatttgtttaagcttgagcaagaggaatatgtggaggatggcatcgactgggcaaaggttgacttcgaggataatcaggactgtttgagcctctttgagaaaaaaccactgggactattgtctctgctggatgaggaatctactttcccgaatgccacagatcttacttttgcaaacaagcttaagcaacatcttgactcgaattcttgcttcagaggagaaagaggcaaggcatttgctgtccgtcactatgcaggagaggtggcttatgatacttcgggttttctggagaagaatagagatttattgcacatggactcgattcagctccttgccaaatgcaaaacttctctgccaaaaatgtttgcatcgaagatgctagttcaatcagataattctatgtctgttccatatagatctagtgctgctgattctcaaaaactaagtgttgccatgaagttcaagggtcaactgttccaacttatgcaaagactggaaagtacaacgccacactttattcgttgcattaaaccaaacaatttacaacttcctgcaatttatgaacaaggacttgtgcttcaacaacttaaatgttgtggggttcttgaggttgtccggatttcaagatctgggtatccaacaagaatgactcaccagaagtttgctcggcggtatggttttcttcttgaggatgttgcatctcaagatccactcagtgtttcagttgcaattcttcatcagttcaacattttacctgagatgtatcaagttggctacacaaagttgttcttccgaactggtcagattggcaaccttgaagatactcggaatcgtactctgcatggtattttaagggttcaaagctgtttcagggggcatcaagcccgtcatcatgcaagagaacgaacaagaggagttttgactcttcaatcattcattcgtggtgagaatgcacggcaaatttactcctctttgttgaggaaacatagagccgcagttgttttgcagagaaatgtgagatgttggcttgcaagaaggtatttcataaatgtccggaaggcctcagtgataatacagtctggtattcgtggcagtcttgttcgaagatgtaatggcaatattgatctaataaatgtgctaagagagtttgaatcaaaacaggaggcacatggtgaccaaattttgatcaaggcctcagtcctggctgagttacagaggcggatactaaaagccgaggccacagtacgtgaaaaggatgaagagaacgagatgcttcatcagcggcttcagcaatatgaaaaccgctggttagagtacgaacagaaaatgaaagctatggaggaaatgtggcagaagcaaatgcgttcgctgcaatcgagcctttccgtagcaaagaagagccttgttttggatgaaacgcctaggatgtcggactcatcagtggatcagagctgggaaagcaatgggaaccaccatgtcagcagcggttctcagctggtgccacacactggtggacgtgaaatgaacgctggcctcagcgtcatcagccgcctggcagaagaattcgagcagcggagccaggttttcgctgatgacgccaagttcctggtcgaggtcaagtctgggcaggcggacgccagcctaaacccagacatggagctccggaggttgaagcagaacttcgactcgtggaagaaagatttcagtggacggatgagggagacgaaggtgatcctgaacaagctcggcaatggcaacgagtcatcgcccaactctgtgaagcggaagtggtggggcaggctgaacacctccaagttttcgtgagtttattatgtattgattggtaatttgtagatgtaaccggtattttacacgccggtgtggttctagcttcctagagtttctactctacgggtgctgtgaaagtccagtgtgttggactggatttgtattccacggagggcgagttgtatagttctcccacaatggcttccttttgaggggtcaaggaccactgaattgtgatgtaattacttgctgaagtagctgtcgaaggggggagattgtgagtgcttaatattccactatccttgtgctttactttctgcctgttgtagattcatagatttaaatgttggtatggtgtgacataatctatcatccgatgactcgtagcatgtttggtttgagaaataagatagtttattatttctcacttattttttgtttagtgtgacgaatgagatagttcattatttctcacttttttgtttggtttgtg

SEQ ID NO: 208547 - DNA, 4531 bp, Zea Mays
ctcccacccggcaggcacagccgcacaggaacccacccggcctctccaccgctgcacctgcagtcctgcacccatttaaatttaaacatttaaaaaaaaaacccaccccacgaaattcgcagaccaccttaattcccattacatcaattattttctcttcccgacccagtccgccgctgcctgcttccttccttccttctctctcctccctctcctccagcgacagagacagggaaggaggcggaggaggaggccgcgtggctgcggaggcgggcagccgcggcccgtgcgattcgcggcgcctctctcgccgtatctgcggtggcgcgggcgggttggcggccggccagcgagatcggctgttgtttttggtggtatttttttttctttccccacggcggtttttgggagttggagcgtggattgaagacggctgacggccggaggggtttggggggtccagttgaggccgtcggggcggagatcccgcggggagctgcggttccgccgcggcccgtgagttggattccgggcgcagcgccgcgccgacgatggcgtcggtggaggtgcgcaagtccagggccctgcgggcgcgcagcgggcccagcaagctgcagccggcgcggtcgatgccgctcgactacaggtactcggccggggcgtcgccggcgaacggcgccggcggcgggccggacgcgaacggcgtcgggcggcgggcggctgcggcggaggcggagaacggaggggaggtggtggtgcggttggaggggggcgatgcggactccccgtacagctccacggcggtcacagcggcggaggaggaggaagtgggggagagaggtggaggaggagacgaggtggattcagcggccacggcgacgccgaggcggttgtcgccgagggcagcagcgagccccacggaaggcgacgcccggtggggtgacaccagctcgtacggcgctaagaagaagcatagagttttttgtcagcttccgaatggcgattgggcattatgcacagtaattacaacctctggtgatgagtcggttgtaaaggtttctgaagggaaggtactgagattgaaaaccgagtgtctacaacctgcaaatcctgaaattcttgatggagtggatgatcttatgcagctaagttatctaagtgaaccatcagtactgtacaatctgcagtacagatactccaaggatatgatttatactaaagcaggtccagttttggtggctgtcaatcctttcaagaaagtttcactgtatggtaacgagtacatcgatgcatatagaaataaatcaatggatagtccacatgtttatgcaatagcagatgcagcactttgtgaaatgaaaagagatgaagtcaaccaatctataattataagtggtgagagtggagcaggaaaaacagaaaccgcaaaaattgctatgcagtacctggcttcccttggaggtggaagtggcattgaatacgaaattcttcagacaaatccaatactcgaggcttttggcaatgcaaagacattgagaaatgataactcaagtcgttttggaaagcttatagaaattcatttcagtaccactggaagaatatgtggtgccatgattcaaacatttttgcttgagaagtccagagttgtgcaatgtgcagttggtgagcgatcataccatatattttatcagctgtgcgctggtgcacctgcctctctaaaagagaagttgaatttgaaaaaggtggatggatacaaatatcttaagcagagctgttgctattcaattgcgggtgtggatgatgcccaaatgtttcgaactgtgacgcaagctatgaacattgttcatatcagcaaagaggaccaagagagtgtttttgcaatggtctctgctgttctttggctgggggatgtctcgttcacagtaattgacaatgaaaatcatgttgaaatcatagtagatgaagcttcgaaaacggtttcagaacttcttggctgcagtattgaagatctcaatttagctttatcaaagcgccacatgaaagttaataatgaaaacattgtccagaaacttacccttgctcaggcaactgacacaagagatgctctggccaaatcagtgtatgccagtttgtttgagtggcttgtagaacaaattaataagtctctctcagttggcaagcgtcgaactgggagatctatcagtattcttgatatctatggctttgaatcatttgataagaacagttttgaacagttctgcattaattatgctaatgaaaggttgcagcaacatttcaatcgtcatttgtttaagcttgagcaagaggaatatgtggaggatggcatcgactgggcaaaggttgacttcgaggataatcaggactgtttgagcctctttgagaaaaaaccactgggactattgtctctgctggatgaggaatctactttcccgaatgccacagatcttacttttgcaaacaagcttaagcaacatcttgactcgaattcttgcttcagaggagaaagaggcaaggcatttgctgtccgtcactatgcaggagaggtggcttatgatacttcgggttttctggagaagaatagagatttattgcacatggactcgattcagctccttgccaaatgcaaaacttctctgccaaaaatgtttgcatcgaagatgctagttcaatcagataattctatgtctgttccatatagatctagtgctgctgattctcaaaaactaagtgttgccatgaagttcaagggtcaactgttccaacttatgcaaagactggaaagtacaacgccacactttattcgttgcattaaaccaaacaatttacaacttcctgcaatttatgaacaaggacttgtgcttcaacaacttaaatgttgtggggttcttgaggttgtccggatttcaagatctgggtatccaacaagaatgactcaccagaagtttgctcggcgttgcaattcttcatcagttcaacattttacctgagatgtatcaagttggctacacaaagttgttcttccgaactggtcagattggcaaccttgaagatactcggaatcgtactctgcatggtattttaagggttcaaagctgtttcagggggcatcaagcccgtcatcatgcaagagaacgaacaagaggagttttgactcttcaatcattcattcgtggtgagaatgcacggcaaatttactcctctttgttgaggaaacatagagccgcagttgttttgcagagaaatgtgagatgttggcttgcaagaaggtatttcataaatgtccggaaggcctcagtgataatacagtctggtattcgtggcagtcttgttcgaagatgtaatggcaatattgatctaataaatgtgctaagagagtttgaatcaaaacaggaggcacatggtgaccaaattttgatcaaggcctcagtcctggctgagttacagaggcggatactaaaagccgaggccacagtacgtgaaaaggatgaagagaacgagatgcttcatcagcggcttcagcaatatgaaaaccgctggttagagtacgaacagaaaatgaaagctatggaggaaatgtggcagaagcaaatgcgttcgctgcaatcgagcctttccgtagcaaagaagagccttgttttggatgaaacgcctaggatgtcggactcatcagtggatcagagctgggaaagcaatgggaaccaccatgtcagcagcggttctcagctggtgccacacactggtggacgtgaaatgaacgctggcctcagcgtcatcagccgcctggcagaagaattcgagcagcggagccaggttttcgctgatgacgccaagttcctggtcgaggtcaagtctgggcaggcggacgccagcctaaacccagacatggagctccggaggttgaagcagaacttcgactcgtggaagaaagatttcagtggacggatgagggagacgaaggtgatcctgaacaagctcggcaatggcaacgagtcatcgcccaactctgtgaagcggaagtggtggggcaggctgaacacctccaagttttcgtgagtttattatgtattgattggtaatttgtagatgtaaccggtattttacacgccggtgtggttctagcttcctagagtttctactctacgggtgctgtgaaagtccagtgtgttggactggatttgtattccacggagggcgagttgtatagttctcccacaatggcttccttttgaggggtcaaggaccactgaattgtgatgtaattacttgctgaagtagctgtcgaaggggggagattgtgagtgcttaatattccactatccttgtgctttactttctgcctgttgtagattcatagatttaaatgttggtatggtgtgacataatctatcatccgatgactcgtagcatgtttggtttgagaaataagatagtttattatttctcacttattttttgtttagtgtgacgaatgagatagttcattatttctcacttttttgtttggtttgtg

SEQ ID NO: 208548 - DNA, 5179 bp, Zea Mays
gcctagcatacctacccggctggcagtgccgctagcccgctacagtgccctccatgcaaaatacagcgctcaagacaacagcagcgaatgccaatgccaattaataactagctactgtctcgtccgtccaggaaataggccggagaaggagacgcctcggcctctcattgctgggtgcgctccatgttagcggccgtaatggctgatagcggcgatgcggccatggccgttgttcttggctggtcgtcatcttggatctgcggggaagaggacggcgggcggctcaccctcaccgtcgcgtccaagtgcgtgcagaggacactcatagactgcgtcaatgtggtcctgttcatcgcgtacgtctgcacgctggctgccgcctgcgtcaggcggcggcagcgctctgcagatgcgagcagcgggaggagcggcgctcctagtaggtgggtgctgctcgtcgtctccacgtgctgcgtggcagctgccgtggcctactgtgtcacggctctccaagacgcctacgacatcaagacggcggttccttacttcgtcaggggcctggtctggatcgcgctggcggcctcgctgcacgcccagccgacgaggccggcgagggtcgtggccgtgctctggtgggtgctcttgtcgctgctggccaccgcgtacaattcggagatccttgccggggggcacagcctggacctcgcggagatgattgcgtggccggtgagcctcctcctgctgctctgcgccctcggctccctgctgccgcggggcgacgggcaccactaccgggacgcctccaacggcagcagcggcttgtcggagcctctgatcggcaatgacagaaccgtgccaacctcggagttgtaccgcgctggcctgttcggccagcttgccttctcgtggttgaaccctctgctccgtgtcggccgctccaaggcgctggacctcggcgacatcccgctcatcgccaccgacgacaccgcgcaccacacgtcgcagcagttcacggaggcctggagccgccacgtgagcgacaaagccaggagccgccggggcgtgggcagcaacagcctcgccctcgtcttgggcaagtgcttcctcagcgagatcctgctcaccggcttctacgccttcctgagaatgctgtccatagcagttgcccccctgctgctcttcgggttcgtgtggtacagcaaccaggaggaacgagacctccgggtcggcctgtcccttgtcggctgcctgctgctcgccaagctcgtggagtcgctgtcgcagcggcattggttcttcagctcgaggaggaccgggatgcgtatccggtcagcgctgatggcggtcatcttccagaagcagctcaggctgtccattcaggggaggaacaaccactccactggcgagattgtcaactacattgcggttgatgcgtaccggcttggcgacgccatcagctggctgcacatggggtggacctcgccacttcagctcgtctttgcagttgccacgctcttctgggcactcaagcttggggctcttcctggtctagtcccgctagtcatctttggtttcctcaacgtgccattcgcgaaaatgctgcaggggtaccaggccaagttcatggttgcacaggacgagaggctccggtccacgtcggagatactcaacagcatgaagatcatcaagctgcagtcgtgggaagacaagttccgcagcacgatcgagtcgctcagggacggcgagttcaaatggctgaggcagacccagatgaagaaggcctatggtgcagtcatgtactggatgtccccgacggtcgtctctgctgtcatgtacacagcaacggccatcatggggagtgctcccctgaatgctagcacgctcttcacggtcttggccaccctgagggtaatgtctgagccagtgaggatgcttccggaggtcctcacaatgatgatccagtacaaggtggcattagatcgaattgagaagttccttctcgaagacgagatcagagaggacgatgtgaaaagggtaccttcagatgactctggtgtcagagttcgagtccaagccggaaatttcagctggaaggcaagcggagctgatctgtcactgaggaatgttaaccttcgcgtgaaccgaggagagaaggtggccgtatgcggcccagttggctcagggaaatcttcactcctgtatgcattacttggggagataccaagattatcaggatcagttgaagtttttggttcagtagcatacgtttcacagagctcgtggatacagagtgggactgttcgtgacaacatactctttgggaagcctttcaacaaggaactgtatgataaggcgatcaaatcttgtgctctggacaaggatatcgaaaattttgaccatggagacctcacagagatcggtcagagaggactgaacatgagtggaggccagaagcaaaggattcagctggctcgagccgtctacagtgatgcagatgtttatctactggatgacccattcagtgcagttgatgcgcataccgctgcagtccttttctatgaatgtgtgatgacagcacttgcagagaagactgtcgtccttgtgacccaccaggttgaatttctgactgaaaccgataggattctggtaatggaaggtggtcaagttagtcaacaagggaaatattcagaactcctgggatctgggacagcatttgagaaactggtgtctgctcaccagtcttcgatcacagcattggataccagtgctagccaacagaaccaagttcaagggcaacaagagtctgatgaatacatagtgccaagtgcgcttcaggttataaggcaggccagcgacatcgacgtgaccgcaaagggcccttcagcagcaatacagcttacagaagaggaagagaagggcattggcgacctgggatggaagccatacaaagaatatataaatgtatccaagggggctttccaattctctggcatgtgtattgctcaagtgctcttcacgtgcttccagatcgcatccacatattggttggcagtggctgttcagatgggtaacgtcagtgctgcacttcttgttggggcatattctggactctctatcttcagctgcttctttgcctactttagaagctgttttgcggctattctgggtctcaaggcctccaaagcattctttggcgggctaatggactccgtattcaaggctcccatgtcattttttgactcaacaccagtgggaagaattttaacgagggcatcttcagatttgagcattctagacttcgacataccttactccatggcttttgtggcgacgggcggcattgaggttgttaccacagtactggtcatgggtactgtaacttggcaagtcctggttgtagcgatcccagttgctgtcaccatgatatatgttcagaggcactacgtttcctcagctagggagctagtaagactcaacggaacaacaaaggcacctgtaatgaactatgcatcagaatcaattctcggtgtggtgacgatcagggcatttgcagcaactgagaggtttatctacagcaacatgcagctcatcgacactgatgccacactgttcttccataccattgccgcacaagagtgggtactcataagagtagaggcactgcagtccttgacaataatcacagcagcattgttccttgttctggttcctccaggagcaatttctccgggctttgcaggactttgtctctcctatgctttgactttaacttcagcacaaatattcttgacaaggttctattcgtacttggaaaactacatcatctcggttgaacgaatcaagcagtatatgcacctcccagtggagccacctgccattataccagatagtagacctccaacttcgtggccgcaggagggaaggatagacctgcaagatttgaagataagataccgtccaaatgcgccgcttgtcctcaaaggaatcacttgcacttttgctgctgggaacaagattggggttgtagggaggacaggaagtggaaaatcaacacttatcagctcattgttccgtctcgttgatccggcgggtgggaggatacttattgacaagttggatatttgctccattggccttaaggatctaagaactaaactaagtattatccctcaagaacctacacttttcaggggaaccgtgcgcaacaatttggatccccttggccagcattctgatgaagagatatgggaggccttggagaagtgtcaactgaagacagcaatcagcaccacctctgctcttctggatacagttgtgagtgatgatggcgataactggagtgctggacagcgtcagctcttctgtcttggcagagttctcctacgcaggaacaaaattctagttctagacgaggcaacagcatccatcgactctgcaacagatgcaatcctgcagaaagtaatcaggcagcagttctcaagttgcacggttataaccatagctcacagggtaccaactgtgacagacagtgacaaggtcatggtcctgtcctacgggaagcttctagaatatgaaacaccagccaagctgttggaagacaaacaatcagcatttgctaaacttgtggctgagtattgggctaataccaagagaaattcaacatgatctaccattattgcaggacatgataaaagatatgatcattttaatcaagatatcgaaagattcaagggttctcaaattgaatctttaacaagacaaggaatgccatcatgattatttgattgatgtggttactgggagtgaataagatatcaacagaaattcaattttggtaatggaagcaatttttggagtgagggctgatgttcgagagaactccagctggttgattgaacatgtggtattcaatgcaaaatgaaatggaggatccacttctagcatgatcaatggcatttttcatacataagcctttttgaataagagaagcgaagtaccaagtcgtgaattgcaatgaagaatgagtaaagtgcagtgctgagaagaataattttcatgtatcttgtgtactcaataatgataaactttatatgactgagaaggaaactgtcgcaaattgtcaaagtgattattcaatagattagggctaacccaacaggttagctatatagtgttttac

SEQ ID NO: 208549 - DNA, 5160 bp, Zea Mays
gcctagcatacctacccggctggcagtgccgctagcccgctacagtgccctccatgcaaaatacagcgctcaagacaacagcagcgaatgccaatgccaattaataactagctactgtctcgtccgtccaggaaataggccggagaaggagacgcctcggcctctcattgctgggtgcgctccatgttagcggccgtaatggctgatagcggcgatgcggccatggccgttgttcttggctggtcgtcatcttggatctgcggggaagaggacggcgggcggctcaccctcaccgtcgcgtccaagtgcgtgcagaggacactcatagactgcgtcaatgtggtcctgttcatcgcgtacgtctgcacgctggctgccgcctgcgtcaggcggcggcagcgctctgcagatgcgagcagcgggaggagcggcgctcctagtaggtgggtgctgctcgtcgtctccacgtgctgcgtggcagctgccgtggcctactgtgtcacggctctccaagacgcctacgacatcaagacggcggttccttacttcgtcaggggcctggtctggatcgcgctggcggcctcgctgcacgcccagccgacgaggccggcgagggtcgtggccgtgctctggtgggtgctcttgtcgctgctggccaccgcgtacaattcggagatccttgccggggggcacagcctggacctcgcggagatgattgcgtggccggtgagcctcctcctgctgctctgcgccctcggctccctgctgccgcggggcgacgggcaccactaccgggacgcctccaacggcagcagcggcttgtcggagcctctgatcggcaatgacagaaccgtgccaacctcggagttgtaccgcgctggcctgttcggccagcttgccttctcgtggttgaaccctctgctccgtgtcggccgctccaaggcgctggacctcggcgacatcccgctcatcgccaccgacgacaccgcgcaccacacgtcgcagcagttcacggaggcctggagccgccacgtgagcgacaaagccaggagccgccggggcgtgggcagcaacagcctcgccctcgtcttgggcaagtgcttcctcagcgagatcctgctcaccggcttctacgccttcctgagaatgctgtccatagcagttgcccccctgctgctcttcgggttcgtgtggtacagcaaccaggaggaacgagacctccgggtcggcctgtcccttgtcggctgcctgctgctcgccaagctcgtggagtcgctgtcgcagcggcattggttcttcagctcgaggaggaccgggatgcgtatccggtcagcgctgatggcggtcatcttccagaagcagctcaggctgtccattcaggggaggaacaaccactccactggcgagattgtcaactacattgcggttgatgcgtaccggcttggcgacgccatcagctggctgcacatggggtggacctcgccacttcagctcgtctttgcagttgccacgctcttctgggcactcaagcttggggctcttcctggtctagtcccgctagtcatctttggtttcctcaacgtgccattcgcgaaaatgctgcaggggtaccaggccaagttcatggttgcacaggacgagaggctccggtccacgtcggagatactcaacagcatgaagatcatcaagctgcagtcgtgggaagacaagttccgcagcacgatcgagtcgctcagggacggcgagttcaaatggctgaggcagacccagatgaagaaggcctatggtgcagtcatgtactggatgtccccgacggtcgtctctgctgtcatgtacacagcaacggccatcatggggagtgctcccctgaatgctagcacgctcttcacggtcttggccaccctgagggtaatgtctgagccagtgaggatgcttccggaggtcctcacaatgatgatccagtacaaggtggcattagatcgaattgagaagttccttctcgaagacgagatcagagaggacgatgtgaaaagggtaccttcagatgactctggtgtcagagttcgagtccaagccggaaatttcagctggaaggcaagcggagctgatctgtcactgaggaatgttaaccttcgcgtgaaccgaggagagaaggtggccgtatgcggcccagttggctcagggaaatcttcactcctgtatgcattacttggggagataccaagattatcaggatcagttgaagtttttggttcagtagcatacgtttcacagagctcgtggatacagagtgggactgttcgtgacaacatactctttgggaagcctttcaacaaggaactgtatgataaggcgatcaaatcttgtgctctggacaaggatatcgaaaattttgaccatggagacctcacagagatcggtcagagaggactgaacatgagtggaggccagaagcaaaggattcagctggctcgagccgtctacagtgatgcagatgtttatctactggatgacccattcagtgcagttgatgcgcataccgctgcagtccttttctatgaatgtgtgatgacagcacttgcagagaagactgtcgtccttgtgacccaccaggttgaatttctgactgaaaccgataggattctggtaatggaaggtggtcaagttagtcaacaagggaaatattcagaactcctgggatctgggacagcatttgagaaactggtgtctgctcaccagtcttcgatcacagcattggataccagtgctagccaacagaaccaagttcaagggcaacaagagtctgatgaatacatagtgccaagtgcgcttcaggttataaggcaggccagcgacatcgacgtgaccgcaaagggcccttcagcagcaatacagcttacagaagaggaagagaagggcattggcgacctgggatggaagccatacaaagaatatataaatgtatccaagggggctttccaattctctggcatgtgtattgctcaagtgctcttcacgtgcttccagatcgcatccacatattggttggcagtggctgttcagatgggtaacgtcagtgctgcacttcttgttggggcatattctggactctctatcttcagctgcttctttgcctactttagaagctgttttgcggctattctgggtctcaaggcctccaaagcattctttggcgggctaatggactccgtattcaaggctcccatgtcattttttgactcaacaccagtgggaagaattttaacgagggcatcttcagatttgagcattctagacttcgacataccttactccatggcttttgtggcgacgggcggcattgaggttgttaccacagtactggtcatgggtactgtaacttggcaagtcctggttgtagcgatcccagttgctgtcaccatgatatatgttcagaggcactacgtttcctcagctagggagctagtaagactcaacggaacaacaaaggcacctgtaatgaactatgcatcagaatcaattctcggtgtggtgacgatcagggcatttgcagcaactgagaggtttatctacagcaacatgcagctcatcgacactgatgccacactgttcttccataccattgccgcacaagagtgggtactcataagagtagaggcactgcagtccttgacaataatcacagcagcattgttccttgttctggttcctccaggagcaatttctccgggctttgcaggactttgtctctcctatgctttgactttaacttcagcacaaatattcttgacaaggttctattcgtacttggaaaactacatcatctcggttgaacgaatcaagcagtatatgcacctcccagtggagccacctgccattataccagatagtagacctccaacttcgtggccgcaggagggaaggatagacctgcaagatttgaagataagataccgtccaaatgcgccgcttgtcctcaaaggaatcacttgcacttttgctgctgggaacaagattggggttgtagggaggacaggaagtggaaaatcaacacttatcagctcattgttccgtctcgttgatccggcgggtgggaggatacttattgacaagttggatatttgctccattggccttaaggatctaagaactaaactaagtattatccctcaagaacctacacttttcaggggaaccgtgcgcaacaatttggatccccttggccagcattctgatgaagagatatgggaggccttggagaagtgtcaactgaagacagcaatcagcaccacctctgctcttctggatacagttgtgagtgatgatggcgataactggagtgctggacagcgtcagctcttctgtcttggcagagttctcctacgcaggaacaaaattctagttctagacgaggcaacagcatccatcgactctgcaacagatgcaatcctgcagaaagtaatcaggcagcagttctcaagttgcacggttataaccatagctcacagggtaccaactgtgacagacagtgacaagggaagcttctagaatatgaaacaccagccaagctgttggaagacaaacaatcagcatttgctaaacttgtggctgagtattgggctaataccaagagaaattcaacatgatctaccattattgcaggacatgataaaagatatgatcattttaatcaagatatcgaaagattcaagggttctcaaattgaatctttaacaagacaaggaatgccatcatgattatttgattgatgtggttactgggagtgaataagatatcaacagaaattcaattttggtaatggaagcaatttttggagtgagggctgatgttcgagagaactccagctggttgattgaacatgtggtattcaatgcaaaatgaaatggaggatccacttctagcatgatcaatggcatttttcatacataagcctttttgaataagagaagcgaagtaccaagtcgtgaattgcaatgaagaatgagtaaagtgcagtgctgagaagaataattttcatgtatcttgtgtactcaataatgataaactttatatgactgagaaggaaactgtcgcaaattgtcaaagtgattattcaatagattagggctaacccaacaggttagctatatagtgttttac

SEQ ID NO: 208550 - DNA, 5150 bp, Zea Mays
gcccgctacagtgccctccatgcaaaatacagcgctcaagacaacagcagcgaatgccaatgccaattaataactagctactgtctcgtccgtccaggaaataggccggagaaggagacgcctcggcctctcattgctgggtgcgctccatgttagcggccgtaatggctgatagcggcgatgcggccatggccgttgttcttggctggtcgtcatcttggatctgcggggaagaggacggcgggcggctcaccctcaccgtcgcgtccaagtgcgtgcagaggacactcatagactgcgtcaatgtggtcctgttcatcgcgtacgtctgcacgctggctgccgcctgcgtcaggcggcggcagcgctctgcagatgcgagcagcgggaggagcggcgctcctagtaggtgggtgctgctcgtcgtctccacgtgctgcgtggcagctgccgtggcctactgtgtcacggctctccaagacgcctacgacatcaagacggcggttccttacttcgtcaggggcctggtctggatcgcgctggcggcctcgctgcacgcccagccgacgaggccggcgagggtcgtggccgtgctctggtgggtgctcttgtcgctgctggccaccgcgtacaattcggagatccttgccggggggcacagcctggacctcgcggagatgattgcgtggccggtgagcctcctcctgctgctctgcgccctcggctccctgctgccgcggggcgacgggcaccactaccgggacgcctccaacggcagcagcggcttgtcggagcctctgatcggcaatgacagaaccgtgccaacctcggagttgtaccgcgctggcctgttcggccagcttgccttctcgtggttgaaccctctgctccgtgtcggccgctccaaggcgctggacctcggcgacatcccgctcatcgccaccgacgacaccgcgcaccacacgtcgcagcagttcacggaggcctggagccgccacgtgagcgacaaagccaggagccgccggggcgtgggcagcaacagcctcgccctcgtcttgggcaagtgcttcctcagcgagatcctgctcaccggcttctacgccttcctgagaatgctgtccatagcagttgcccccctgctgctcttcgggttcgtgtggtacagcaaccaggaggaacgagacctccgggtcggcctgtcccttgtcggctgcctgctgctcgccaagctcgtggagtcgctgtcgcagcggcattggttcttcagctcgaggaggaccgggatgcgtatccggtcagcgctgatggcggtcatcttccagaagcagctcaggctgtccattcaggggaggaacaaccactccactggcgagattgtcaactacattgcggttgatgcgtaccggcttggcgacgccatcagctggctgcacatggggtggacctcgccacttcagctcgtctttgcagttgccacgctcttctgggcactcaagcttggggctcttcctggtctagtcccgctagtcatctttggtttcctcaacgtgccattcgcgaaaatgctgcaggggtaccaggccaagttcatggttgcacaggacgagaggctccggtccacgtcggagatactcaacagcatgaagatcatcaagctgcagtcgtgggaagacaagttccgcagcacgatcgagtcgctcagggacggcgagttcaaatggctgaggcagacccagatgaagaaggcctatggtgcagtcatgtactggatgtccccgacggtcgtctctgctgtcatgtacacagcaacggccatcatggggagtgctcccctgaatgctagcacgctcttcacggtcttggccaccctgagggtaatgtctgagccagtgaggatgcttccggaggtcctcacaatgatgatccagtacaaggtggcattagatcgaattgagaagttccttctcgaagacgagatcagagaggacgatgtgaaaagggtaccttcagatgactctggtgtcagagttcgagtccaagccggaaatttcagctggaaggcaagcggagctgatctgtcactgaggaatgttaaccttcgcgtgaaccgaggagagaaggtggccgtatgcggcccagttggctcagggaaatcttcactcctgtatgcattacttggggagataccaagattatcaggatcagttgaagtttttggttcagtagcatacgtttcacagagctcgtggatacagagtgggactgttcgtgacaacatactctttgggaagcctttcaacaaggaactgtatgataaggcgatcaaatcttgtgctctggacaaggatatcgaaaattttgaccatggagacctcacagagatcggtcagagaggactgaacatgagtggaggccagaagcaaaggattcagctggctcgagccgtctacagtgatgcagatgtttatctactggatgacccattcagtgcagttgatgcgcataccgctgcagtccttttctatgaatgtgtgatgacagcacttgcagagaagactgtcgtccttgtgacccaccaggttgaatttctgactgaaaccgataggattctggtaatggaaggtggtcaagttagtcaacaagggaaatattcagaactcctgggatctgggacagcatttgagaaactggtgtctgctcaccagtcttcgatcacagcattggataccagtgctagccaacagaaccaagttcaagggcaacaagagtctgatgaatacatagtgccaagtgcgcttcaggttataaggcaggccagcgacatcgacgtgaccgcaaagggcccttcagcagcaatacagcttacagaagaggaagagaagggcattggcgacctgggatggaagccatacaaagaatatataaatgtatccaagggggctttccaattctctggcatgtgtattgctcaagtgctcttcacgtgcttccagatcgcatccacatattggttggcagtggctgttcagatgggtaacgtcagtgctgcacttcttgttggggcatattctggactctctatcttcagctgcttctttgcctactttagaagctgttttgcggctattctgggtctcaaggcctccaaagcattctttggcgggctaatggactccgtattcaaggctcccatgtcattttttgactcaacaccagtgggaagaattttaacgagggcatcttcagatttgagcattctagacttcgacataccttactccatggcttttgtggcgacgggcggcattgaggttgttaccacagtactggtcatgggtactgtaacttggcaagtcctggttgtagcgatcccagttgctgtcaccatgatatatgttcagaggcactacgtttcctcagctagggagctagtaagactcaacggaacaacaaaggcacctgtaatgaactatgcatcagaatcaattctcggtgtggtgacgatcagggcatttgcagcaactgagaggtttatctacagcaacatgcagctcatcgacactgatgccacactgttcttccataccattgccgcacaagagtgggtactcataagagtagaggcactgcagtccttgacaataatcacagcagcattgttccttgttctggttcctccaggagcaatttctccgggtagccacattaccattataactacatcttccttcccaatggtatctttggactgatggaatattaccggttctattcgtacttggaaaactacatcatctcggttgaacgaatcaagcagtatatgcacctcccagtggagccacctgccattataccagatagtagacctccaacttcgtggccgcaggagggaaggatagacctgcaagatttgaagataagataccgtccaaatgcgccgcttgtcctcaaaggaatcacttgcacttttgctgctgggaacaagattggggttgtagggaggacaggaagtggaaaatcaacacttatcagctcattgttccgtctcgttgatccggcgggtgggaggatacttattgacaagttggatatttgctccattggccttaaggatctaagaactaaactaagtattatccctcaagaacctacacttttcaggggaaccgtgcgcaacaatttggatccccttggccagcattctgatgaagagatatgggaggccttggagaagtgtcaactgaagacagcaatcagcaccacctctgctcttctggatacagttgtgagtgatgatggcgataactggagtgctggacagcgtcagctcttctgtcttggcagagttctcctacgcaggaacaaaattctagttctagacgaggcaacagcatccatcgactctgcaacagatgcaatcctgcagaaagtaatcaggcagcagttctcaagttgcacggttataaccatagctcacagggtaccaactgtgacagacagtgacaaggtcatggtcctgtcctacgggaagcttctagaatatgaaacaccagccaagctgttggaagacaaacaatcagcatttgctaaacttgtggctgagtattgggctaataccaagagaaattcaacatgatctaccattattgcaggacatgataaaagatatgatcattttaatcaagatatcgaaagattcaagggttctcaaattgaatctttaacaagacaaggaatgccatcatgattatttgattgatgtggttactgggagtgaataagatatcaacagaaattcaattttggtaatggaagcaatttttggagtgagggctgatgttcgagagaactccagctggttgattgaacatgtggtattcaatgcaaaatgaaatggaggatccacttctagcatgatcaatggcatttttcatacataagcctttttgaataagagaagcgaagtaccaagtcgtgaattgcaatgaagaatgagtaaagtgcagtgctgagaagaataattttcatgtatcttgtgtactcaataatgataaactttatatgactgagaaggaaactgtcgcaaattgtcaaagtgattattcaatagattagggctaacccaacaggttagctatatagtgttttac

SEQ ID NO: 208551 - DNA, 2223 bp, Zea Mays
atcaaaaaagaagacgtaattgcgcaaaagcctttttccgagatcggcgaaacaaatcgctgtaaaacccagcctgctaatcgccccactaggagtagtaggaggactctccgaggtccgagcggggtaggcaggtgtccgaaacggatcaccaaaccccgccggcgcagccgagagatccgacgtcgccgcgatccatggccgcctcgacggcggcggcgcggcgtctcctcctcgccctcgccgtcctcgccgcctgcctcggctcggcgccgcacggggccgtcgcgctccgctcgctcggcgtcgggggcgccaaggcggccgacggggacgcggccgtggacctcgacgcgtccaacttcaccgccttcctccagacttcgccggagtcgttcgcggtcgtcgagttcttcgcccactggtgtcctgcctgcagaaactacaagcctcactatgagagggttgcaaaacttttcaatggcccagatgctgcacatccagggactgttgtgatggcacgagttgattgtgcatcaaagcacaggtgaacgtggatctttgcaacaaattctctgttgaccattatccttacctggtgtggggtccgccaacaaaattcaatttggctcagtggaaaccaaagcaagagaatagtgaattggaactaattgatgatggaagaacagcagatcggttactgaaatggataaataagaagatgggaagctcattcaatttagacgacaaaaagtatgagaatgaaagtatgcacccaaaaaatacttcagatcctgaacagattgttcgagcaatttatgacgttgaggaagctacatctcatgcattgcagataattttggagcacaaggtttgagtgaaatgatcaaaacttccaactaatgtgctgtctgcacctctttttatgattattgctaatgttacctgcaactgtagatgatcaaaccagacactcgtgactcgcttattagctttttacaaattttggtggctcatcatccatcaaagaggtgtcgaagaggatctgctgagctacttattgactttgatgatcactggcatacaaacctctcattaagtttggaagacagtactacactgttgaaaggtgcaggagagaaagtatgtggaaatggagtgccacgtggatactggattttctgccgaggaagtaaaaaggaaacaagaggatttagctgtggcctatgggttttgctgcattcactaactgtccgaatcggagatggagagagccaaacaacatttacatcaatttgtgatttcatccacaatttcttcatatgtgaggaatgccgcacacacttctatgaaatgtgttcaagttaccgttcacctgtagtgtatcagtccccttcaaatctgcccgtgaccttgccctctggctatggaccgcgcataacaaagttaacgagaggttgatgaaagaagaaaaggagttagacaatgctgatccttcatttcctaagatcatatggcctccaaagcaactctgtccattgtgctaccgttcttctagtaggacggctgatggagccatgcaggttgagtggaatgaagatgaagtattcaatttcttggttaactactacgggaagatgcttgtatcatcctacagggagacctccatgcagtcctttcaagtagcctcaatttctgacgattcttccgcatccagtgccgcaacagtacctattggagctgccctgggtatcgcccttgctagctgtacatttggggcgctagcatgcttctggaggacccaacagaagaacagaaagcaaagaaagaactggaactgaatatcttgcaccacttgcaaaccctaaactgcatgtctgcatcagaagtagcctccgtgagtgtaaattttctggaccggttatcttgacgatgggcccaaaagagtcgaaaacagatgaaaaacatacagagtagatttagtagtgctgagtcacgtggtagtgttgcgcgacggcgcgaactttgttgcaacaggtaatacagattgaacgtgtaaactctgcccttaacatgtttctcggatacctttacctggttatcgatgtaatattatcaatttaatgagtgaaaacgctgtgccttactttattgctgagctgaaacttcatcgatgttgtatctgtcatcctaatggttgccgtactacgtccagtcgaaaaa

SEQ ID NO: 208552 - DNA, 1236 bp, Zea Mays
  misc_feature (1)..(1): n is a, c, g, or t
nttttgtatctagctacatttattcactcatggtaccttagtacttggttttatgctttccttaatacaaaaatttcctattcatatgcaggtccctgacattgaggattttatatacgaaaaggccaaaacattgacatcgtcaagtaaggcaacaacatctttggtcaaggtggagaaaaaggttggagtttcttcagttataaaagttggagctccagataactgggaggcagttcttggaggcattaaaagcatgaggttatctggtgaagcccccgtagatacgaagggctgtgaaaaagctggttctctccttccacccaaggaaagaagatttgcagttctgatatcaactatgatgtcaagccagacaaaagatgaagttacacatgctgctgtggaacgcctctctgaaaacggtttacttgatccggatgctatagtgaggactgatgagaccacgcttgcgaatcttatcaaacctgtcggattctatcagcgaaaggcgcagttcataaaagaagcttctaaaatttgtcttgagcgctttggaggggatattccggattctctgaatgaactgcttgctctgaggggagttggccctaaaatggctcatttggtgatgagcattgcttggaagaatactcaaggaatctgtgttgacactcatgtgcatcgcatttctaaccgacttgggtgggtttttcgggaagggacaagacagaaaactacgacaccagaacagacaagaatttctctagagaaatggctacccaaggatgagtgggaacctataaatccattactggttggatttgggcaaactatctgtactccactgaggcccaaatgcgataagtgtggcatcaacaacatttgcccttctgcttttaaggaatcatcaagcccaattccaaagcaaaagaaaacaaggtctccatagaactctgactgtgacttgtctggcaccgacgtgagataatattttgggttgtccgtcggtggtaaatattatggggtttccttttggtcagttattgttggatcaccttggtgccgtaccattggcatttggcaatggcaagtcatgtatatcattttgtataccggtaaattgttcaagacggtatgaagacacgcttgtctaccagttactgtaacaagcgaaattttcatgtgccaaatgacacatgattcatgaaagttatctgatcgggagcttgcgcgtgg

SEQ ID NO: 208553 - DNA, 4019 bp, Zea Mays
cccgaaccgcatgtctcctccccctcccagacacaaccctcccattgtcttcccctcctctcctcacgccgaccactccattcctcatcgccgcctccgcttactaatccccacaaccgcaccgatccatcgctcgccttaggttttctgctcgactacctcctggtgctccaccgttctggctcgattcgcgccgagggcggttgctccgagctcttagccacctgtcgccgctgtagcctgctgctgcgggggtgctctgccgtcggctgccgctggtgtcgaggaatagggttttgggactgccaggcagaggagggtgcattggttggcttgcgcatggggatggtgcccaacgggctcctgcccagtgcgtctgccgggatgacgcgacggctcgaccccgagcgctgggcggtcgcggaggaccgcacggcggagttgatcgcgtgcatccaacccaacgtgtactccgaggggcggaggctggccgtgtaccactacgtgcagcggctcatcatgaactgcctctcctgccaggtttttacctttgggtcagtccctctcaagacttacttacccgatggtgacattgatgtcactgcttttagtaatagtgaagaattaaaggagatttgggcaaatcttgtccgggatgcattggagcgtgaagagaaggatgaaaacgctgaatttcatgtaaaagaagtccagtatattcaggcagaggtcaagattataaagtgtcttgtggaaaacattgttgttgacatctcatttaatcaagtcggtggactatgcacactatgttttcttgaagagattgacaacttgatcagccaaaaccatttattcaagaggagtatcatattgataaaggcatggtgtttctacgagagccgtattcttggagctcatcatggtcttatatctacttatgcattggagacacttgttctgtacatatttcatatattcaacaactctttcactggacctcttgaggtgttgtaccgtttcttagaatttttcagcaactttgattgggagaaattttgtttgagcttgtggggcccagttcctattagttcacttccggatatgactgcgatccccccacggatggacagtggtgagttgttgctgaacaagtccttcctcgatacttgtagttctgcatatggagttgtgcctcacacccaggagaaccagggtcaaccatttgtttcaaaacattttaatgttattgatcctttacgtacaaacaacaatcttggaagaagtgtcagtaaagaaggttcattttagggaccgacactcaaattcaagaaactacagaggaggttataatggtgacaggggtgactataatgataaggagggaagctggataaactcaaaacaacgaaatccaaaccgcggctatggacgtagccagtcagagaggtccggcatgaggtctgatagacaggtcactgatgagagccggtctgataggcaacgacgaacttatagaaatgactcgtaccggcatgaggcaagctctcagtatcttgtgcagggccaaccttttggatccacaagctctatgcgcaaaccaggaaacacagtgcatggggtttatacaccaccatctacgtattcaaatggtaccagtgctttatctggccctccaggaccaccattttttatggtgtactcttatgaacaaggctcaaatcatgctgcttcctcatctgaaccaattgaatttggatctcttgggccacttcctgcagcagatggtgatgacataccaaggtcgacacgccaagtaatgcctaatgggttttatgggcaaagacgtggtcgatataggggtggttcctctcattcatctcctgatcaaccatcctcgcctcagcctcgtcggtagttgagtcttcgtatgatggcttgatcacttcgtatgaaaccttgcgatagcaatattttggtccaccccttgtgatcacatcctgcatgggtgaagatggttgggccttcagcagccacaaaaaaagtatatgccctagctggcttgttggtgctctgtgattctcagaagcactgaattgtgaataccatcaaaagaggcatcaatttaccggcaggttattttaccagtcacaatgatgcttcctggaatcaaaataactatcttccgaacaaatcatggaaccttcaatcctataatatcttcatacagaaatcagaactgaactgaaggttatgagcaaggatgaactgtgttccggccgtcccgttatatgaattgtgtcaagggtaataacaatattagtttggatggagcaggaacaagcattgctgcattggaaacaatctggaatgctttgggctttaaatcccgtaccgtttttaggtaggattaagctcatgtaacacagcaaacttttcacttagatgcactatgaatcaagtgaatcgtaggaaacggattctcgtgctgaagggagggatgactccagaatttactcttaaggcacgagtaaaaaagttatccatgtcaatcttcctcgtttcctttccatgtgtgctgtgtgttgggatgttcgcatgtttctctgcccgcgtgttggttttcagggctgtttcatctatgatcattcagttatgcagagagcggcagctttataggttacatcagtgttaaaaaaataagaggaatttagggatcttaagaatcagtgtagctggtaatttgctcgtgctaaatgcattttacaatgggtacatatgtattgcaaattctgagctcgcatgatgttggtgaacattctcgcactcccagtggcctatgggctggtctacattgtttgcgtatttcccttggtaatcagggtatgacgagtaaaatggccattccctggactgctacagtggcgaagtgtgcccatacttcgtctgttgaaactgaatgacgtcctcagctcgctactctgctccagctctcttcttgagctccgaaatgaagtcctccctctcctggtctgacatgccctccgtggagcagtccccgacgccccactcggcgccccgcagacagtacttgtcctggatcatcctctcgttcctgcaaaaaacacaggttcagcgctggaaatgcatcaccagagagatcccaagaaccgaataaaagactacgtttttacttctctttgttcttcctgctcttctcgagcaggtcctgcagcaccttggacttcttgaacctgttatcgaactcggtgtacttcttctggttctccgcttgagagcgaaacagggagacatggtttccatgagtcagaaaaggcccggaatggtaaaacgcttgcagcaagaacaagtccttggcctccacaagaactcagcaggtaactcaggatctcaactaaccattccatttctccaggaactcgagccgggggaggtcggggccgggagtcgactccagtcccgagaaaccggacaggatgccggcgttcactgcagttcgcgaacaaaatgttccgggcattattagtctggaagcaccggcggcgaatcttcgaatgttttacgttccatcaagtgtgcctgactctgatgctgtgttgcaccggtgtcgctagcaagtgcgccgtgccggtgagcaagactgcaagagtagccgtacctggactggaccagaggaagagcgagagcgagacagccgccgcagggacagccagagacacccggcctgtcatcgctggtggcggggcggcgctgcatcgccccttgcccttcgggttcggcggtgctgcggcggccgggggcgcggcggggaggccgagcatggctagctacttcgcttgctggtagcctgacagtatgctaaggcccagcaatgcgaaggaggatgcatcatggatggattggatggagagcatgtagcactagcggactggtgggggcaagccgccgctgggaaaggatgggggccgacttgttctcttgtgagccactaactaaaagct

SEQ ID NO: 208554 - DNA, 5916 bp, Zea Mays
cccgaaccgcatgtctcctccccctcccagacacaaccctcccattgtcttcccctcctctcctcacgccgaccactccattcctcatcgccgcctccgcttactaatccccacaaccgcaccgatccatcgctcgccttaggttttctgctcgactacctcctggtgctccaccgttctggctcgattcgcgccgagggcggttgctccgagctcttagccacctgtcgccgctgtagcctgctgctgcgggggtgctctgccgtcggctgccgctggtgtcgaggaatagggttttgggactgccaggcagaggagggtgcattggttggcttgcgcatggggatggtgcccaacgggctcctgcccagtgcgtctgccgggatgacgcgacggctcgaccccgagcgctgggcggtcgcggaggaccgcacggcggagttgatcgcgtgcatccaacccaacgtgtactccgaggggcggaggctggccgtgtaccactacgtgcagcggctcatcatgaactgcctctcctgccaggtttttacctttgggtcagtccctctcaagacttacttacccgatggtgacattgatgtcactgcttttagtaatagtgaagaattaaaggagatttgggcaaatcttgtccgggatgcattggagcgtgaagagaaggatgaaaacgctgaatttcatgtaaaagaagtccagtatattcaggcagaggtcaagattataaagtgtcttgtggaaaacattgttgttgacatctcatttaatcaagtcggtggactatgcacactatgttttcttgaagagattgacaacttgatcagccaaaaccatttattcaagaggagtatcatattgataaaggcatggtgtttctacgagagccgtattcttggagctcatcatggtcttatatctacttatgcattggagacacttgttctgtacatatttcatatattcaacaactctttcactggacctcttgaggtgttgtaccgtttcttagaatttttcagcaactttgattgggagaaattttgtttgagcttgtggggcccagttcctattagttcacttccggatatgactgcgatccccccacggatggacagtggtgagttgttgctgaacaagtccttcctcgatacttgtagttctgcatatggagttgtgcctcacacccaggagaaccagggtcaaccatttgtttcaaaacattttaatgttattgatcctttacgtacaaacaacaatcttggaagaagtgtcagtaaaggaaatttctttagaatacgcagtgcttttgcgtatggggcgaaaaggctcggaaagttacttgaatgtccaaaagaagctttaattcctgaattaaaccagttcttcacaaatacatggataagacatgggagtggaagtcgtcctgatgtgcctatcccaagtctggttgatgtgcggcctatgaaggttgtttcttctgtagtgtcaagcagccagagaagtttagcggcattcaagaaaaaagttgaaaatcctaaacttcatgttaatcaggataatcttcgtccgaatcaagataatctcactggagttggtgacatacattaccgtaatctaccaagaacagttaatccttcagtttctcatgttcagcaccaaaaaagttatacaccacaaggcaatgctaaggtctctgaacagcttgaaagaaataactcagacggattgatgcaaagtgcaagggataagagagtgccaaatggtctctttgtcaatgacagaaatgggcagaacaggtccagatttgcaaggacccgatcaagtcctgaactcacagactcgtctactgaaggatttcgtggtaggcggactaatgcagttggtatggaaaaatcttttggtgttgattacagcagaagaaacatcttgattccagaagtgtctagcaaccacagcactaagtcttcacaagatgaatcagtgtcttccatgaatggttcatctcaccctagtgcattggcagcttctgactcaaatagcgtttcaagcagctttcgtgatgataatggttttgtgatgaatgaagaactcccttctgtttctgaatcatcggatatgcaccacgatgaacaagttctggctaatttaatggaatccatgaagttgcatggattcaacggacagattcaattgccaatgcaaataccttctcatttgtctgtagcgcatccccctttactggctccaacaacttattcacaaaagcatttggctggggttccaccagctaacttaattgggacaccatggttgcccaatatgcagttcctgcatggatttgttccacctatggcccattacatacacaatccaaattttgcaccaaacatcgaggatggtactgagactgaaaaacctaatacatcagatgtgaatcatgatgctggcaaaacttggcaagagtatggtgttgggttttctagacattttgatcctgaagcaagagatcctcacttctatggtattgatggcaaggagcattcctctttgcctaatggtgtaccaggtgctcccttggaaaggcagatgaaattcacagttgagaataatgttgtaggtgatgaaacttatactggcatgttccaaattcatacaggtagagaacctgctgtagattattctaagaggagtggttatgggaatgttccgtcttcacatgccagttcatccaaaggcaaaactctggattcgagttcatgggatgaaatgactgtaaatacaacaataccaccaagagaaaattggggaaaaagacctgcctttgtggcacctgccacgactacacatggcaatactgggtggcagatgggaaatatcactgagcatctcgcagctgaagttaatgatggccccagaaatgggacagtggtaccaatcatcactgaagcttctgagatagtaacagggtctgattctttttcatcaaaatcaagaactagtcaagtacccaatgagcttgatccatcacaagttggcatgcctaatccagtgtttacaccttttcttattggatcaccacagcataggcaagctgatagctctggacttacttttgttccaacaggtccaccagttccttttgttgtgctcccgtttgttccagggaataatgatggttctggcccccagtttgagagaagcgaaggaattgatcagcttcctgccaatactgtaggtcaattttttggttcacttaatgatgttcaccaacaagattccagtgctatctcaacagtatcgtccagtactatgactgagccatctggtgaacacaagcctgatatcttgcatagtgattttgtcagccattggcacaatttacagtatgggcgactctgtcagaatcctcgtcccatgggtcctgttctataccctgttccagtgccaccgatgtatttacagggccatgttccatgggatgggcctggaagaccagctgcaccaaatgttaactggacacaaatggtgggcggtcaacgagtatttcctgtgatgcctgtacaaccggctacagaaagaactggtgtttttcagcactacggtgaagatgcacccagataccgtggaggcacaggaacctacttgccaaatcctaaggttcattttagggaccgacactcaaattcaagaaactacagaggaggttataatggtgacaggggtgactataatgataaggagggaagctggataaactcaaaacaacgaaatccaaaccgcggctatggacgtagccagtcagagaggtccggcatgaggtctgatagacaggtcactgatgagagccggtctgataggcaacgacgaacttatagaaatgactcgtaccggcatgaggcaagctctcagtatcttgtgcagggccaaccttttggatccacaagctctatgcgcaaaccaggaaacacagtgcatggggtttatacaccaccatctacgtattcaaatggtaccagtgctttatctggccctccaggaccaccattttttatggtgtactcttatgaacaaggctcaaatcatgctgcttcctcatctgaaccaattgaatttggatctcttgggccacttcctgcagcagatggtgatgacataccaaggtcgacacgccaagtaatgcctaatgggttttatgggcaaagacgtggtcgatataggggtggttcctctcattcatctcctgatcaaccatcctcgcctcagcctcgtcggtagttgagtcttcgtatgatggcttgatcacttcgtatgaaaccttgcgatagcaatattttggtccaccccttgtgatcacatcctgcatgggtgaagatggttgggccttcagcagccacaaaaaaagtatatgccctagctggcttgttggtgctctgtgattctcagaagcactgaattgtgaataccatcaaaagaggcatcaatttaccggcaggttattttaccagtcacaatgatgcttcctggaatcaaaataactatcttccgaacaaatcatggaaccttcaatcctataatatcttcatacagaaatcagaactgaactgaaggttatgagcaaggatgaactgtgttccggccgtcccgttatatgaattgtgtcaagggtaataacaatattagtttggatggagcaggaacaagcattgctgcattggaaacaatctggaatgctttgggctttaaatcccgtaccgtttttagggtatgacgagtaaaatggccattccctggactgctacagtggcgaagtgtgcccatacttcgtctgttgaaactgaatgacgtcctcagctcgctactctgctccagctctcttcttgagctccgaaatgaagtcctccctctcctggtctgacatgccctccgtggagcagtccccgacgccccactcggcgccccgcagacagtacttgtcctggatcatcctctcgttcctgcaaaaaacacaggttcagcgctggaaatgcatcaccagagagatcccaagaaccgaataaaagactacgtttttacttctctttgttcttcctgctcttctcgagcaggtcctgcagcaccttggacttcttgaacctgttatcgaactcggtgtacttcttctggttctccgcttgagagcgaaacagggagacatggtttccatgagtcagaaaaggcccggaatggtaaaacgcttgcagcaagaacaagtccttggcctccacaagaactcagcaggtaactcaggatctcaactaaccattccatttctccaggaactcgagccgggggaggtcggggccgggagtcgactccagtcccgagaaaccggacaggatgccggcgttcactgcagttcgcgaacaaaatgttccgggcattattagtctggaagcaccggcggcgaatcttcgaatgttttacgttccatcaagtgtgcctgactctgatgctgtgttgcaccggtgtcgctagcaagtgcgccgtgccggtgagcaagactgcaagagtagccgtacctggactggaccagaggaagagcgagagcgagacagccgccgcagggacagccagagacacccggcctgtcatcgctggtggcggggcggcgctgcatcgccccttgcccttcgggttcggcggtgctgcggcggccgggggcgcggcggggaggccgagcatggctagctacttcgcttgctggtagcctgacagtatgctaaggcccagcaatgcgaaggaggatgcatcatggatggattggatggagagcatgtagcactagcggactggtgggggcaagccgccgctgggaaaggatgggggccgacttgttctcttgtgagccactaactaaaagct

SEQ ID NO: 208555 - DNA, 2765 bp, Zea Mays
cactgttcccttgtctttgccgaaacagcgaggcttcctcccaattccaatccaagccccaactaacgacctccgcccattccgctcgcggttgcctccgcctccgcctccgcctccgcgcctaacccaatccagagccagggcagggcaaccaaaccctaggccctcgcgctcgtggtatccatgggctgaccgcgtcccggtggggagcccggatccagagctagggttccgtcctcggcggcaacgccatggagtgggacagcgagtccgacggcgccggcagcgtcggcgtcgacgagcaggaagaggagcaggagcaggaggaggaggaggaggagcggggaggcgagggaggaggtggcgacgccggtgggatgttcacgctcgcgattgaaggcatgctgcgcgcgtcaggtccgtgcgggctcgtcgtcaccgacgcgctcgagcccgactgtcccatcatctacgccaaccgcggcttcgaggaggctacgggctaccgcgccgaggagtttcttggcaggaactgtgtagagggccatttgctcgaaggagacatcccctagttaatgctgcagtggtttcagagattcaaagatgcataaacaacagcattgagttccgtggcgatttattaaatttcagaaaagatggatcgccactgatgaacaggttgcatctgacccctatatatggagatgatgaaactataacccattatatgggcatccagttcttcactgatgctaatgttgatttgggaccattgccctgtccaatgacaaaggaaccagtgaggtcaacacggtttgctccagataactcatttcgacccatttctgcggggccagagcacagcaatttctgccgggaatattctagcctcttccagttaacggatgaagtgctttgccaaagtatactgtcaaggttgacaccaagagatatagcatctgtgagctccgtgtgcaggtgcttgtatcatttgacaagaaatgaagatctctggagaatggtttgccagaatgcttggggtagtgaaactactcgagctcttgagacggtgcccgctgcaagaaggttgggctggggacgtctggcaagagaactgaccaccctggaagctgttgcctggaggaaattgacagttgggggtgcagtggagccatctcgatgcaatttcagtgcctgtgccgtagggaaccgtgttgttctatttggtggggaaggtgttaacatgcagccgatgaatgacacgtttgtattggatttaaacgctagcaatccagagtggaggcatataaatgtgagtgcagctcctccaggtcgctggggccatactctgtcatgcttaaatggctcttggttggttgtttttggtggatgtggaaggcagggtctgcttaatgatgtattcatgttggatttggatgcaaaacaaccaacctggcgtgagatacctggagttgcacccccagttccacgttcatggcacagctcctgcactttggatgggacgaagttagtagtttctggtggctgtgccgattcaggtgtacttctcagtgacacatatcttcttgatgtaaccatggataggccagtttggagagaggttcctgcatcctggaaaccgccttctaggctggggcactcaatgtctgtctatgatggtaggaagatcctgatgtttggtggtcttgctaagagcggccctctgcggctcaggtctagtgatgtgtacacaatggacttaagtgaagaagaaccttgctggcgatgcctcactggtagtggaatgcctggggctggaaatccagctggcgcaggtccacctcctcgcctcgatcatgttggtgtgagcctgccaggtggaagaattttgatatttggtggctcagtggcaggtcttcactcagcatcacagctttatctgttggatccaactgaagaaaagccgacctggagaattttgagtgttcctgggcaccctccccgattcgcctggggccacagcacctgtgttgttggaggaacaaaagcgatagtgcttggtggacaaactggggaagagtggatgcttacagaaatacatgagctctctttggcaaacaactcagtctgagttcatggtggacaaaccggggaagagtggatgcttacagaaatacatgagctctctttggcaagcaactcagtctgagttcagggtggccaaaccggggaagagtggatgcttacagaaatacatgagctctctttggcaagcaactcagtctgagttcaggaatggttcttagtcatgctccttgcaaactaattgcggcttcttatgcgacctgaagcttgattgccttcaccttcagagtatcatctggcagctacatggctttacttgggagatgaaatggttttcactggtttgctcgctttatgtaggcagagggtagcgatatgttcatttttattgccgtttgcttggccttctttttaccagataattacagttcataagctactattgtggaatgagtaccagattttatatgtattctcagatgtttccgacttgcaatatgttaggaaaacaaaggactaccttgtacatagtttaagcttttgttgtacggtacatggagaccttgatgctgctgtcttgcggcacaggcgcacaactgctgagatggcgtgatgtaaggtgatcaccgatcgaccatgtttttgtgcagaacttgtattatgcagaaatttcatcccgc

SEQ ID NO: 208556 - DNA, 2836 bp, Zea Mays
cgacctccgcccattccgctcgcggttgcctccgcctccgcctccgcctccgcgcctaacccaatccagagccagggcagggcaaccaaaccctaggccctcgcgctcgtggtatccatgggctgaccgcgtcccggtggggagcccggatccagagctagggttccgtcctcggcggcaacgccatggagtgggacagcgagtccgacggcgccggcagcgtcggcgtcgacgagcaggaagaggagcaggagcaggaggaggaggaggaggagcggggaggcgagggaggaggtggcgacgccggtgggatgttcacgctcgcgattgaaggcatgctgcgcgcgtcaggtccgtgcgggctcgtcgtcaccgacgcgctcgagcccgactgtcccatcatctacgccaaccgcggcttcgaggaggctacgggctaccgcgccgaggagtttcttggcaggaactggattgcttggcatgataccatactactgattacaaagaaaaccatatgcttggctttagctggcatgatattgctgttttgaggtcatgttcttcaatattgtttcgagagagaaatatctaagtcgattcctgcagtgtagagggccatttgctcgaaggagacatcccctagttaatgctgcagtggtttcagagattcaaagatgcataaacaacagcattgagttccgtggcgatttattaaatttcagaaaagatggatcgccactgatgaacaggttgcatctgacccctatatatggagatgatgaaactataacccattatatgggcatccagttcttcactgatgctaatgttgatttgggaccattgccctgtccaatgacaaaggaaccagtgaggtcaacacggtttgctccagataactcatttcgacccatttctgcggggccagagcacagcaatttctgccgggaatattctagcctcttccagttaacggatgaagtgctttgccaaagtatactgtcaaggttgacaccaagagatatagcatctgtgagctccgtgtgcaggtgcttgtatcatttgacaagaaatgaagatctctggagaatggtttgccagaatgcttggggtagtgaaactactcgagctcttgagacggtgcccgctgcaagaaggttgggctggggacgtctggcaagagaactgaccaccctggaagctgttgcctggaggaaattgacagttgggggtgcagtggagccatctcgatgcaatttcagtgcctgtgccgtagggaaccgtgttgttctatttggtggggaaggtgttaacatgcagccgatgaatgacacgtttgtattggatttaaacgctagcaatccagagtggaggcatataaatgtgagtgcagctcctccaggtcgctggggccatactctgtcatgcttaaatggctcttggttggttgtttttggtggatgtggaaggcagggtctgcttaatgatgtattcatgttggatttggatgcaaaacaaccaacctggcgtgagatacctggagttgcacccccagttccacgttcatggcacagctcctgcactttggatgggacgaagttagtagtttctggtggctgtgccgattcaggtgtacttctcagtgacacatatcttcttgatgtaaccatggataggccagtttggagagaggttcctgcatcctggaaaccgccttctaggctggggcactcaatgtctgtctatgatggtaggaagatcctgatgtttggtggtcttgctaagagcggccctctgcggctcaggtctagtgatgtgtacacaatggacttaagtgaagaagaaccttgctggcgatgcctcactggtagtggaatgcctggggctggaaatccagctggcgcaggtccacctcctcgcctcgatcatgttggtgtgagcctgccaggtggaagaattttgatatttggtggctcagtggcaggtcttcactcagcatcacagctttatctgttggatccaactgaagaaaagccgacctggagaattttgagtgttcctgggcaccctccccgattcgcctggggccacagcacctgtgttgttggaggaacaaaagcgatagtgcttggtggacaaactggggaagagtggatgcttacagaaatacatgagctctctttggcaaacaactcagtctgagttcatggtggacaaaccggggaagagtggatgcttacagaaatacatgagctctctttggcaagcaactcagtctgagttcagggtggccaaaccggggaagagtggatgcttacagaaatacatgagctctctttggcaagcaactcagtctgagttcaggaatggttcttagtcatgctccttgcaaactaattgcggcttcttatgcgacctgaagcttgattgccttcaccttcagagtatcatctggcagctacatggctttacttgggagatgaaatggttttcactggtttgctcgctttatgtaggcagagggtagcgatatgttcatttttattgccgtttgcttggccttctttttaccagataattacagttcataagctactattgtggaatgagtaccagattttatatgtattctcagatgtttccgacttgcaatatgttaggaaaacaaaggactaccttgtacatagtttaagcttttgttgtacggtacatggagaccttgatgctgctgtcttgcggcacaggcgcacaactgctgagatggcgtgatgtaaggtgatcaccgatcgaccatgtttttgtgcagaacttgtattatgcagaaatttcatcccgc

SEQ ID NO: 208557 - DNA, 2098 bp, Zea Mays
cgccatccctccccgctagctactattcgctaacggctaaccctttctctctgctcgcctcgccattactgttcggactgagctctgcctgctggagcctggactacatcgtgatgatggcggagttggtagcgctcgtcatcattccaggcagcaagatcgcatgacacacagctgaagctcggctttggcgcttcttggtgaccgaagcacgcgcagcatccatccgccatggagagtgccggcggacgaccagaggcggcggcggcggcggtgctcaaggtcaagggaagagacgccggaagaagaccgaacggggctcactcgtcttcttcctgcctgcaacaccgacactccagaagaacaacgagcgcgtcgtacgtaaatgctcccgacgtgtcgccgcgactctccgccggtcacatacctgcggccatcagtcgcagtgaggtgctcgacgacacaaggcgttcgctcgacctccctgaccagtttcccgagcatcgcgtcgccgcagccacagagagagctgaaagaagcggttcgaagtctgccgcggacctggcctgggagatagccgtcctggaggagcaagtcgtccgcaaggagctgcacctgctgtccctgtacagagccgcgttcgaccagtacctcggcgtctcccctcgcgcgtctgctcaggaaccgcgccatgagcgcagcagcagaagggctactgctgctgacgacgaaggcgcccttcgcctgaggagcatcaaggagtctgcgtcctacagcctaccaacgctctccgattctaaacgcgtagagctctccaggtgctcctcagggcggtccagcctggccaacttcctgagcgcctcgatcgctgagtacgtgcctaagatctcgtgcaagctctcggaggacatactgcggtgcgtctccgccgtctactgcaagctcgcgagcaggccgctgtcgcaggaggaggaggaggcgaggtccgagacgccgccgttcacgccttctctctcggtctcgtccgcgtcgagctccttctccctcaagaagcagcaccccgtccgtggctggagccctcggtgctactacaacgccgacgcgactgcgaccccggacgcgtacgcttcgtccggcgggagcagtgggcggtacagtggggtgatggttttcccagggatacatgtagacgaggagaagtttgagtatgcctgcaaaatgctggacactatcagatcgctgatcaaacggctggagaagattgatcctagaaagatggcacatgaagagcagctctgtttctgggtcaacatccacaatgccttggttatgcatgctttcatggcctatggattacaggaaaaacggatgaaaagcactgacttgattctgaaggctgcatacaatgtgggtgggcattcagtgaactcccaaactatccagaactcgattctaggatgccagtcccaccgcccttcactgtgggttcggacactatttacgccgacgaaaaaatctgggagctccatacatccatatgcgcttcagtacgcagagccaattgcgcactttgcgctctcgaccggcgcgttttcagacccacctgtgaggctgtacacagccaagaaactgtaccatcagctggagcaagccagggccgagttcatccaagcaaatgtcatggtccggaggcagaccatcttcctgcccaaggttctccacttctatgcgaaggatgcttccctggagctacctgaccttgttgacatagtgtgcgagagcatgcctgagctgcagcgaaaagagatcaggcagtatcttaggaggaggatcgacaagtgtgttcagtggttgccctacaagtcttctttcaggtacactgtgcatagcagtttggctgagtaggcacttttttttcttctctatgtgcttgtaaataaggagccatgattctaagaacagtcgtctgttggggtgtgtgtgtgtatgtaaaactatattgtgacagttctttctttcttagaggaaaattacagcttatcttaaatcctctttgtgctttaccacactactacagatttgcagatttcagttgtac

SEQ ID NO: 208558 - DNA, 1865 bp, Zea Mays
gctttattaccaatcacattcctggctgttatccatctcttgtgccagcacaatgatgctttgtcatatctagggagaagtgagtaaaagccatgagtgatgattatgcttctcttcttcttttccttcttaatgacgtactgccagtacgtacgtgctgttgtcagggaactgtatccgaattccaaattttgaacatgatttagcaagacagacagagagaaagagaatagttgactagttgtaaacttgtaatgtatggatcatgcctttcattcgatggctactgatcttgcttcgagcgcagtctgccgcggacctggcctgggagatagccgtcctggaggagcaagtcgtccgcaaggagctgcacctgctgtccctgtacagagccgcgttcgaccagtacctcggcgtctcccctcgcgcgtctgctcaggaaccgcgccatgagcgcagcagcagaagggctactgctgctgacgacgaaggcgcccttcgcctgaggagcatcaaggagtctgcgtcctacagcctaccaacgctctccgattctaaacgcgtacacgcgcaggagctctccaggtgctcctcagggcggtccagcctggccaacttcctgagcgcctcgatcgctgagtacgtgcctaagatctcgtgcaagctctcggaggacatactgcggtgcgtctccgccgtctactgcaagctcgcgagcaggccgctgtcgcaggaggaggaggaggcgaggtccgagacgccgccgttcacgccttctctctcggtctcgtccgcgtcgagctccttctccctcaagaagcagcaccccgtccgtggctggagccctcggtgctactacaacgccgacgcgactgcgaccccggacgcgtacgcttcgtccggcgggagcagtgggcggtacagtggggtgatggttttcccagggatacatgtagacgaggagaagtttgagtatgcctgcaaaatgctggacactatcagatcgctgatcaaacggctggagaagattgatcctagaaagatggcacatgaagagcagctctgtttctgggtcaacatccacaatgccttggttatgcatgctttcatggcctatggattacaggaaaaacggatgaaaagcactgacttgattctgaaggctgcatacaatgtgggtgggcattcagtgaactcccaaactatccagaactcgattctaggatgccagtcccaccgcccttcactgtgggttcggacactatttacgccgacgaaaaaatctgggagctccatacatccatatgcgcttcagtacgcagagccaattgcgcactttgcgctctcgaccggcgcgttttcagacccacctgtgaggctgtacacagccaagaaactgtaccatcagctggagcaagccagggccgagttcatccaagcaaatgtcatggtccggaggcagaccatcttcctgcccaaggttctccacttctatgcgaaggatgcttccctggagctacctgaccttgttgacatagtgtgcgagagcatgcctgagctgcagcgaaaagagatcaggcagtatcttaggaggaggatcgacaagtgtgttcagtggttgccctacaagtcttctttcaggtacactgtgcatagcagtttggctgagtaggcacttttttttcttctctatgtgcttgtaaataaggagccatgattctaagaacagtcgtctgttggggtgtgtgtgtgtatgtaaaactatattgtgacagttctttctttcttagaggaaaattacagcttatcttaaatcctctttgtgctttaccacactactacagatttgcagatttcagttgtac

SEQ ID NO: 208559 - DNA, 1951 bp, Zea Mays
tgattttttttcccaagttcattgcaaaactgtccaggcccaggagcccatgaagaaagaagaggcccactaacgaaacggggtaagtatatcatatctttatcggataggacacccccatctcaacgcaaacccaactgtcttggttgcgcaagcaccaagcaggtggaagatgatggaggtggcgggggctcaggcccgcgcggttcccctcctgctccgcaacaccgcctccctgcggacctccgtctccgtctcctgcacgggctcccgccggagctgggtggcggcggccacggcggagggggacgagacccgcggcttcgacaaggtgcccatggacacccccggcgcgtaccgcctggtagaccgggacaccggccgcagcgtcatcgtgtggggcggcaccgacgacagcgacgaggcctccatgccgtccccggcggtgctctcccggaccaccgaccgccgccacagccaaggtgttgggggaggtacaggtatcgggaatttcggcaggttcaaggcacagaaaataaaatccttggtcacgaggtcagctcaccgcaagagggagagttctaatcgctcaagcactgcctggtctgatgaatcttctttcaatggctctgatgatgaagaggaaagctattttgagagaagaaagcatgtctcagactctgaacgccacccgaagatgagcagtggctccagagatggaagaactcgaagtgcacattctctgagttctgttttgagccaatacagaggcgatgatgatacagacttccctggttcagaggctacttctggttccaaacgatggggtaatgttgccgatgttacttatggacggcagaatcagaagcaaagggagcctctgaatttccctcaaagaaaagggcctctggacggcggatttttcagtcgcagatctttcaaggagattggctgcagcgatgaaatgctaggtgcgttgagaaattttgatttccctcgtccgtctcatatccaggctatggcatatgggcctatcttagaggggaggagttgtgttgttgctgatcaaagtgggtctggcaagacactggcatatctttgccctataatacaaaacttaaggaacgaagaagttcaagggctccataaatcatcccctaggaaccccagggtgatagtattgacccctactgctgaacttgcttctcaggtccttaacaactgccggttgatatcaaaatctggggttccatttaggtctatggttgcaaccggaggatttcgacaaaagactcagttagagagccttgaccaagagctcgatgtaattatagcaacacctggccgtttcttgtatctgcttcaagaaggctttgtgcaactagctaacctcagatgtgttgtgttggatgaagtggacattttatttggtgaagaaggtttcgagcaagtgcttcatcagttgatcaccgtggcaccagtgacaacgcagtatcttttcgtgactgccactcttcctcttgacatctataacaaggtcgttgaaacctttcctgactgtgaggtgatcatgggacccggtgtccaccgaacaagctctcgccttgaagagatccttgtggactgcagcggagatgacaacgaagaaaagaatccagaaaccgccttttcgaacaagaaaacagcgcttttgaagattatcgaggagtctcctgtccgcaaaacaattgttttctgcaacaagattgagacatgtagaaaagttgagaatgcgctgaggcgggtggacaggaaggcctcgcagatcaaagttctccccttccatgctgcgctggatcaggcccagcgcatcgcaaacatcaaggagttcctgaacaagcaaacggctgactccatgttccttgtgtgcacagatagcgctgatgctaccatttgagtttgacgacggtcg

SEQ ID NO: 208560 - DNA, 1814 bp, Zea Mays
atctcaacgcaaacccaactgtcttggttgcgcaagcaccaagcaggtggaagatgatggaggtggcgggggctcaggcccgcgcggttcccctcctgctccgcaacaccgcctccctgcggacctccgtctccgtctcctgcacgggctcccgccggagctgggtggcggcggccacggcggagggggacgagacccgcggcttcgacaaggtgcccatggacacccccggcgcgtaccgcctggtagaccgggacaccggccgcagcgtcatcgtgtggggcggcaccgacgacagcgacgaggcctccatgccgtccccggcggtgctctcccggaccaccgaccgccgccacagccaaggtatcgggaatttcggcaggttcaaggcacagaaaataaaatccttggtcacgaggtcagctcaccgcaagagggagagttctaatcgctcaagcactgcctggtctgatgaatcttctttcaatggctctgatgatgaagaggaaagctattttgagagaagaaagcatgtctcagactctgaacgccacccgaagatgagcagtggctccagagatggaagaactcgaagtgcacattctctgagttctgttttgagccaatacagaggcgatgatgatacagacttccctggttcagaggctacttctggttccaaacgatggggtaatgttgccgatgttacttatggacggcagaatcagaagcaaagggagcctctgaatttccctcaaagaaaagggcctctggacggcggatttttcagtcgcagatctttcaaggagattggctgcagcgatgaaatgctaggtgcgttgagaaattttgatttccctcgtccgtctcatatccaggctatggcatatgggcctatcttagaggggaggagttgtgttgttgctgatcaaagtgggtctggcaagacactggcatatctttgccctataatacaaaacttaaggaacgaagaagttcaagggctccataaatcatcccctaggaaccccagggtgatagtattgacccctactgctgaacttgcttctcaggtccttaacaactgccggttgatatcaaaatctggggttccatttaggtctatggttgcaaccggaggatttcgacaaaagactcagttagagagccttgaccaagagctcgatgtaattatagcaacacctggccgtttcttgtatctgcttcaagaaggctttgtgcaactagctaacctcagatgtgttgtgttggatgaagtggacattttatttggtgaagaaggtttcgagcaagtgcttcatcagttgatcaccgtggcaccagtgacaacgcagtatcttttcgtgactgccactcttcctcttgacatctataacaaggtcgttgaaacctttcctgactgtgaggtgatcatgggacccggtgtccaccgaacaagctctcgccttgaagagatccttgtggactgcagcggagatgacaacgaagaaaagaatccagaaaccgccttttcgaacaagaaaacagcgcttttgaagattatcgaggagtctcctgtccgcaaaacaattgttttctgcaacaagattgagacatgtagaaaagttgagaatgcgctgaggcgggtggacaggaaggcctcgcagatcaaagttctccccttccatgctgcgctggatcaggcccagcgcatcgcaaacatcaaggagttcctgaacaagcaaacggctgactccatgttccttgtgtgcacagatagcgctgatgctaccatttgagtttgacgacggtcg

SEQ ID NO: 208561 - DNA, 1770 bp, Zea Mays
atctcaacgcaaacccaactgtcttggttgcgcaagcaccaagcaggtggaagatgatggaggtggcgggggctcaggcccgcgcggttcccctcctgctccgcaacaccgcctccctgcggacctccgtctccgtctcctgcacgggctcccgccggagctgggtggcggcggccacggcggagggggacgagacccgcggcttcgacaaggtgcccatggacacccccggcgcgtaccgcctggtagaccgggacaccggccgcagcgtcatcgtgtggggcggcaccgacgacagcgacgaggcctccatgccgtccccggcggtgctctcccggaccaccgaccgccgccacagccaaggtatcgggaatttcggcaggttcaaggcacagaaaataaaatccttggtcacgaggtcagctcaccgcaagagggagagttctaatcgctcaagcactgcctggtctgatgaatcttctttcaatggctctgatgatgaagaggaaagctattttgagagaagaaagcatgtctcagactctgaacgccacccgaagatgagcagtggctccagagatggaagaactcgaagtgcacattctctgagttctgttttgagccaatacagaggcgatgatgatacagacttccctggttcagaggctacttctggttccaaacgatggggtaatgttgccgatgttacttatggacggcagaatcagaagcaaagggagcctctgaatttccctcaaagaaaagggcctctggacggcggatttttcagtcgcagatctttcaaggagattggctgcagcgatgaaatgctaggctatggcatatgggcctatcttagaggggaggagttgtgttgttgctgatcaaagtgggtctggcaagacactggcatatctttgccctataatacaaaacttaaggaacgaagaagttcaagggctccataaatcatcccctaggaaccccagggtgatagtattgacccctactgctgaacttgcttctcaggtccttaacaactgccggttgatatcaaaatctggggttccatttaggtctatggttgcaaccggaggatttcgacaaaagactcagttagagagccttgaccaagagctcgatgtaattatagcaacacctggccgtttcttgtatctgcttcaagaaggctttgtgcaactagctaacctcagatgtgttgtgttggatgaagtggacattttatttggtgaagaaggtttcgagcaagtgcttcatcagttgatcaccgtggcaccagtgacaacgcagtatcttttcgtgactgccactcttcctcttgacatctataacaaggtcgttgaaacctttcctgactgtgaggtgatcatgggacccggtgtccaccgaacaagctctcgccttgaagagatccttgtggactgcagcggagatgacaacgaagaaaagaatccagaaaccgccttttcgaacaagaaaacagcgcttttgaagattatcgaggagtctcctgtccgcaaaacaattgttttctgcaacaagattgagacatgtagaaaagttgagaatgcgctgaggcgggtggacaggaaggcctcgcagatcaaagttctccccttccatgctgcgctggatcaggcccagcgcatcgcaaacatcaaggagttcctgaacaagcaaacggctgactccatgttccttgtgtgcacagatagcgctgatgctaccatttgagtttgacgacggtcg

SEQ ID NO: 208562 - DNA, 4135 bp, Zea Mays
  misc_feature (1)..(1): n is a, c, g, or t
ncctgcaaaaacggaagggatataccctcttctattcccactctattttcggatttttcagtaaattcaaaaacggatcagatctaatgtgtaacacgggccgagacgatattttaaggttccattttggaccctacgtgtgggtgtgggtggcgagactgggatgggatggggtactaggcagggggaagtatttgatcaagggcgcccaggaactcgaacgcagtcaaacccggtgaacgtttagggtagtgtttggttgaggagtcaagtagaacagagccgtttcatggtgtgcagcctgagcctggtgtgcagcactaagtcaactaagcaactcaagcgtgatttgaatcagaaagagggggttgttttttagtttagtacctgtgtcggtgggtatggacgaattaaacaagatcatggttttgagatccagccgtccaagaatactgggaaggcaaggggcagtgacggagagcatgcagcagagcaacatgtccaagtgccccccaggctaaacacgcacacaaagtaagcgatctgcaacgcacatggaagcctaaacggcaacttacttttctgatgctgatcccacagttggggactgtagtagtgaggatggagtgatggacagagcctaggattgatagataactcgtggctgtggggccccctggtatcttcagatctctactgcaaactacaagcatgtactggcctggcctagctcatctatctatcagatgtctaccaagtacaaaaaccccccctgatatctttaatcccggcaaaacctgcgtggcatatctgcttcacatgttctttaggccggcttcttgtttcattaacccaaccagatttggctctccgattggcccgctggctgcactttccctgatctttcctcgagctcgataaacaaatatcgacgcgcagcgtgcctcccgctaactaaacgatctccacagctcctcatccttctgcgttgccgccctcgctgtaccctgctgcttacccttcaagcctgccgaccatcgcatcatcactagctttttttcttcacttctgctcggcgtctcttgtttgctgttggctgttggcttcataagcgcaaggaaggacgagagatagagcgacgaagtatcttgctcggaactctcccacagctgggctctgagatgagtaatgggttctgaggatagagccgcgcgagcttcctcccgttctgcgtccctgcgacgtatgggcactgcccgggggctatgacctttcagactggatgtttcaggtatggctgttgatttgcttcgtgttcacagaatcctctccaccctgttggagacaaaggggataaccgtcacgagatatatagaaggtagaggtaatacccagaaaacaaccgaattgttgctggaagctggtgagcaagagcttttacgcacctgggaagacccaatggacgagcagtgcaaacaggacagcaaggactcgattcggagaacaatcgtggagcatgataaggtcttcaggcagcaggtgcatgagctgcatcgtttgtaccatgtacaaaaaacattgatggctgaatgcgatagccataggtatcaaccgagagcagaaggaactcatgaagtggtgcagggatcaaggtcgaacctcaagtgcagtccttctacctcagggacaaaccaatctgctctccttggtaatgcacaatacccagctccgcagcaagtacaagaagatttgagtctccatgaatgcaagccggtgaactgcctcagcctcttcggtgaagaaaactcagcagccaaagaaaggtttcacggggagaaccataaatcagttgaagatgaaagctggagcgccgctgtagagagtgatcttgacctcaaactgagcatcggccccagctcacattcaccagaaacaccgcgctggctattctcaggaagcagggaaagaaacccttctggccagcatcgatgagagcaagctagtaaatatctgatcattcagtttgggggcaggagaagcaaaacacagcacactagagtttcatatgctgagaaagctgaagcctccattaaaaatggcatgtggatttgtggaaatacaggtctcaagaaaaatacacttctagctcctatggcgggcgccttggccaaaaacagaaacaaagcccagaaaggcttccaccagatttcaatcagaattctttagtatgccaaaaatgtagaacctcaaaggtcccaatgcttgctatgggtaggataggactgcactaatgttatggcaagtaaaggattggtaacaattcaggtcttgcttgccttgtgcataattttgagtttcagagcaaaagtgataagaaaaaacattaggtaagtattgaatttgaaagaaccaaacaatccctttcagttctcatacaccaataattatatagtcacattcagcagtatacttagtgtttttcaattacccatcatgattgatgttttgcaatttgcatttgtactgtgggcactccatggtccatgcttttaagtatatatatattttttcaaatcagtgtgtccacttttgcaatcaaacactgacttcctcattacccatgcattaccgaatagatctgtcaccagatgtttagctcttcattgcaaacaaagattgccatcactcaattgctttgaattcataagcagtgttctaagctttgctctgctgttcagagttgaccttcctatattggaaaccaagtcagataaataagccggacaaggaactgttgtcggtgaaggtttaggccttgttcggttagctcggattgtggctaggaactattccaactaatcaatactagtacaaataaacttatcattccaaccggaatggttgtcgtggaacggttctggagtaaacgaacgggcccttaatggtttattcacccatgtttatttttttaacaaaatccatatcatgcattcaccagaatccactgcatgagcattctccatcttcgaaatgatgggatctcaagttgtccctgtctataatctcgatgggcccaacttttgacaccaatcttataaacaaatggcagtcctcacatatccttagattctttactatcctaattgaggatctagactcgagtttgagcaaatccaaatgacagagcaagcttctcactatgacccattgacaacctttctttctcttcctcacttacgttataaacaactgaactaaggactggcacataacttgcaagattcaattttgcccgtagctccaataatcttattctatatttcatgcatccatgggtgtgtattatcaccagcaaagaacccgacccgacaactgcattcctcccaagaccattccattctacaattccctgaacccaggcgtctcgcctcaccgcaccgagctgagcagattgcaccggtgagtgaagcttcatcaatgggcatgccggccacctccatctgctcaaatggctccagtgccttcactggcatggcattctgtgcatacgccgtcaccattgccgtccacgccaccatatccttcaccagagcgcacacacctcctcagctgaacccatatcacggctcctagaatacgctgccacaatgcttgtacacgaaatgacatccttcaccgtcatttcgtgaaacaccttacccgcggcaccaacatcgccgcacgcgacgtacgcaccgatcaacgagttctcaacaaaccgatgcttatcggaggagcgacaccggccgtggcggacgcaggtgaagaggcggacggtctccaggcgcggctgagtgaggtgcgcgaagcggagcagcgcggcggcgaggagagaagaatacggcgacggcgtagcggcgtgcgcgcgggcgggcgggagcgggagcgcggcgagtcggtggagcaggctggagaggaggaacggggctgacggcgacgggaggtggaggcggacgaggaggccgtggaggtggccgatgtgcgggagggaggacgaggacgcgacggcggcgcggagtcagggccgccccgcgccatggagacggaccgcggacgggcgtcgcgggttggtttggaaacgagcggtttgtcgtgg

SEQ ID NO: 208563 - DNA, 2218 bp, Zea Mays
gggaccaaccgttgcggatgatttcctctcgtctcgtcccatactcccgtcctgtccgtcttcacctgcgttccccgggtcccgacacgccgctgtaccagtcccgcccgcctgcgcacttctcccacccccgcgccgcctccggcgccggcgagccctcccgacgctcctcgaacgatccgtccctgtcgcggcccttctctctgccgcttccagcccaagggtcaatctgtcaaggacacacacagtcaaacctacctctgctggcgaccgttcaggaatttctgttaaatgcaacttggggtggtcttctcaaccatcgcctgacttgaggcatcactttagaggatactcatcagcatcagaggcagttcttacttcccaatctgatgtgagaaaactgtttgttggcaatgaaaaaatcggtgttctcttgctgaatcttgggggcccagagactcttgacgatgtgcagcctttcttgtttaatctttttgcagatccggacattatccgtcttcctaggctctttcgctttctgcagaagccacttgcaaaattcatatcagaagtgagagcaccaaaaagtaaggaaggttatgcatccataggtggcggttctcctctacgacaaattactgatgcacaggctgaagcacttagggaggcattacatgggaaagatgttcctgccaacgtgtatgttggaatgcggtattggcatcccttcactgaagaagccatagaacaaataaaacgggatggaatcacgaaacttgttgtgttgcctctataccctcagttctccatatcaactagtggttcaagtctccgtttattggagagcatattcagagaggatgagtatctcgtgaatatgcaacatacagttataccttcctggtaccaacgtgaaggatatatcaaggctatggcaactttgattgaaaacgaattgacaaaatttcaagaaccccaaaaggttatgatatttttcagtgctcatggagttcctctggcatatgttgaagaagctggtgatccatataaagcagaaatggaagagtgtatcgatcttatcatggaagaactggaaaaaagaggaataacaaatccgtgcatacttgcttatcagagccgagttggaccagtggaatggctgaaaccgtacactgatgagacaattattgagcttgggcagaaaggggtaaagagcctgcttgctgttcccattagttttgttagcgaacacattgaaactttggaagaaatcgatgtggagtacaaagagttggctttagaatctggcatcaagcactggggacgggttccagcactaggttgcgaacccacattcatttcggatcttgctgatgctgttattgaaagcctaccttatgttggcgcaatggcagtttccaatcttgaggctcggcagtctctcgtacccctcgggagcgtggaggagctgctagcagcatacgactcgaagcgcgatgagctccctccaccggtaatcgtgtgggagtggggctggacaaagagcgcggagacctggaatggtcgtgcggcgatgctggccgtgctggctctcctggtgctggaagtgaccaccggcgaagggttcctgcatcaatggggaatcctgcctctgttccgctgagccgacagttctgttcatgatggggtcataattttgctgcagccgaaggaagttttgaacttctgatgctgtatatgaatcaatttgccttaaatcgtcgatgggaaaagaggagaaaatggtaaaatatggacagaattcgacggtatatcatgttatattgtacctacctacatgacatgggacatgaaatagggctcagacatgcgctatggaacttggaatacacacaaacctaacacgccacatgctgcacaaactcctgcctactgccactagtaccttgtctgtccataagtggatgcgcgttgcttttagagaataatcatatgagcggatgagcctctgcattgtcatgtggatgctatatcaatccagcattccagctcaacaatttcagggttagctttagctcaagcagattaatttttcggttggctgagtttatatggtttttgtgcctctattgatggagattaattatagattttccatggatgacttagaaggtgacttaattctaaatgtcaacagagttgatattattaacgggat

SEQ ID NO: 208564 - DNA, 2370 bp, Zea Mays
gggaccaaccgttgcggatgatttcctctcgtctcgtcccatactcccgtcctgtccgtcttcacctgcgttccccgggtcccgacacgccgctgtaccagtcccgcccgcctgcgcacttctcccacccccgcgccgcctccggcgccggcgagccctcccgacgctcctcgaacgatccgtccctgtcgcggcccttctctctgccgcttccagcccaaggggaggagagggagaggatgtggtcgtcgagccaggcgagcacgaggggcgtcgtggagatggggagggtggaggccgggccgtcgcatttccctaagagacccgcgcctcagaactccgccagggtcaatctgtcaaggacacacacagtcaaacctacctctgctggcgaccgttcaggaatttctgttaaatgcaacttggggtggtcttctcaaccatcgcctgacttgaggcatcactttagaggatactcatcagcatcagaggcagttcttacttcccaatctgatgtgagaaaactgtttgttggcaatgaaaaaatcggtgttctcttgctgaatcttgggggcccagagactcttgacgatgtgcagcctttcttgtttaatctttttgcagatccgttatatgtcccatgacgcatgatcgcaggacattatccgtcttcctaggctctttcgctttctgcagaagccacttgcaaaattcatatcagaagtgagagcaccaaaaagtaaggaaggttatgcatccataggtggcggttctcctctacgacaaattactgatgcacaggctgaagcacttagggaggcattacatgggaaagatgttcctgccaacgtgtatgttggaatgcggtattggcatcccttcactgaagaagccatagaacaaataaaacgggatggaatcacgaaacttgttgtgttgcctctataccctcagttctccatatcaactagtggttcaagtctccgtttattggagagcatattcagagaggatgagtatctcgtgaatatgcaacatacagttataccttcctggtaccaacgtgaaggatatatcaaggctatggcaactttgattgaaaacgaattgacaaaatttcaagaaccccaaaaggttatgatatttttcagtgctcatggagttcctctggcatatgttgaagaagctggtgatccatataaagcagaaatggaagagtgtatcgatcttatcatggaagaactggaaaaaagaggaataacaaatccgtgcatacttgcttatcagagccgagttggaccagtggaatggctgaaaccgtacactgatgagacaattattgagcttgggcagaaaggggtaaagagcctgcttgctgttcccattagttttgttagcgaacacattgaaactttggaagaaatcgatgtggagtacaaagagttggctttagaatctggcatcaagcactggggacgggttccagcactaggttgcgaacccacattcatttcggatcttgctgatgctgttattgaaagcctaccttatgttggcgcaatggcagtttccaatcttgaggctcggcagtctctcgtacccctcgggagcgtggaggagctgctagcagcatacgactcgaagcgcgatgagctccctccaccggtaatcgtgtgggagtggggctggacaaagagcgcggagacctggaatggtcgtgcggcgatgctggccgtgctggctctcctggtgctggaagtgaccaccggcgaagggttcctgcatcaatggggaatcctgcctctgttccgctgagccgacagttctgttcatgatggggtcataattttgctgcagccgaaggaagttttgaacttctgatgctgtatatgaatcaatttgccttaaatcgtcgatgggaaaagaggagaaaatggtaaaatatggacagaattcgacggtatatcatgttatattgtacctacctacatgacatgggacatgaaatagggctcagacatgcgctatggaacttggaatacacacaaacctaacacgccacatgctgcacaaactcctgcctactgccactagtaccttgtctgtccataagtggatgcgcgttgcttttagagaataatcatatgagcggatgagcctctgcattgtcatgtggatgctatatcaatccagcattccagctcaacaatttcagggttagctttagctcaagcagattaatttttcggttggctgagtttatatggtttttgtgcctctattgatggagattaattatagattttccatggatgacttagaaggtgacttaattctaaatgtcaacagagttgatattattaacgggat

SEQ ID NO: 208565 - DNA, 1936 bp, Zea Mays
caacgttttaactataatttttttggtaatactttaattataatttgtcaaaatttaatgtcaaattcaaaattttcatcaatttcgaactatttttaaattcaaagtcaaaatattgatatttatggtcagatttatgccacaattatatcctaaactttcatataaaacttaggacaaatttgcggaaaatcgataaaagaagaggggatatagtacaaaggacattatccgtcttcctaggctctttcgctttctgcagaagccacttgcaaaattcatatcagaagtgagagcaccaaaaagtaaggaaggttatgcatccataggtggcggttctcctctacgacaaattactgatgcacaggctgaagcacttagggaggcattacatgggaaagatgttcctgccaacgtgtatgttggaatgcggtattggcatcccttcactgaagaagccatagaacaaataaaacgggatggaatcacgaaacttgttgtgttgcctctataccctcagttctccatatcaactagtggttcaagtctccgtttattggagagcatattcagagaggatgagtatctcgtgaatatgcaacatacagttataccttcctggtaccaacgtgaaggatatatcaaggctatggcaactttgattgaaaacgaattgacaaaatttcaagaaccccaaaaggttatgatatttttcagtgctcatggagttcctctggcatatgttgaagaagctggtgatccatataaagcagaaatggaagagtgtatcgatcttatcatggaagaactggaaaaaagaggaataacaaatccgtgcatacttgcttatcagagccgagttggaccagtggaatggctgaaaccgtacactgatgagacaattattgagcttgggcagaaaggggtaaagagcctgcttgctgttcccattagttttgttagcgaacacattgaaactttggaagaaatcgatgtggagtacaaagagttggctttagaatctggcatcaagcactggggacgggttccagcactaggttgcgaacccacattcatttcggatcttgctgatgctgttattgaaagcctaccttatgttggcgcaatggcagtttccaatcttgaggctcggcagtctctcgtacccctcgggagcgtggaggagctgctagcagcatacgactcgaagcgcgatgagctccctccaccggtaatcgtgtgggagtggggctggacaaagagcgcggagacctggaatggtcgtgcggcgatgctggccgtgctggctctcctggtgctggaagtgaccaccggcgaagggttcctgcatcaatggggaatcctgcctctgttccgctgagccgacagttctgttcatgatggggtcataattttgctgcagccgaaggaagttttgaacttctgatgctgtatatgaatcaatttgccttaaatcgtcgatgggaaaagaggagaaaatggtaaaatatggacagaattcgacggtatatcatgttatattgtacctacctacatgacatgggacatgaaatagggctcagacatgcgctatggaacttggaatacacacaaacctaacacgccacatgctgcacaaactcctgcctactgccactagtaccttgtctgtccataagtggatgcgcgttgcttttagagaataatcatatgagcggatgagcctctgcattgtcatgtggatgctatatcaatccagcattccagctcaacaatttcagggttagctttagctcaagcagattaatttttcggttggctgagtttatatggtttttgtgcctctattgatggagattaattatagattttccatggatgacttagaaggtgacttaattctaaatgtcaacagagttgatattattaacgggat

SEQ ID NO: 208566 - DNA, 1764 bp, Zea Mays
cccaaataactaatgcccagtcacttaaatcttcactggaatgtgcaccaagacattatccgtcttcctaggctctttcgctttctgcagaagccacttgcaaaattcatatcagaagtgagagcaccaaaaagtaaggaaggttatgcatccataggtggcggttctcctctacgacaaattactgatgcacaggctgaagcacttagggaggcattacatgggaaagatgttcctgccaacgtgtatgttggaatgcggtattggcatcccttcactgaagaagccatagaacaaataaaacgggatggaatcacgaaacttgttgtgttgcctctataccctcagttctccatatcaactagtggttcaagtctccgtttattggagagcatattcagagaggatgagtatctcgtgaatatgcaacatacagttataccttcctggtaccaacgtgaaggatatatcaaggctatggcaactttgattgaaaacgaattgacaaaatttcaagaaccccaaaaggttatgatatttttcagtgctcatggagttcctctggcatatgttgaagaagctggtgatccatataaagcagaaatggaagagtgtatcgatcttatcatggaagaactggaaaaaagaggaataacaaatccgtgcatacttgcttatcagagccgagttggaccagtggaatggctgaaaccgtacactgatgagacaattattgagcttgggcagaaaggggtaaagagcctgcttgctgttcccattagttttgttagcgaacacattgaaactttggaagaaatcgatgtggagtacaaagagttggctttagaatctggcatcaagcactggggacgggttccagcactaggttgcgaacccacattcatttcggatcttgctgatgctgttattgaaagcctaccttatgttggcgcaatggcagtttccaatcttgaggctcggcagtctctcgtacccctcgggagcgtggaggagctgctagcagcatacgactcgaagcgcgatgagctccctccaccggtaatcgtgtgggagtggggctggacaaagagcgcggagacctggaatggtcgtgcggcgatgctggccgtgctggctctcctggtgctggaagtgaccaccggcgaagggttcctgcatcaatggggaatcctgcctctgttccgctgagccgacagttctgttcatgatggggtcataattttgctgcagccgaaggaagttttgaacttctgatgctgtatatgaatcaatttgccttaaatcgtcgatgggaaaagaggagaaaatggtaaaatatggacagaattcgacggtatatcatgttatattgtacctacctacatgacatgggacatgaaatagggctcagacatgcgctatggaacttggaatacacacaaacctaacacgccacatgctgcacaaactcctgcctactgccactagtaccttgtctgtccataagtggatgcgcgttgcttttagagaataatcatatgagcggatgagcctctgcattgtcatgtggatgctatatcaatccagcattccagctcaacaatttcagggttagctttagctcaagcagattaatttttcggttggctgagtttatatggtttttgtgcctctattgatggagattaattatagattttccatggatgacttagaaggtgacttaattctaaatgtcaacagagttgatattattaacgggat

SEQ ID NO: 208567 - DNA, 1584 bp, Zea Mays
ccggaaccggaggcagtatgggatttggtgcccacaggaagtggagggagagcggtctccggtctcgcctccttcctcccgttcccgtcgccgccccgctcccgcccctggttttgccttgcctagccttcgtccgtctactacttgtcggaggcagcaaggtggcggacccgaggccggccagggtggtggacctatcgcccgtaggcgacaggtcccgcgcctcctccaagaagaaccgccgccgccacaagaaggccgacgccgcctcttccatctcgcccatgcagaggctcttcgacaccagcagggaggtcttcgccaactcctacccgggcttcgtcccgccgccggacgccgtcgcccgcctctcgggcctcctcaatgagctgaagcctcgtgacgtcagggttgccccaagcatgtccgtcttcaagcatgccgatcctacaagcccccctccagttacctatttgcacttctacggttcctccgagttttcgtttggtatcttctgtttaccgaaatcggcaattattcccctccacaaccatcctgggatgacagtgtttagcaagatactgtttggttccatgcacctcaagtcctatgattgggctaaaagtctgccggcgggtagcaacgataatgcacttgagaactctgatggagcaggagctcgtctggccaaggtgaacacagatgccgtttttgacgcttcatctgagaccgtagttctgtaccctgaaaatggagggaacttgcactgctttacggcgctgaccccttgtgccgtgctggatgtgatgggccctccctacaaccgtgctcaaggaagggattgcgcgtattacagcgaatcgccctactcgtgtgctggagatgcacaatattcttggctcaaagaggttcacagcacatttgagatggaaggcataaagatggagcccaacttcatcgtctaataattaagcaggcatggcatggcatgtcatcgtaatgctgctagtttcatgtagataatctctagctgcgggggtgtagtacaactggaagacggccagatgctcttttgacattcgtttgccttaatttcatatgcctccctttatgtatgttaacaattcgaatcttgggtcatggtcactttttttctgttttccctgtagacagcaggtgctactttttgaagtgatcatggaccaaattctgtgggtcgtttggttggtttttgttgagcagcagaacagtcttcaactttctgcctgccatcgtgtttcagtttcagggcccatgccttgtgttttctctttgaatgaacaaagaactgtctctagcatagttataaatggatatggtccaggcttccaaatcaggagctgtgaggtgatggggacggacgtagttgtgtagtacgggggtcaggtcaggtccggccggacgatgttcttcgttgcagcgtactctctgttggctgcaccgcattagcgcaatgattcggtctgatttgtcatactttttaacctacaaatgttatgcattagcaatggttttagataaaaaaatattaacaaataaaaaaaa

SEQ ID NO: 208568 - DNA, 2063 bp, Zea Mays
tgaggaggggtgggggatagggttttttcgcaagccagcgaggcagcgaccgttttgtcaccgcaacacccccgccgactccctcgccgccgccaggaatggagtccagcgctaagaagcttagcagcctccgtatcacctcactggatggcgatgatgacgaaaccgaggacccgcatcagccccctccagcaggaccctccgccgctgcagcagattctgatgacgacgatgaagaggaagaagcggaagtgactcttggtgtccttagcaaaccgaaacacccaggcctccttctccgccacttgttccccagcaaggccggcggcatcccggcgtggctagaccccgtgaacttgccgtcggggaagtccagctgctgcggtttttgtggcgagcctttgcagtttgttcttcagatttatgcagcagttgaagacaatgtagcagccttccatcgaactctgttcatgttcatgtgcccatccatggcgtgcttgcttcgagatcaacatgaacaatggaagcacaagcatgggaatccatgtagaagcgtgaaggttttccggtgtcaattgccacggactaatgccttctactcagctcaacctccaaagcatgaccggtctgacaaaccactgtgtccaggagcccatgtatgccactggtgtggtacctggaaaggtgataaaatatgtagtagctgtaagaaagcaagatactgttctgagaaacatcaggcactgcattggcgtactggtcataaaaatgattgcctccagataataagttcttctgctgcttcaaattcagttttgccaactgttggaaaagttcctgctaacactttttggccagaatttgagataaaaatagactatgaaggtagatttgattccgatagtggtgatgagaataactcgaagttgttggtgatgcaaagacatgggaaacctgatgctatgatgcagtcatggatggatcaatttgaggctgattctgacaacaaatgctgggcatcttttcaagagcgggtctcaagagcaccaaatcaagtgttgaggtattgtcgagaaccaaatgctaaacctctctgggcgttatcttctgggtgtccatcaaatgctgatatcccatcatgtagctactgtaaaggtccattatgttatgaatttcaggtaatgccacaattgctatatttctttgttgtgggaaatcaaccagactcccttgactgggcaacaattgctgtctacacgtgtcaaggggcatgtgaccaaagtgttagctacaaagaggagtttgcttgggttcaattgtaccctacaacaactacgaggcaataataatgtttgcctattccttgctgtccaatgctgcaggtgtcaaaaagtttgcagaaagtcagaaacaattcagtaaatacccccgccagaagaattggaggttgggatgctcgaggcagtgaggagttgacaggaaccgtctgcaagtacgtacctccttttggtactagagtttctgagatagggaggagtggcttcaatgtttccaggtctattggtcgtgaggagaccgtgggtcccagacacatggtcgttacatcgcctttggtccattttaggcactaccatagggcccatgtagatgtgatggctatagggggtgtttggtttctaaggactaatatttagtcccttcattttattccttttaagttttagtttctatatttggtaattttggaactaaaatggaataaaatgtagggactaaacattagtccctacaaaccaaacaccccaatagttgcatatgcttccattttttgtggtggccaccatgtgtggtttattagtgttcgtgccgttgaaaggctttgttgttttttcatctctaaaaggatccttggtaagctatttttgttcgcttagtctcactcagaaggtgctcgcatgcatgtgaacatttccgacgatggttcatcggcgaaagatttgattttaataaaacggaacattatggcatgctaatcttctagtggtgttttcagttgccaatat

SEQ ID NO: 208569 - DNA, 2059 bp, Zea Mays
tgaggaggggtgggggatagggttttttcgcaagccagcgaggcagcgaccgttttgtcaccgcaacacccccgccgactccctcgccgccgccaggaatggagtccagcgctaagaagcttagcagcctccgtatcacctcactggatggcgatgatgacgaaaccgaggacccgcatcagccccctccagcaggaccctccgccgctgcagcagattctgatgacgacgatgaagaggaagaagcggaagtgactcttggtgtccttagcaaaccgaaacacccaggcctccttctccgccacttgttccccagcaaggccggcggcatcccggcgtggctagaccccgtgaacttgccgtcggggaagtccagctgctgcggtttttgtggcgagcctttgcagtttgttcttcagatttatgcagcagttgaagacaatgtagcagccttccatcgaactctgttcatgttcatgtgcccatccatggcgtgcttgcttcgagatcaacatgaacaatggaagcacaagcatgggaatccatgtagaaggttttccggtgtcaattgccacggactaatgccttctactcagctcaacctccaaagcatgaccggtctgacaaaccactgtgtccaggagcccatgtatgccactggtgtggtacctggaaaggtgataaaatatgtagtagctgtaagaaagcaagatactgttctgagaaacatcaggcactgcattggcgtactggtcataaaaatgattgcctccagataataagttcttctgctgcttcaaattcagttttgccaactgttggaaaagttcctgctaacactttttggccagaatttgagataaaaatagactatgaaggtagatttgattccgatagtggtgatgagaataactcgaagttgttggtgatgcaaagacatgggaaacctgatgctatgatgcagtcatggatggatcaatttgaggctgattctgacaacaaatgctgggcatcttttcaagagcgggtctcaagagcaccaaatcaagtgttgaggtattgtcgagaaccaaatgctaaacctctctgggcgttatcttctgggtgtccatcaaatgctgatatcccatcatgtagctactgtaaaggtccattatgttatgaatttcaggtaatgccacaattgctatatttctttgttgtgggaaatcaaccagactcccttgactgggcaacaattgctgtctacacgtgtcaaggggcatgtgaccaaagtgttagctacaaagaggagtttgcttgggttcaattgtaccctacaacaactacgaggcaataataatgtttgcctattccttgctgtccaatgctgcaggtgtcaaaaagtttgcagaaagtcagaaacaattcagtaaatacccccgccagaagaattggaggttgggatgctcgaggcagtgagtaggagttgacaggaaccgtctgcaagtacgtacctccttttggtactagagtttctgagatagggaggagtggcttcaatgtttccaggtctattggtcgtgaggagaccgtgggtcccagacacatggtcgttacatcgcctttggtccattttaggcactaccatagggcccatgtagatgtgatggctatagggggtgtttggtttctaaggactaatatttagtcccttcattttattccttttaagttttagtttctatatttggtaattttggaactaaaatggaataaaatgtagggactaaacattagtccctacaaaccaaacaccccaatagttgcatatgcttccattttttgtggtggccaccatgtgtggtttattagtgttcgtgccgttgaaaggctttgttgttttttcatctctaaaaggatccttggtaagctatttttgttcgcttagtctcactcagaaggtgctcgcatgcatgtgaacatttccgacgatggttcatcggcgaaagatttgattttaataaaacggaacattatggcatgctaatcttctagtggtgttttcagttgccaatat

SEQ ID NO: 208570 - DNA, 3378 bp, Zea Mays
gatccattgccatccctatatcaatctaggttacaaccaggtccaacgacacgcgggttgggccttcttgttcgcttgggtcttgtcttgttagccgatctgtgactcccccgccatcgatgccaagtttgccccgttgccggcgtcacccctcccctcgacggtgaagctcatagcttccctccaccgccggtgtcgcttctcccccgccgaccaagccgtgcctgtcgccggcgtcgcccctcccccactagtgaaactcgcggtctctccaccgcacgcgcctcgtgtagttgtggctgcgtgcaccccctgtagccccggcgataggtcctactgctccatccggtttgcttccggcaacaagatcaacaacaagcgagcgaggtagtgaaaagctgcagctgtgatctctggaggtgctcttcctactctttctggtattttgatggtggcttgatggccagtaatatgcagtcttctgggctgcctcagcctccaagacctcccatgatgggttctagcgctcagccacaaaatcttggaccaccaatgcctatgcagtttaggccagtgatgccttcgcagcatcctcctcagttcatgccaccagcagcacagcagttccgtcctgttggtgagcctatggcgggggctaacgttggcatgccagggcaaatgccacattttccacaacctgggcagcacttgcctcactcaaatcaagttccacctgtatcacaaggggttcccatggtatatcagccagctagaccaatgtcatcagcacctatgcaacaacagcaacaaactgcgtatgctgggggccatttgcccaccatgggtgctcctatgcaacccctgacctatacatatcaaccaacatcgatccctcctgtagcgcaaccctggagtacaggcccaggacagagtgtacatcatgtgcctcctctagtgccgtctgggcaccagccggtgtcagctccaacgactttgcctcctgtcaacttgtctgaacctagctcttcagactggcaggaacacactgcagccgagggaaaaaagtactactataataagaagacaaggcaatcaagttgggagaaaccagttgagttgatgacacctttggagagggctgatgcctcaactgaatggaaagaatttactacaccagaaggacggaagtactatttcaacaaagtgaccaagcaatcaaaatggactattcctgacgagttaaaggttgcacgtgaattggcagagaacgcatcaaatcaacaacctgatcgagaatcaggaatagctactagtgctcttgtcagatctgctgcctttgaaccttctactgcacctgctaatcagtcgtcatctgctgttggtataattgcttccagcgcacatgatggatcatcaaactctgttctttctggtcctcccctgccgcacaatgtggagaatacttccagttctattgttggcatgcaaaatggtggttcgagtactgctgttgttcctgttgcagcaagcacagaagttccattagttgcaacagatgcagggtccagcagaaacaacgatgaaaattcatctctgaccactggggctgacgcagaggatggtacatccgctgaagatttggtggaggccaaaaagaccatgccagttgcagggaagattaatgtcactccagtggaggagaaaacaagtgaagaagaacctgtagtctatgccactaagatggaagcaaaaaatgcgttcaagtccctgcttgagtcggtaaatgtggagtctgattggacatgggatcagactatgagagtcatcataaatgacaaaagatatggtgctttgaaaactcttggagagagaaagcaagctttcaatgagtacttgaaccagcgcaaaaagtttgaagccgaagaaaaacgtatcaaacagaggaaagcacgtgatgatttccttgcaatgttggaagaaagcaaggagcttacatcatcaacaagatggagcaaagcaatacttatgtttgaagatgatgaaagattcaaagcagttgagcgtccaagggagcgtgaagatttatttgagaactatcttgtggaactgcataagaaggaaaaagccaaggctgctgaagaacacaaaagatatgtagcagagtacagagcttttctagaatcatgtgacttcatcaaggcaagcactcagtggagaaaagttcaggaacgcctggaggacgatgaacgttattcccgacttgagaagtttgatcggttggatatttttcaagagtacattcgacacctagagaaagaagaggaagagcagaagcgggtacaaaaggatcaagtgagaagacaagagaggaaaaaccgtgatgggtttcgtaaaatgttggaagaacatgttgctgatggcacacttaatgcaagaactcggtggcgtgattactgtgcacagataaaagattcacagtcctacttggctgtagcatcaaacacatctggctctacaccgaaagagttatttgatgacgtgatcgaggaacttggcaaacagtatcaagaagacaagatccaaattaaagaagtggtgaaatctggaaagattcctatgacaacttcatggacattagaggaattccaaactgctactctggaggatgatgctcttaaaggaatatcaaccatcaacatcaagcttgtatatgacgatcagcttgaaaggctcaaggaaaaagagcaaaaggacgctaagaagcgccagcgcttgggtgaaaatttttcagatcttttgtattccatcaaggaaatatcagcttcttcaacatgggatgattctaaacagcttttcgaggatagccaagagttcagggccttggacagtgagacttatgctagagagctttttgaagagtgcgttgtccacctgaaagaaaggaaggagaaagaacgcaaagaaaaagaaagagaccaccgggaggagagagaaaaggagaaagggaaggatcgatcaaggagagatgaaatggagtttgatggtgctgatttgaacacccatggtgcaaaagataagaaaagagataaagataaagaaaagaaacataagagacgtcaccatgacacagatgatgtaagctctgagagggatgataaagacgatgctaagaagtctcggaggcatagcagtgatcgcaagaaatctaggaagcatgcacatggctcagattcagatagtgaaaaccggcacaaaagacataaaaaggaccgagatagtagtagaagaaatggagcacatgagctggaagatggtgaacttggagaggatggggagatctattagtctttctgtttgctaccgagattctacttgtag

SEQ ID NO: 208571 - DNA, 3767 bp, Zea Mays
ctaggttacaaccaggtccaacgacacgcgggttgggccttcttgttcgcttgggtcttgtcttgttagccgaggaattgatttactaaggaatgccgagaaaccctaagactgcgtgtctcctctttgctagatctgtgactcccccgccatcgatgccaagtttgccccgttgccggcgtcacccctcccctcgacggtgaagctcatagcttccctccaccgccggtgtcgcttctcccccgccgaccaagccgtgcctgtcgccggcgtcgcccctcccccactagtgaaactcgcggtctctccaccgcacgcgcctcgtgtagttgtggctgcgtgcaccccctgtagccccggcgataggtcctactgctccatccggtttgcttccggcaacaagatcaacaacaagcgagcgaggtagtgaaaagctgcagctgtgatctctggaggtgctcttcctactctttctggtattttgatggtggcttgatggccagtaatatgcagtcttctgggctgcctcagcctccaagacctcccatgatgggttctagcgctcagccacaaaatcttggaccaccaatgcctatgcagtttaggccagtgatgccttcgcagcatcctcctcagttcatgccaccagcagcacagcagttccgtcctgttggtgagcctatggcgggggctaacgttggcatgccagggcaaatgccacattttccacaacctgggcagcacttgcctcactcaaatcaagttccacctgtatcacaaggggttcccatggtatatcagccagctagaccaatgtcatcagcacctatgcaacaacagcaacaaactgcgtatgctgggggccatttgcccaccatgggtgctcctatgcaacccctgacctatacatatcaaccaacatcgatccctcctgtagcgcaaccctggagtacaggcccaggacagagtgtacatcatgtgcctcctctagtgccgtctgggcaccagccggtgtcagctccaacgactttgcctcctgtcaacttgtctgaacctagctcttcagactggcaggaacacactgcagccgagggaaaaaagtactactataataagaagacaaggcaatcaagttgggagaaaccagttgagttgatgacacctttggagagggctgatgcctcaactgaatggaaagaatttactacaccagaaggacggaagtactatttcaacaaagtgaccaagcaatcaaaatggactattcctgacgagttaaaggttgcacgtgaattggcagagaacgcatcaaatcaacaacctgatcgagaatcaggaatagctactagtgctcttgtcagatctgctgcctttgaaccttctactgcacctgctaatcagtcgtcatctgctgttggtataattgcttccagcgcacatgatggatcatcaaactctgttctttctggtcctcccctgccgcacaatgtggagaatacttccagttctattgttggcatgcaaaatggtggttcgagtactgctgttgttcctgttgcagcaagcacagaagttccattagttgcaacagatgcagggtccagcagaaacaacgatgaaaattcatctctgaccactggggctgacgcagaggatggtacatccgctgaagatttggtggaggccaaaaagaccatgccagttgcagggaagattaatgtcactccagtggaggagaaaacaagtgaagaagaacctgtagtctatgccactaagatggaagcaaaaaatgcgttcaagtccctgcttgagtcggtaaatgtggagtctgattggacatgggatcagactatgagagtcatcataaatgacaaaagatatggtgctttgaaaactcttggagagagaaagcaagctttcaatgagtacttgaaccagcgcaaaaagtttgaagccgaagaaaaacgtatcaaacagaggaaagcacgtgatgatttccttgcaatgttggaagaaagcaaggagcttacatcatcaacaagatggagcaaagcaatacttatgtttgaagatgatgaaagattcaaagcagttgagcgtccaagggagcgtgaagatttatttgagaactatcttgtggaactgcataagaaggaaaaagccaaggctgctgaagaacacaaaagatatgtagcagagtacagagcttttctagaatcatgtgacttcatcaaggcaagcactcagtggagaaaagttcaggaacgcctggaggacgatgaacgttattcccgacttgagaagtttgatcggttggatatttttcaagagtacattcgacacctagagaaagaagaggaagagcagaagcgggtacaaaaggatcaagtgagaagacaagagaggaaaaaccgtgatgggtttcgtaaaatgttggaagaacatgttgctgatggcacacttaatgcaagaactcggtggcgtgattactgtgcacagataaaagattcacagtcctacttggctgtagcatcaaacacatctggctctacaccgaaagagttatttgatgacgtgatcgaggaacttggcaaacagtatcaagaagacaagatccaaattaaagaagtggtgaaatctggaaagattcctatgacaacttcatggacattagaggaattccaaactgctactctggaggatgatgctcttaaaggaatatcaaccatcaacatcaagcttgtatatgacgatcagcttgaaaggctcaaggaaaaagagcaaaaggacgctaagaagcgccagcgcttgggtgaaaatttttcagatcttttgtattccatcaaggaaatatcagcttcttcaacatgggatgattctaaacagcttttcgaggatagccaagagttcagggccttggacagtgagacttatgctagagagctttttgaagagtgcgttgtccacctgaaagaaaggttaaaagagaaagaacgtttgagggaggaagaaaaggcaaaaagagagaaagagcgtgaggagaaagagaagaagaaagagaaagaaaggaaggagaaagaacgcaaagaaaaagaaagagaccaccgggaggagagagaaaaggagaaagggaaggatcgatcaaggagagatgaaatggagtttgatggtgctgatttgaacacccatggtgcaaaagataagaaaagagataaagataaagaaaagaaacataagagacgtcaccatgacacagatgatgtaagctctgagagggatgataaagacgatgctaagaagtctcggaggcatagcagtgatcgcaagaaatctaggaagcatgcacatggctcagattcagatagtgaaaaccggcacaaaagacataaaaaggaccgagatagtagtagaagaaatggagcacatgagctggaagatggtgaacttggagaggatggggagatctattagtctttctgtttgctaccgagattgtcagtaattacttccccttgtcatgttctccattgctcctatttttcttacttttgacttgttattagtgctttggcttaacaatcactagtgttatagttatttagttccatacattctgaaatattttcttaaatatctacatttcttcaataccaattgtcgtttcttttctttttgcataatcaatgtgtgggttctagggtagttgcacatattattctctggaaagcgaaagggcctctagcctagtggttaaggcttcggagtag

SEQ ID NO: 208572 - DNA, 3504 bp, Zea Mays
ctaggttacaaccaggtccaacgacacgcgggttgggccttcttgttcgcttgggtcttgtcttgttagccgaggaattgatttactaaggaatgccgagaaaccctaagactgcgtgtctcctctttgctagatctgtgactcccccgccatcgatgccaagtttgccccgttgccggcgtcacccctcccctcgacggtgaagctcatagcttccctccaccgccggtgtcgcttctcccccgccgaccaagccgtgcctgtcgccggcgtcgcccctcccccactagtgaaactcgcggtctctccaccgcacgcgcctcgtgtagttgtggctgcgtgcaccccctgtagccccggcgataggtcctactgctccatccggtttgcttccggcaacaagatcaacaacaagcgagcgaggtagtgaaaagctgcagctgtgatctctggaggtgctcttcctactctttctggtattttgatggtggcttgatggccagtaatatgcagtcttctgggctgcctcagcctccaagacctcccatgatgggttctagcgctcagccacaaaatcttggaccaccaatgcctatgcagtttaggccagtgatgccttcgcagcatcctcctcagttcatgccaccagcagcacagcagttccgtcctgttggtgagcctatggcgggggctaacgttggcatgccagggcaaatgccacattttccacaacctgggcagcacttgcctcactcaaatcaagttccacctgtatcacaaggggttcccatggtatatcagccagctagaccaatgtcatcagcacctatgcaacaacagcaacaaactgcgtatgctgggggccatttgcccaccatgggtgctcctatgcaacccctgacctatacatatcaaccaacatcgatccctcctgtagcgcaaccctggagtacaggcccaggacagagtgtacatcatgtgcctcctctagtgccgtctgggcaccagccggtgtcagctccaacgactttgcctcctgtcaacttgtctgaacctagctcttcagactggcaggaacacactgcagccgagggaaaaaagtactactataataagaagacaaggcaatcaagttgggagaaaccagttgagttgatgacacctttggagagggctgatgcctcaactgaatggaaagaatttactacaccagaaggacggaagtactatttcaacaaagtgaccaagcaatcaaaatggactattcctgacgagttaaaggttgcacgtgaattggcagagaacgcatcaaatcaacaacctgatcgagaatcaggaatagctactagtgctcttgtcagatctgctgcctttgaaccttctactgcacctgctaatcagtcgtcatctgctgttggtataattgcttccagcgcacatgatggatcatcaaactctgttctttctggtcctcccctgccgcacaatgtggagaatacttccagttctattgttggcatgcaaaatggtggttcgagtactgctgttgttcctgttgcagcaagcacagaagttccattagttgcaacagatgcagggtccagcagaaacaacgatgaaaattcatctctgaccactggggctgacgcagaggatggtacatccgctgaagatttggtggaggccaaaaagaccatgccagttgcagggaagattaatgtcactccagtggaggagaaaacaagtgaagaagaacctgtagtctatgccactaagatggaagcaaaaaatgcgttcaagtccctgcttgagtcggtaaatgtggagtctgattggacatgggatcagactatgagagtcatcataaatgacaaaagatatggtgctttgaaaactcttggagagagaaagcaagctttcaatgagtacttgaaccagcgcaaaaagtttgaagccgaagaaaaacgtatcaaacagaggaaagcacgtgatgatttccttgcaatgttggaagaaagcaaggagcttacatcatcaacaagatggagcaaagcaatacttatgtttgaagatgatgaaagattcaaagcagttgagcgtccaagggagcgtgaagatttatttgagaactatcttgtggaactgcataagaaggaaaaagccaaggctgctgaagaacacaaaagatatgtagcagagtacagagcttttctagaatcatgtgacttcatcaaggcaagcactcagtggagaaaagttcaggaacgcctggaggacgatgaacgttattcccgacttgagaagtttgatcggttggatatttttcaagagtacattcgacacctagagaaagaagaggaagagcagaagcgggtacaaaaggatcaagtgagaagacaagagaggaaaaaccgtgatgggtttcgtaaaatgttggaagaacatgttgctgatggcacacttaatgcaagaactcggtggcgtgattactgtgcacagataaaagattcacagtcctacttggctgtagcatcaaacacatctggctctacaccgaaagagttatttgatgacgtgatcgaggaacttggcaaacagtatcaagaagacaagatccaaattaaagaagtggtgaaatctggaaagattcctatgacaacttcatggacattagaggaattccaaactgctactctggaggatgatgctcttaaaggaatatcaaccatcaacatcaagcttgtatatgacgatcagcttgaaaggctcaaggaaaaagagcaaaaggacgctaagaagcgccagcgcttgggtgaaaatttttcagatcttttgtattccatcaaggaaatatcagcttcttcaacatgggatgattctaaacagcttttcgaggatagccaagagttcagggccttggacagtgagacttatgctagagagctttttgaagagtgcgttgtccacctgaaagaaaggttaaaagagaaagaacgtttgagggaggaagaaaaggcaaaaagagagaaagagcgtgaggagaaagagaagaagaaagagaaagaaaggaaggagaaagaacgcaaagaaaaagaaagagaccaccgggaggagagagaaaaggagaaagggaaggatcgatcaaggagagatgaaatggagtttgatggtgctgatttgaacacccatggtgcaaaagataagaaaagagataaagataaagaaaagaaacataagagacgtcaccatgacacagatgatgtaagctctgagagggatgataaagacgatgctaagaagtctcggaggcatagcagtgatcgcaagaaatctaggaagcatgcacatggctcagattcagatagtgaaaaccggcacaaaagacataaaaaggaccgagatagtagtagaagaaatggagcacatgagctggaagatggtgaacttggagaggatggggagatctattagtctttctgtttgctaccgagattctacttgtag

SEQ ID NO: 208573 - DNA, 3671 bp, Zea Mays
cgcgggttgggccttcttgttcgcttgggtcttgtcttgttagccgatctgtgactcccccgccatcgatgccaagtttgccccgttgccggcgtcacccctcccctcgacggtgaagctcatagcttccctccaccgccggtgtcgcttctcccccgccgaccaagccgtgcctgtcgccggcgtcgcccctcccccactagtgaaactcgcggtctctccaccgcacgcgcctcgtgtagttgtggctgcgtgcaccccctgtagccccggcgataggtcctactgctccatccggtttgcttccggcaacaagatcaacaacaagcgagcgaggtagtgaaaagctgcagctgtgatctctggaggtgctcttcctactctttctggtattttgatggtggcttgatggccagtaatatgcagtcttctgggctgcctcagcctccaagacctcccatgatgggttctagcgctcagccacaaaatcttggaccaccaatgcctatgcagtttaggccagtgatgccttcgcagcatcctcctcagttcatgccaccagcagcacagcagttccgtcctgttggtgagcctatggcgggggctaacgttggcatgccagggcaaatgccacattttccacaacctgggcagcacttgcctcactcaaatcaagttccacctgtatcacaaggggttcccatggtatatcagccagctagaccaatgtcatcagcacctatgcaacaacagcaacaaactgcgtatgctgggggccatttgcccaccatgggtgctcctatgcaacccctgacctatacatatcaaccaacatcgatccctcctgtagcgcaaccctggagtacaggcccaggacagagtgtacatcatgtgcctcctctagtgccgtctgggcaccagccggtgtcagctccaacgactttgcctcctgtcaacttgtctgaacctagctcttcagactggcaggaacacactgcagccgagggaaaaaagtactactataataagaagacaaggcaatcaagttgggagaaaccagttgagttgatgacacctttggagagggctgatgcctcaactgaatggaaagaatttactacaccagaaggacggaagtactatttcaacaaagtgaccaagcaatcaaaatggactattcctgacgagttaaaggttgcacgtgaattggcagagaacgcatcaaatcaacaacctgatcgagaatcaggaatagctactagtgctcttgtcagatctgctgcctttgaaccttctactgcacctgctaatcagtcgtcatctgctgttggtataattgcttccagcgcacatgatggatcatcaaactctgttctttctggtcctcccctgccgcacaatgtggagaatacttccagttctattgttggcatgcaaaatggtggttcgagtactgctgttgttcctgttgcagcaagcacagaagttccattagttgcaacagatgcagggtccagcagaaacaacgatgaaaattcatctctgaccactggggctgacgcagaggatggtacatccgctgaagatttggtggaggccaaaaagaccatgccagttgcagggaagattaatgtcactccagtggaggagaaaacaagtgaagaagaacctgtagtctatgccactaagatggaagcaaaaaatgcgttcaagtccctgcttgagtcggtaaatgtggagtctgattggacatgggatcagactatgagagtcatcataaatgacaaaagatatggtgctttgaaaactcttggagagagaaagcaagctttcaatgagtacttgaaccagcgcaaaaagtttgaagccgaagaaaaacgtatcaaacagaggaaagcacgtgatgatttccttgcaatgttggaagagcttacatcatcaacaagatggagcaaagcaatacttatgtttgaagatgatgaaagattcaaagcagttgagcgtccaagggagcgtgaagatttatttgagaactatcttgtggaactgcataagaaggaaaaagccaaggctgctgaagaacacaaaagatatgtagcagagtacagagcttttctagaatcatgtgacttcatcaaggcaagcactcagtggagaaaagttcaggaacgcctggaggacgatgaacgttattcccgacttgagaagtttgatcggttggatatttttcaagagtacattcgacacctagagaaagaagaggaagagcagaagcgggtacaaaaggatcaagtgagaagacaagagaggaaaaaccgtgatgggtttcgtaaaatgttggaagaacatgttgctgatggcacacttaatgcaagaactcggtggcgtgattactgtgcacagataaaagattcacagtcctacttggctgtagcatcaaacacatctggctctacaccgaaagagttatttgatgacgtgatcgaggaacttggcaaacagtatcaagaagacaagatccaaattaaagaagtggtgaaatctggaaagattcctatgacaacttcatggacattagaggaattccaaactgctactctggaggatgatgctcttaaaggaatatcaaccatcaacatcaagcttgtatatgacgatcagcttgaaaggctcaaggaaaaagagcaaaaggacgctaagaagcgccagcgcttgggtgaaaatttttcagatcttttgtattccatcaaggaaatatcagcttcttcaacatgggatgattctaaacagcttttcgaggatagccaagagttcagggccttggacagtgagacttatgctagagagctttttgaagagtgcgttgtccacctgaaagaaaggttaaaagagaaagaacgtttgagggaggaagaaaaggcaaaaagagagaaagagcgtgaggagaaagagaagaagaaagagaaagaaaggaaggagaaagaacgcaaagaaaaagaaagagaccaccgggaggagagagaaaaggagaaagggaaggatcgatcaaggagagatgaaatggagtttgatggtgctgatttgaacacccatggtgcaaaagataagaaaagagataaagataaagaaaagaaacataagagacgtcaccatgacacagatgatgtaagctctgagagggatgataaagacgatgctaagaagtctcggaggcatagcagtgatcgcaagaaatctaggaagcatgcacatggctcagattcagatagtgaaaaccggcacaaaagacataaaaaggaccgagatagtagtagaagaaatggagcacatgagctggaagatggtgaacttggagaggatggggagatctattagtctttctgtttgctaccgagattgtcagtaattacttccccttgtcatgttctccattgctcctatttttcttacttttgacttgttattagtgctttggcttaacaatcactagtgttatagttatttagttccatacattctgaaatattttcttaaatatctacatttcttcaataccaattgtcgtttcttttctttttgcataatcaatgtgtgggttctagggtagttgcacatattattctctggaaagcgaaagggcctctagcctagtggttaaggcttcggagtag

SEQ ID NO: 208574 - DNA, 3505 bp, Zea Mays
cgcgggttgggccttcttgttcgcttgggtcttgtcttgttagccgatctgtgactcccccgccatcgatgccaagtttgccccgttgccggcgtcacccctcccctcgacggtgaagctcatagcttccctccaccgccggtgtcgcttctcccccgccgaccaagccgtgcctgtcgccggcgtcgcccctcccccactagtgaaactcgcggtctctccaccgcacgcgcctcgtgtagttgtggctgcgtgcaccccctgtagccccggcgataggtcctactgctccatccggtttgcttccggcaacaagatcaacaacaagcgagcgaggtagtgaaaagctgcagctgtgatctctggaggtgctcttcctactctttctggtattttgatggtggcttgatggccagtaatatgcagtcttctgggctgcctcagcctccaagacctcccatgatgggttctagcgctcagccacaaaatcttggaccaccaatgcctatgcagtttaggccagtgatgccttcgcagcatcctcctcagttcatgccaccagcagcacagcagttccgtcctgttggtgagcctatggcgggggctaacgttggcatgccagggcaaatgccacattttccacaacctgggcagcacttgcctcactcaaatcaagttccacctgtatcacaaggggttcccatggtatatcagccagctagaccaatgtcatcagcacctatgcaacaacagcaacaaactgcgtatgctgggggccatttgcccaccatgggtgctcctatgcaacccctgacctatacatatcaaccaacatcgatccctcctgtagcgcaaccctggagtacaggcccaggacagagtgtacatcatgtgcctcctctagtgccgtctgggcaccagccggtgtcagctccaacgactttgcctcctgtcaacttgtctgaacctagctcttcagactggcaggaacacactgcagccgagggaaaaaagtactactataataagaagacaaggcaatcaagttgggagaaaccagttgagttgatgacacctttggagagggctgatgcctcaactgaatggaaagaatttactacaccagaaggacggaagtactatttcaacaaagtgaccaagcaatcaaaatggactattcctgacgagttaaaggttgcacgtgaattggcagagaacgcatcaaatcaacaacctgatcgagaatcaggaatagctactagtgctcttgtcagatctgctgcctttgaaccttctactgcacctgctaatcagtcgtcatctgctgttggtataattgcttccagcgcacatgatggatcatcaaactctgttctttctggtcctcccctgccgcacaatgtggagaatacttccagttctattgttggcatgcaaaatggtggttcgagtactgctgttgttcctgttgcagcaagcacagaagttccattagttgcaacagatgcagggtccagcagaaacaacgatgaaaattcatctctgaccactggggctgacgcagaggatggtacatccgctgaagatttggtggaggccaaaaagaccatgccagttgcagggaagattaatgtcactccagtggaggagaaaacaagtgaagaagaacctgtagtctatgccactaagatggaagcaaaaaatgcgttcaagtccctgcttgagtcggtaaatgtggagtctgattggacatgggatcagactatgagagtcatcataaatgacaaaagatatggtgctttgaaaactcttggagagagaaagcaagctttcaatgagtacttgaaccagcgcaaaaagtttgaagccgaagaaaaacgtatcaaacagaggaaagcacgtgatgatttccttgcaatgttggaagaaagcaaggagcttacatcatcaacaagatggagcaaagcaatacttatgtttgaagatgatgaaagattcaaagcagttgagcgtccaagggagcgtgaagatttatttgagaactatcttgtggaactgcataagaaggaaaaagccaaggctgctgaagaacacaaaagatatgtagcagagtacagagcttttctagaatcatgtgacttcatcaaggcaagcactcagtggagaaaagttcaggaacgcctggaggacgatgaacgttattcccgacttgagaagtttgatcggttggatatttttcaagagtacattcgacacctagagaaagaagaggaagagcagaagcgggtacaaaaggatcaagtgagaagacaagagaggaaaaaccgtgatgggtttcgtaaaatgttggaagaacatgttgctgatggcacacttaatgcaagaactcggtggcgtgattactgtgcacagataaaagattcacagtcctacttggctgtagcatcaaacacatctggctctacaccgaaagagttatttgatgacgtgatcgaggaacttggcaaacagtatcaagaagacaagatccaaattaaagaagtggtgaaatctggaaagattcctatgacaacttcatggacattagaggaattccaaactgctactctggaggatgatgctcttaaaggaatatcaaccatcaacatcaagcttgtatatgacgatcagcttgaaaggctcaaggaaaaagagcaaaaggacgctaagaagcgccagcgcttgggtgaaaatttttcagatcttttgtattccatcaaggaaatatcagcttcttcaacatgggatgattctaaacagcttttcgaggatagccaagagttcagggccttggacagtgagacttatgctagagagctttttgaagagtgcgttgtccacctgaaagaaaggttaaaagagaaagaacgtttgagggaggaagaaaaggcaaaaagagagaaagagcgtgaggagaaagagaagaagaaagagaaagaaaggaaggagaaagaacgcaaagaaaaagaaagagaccaccgggaggagagagaaaaggagaaagggaaggatcgatcaaggagagatgaaatggagtttgatggtgctgatttgaacacccatggtgcaaaagataagaaaagagataaagataaagaaaagaaacataagagacgtcaccatgacacagatgatgtaagctctgagagggatgataaagacgatgctaagaagtctcggaggcatagcagtgatcgcaagaaatctaggaagcatgcacatggctcagattcagatagtgaaaaccggcacaaaagacataaaaaggaccgagatagtagtagaagaaatggagcacatgagctggaagatggtgaacttggagaggatggggagatctattagtctttctgtttgctaccgagattctgaccaggctaaattttcatttccttcaaagtccatggtgctgtctgtgctgaggtaacagattgctcagtttgcaacgagtttctttgtgagtgat

SEQ ID NO: 208575 - DNA, 3645 bp, Zea Mays
gttcgcttgggtcttgtcttgttagccgatctgtgactcccccgccatcgatgccaagtttgccccgttgccggcgtcacccctcccctcgacggtgaagctcatagcttccctccaccgccggtgtcgcttctcccccgccgaccaagccgtgcctgtcgccggcgtcgcccctcccccactagtgaaactcgcggtctctccaccgcacgcgcctcgtgtagttgtggctgcgtgcaccccctgtagccccggcgataggtcctactgctccatccggtttgcttccggcaacaagatcaacaacaagcgagcgagctgtgatctctggaggtgctcttcctactctttctggtattttgatggtggcttgatggccagtaatatgcagtcttctgggctgcctcagcctccaagacctcccatgatgggttctagcgctcagccacaaaatcttggaccaccaatgcctatgcagtttaggccagtgatgccttcgcagcatcctcctcagttcatgccaccagcagcacagcagttccgtcctgttggtgagcctatggcgggggctaacgttggcatgccagggcaaatgccacattttccacaacctgggcagcacttgcctcactcaaatcaagttccacctgtatcacaaggggttcccatggtatatcagccagctagaccaatgtcatcagcacctatgcaacaacagcaacaaactgcgtatgctgggggccatttgcccaccatgggtgctcctatgcaacccctgacctatacatatcaaccaacatcgatccctcctgtagcgcaaccctggagtacaggcccaggacagagtgtacatcatgtgcctcctctagtgccgtctgggcaccagccggtgtcagctccaacgactttgcctcctgtcaacttgtctgaacctagctcttcagactggcaggaacacactgcagccgagggaaaaaagtactactataataagaagacaaggcaatcaagttgggagaaaccagttgagttgatgacacctttggagagggctgatgcctcaactgaatggaaagaatttactacaccagaaggacggaagtactatttcaacaaagtgaccaagcaatcaaaatggactattcctgacgagttaaaggttgcacgtgaattggcagagaacgcatcaaatcaacaacctgatcgagaatcaggaatagctactagtgctcttgtcagatctgctgcctttgaaccttctactgcacctgctaatcagtcgtcatctgctgttggtataattgcttccagcgcacatgatggatcatcaaactctgttctttctggtcctcccctgccgcacaatgtggagaatacttccagttctattgttggcatgcaaaatggtggttcgagtactgctgttgttcctgttgcagcaagcacagaagttccattagttgcaacagatgcagggtccagcagaaacaacgatgaaaattcatctctgaccactggggctgacgcagaggatggtacatccgctgaagatttggtggaggccaaaaagaccatgccagttgcagggaagattaatgtcactccagtggaggagaaaacaagtgaagaagaacctgtagtctatgccactaagatggaagcaaaaaatgcgttcaagtccctgcttgagtcggtaaatgtggagtctgattggacatgggatcagactatgagagtcatcataaatgacaaaagatatggtgctttgaaaactcttggagagagaaagcaagctttcaatgagtacttgaaccagcgcaaaaagtttgaagccgaagaaaaacgtatcaaacagaggaaagcacgtgatgatttccttgcaatgttggaagaaagcaaggagcttacatcatcaacaagatggagcaaagcaatacttatgtttgaagatgatgaaagattcaaagcagttgagcgtccaagggagcgtgaagatttatttgagaactatcttgtggaactgcataagaaggaaaaagccaaggctgctgaagaacacaaaagatatgtagcagagtacagagcttttctagaatcatgtgacttcatcaaggcaagcactcagtggagaaaagttcaggaacgcctggaggacgatgaacgttattcccgacttgagaagtttgatcggttggatatttttcaagagtacattcgacacctagagaaagaagaggaagagcagaagcgggtacaaaaggatcaagtgagaagacaagagaggaaaaaccgtgatgggtttcgtaaaatgttggaagaacatgttgctgatggcacacttaatgcaagaactcggtggcgtgattactgtgcacagataaaagattcacagtcctacttggctgtagcatcaaacacatctggctctacaccgaaagagttatttgatgacgtgatcgaggaacttggcaaacagtatcaagaagacaagatccaaattaaagaagtggtgaaatctggaaagattcctatgacaacttcatggacattagaggaattccaaactgctactctggaggatgatgctcttaaaggaatatcaaccatcaacatcaagcttgtatatgacgatcagcttgaaaggctcaaggaaaaagagcaaaaggacgctaagaagcgccagcgcttgggtgaaaatttttcagatcttttgtattccatcaaggaaatatcagcttcttcaacatgggatgattctaaacagcttttcgaggatagccaagagttcagggccttggacagtgagacttatgctagagagctttttgaagagtgcgttgtccacctgaaagaaaggttaaaagagaaagaacgtttgagggaggaagaaaaggcaaaaagagagaaagagcgtgaggagaaagagaagaagaaagagaaagaaaggaaggagaaagaacgcaaagaaaaagaaagagaccaccgggaggagagagaaaaggagaaagggaaggatcgatcaaggagagatgaaatggagtttgatggtgctgatttgaacacccatggtgcaaaagataagaaaagagataaagataaagaaaagaaacataagagacgtcaccatgacacagatgatgtaagctctgagagggatgataaagacgatgctaagaagtctcggaggcatagcagtgatcgcaagaaatctaggaagcatgcacatggctcagattcagatagtgaaaaccggcacaaaagacataaaaaggaccgagatagtagtagaagaaatggagcacatgagctggaagatggtgaacttggagaggatggggagatctattagtctttctgtttgctaccgagattgtcagtaattacttccccttgtcatgttctccattgctcctatttttcttacttttgacttgttattagtgctttggcttaacaatcactagtgttatagttatttagttccatacattctgaaatattttcttaaatatctacatttcttcaataccaattgtcgtttcttttctttttgcataatcaatgtgtgggttctagggtagttgcacatattattctctggaaagcgaaagggcctctagcctagtggttaaggcttcggagtag

SEQ ID NO: 208576 - DNA, 1113 bp, Zea Mays
agcggtcatgacattcacagaatctctcctcccgagaggttaaagcaaatagaaataggtgctcattctgaaacacttgcaaccttctcctcgcccaccttcatctccaaatacatcccatgaactcgcataaatttcttctggcagtgctgctgcttttgcttcacaactatgcatcctatgctgccacatcgaaggaagatgatgacttcctcaaaacttgcccatcgcatcgatgccacaagcatggaccagagatccggttcccctttcggcttccaagccaccctccatcatgtggcgcacctgggatgcaattatcatgctctgggcatgacaccatccttgatcatccagttcttggctcctgcagagtgacagcaatatattacaggcatcgtgtcatgaatgtcatcccgccagaggactcatcatcacactgccaacttcagaagcttgttaaaagaaatcaatcaactgatgtgtacacacctgtagcacatcctttctcagtacttgtaggatgctcaagagaagcaacaaatcaagatggtattgtcggcccaagctcttgtttaagcctcattaacaatgcaagccagctctggtacctggtggatccttctacagatatgtctactcttcccatgggctgcgaggttgttgcaaagggaatcccagtaccctacacttacgacaaaaatggtccaatagatgagacattctccggaaggtcactgttcaacgaaaatgcaaatagagcaatcaattttggtgaaacatcattcaattggaacctcaacaacatcaccggctcttgtcaaaggtgtgaacaggaagggaaacattgtggattcagttcaaacaggcgacaagcattctgcctgcatcacggttcacatgtcatcctcattgcaggaggcgcaatgcactcgggctgcccgcggctaggcctacaaggtggacacgtgcagacagcgtaatgagtggacacatgcatgatgatttagacgttttaatattaataaccgtgtgttacaacgacacacaagtatatttgatacttatatgagatattgaactgatctaaagattcattaatctagatttacg

SEQ ID NO: 208577 - DNA, 1089 bp, Zea Mays
agcggtcatgacattcacagaatctctcctcccgagaggttaaagcaaatagaaataggtgctcattctgaaacacttgcaaccttctcctcgcccaccttcatctccaaatacatcccatgaactcgcataaatttcttctggcagtgctgctgcttttgcttcacaactatgcatcctatgctgccacatcgaaggaagatgatgacttcctcaaaacttgcccatcgcatcgatgccacaagcatggaccagagatccggttcccctttcggcttccaagccaccctccatcatgtggcgcacctgggatgcaattatcatgctctgggcatgacaccatccttgatcatccagttcttggctcctgcagagtgacagcaatatattacaggcatcgtgtcatgaatgtcatcccgccagaggactcatcatcacactgccaacttcagaagcttgttaaaagaaatcaatcaactgatgtgtacacacctgtagcacatcctttctcagtacttgtaggatgctcaagagaagcaacaaatcaagatggtattgtcggcccaagctcttgtttaagcctcattaacaatgcaagccagctctggtacctggtggatccttctacagatatgtctactcttcccatgggctgcgaggttgttgcaaagggaatcccagtaccctacacttacgacaaaaatggtccaatagatgagacattctccggaaggtcactgttcaacgaaaatgcaaatagagcaatcaattttggtgaaacatcattcaattggaacctcaacaacatcaccggctcttgtcaaaggtgtgaacaggaagggaaacattgtggattcagttcaaacaggcgacaagcattctgcctgcatcacggaggcgcaatgcactcgggctgcccgcggctaggcctacaaggtggacacgtgcagacagcgtaatgagtggacacatgcatgatgatttagacgttttaatattaataaccgtgtgttacaacgacacacaagtatatttgatacttatatgagatattgaactgatctaaagattcattaatctagatttacg

SEQ ID NO: 208578 - DNA, 2200 bp, Zea Mays
tatagctaacggtcacacgcaccacaaaaccccgttccccaattccccgatcgacgcccctcttatcacaggagggcggcggggctgctgtcggctactcggctccacgagaccacgactggagttcggcgaatcgacagtaggtggaggcggggctcacggccgacggagcctctcaccaacgcccaacgcccaacgccggttccctgggttgggctggccacttgctcctcgccggctggggctgaggtgtggccggcggcagctaggaacagcgacctgcgccagtcgaagcaacattgcgtcagggagcggaagacatgcgcgccgttggtgaatgacagctttgcatcaccttctctgccgctcccatttctccctcgaggcaagaaaaataaatcctagggtttctgcctccaatccgcggccgatgcctgacgccaatgagctggaagccgcccggcgcgtggcgaccttcaccttggcggagctctctatctcctcttcgacgttgcctcctcgctccaacctcccggcgctctttcgccgctgcctccagttgctgcctcttctcaacgctggcgatccaaaactagccgctcgatgctgccgcggcctcctcgcttccgttggcgccatcctctctcgggacctctcgccctccctcctccctgcaatcgaggtcttcactgagagtgttgtttctagtgaccatttgaggagctgcttgattatagccaactgtgctgcacgtgaaggatcaaggatgttcgctgaggctgacccatacgaggatgagcacataatgcttgaacttgtgtgccgccacttcatttcatcattactggacgagggggcatttgaggtgtttctgagtgcactttcttggtcggggagggcattgcagcggactccagaaatcagctttcagggggcttttgtgctggttcaaaggacctacctctctttgccggctgttgtacaagcacatcttttactgctcatgtcaagatgcaccagtggtcaaaatcttaactcgcatatgctagcgtttagatatgccatgaatctttatgtcagatatttaccggcattgcgtgttttcaacataacccgcagtgcaatacccccactgaattatttgggcaagaaaagatcttttagttgtatcaaagatagcactgatcagaaactcagaagtcagatctatcgtctgctttcgttttgtgaattgcactgtggtgatgatcttcctgtcaatgagagtgatattggttgcataattgaaatgaaccagcatatgtttcttgaaaagttcaggcaagaatgtattgtgtttgtgaagggtatattgtctagtatcctgtgctgtgcaaagcaaaaggaggtgagtgaacctgatactgaggtatcagatgagattatttgccttgctgcagcaactagggtaatgggctcctcaattctatacatcctgcacaataaaaattatgaagcaaactgcaaggaatacaatgttatatgtgaaattatcagtttgcttgggcaatatggaacagatgagcttcatagatatgacctcctggctattattggggagtcagtggaaagtgaaagtgcctcaatgctaatgttggctcattttgctagcttatcaacttgttgtttaagaagaaggcttggctttctgtggaaaggttgtattatcatgatgatgatcgccacaaatcttattgctgaagagcaaagttggggtacatttcatctccctatggatgtctccaaatattctccagttttctgcaataccgaaaaggggattgtagaggtttctgctcgaactaaagagataatattacggtataaaagcatacataaatctcataataaaggcaggcgcttttatgatgatggaatcaggtgcaacagcagcggcttggaagttgcggtgcagaactcatgaacagagtgcatgggagctttctgtactcccctggacggagggataagactgttggttattttttgagagagaagttaattttttttacatattttgttggtctcatgctgatggactggtgggaggcaagagtagtagtgctgcacgttggatctcccaaacctatatcacctactatgtgaccttttattttgggacaaaatttgaattatagaattgcaaatatttaggacagag

SEQ ID NO: 208579 - DNA, 2169 bp, Zea Mays
cacgcttggcggtccccgtagaccaagtccactcgccgatccctctccgagatctccacccacttatttcccctcccaccgcggccaggcctcagtcctctctgtcgcggagccgccgcaacccagcgtcccccgaagtctaaccctagatccggaccggccatggcgtcccgccgggtcgtctcctcgctcctccgctccgcgtcccgcctgcgggccgcctcgcccgctgctccacgaccgcgcgcgccaccgcaccgcccgtccccggccgggtacctcttcaaccgcgctgccgcctacgcctcttccgccgcggcccaggcggcacctgccaccccgccgccggccaccgggaagaccgggggcggcaagatcaccgacgagttcaccggcgctggcgccatcggccaggtgtgccaggtgatcggcgccgtcgttgacgtgcgcttcgatgagggcctcccgcccatcctcacggcgctcgaggtgctcgacaacaacatccgcctcgtgctcgaggtggcgcagcaccttggcgagaacatggtgcgcaccatcgctatggacggcacggaggggctcgtccgcggccagcgcgtcctcaacactggctcccccatcaccgtgcctgttggcagggctacccttggacgcatcataaatgttattggtgaaccgattgatgagaagggtgacataaagacaaaccacttcctccctattcatcgtgaagcccctgcttttgttgagcaggccactgagcagcaaattcttgttactggaatcaaggtcgtggatcttcttgcaccctaccaaaggggtggaaagattggtctcttcggtggtgcaggagtgggtaaaactgtgctcattatggagttgatcaacaatgttgctaaggcccatggtggtttctctgtgtttgctggtgttggagaacgtacccgtgaaggtaatgatctgtacagggaaatgattgaaagtggtgtcattaagctagatgacaagcagagcgaaagcaagtgtgctcttgtttacgggcagatgaatgagcccccgggtgctcgtgctcgtgttgggttgactggtttgactgttgctgaacatttccgtgatgctgaaggacaagatgtgcttctgtttattgacaacattttccgttttactcaggcaaactctgaggtgtctgctcttcttggacgtatcccatctgctgtgggataccagccaacccttgccactgatcttggaggactgcaagagcgtattacgacaacaaagaagggttctattacatctgtgcaggccatctacgtgcctgccgatgacttgacggatcctgctcctgctactacctttgcccatcttgatgctacaactgtgttgtcacgacagatctctgagcttggtatttatcctgctgttgatccactggattccacatcaagaatgctttctccccacgtgctgggtgaggatcactacaacactgctcgtggtgtgcagaaggttcttcagaactacaaaaatcttcaggatattattgctatcttgggtatggatgagctcagtgaggatgacaagctgacagtcgcccgtgcaagaaagattcagcgtttcctgagccagcctttccatgtcgctgaagttttcacgggtgctccaggaaagtatgtggagctgaaggaaagcgtgaagagtttccagggtgttttggatgggaagtatgatgacctccctgagcagtcattctacatggttggtggcattgaggaagtcattgctaaggctgagaaaattgccaaggagtctgcttcataaggaggcttcttgcttgttcaaccctgtacaagttccatttttggattttaagcgtttatttatgcttttcccagttaggcatgacgagctggagagtccatctcctgctgagagatgtttgttttacccttctttgcttcctccaccttacacccaaataagcaactgcagtgacgttggttttggctgcacccaaactacatgactgaagaaacttgtggcctgtgtaacgcgaatccatcagaacgccaaagttatggcttctggttgtggcaaattatggttcctccctgttcggttgagtggttgcattctggagtgccaatgattaagcaattgcaggcg

SEQ ID NO: 208580 - DNA, 699 bp, Zea Mays
ccaggtcatacatctgaattgactagtcaaactcagtgatctctttggggactaatcaaactcaagaactaagtttcatgtctgatctcgacgtccagcttccatctgcttttgatccgtttgcagaggcaaatgctgaggactccagtgctggtgctggatcaaaggactatgtgcacgtgcgtattcagcagcgcaacggaaggaagagtctgacaactgttcagggcttgaagaaagagtacagctacaacaagatcctcaaggatctcaaaaaagagttctgctgcaatggtactgtagtccaggatccagagctaggccaggtcattcaactgcaaggtgatcagcgtaaaaatgtcgctacttttctagtccaggccggaatcgtgaaaaaagatagcatcaagattcacggattttagactgcaaattttgagtgcttgtgtgtgcctatcatatggtaccatatgataccagtatgttttgtaagtgttacctgcatgaaagtatcgtttgtctggggaactgtctactactgatattgaataacaagagagattgctgttcgtgttcgtctatgaattattatgatctttccccagacttgagctttccaatccgtgttcttttatgatcactttgcttctcatgtgctttctgatatgtatttgaccttcacctcaagttgtatctttt

SEQ ID NO: 208581 - DNA, 2570 bp, Zea Mays
cagaaggccaccaagttgatgatcacaagctttgtccacggttcagacggcctgggaaaccaggatttccctccatcagctaccaagcctgtagatcaatcggctgctgccttcctggttgagcaaccaaatctataccctggacaagttaccattgtcgccctcagtccactaaccaaccttgctctgacagtcgagcttgaccctttgttctcgaagaatatatggcagattatttttcttggcggtgtgtattcaattaatggtaatgtgaactatgcagctgaggcaaatgtagatattgtgttcacccgcggtgctgatattttggctatggtactaattgtaacacatcaagtagttttaacccgtaattctgccatatttaagggtcacattatttctgctcaggatgtatgcttcatatactgagataatgcttcttttataacctacttctcattagtcaatggcaatctctactactctataagggtccagtgtgggcgtccacactggtaccgtgcccccgcccccaaaattctcgccccgcctcgctctccgtcgcgccattccagggaccctccatcgccgcccccgccatcatcgcgtcagcgcccgcgctccgtcgatggaaggcgccattccagggacccaccccaaccctgcgatcctcacccttccaaggatgccccgcacccatctcgtccaatccctcctcccgcctcacccgctcacaaggtcgacgacgacgaatctaaggacgccaacgccacccctctctgagctccctatggccactgcgggtgagtgcctctgggtagccggtcacccctctcttgcagcctccgagcttcggcgaacgcagaactggcagggcgcgacggccgacgcaatgtacgtgggtagccggcgtccaatgtcggccgccgctggcgagcgcccccggcgcggctgcccaaccaagctctgtccagatctgaccgtctagggcgaggtgaccccctcctggcggcgagcgagacagcccccactccaccccacctcgcaacagccaccgatcagtggagcgcactcaaaactgttggatttattttggaacttaggtgaaggaggaatgggtggagggacgagcaagatggcaacgttctattgaaacaaactgcctcgattattaggctatcattactaaacaaactacctttatcgtcaacctactaacttccatattcttcacattcagctttgcaaaatttacttgactggattttttagcttaacatataactcagggagacatgcgattttgggacgatcaaactgttggtaagtaaatacttgttggcctgttgctcttcttttagctatagctgaccataatttttcttggttgaggaaactgtagttagtgatagctcaatattttgtgtgtagaaacctgtataaagtattggacatgtatttcatagtttttgtaacttataaggctatgtaagtcacagattaactcttcaaagaattatacaacaaagaaattagcgctcagaaatgggatctttgcatttttagtcttgctcattttttattattcatgtatgactcatggttttctagagaaaaatattggaccgttacaataatgctaatatggtgttaatctaggattgctcattttgagtattcttgtacgactcatggttttctagagaaaagatcttggactgtagcactacctccacttgtgagatctggacttctgtagttatatgccatagcaacactgaaagtgacaatgtttgaatggtatagttcttttccttggtcggtgatatatattcacttgatggtatagctctgccaaaagcacaacagctcgtgcttgatccacaaaaaataggatgctcatgtgattgtattttgattttttagttttatttttgttgcatgtataatccaatcgccgagatcgacctctaccgtctcgagccataggacctcccctccctcttcaacatccgcagtcacaacgccaaggggtagttcttcgcccgtgcggtcgaggcggtcccagcaacaggaccaaccacgcacacgccgatggggtactggagatccggacggagtagcattcttgctggcccagggtcagcccacttcttgcgcaagtttgttgttgggaaccaatggaatccgactattcatttttcttgcggatggtcgtgtcggtggggtcaagaaaattctctggaatttggcactgataagatagaaatgcatgttggggctgtacaggccaacgatcgagctcttgtagtcgatgatcttattgccacccgtgtgcagctgtcaaacttatcggagatggacgatgaagcgttggatcaaggagatggaggttggatcaaggagatggaggaggtggccgccacggccaccacttccaggtcgattatgccctttagggccatccagaagggcaagccgttgtcggtgtccttggcatcgagaagaagtccacccctaagctctagaactccagttcatcgactcatgatcatcagaacacggtt

SEQ ID NO: 208582 - DNA, 3616 bp, Zea Mays
cagaaggccaccaagttgatgatcacaagctttgtccacggttcagacggcctgggaaaccaggatttccctccatcagctaccaagcctgtagatcaatcggctgctgccttcctggttgagcaaccaaatctataccctggacaagttaccattgtcgccctcagtccactaaccaaccttgctctgacagtcgagcttgaccctttgttctcgaagaatatatggcagattatttttcttggcggtgtgtattcaattaatggtaatgtgaactatgcagctgaggcaaatgtagatattgtgttcacccgcggtgctgatattttggctatggtactaattgtaacacatcaagtagttttaacccgtaattctgccatatttaagggtcacattatttctgctcaggatgtatgcttcatatactgagataatgcttcttttataacctacttctcattagtcaatggcaatctctactactctataagggtccagtgtgggcgtccacactggtaccgtgcccccgcccccaaaattctcgccccgcctcgctctccgtcgcgccattccagggaccctccatcgccgcccccgccatcatcgcgtcagcgcccgcgctccgtcgatggaaggcgccattccagggacccaccccaaccctgcgatcctcacccttccaaggatgccccgcacccatctcgtccaatccctcctcccgcctcacccgctcacaaggtcgacgacgacgaatctaaggacgccaacgccacccctctctgagctccctatggccactgcgggtgagtgcctctgggtagccggtcacccctctcttgcagcctccgagcttcggcgaacgcagaactggcagggcgcgacggccgacgcaatgtacgtgggtagccggcgtccaatgtcggccgccgctggcgagcgcccccggcgcggctgcccaaccaagctctgtccagatctgaccgtctagggcgaggtgaccccctcctggcggcgagcgagacagcccccactccaccccacctcgcaacagccaccgcgtaccttgagtgacctcgtttgaggccttgacagccacctcggtcttgtcagatcagtggagcgcactcaaaactgttggatttattttggaacttaggtgaaggaggaatgggtggagggacgagcaagatggcaacgttctattgaaacaaactgcctcgattattaggctatcattactaaacaaactacctttatcgtcaacctactaacttccatattcttcacattcagctttgcaaaatttacttgactggattttttagcttaacatataactcagggagacatgcgattttgggacgatcaaactgttggtaagtaaatacttgttggcctgttgctcttcttttagctatagctgaccataatttttcttggttgaggaaactgtagttagtgatagctcaatattttgtgtgtagaaacctgtataaagtattggacatgtatttcatagtttttgtaacttataaggctatgtaagtcacagattaactcttcaaagaattatacaacaaagaaattagcgctcagaaatgggatctttgcatttttagtcttgctcattttttattattcatgtatgactcatggttttctagagaaaaatattggaccgttacaataatgctaatatggtgttaatctaggattgctcattttgagtattcttgtacgactcatggttttctagagaaaagatcttggactgtagcactacctccacttgtgagatctggacttctgtagttatatgccatagcaacactgaaagtgacaatgtttgaatgttttatttttgttgcatgtataatccaatcgccgagatcgacctctaccgtctcgagccataggacctcccctccctcttcaacatccgcagtcacaacgccaaggggtagttcttcgcccgtgcggtcgaggcggtcccagcaacaggaccaaccacgcacacgccgatggggtactggagatccggacggagtagcattcttgctggcccagggtcagcccacttcttgcgcaagtttgttgttgggaaccaatggaatccgactattcatttttcttgcggatggtcgtgtcggtggggtcaagaaaattctctggaatttggcactgataagatagaaatgcatgttggggctgtacaggccaacgatcgagctcttgtagtcgatgatcttattgccacccgtgtgcagctgtcaaacttatcggagatggacgatgaagcgttggatcaaggagatggaggttggatcaaggagatggaggaggtggccgccacggccaccacttccaggtcgattatgccctttagggccatccagaagggcaagccgttgtcggtgtccttggcatcgagaagaagtccacccctaagctctagaactccaggtgctcgccgtggccacaagcgtgtagtcccccgacgcagagaagaggaagggcatgtggcgtagttagagggatctgaaccctagcggtcgtccgcccgtccagatctgtgacccgcccttctcgacgcttcggtgacatgagtgcctggaaatctagggaggcgaaaaggtcagagttcagtcatgtcatgcttgatttgagttctgtgccagatcaaagcaagtagtagtacgtgagaagttaaccatgaacagacaccctttttctctttgtgtatcacagattttgaaacttgctgagagggaaaaacaaatttatggggaaaaaatgtgacactgaaagccatttgcttccagcagcttaagaattgttgcggtagatgcaactgaagagggtcttcaagtaagtaaatcaactactacaatggctcactaaaaatggtcgacaggacagtttcggaaccttattgttgttcttcagagagaacatcgacaaaggaacttgaagctccgtaggcgaaaggatctctagaaacgactaactaaattctcctaggtactactctagggaggatgctgaagatgctgtcaaatacattagtggaacaatgcttgacgatcgtccaatccgtgttgatttcgatcggggctttgaagaaggcagacagtggggccgtggacgaagtggtgtacaagctttacaaaccatgatatgtccgtgcgttgtagtagtaagaaagaactaatgttcacagttaaaaagtgtggaatgagaaccgacattaaaataggagaatatatataatgtgggtttcatacatatgttctatgtttcacatctaccaccgaaggccaagtacattttgatatactagcctaaaatgttctgctgatctgatatactagcctaaaatgttccgttgatctgattttttgctacaccctgctgccctctacatttggattgtctgtattttgattttttagttttatttttgttgcatgtataatccaatatgtgattgtatcttttgattcctggaaggatagagtttgcactagaagaggatgctcatgttgttggtgactgtgtaaaagtacctttctgtaattatcattgtctattgtttataaggattaatgttaaa

SEQ ID NO: 208583 - DNA, 3405 bp, Zea Mays
cagaaggccaccaagttgatgatcacaagctttgtccacggttcagacggcctgggaaaccaggatttccctccatcagctaccaagcctgtagatcaatcggctgctgccttcctggttgagcaaccaaatctataccctggacaagttaccattgtcgccctcagtccactaaccaaccttgctctgacagtcgagcttgaccctttgttctcgaagaatatatggcagattatttttcttggcggtgtgtattcaattaatggtaatgtgaactatgcagctgaggcaaatgtagatattgtgttcacccgcggtgctgatattttggctatggtactaattgtaacacatcaagtagttttaacccgtaattctgccatatttaagggtcacattatttctgctcaggatgtatgcttcatatactgagataatgcttcttttataacctacttctcattagtcaatggcaatctctactactctataagggtccagtgtgggcgtccacactggtaccgtgcccccgcccccaaaattctcgccccgcctcgctctccgtcgcgccattccagggaccctccatcgccgcccccgccatcatcgcgtcagcgcccgcgctccgtcgatggaaggcgccattccagggacccaccccaaccctgcgatcctcacccttccaaggatgccccgcacccatctcgtccaatccctcctcccgcctcacccgctcacaaggtcgacgacgacgaatctaaggacgccaacgccacccctctctgagctccctatggccactgcgggtgagtgcctctgggtagccggtcacccctctcttgcagcctccgagcttcggcgaacgcagaactggcagggcgcgacggccgacgcaatgtacgtgggtagccggcgtccaatgtcggccgccgctggcgagcgcccccggcgcggctgcccaaccaagctctgtccagatctgaccgtctagggcgaggtgaccccctcctggcggcgagcgagacagcccccactccaccccacctcgcaacagccaccgatcagtggagcgcactcaaaactgttggatttattttggaacttaggtgaaggaggaatgggtggagggacgagcaagatggcaacgttctattgaaacaaactgcctcgattattaggctatcattactaaacaaactacctttatcgtcaacctactaacttccatattcttcacattcagctttgcaaaatttacttgactggattttttagcttaacatataactcagggagacatgcgattttgggacgatcaaactgttggtaagtaaatacttgttggcctgttgctcttcttttagctatagctgaccataatttttcttggttgaggaaactgtagttagtgatagctcaatattttgtgtgtagaaacctgtataaagtattggacatgtatttcatagtttttgtaacttataaggctatgtaagtcacagattaactcttcaaagaattatacaacaaagaaattagcgctcagaaatgggatctttgcatttttagtcttgctcattttttattattcatgtatgactcatggttttctagagaaaaatattggaccgttacaataatgctaatatggtgttaatctaggattgctcattttgagtattcttgtacgactcatggttttctagagaaaagatcttggactgtagcactacctccacttgtgagatctggacttctgtagttatatgccatagcaacactgaaagtgacaatgtttgaatggtatagttcttttccttggtcggtgatatatattcacttgatggtatagctctgccaaaagcacaacagctcgtgcttgatccacaaaaaataggatgctcatgtgattgtattttgattttttagttttatttttgttgcatgtataatccaatcgccgagatcgacctctaccgtctcgagccataggacctcccctccctcttcaacatccgcagtcacaacgccaaggggtagttcttcgcccgtgcggtcgaggcggtcccagcaacaggaccaaccacgcacacgccgatggggtactggagatccggacggagtagcattcttgctggcccagggtcagcccacttcttgcgcaagtttgttgttgggaaccaatggaatccgactattcatttttcttgcggatggtcgtgtcggtggggtcaagaaaattctctggaatttggcactgataagatagaaatgcatgttggggctgtacaggccaacgatcgagctcttgtagtcgatgatcttattgccacccgtgtgcagctgtcaaacttatcggagatggacgatgaagcgttggatcaaggagatggaggttggatcaaggagatggaggaggtggccgccacggccaccacttccaggtcgattatgccctttagggccatccagaagggcaagccgttgtcggtgtccttggcatcgagaagaagtccacccctaagctctagaactccaggtgctcgccgtggccacaagcgtgtagtcccccgacgcagagaagaggaagggcatgtggcgtagttagagggatctgaaccctagcggtcgtccgcccgtccagatctgtgacccgcccttctcgacgcttcggtgacatgagtgcctggaaatctagggaggcgaaaaggtcagagttcagtcatgtcatgcttgatttgagttctgtgccagatcaaagcaagtagtagtacgtgagaagttaaccatgaacagacaccctttttctctttgtgtatcacagattttgaaacttgctgagagggaaaaacaaatttatggggaaaaaatgtgacactgaaagccatttgcttccagcagcttaagaattgttgcggtagatgcaactgaagagggtcttcaagtaagtaaatcaactactacaatggctcactaaaaatggtcgacaggacagtttcggaaccttattgttgttcttcagagagaacatcgacaaaggaacttgaagctccgtaggcgaaaggatctctagaaacgactaactaaattctcctaggtactactctagggaggatgctgaagatgctgtcaaatacattagtggaacaatgcttgacgatcgtccaatccgtgttgatttcgatcggggctttgaagaaggcagacaatgcagacaagactgaattagttcctacttctccccatcaattagaaatggggactatagaagatgtccgaacagagcctgatgtctcacaggaacaaacaactaaagaaaatggaagccagacaacctttagctatgaacgattgatatcaaagtccactgaccctgttagtgggatagacaacaagcacagagag

SEQ ID NO: 208584 - DNA, 1675 bp, Zea Mays
gttgcatgtataatccaatcgccgagatcgacctctaccgtctcgagccataggacctcccctccctcttcaacatccgcagtcacaacgccaaggggtagttcttcgcccgtgcggtcgaggcggtcccagcaacaggaccaaccacgcacacgccgatggggtactggagatccggacggagtagcattcttgctggcccagggtcagcccacttcttgcgcaagtttgttgttgggaaccaatggaatccgactattcatttttcttgcggatggtcgtgtcggtggggtcaagaaaattctctggaatttggcactgataagatagaaatgcatgttggggctgtacaggccaacgatcgagctcttgtagtcgatgatcttattgccacccgtgtgcagctgtcaaacttatcggagatggacgatgaagcgttggatcaaggagatggaggttggatcaaggagatggaggaggtggccgccacggccaccacttccaggtcgattatgccctttagggccatccagaagggcaagccgttgtcggtgtccttggcatcgagaagaagtccacccctaagctctagaactccaggtgctcgccgtggccacaagcgtgtagtcccccgacgcagagaagaggaagggcatgtggcgtagttagagggatctgaaccctagcggtcgtccgcccgtccagatctgtgacccgcccttctcgacgcttcggtgacatgagtgcctggaaatctagggaggcgaaaaggtcagagttcagtcatgtcatgcttgatttgagttctgtgccagatcaaagcaagtagtagtacgtgagaagttaaccatgaacagacaccctttttctctttgtgtatcacagattttgaaacttgctgagagggaaaaacaaatttatggggaaaaaatgtgacactgaaagccatttgcttccagcagcttaagaattgttgcggtagatgcaactgaagagggtcttcaagtaagtaaatcaactactacaatggctcactaaaaatggtcgacaggacagtttcggaaccttattgttgttcttcaggtactactctagggaggatgctgaagatgctgtcaaatacattagtggaacaatgcttgacgatcgtccaatccgtgttgatttcgatcggggctttgaagaaggcagacagtggggccgtggacgaagtggtgtacaagctttacaaaccatgatatgtccgtgcgttgtagtagtaagaaagaactaatgttcacagttaaaaagtgtggaatgagaaccgacattaaaataggagaatatatataatgtgggtttcatacatatgttctatgtttcacatctaccaccgaaggccaagtacattttgatatactagcctaaaatgttctgctgatctgatatactagcctaaaatgttccgttgatctgattttttgctacaccctgctgccctctacatttggattgtctgtattttgattttttagttttatttttgttgcatgtataatccaatatgtgattgtatcttttgattcctggaaggatagagtttgcactagaagaggatgctcatgttgttggtgactgtgtaaaagtacctttctgtaattatcattgtctattgtttataaggattaatgttaaa

SEQ ID NO: 208585 - DNA, 492 bp, Zea Mays
aatctatctattctaccccacctgacctgacccgccgtgcctcaaccggttccgcgcggccaacgcgtcttccggtctgccccgtcggcgataatccgccgcctagcaaagcggccgagccgagccgatggcgctggcgctggccgggctcccccacgccgcttcccgcctcgtgcctcgtgtccgccagcctcccttccgcgctctctgcgccgcagctgcggccggcgatgcctcgaagcggatgctggtactgtacaccaagccggggtgctgcctctgcgatggactcaaggagaagctccacgccgcgtccatgcttgctggcacgccctactcactcgcgtctctcgagctccaggagagggacatcacgacgaatccggagtgggagcggctctaccagtacgagattccagtgttggccaaggtgctccccgacgggaccgagactttactcacactatgtgccaactacgaagcttttcaagc

SEQ ID NO: 208586 - DNA, 2563 bp, Zea Mays
taccaagtcagcggcatcacagtggaacagtcatgtgcgattttctttctcaaaaacagtgaagatgctcaggctgtctgtgactctgggtgactcttgtcttccacacatcgccacgccactgattggctcgcgattatgtgattcttgaaccttcttgccatggggatgtctgcagcgtctcatctctgtgcttcttcgtccctgcgagctttaaccgtgttgtttttgttggcagctcttgtttcagatgtagaggggcgacatcatcgtcatgtctgtcctcatttctcctgcggtggtttaagcaatatatcgtatccatttcgtcggcaaggtgatccatctgggtgcggtgtccaatcgtatgagctggtttgcacggatacagatgctacaattcgcatcggcagtggaacatacaaggtgcttagcatcaactccacatattcttacttctgggttattgatgccgacctggacatccagagcagttgcccccttccccggtgggattaccatgctcgttggatcaatctctacttacatctttggaggattgagttcatctatcagtatttctatccttcttctttttatattgattcggggcggtgggctatctttgtgaattgttctcagccaatagagaacattgatactgataaatatcatatatatgagccggtgtcttgcttgagcaattcttctttcatctacttgctggtaactcactactgggatgctgacaactgggatgttactgctggggttctggagccttcatgcggttacctagccatgactcctttgggtggtccaggcatgcaggtgccctggaatacaagctatccagatgttgttaagttcatgaggagtggatttgcccttggatttcccgtttggtatggtgataacatcagagaatgtctcgcaaacaatatgcgtactttccataaagaaccaagaaatagtacaggcatcaggcaacagatcttggacattcttacgttcgagacattatggttttgtgttattgaacaacttggatcaactaataatggtgtcaaatctgttctcatccacatcatcgaagaaataccatatgttctttccggtctgaaatctgcacatgttatttgcaggttcatattgatgccgctggcagtatttgtcttcctagcctataaatactggaaaacacggataacaatagatgcagttgagaagttcctgcgaatgcaccatatgctcgttccgatgagatatgcatacacaaacatcattgctatcaccggccatttcagagacaagctcggacaaggaggctacggtactgtatacaagggggtgctacagccaggtgaagttcatgtcgctgtcaagatgttgggcaactcaaactgtaatggagaagagttcatcagtgaggtcgccaccattggcaagatccaccatgtcaatgttgtgcgcctcattgggttttgctccgaggaaaatattagggcacttatctatgagttcatgccccgtggatctctcgataagtacatcttctcgtcggagaagacattctcatgggacaaactcaacgagatcgctctgggcattgctagaggtcttaactacctgcatcacgggtgtgatatgcagattgtacactttgacatcaagccacacaacatccttcttgatagcaactttgttccaaaagttgctgattttgggctagccaaactgttcccaagagatgacagtttcgtgccactaagcgctatgcggggaacgataggctatatagctccagagatggtatctcgaagctttggtgtcatctctagcaaatccgatgtgtacagctttgggatgctactattggagatgacgggcgggcgaagaaacgcagatcctcatgcaggaagctctagtcaagcatactacccatccttggtgtacaggcagctcagccagggtgatgcgaacaggatcagtgaaggtgttgatatgcacgagttagagaagaagctatgtatcattgggctttggtgcatccagatgaagccgcaagatcggccgacaatgagcgaggtcatagagatgcttgaagctggtgtcgatggcatccaaatgcctccgaggccatacttttgtgatgaagagggtgaaagttcttactctacaatctctgaactggatacaatagaagagtagtagtagtaaaatgcacttgtgtctatgtgctcttaatgtatcagactattaagattgcaaggttgccataagctaagggccttagataaggaggagcgagagagagcagatgaggcggaactggataactttatcttgggtgttctttttgaggataatacagatgaggtgatggacatggaaagtggacatatagtaatgtctcgtactgacatgtccgaagtcacaaagggttccatgaggagaattaagtcaaattcttttgagtctaaatgaaaggggtgttttggaattgtgatgggtttagagacccttttaaacatagatttatttcagagttaacaaaggagca

SEQ ID NO: 208587 - DNA, 1964 bp, Zea Mays
gtgcgattttctttctcaaaaacagtgaagatgctcaggctgtctgtgactctgggtgactcttgtcttccacacatcgccacgccactgattggctcgcgattatgtgattcttgaaccttcttgccatggggatgtctgcagcgtctcatctctgtgcttcttcgtccctgcgagctttaaccgtgttgtttttgttggcagctcttgtttcagatgtagaggggcgacatcatcgtcatgtctgtcctcatttctcctgcggtggtttaagcaatatatcgtatccatttcgtcggcaaggtgatccatctgggtgcggtgtccaatcgtatgagctggtttgcacggatacagatgctacaattcgcatcggcagtggaacatacaaggcatgcaggtgccctggaatacaagctatccagatgttgttaagttcatgaggagtggatttgcccttggatttcccgtttggtatggtgataacatcagagaatgtctcgcaaacaatatgcgttatttgcaggttcatattgatgccgctggcagtatttgtcttcctagcctataaatactggaaaacacggataacaatagatgcagttgagaagttcctgcgaatgcaccatatgctcgttccgatgagatatgcatacacaaacatcattgctatcaccggccatttcagagacaagctcggacaaggaggctacggtactgtatacaagggggtgctacagccaggtgaagttcatgtcgctgtcaagatgttgggcaactcaaactgtaatggagaagagttcatcagtgaggtcgccaccattggcaagatccaccatgtcaatgttgtgcgcctcattgggttttgctccgaggaaaatattagggcacttatctatgagttcatgccccgtggatctctcgataagtacatcttctcgtcggagaagacattctcatgggacaaactcaacgagatcgctctgggcattgctagaggtcttaactacctgcatcacgggtgtgatatgcagattgtacactttgacatcaagccacacaacatccttcttgatagcaactttgttccaaaagttgctgattttgggctagccaaactgttcccaagagatgacagtttcgtgccactaagcgctatgcggggaacgataggctatatagctccagagatggtatctcgaagctttggtgtcatctctagcaaatccgatgtgtacagctttgggatgctactattggagatgacgggcgggcgaagaaacgcagatcctcatgcaggaagctctagtcaagcatactacccatccttggtgtacaggcagctcagccagggtgatgcgaacaggatcagtgaaggtgttgatatgcacgagttagagaagaagctatgtatcattgggctttggtgcatccagatgaagccgcaagatcggccgacaatgagcgaggtcatagagatgcttgaagctggtgtcgatggcatccaaatgcctccgaggccatacttttgtgatgaagagggtgaaagttcttactctacaatctctgaactggatacaatagaagagtagtagtagtaaaatgcacttgtgtctatgtgctcttaatgtatcagactattaagattgcaaggttgccataagctaaggtattggttgtatacttttattgagagtgtgataatgtgatatcatataaaatacctccatgaagttttttacaaagaattcctcaagaacattttgtttgcctacaagcagaggatcagagtcccagccgttgtatcttccaaagggctgcagttcctatatacgaatccttgcaaaggcttagtgtacaatttctatgttatgcataataaattaagtaaactagtatattgcttgtgctaacactgcaatagtatttggcaatacaaatcaaataaccaaaatattcaaaaa

SEQ ID NO: 208588 - DNA, 2156 bp, Zea Mays
tcatgtgcgattttctttctcaaaaacagtgaagatgctcaggctgtctgtgactctgggtgactcttgtcttccacacatcgccacgccactgattggctcgcgattatgtgattcttgaaccttcttgccatggggatgtctgcagcgtctcatctctgtgcttcttcgtccctgcgagctttaaccgtgttgtttttgttggcagctcttgtttcagatgtagaggggcgacatcatcgtcatgtctgtcctcatttctcctgcggtggtttaagcaatatatcgtatccatttcgtcggcaaggtgatccatctgggtgcggtgtccaatcgtatgagctggtttgcacggatacagatgctacaattcgcatcggcagtggaacatacaaggcatgcaggtgccctggaatacaagctatccagatgttgttaagttcatgaggagtggatttgcccttggatttcccgtttggtatggtgataacatcagagaatgtctcgcaaacaatatgcgtactttccataaagaaccaagaaatagtacaggcatcaggcaacagatcttggacattcttacgttcgagacattatggttttgtgttattgaacaacttggatcaactaataatggtgtcaaatctgttctcatccacatcatcgaagaaataccatatgttctttccggtctgaaatctgcacatgttatttgcaggttcatattgatgccgctggcagtatttgtcttcctagcctataaatactggaaaacacggataacaatagatgcagttgagaagttcctgcgaatgcaccatatgctcgttccgatgagatatgcatacacaaacatcattgctatcaccggccatttcagagacaagctcggacaaggaggctacggtactgtatacaagggggtgctacagccaggtgaagttcatgtcgctgtcaagatgttgggcaactcaaactgtaatggagaagagttcatcagtgaggtcgccaccattggcaagatccaccatgtcaatgttgtgcgcctcattgggttttgctccgaggaaaatattagggcacttatctatgagttcatgccccgtggatctctcgataagtacatcttctcgtcggagaagacattctcatgggacaaactcaacgagatcgctctgggcattgctagaggtcttaactacctgcatcacgggtgtgatatgcagattgtacactttgacatcaagccacacaacatccttcttgatagcaactttgttccaaaagttgctgattttgggctagccaaactgttcccaagagatgacagtttcgtgccactaagcgctatgcggggaacgataggctatatagctccagagatggtatctcgaagctttggtgtcatctctagcaaatccgatgtgtacagctttgggatgctactattggagatgacgggcgggcgaagaaacgcagatcctcatgcaggaagctctagtcaagcatactacccatccttggtgtacaggcagctcagccagggtgatgcgaacaggatcagtgaaggtgttgatatgcacgagttagagaagaagctatgtatcattgggctttggtgcatccagatgaagccgcaagatcggccgacaatgagcgaggtcatagagatgcttgaagctggtgtcgatggcatccaaatgcctccgaggccatacttttgtgatgaagagggtgaaagttcttactctacaatctctgaactggatacaatagaagagtagtagtagtaaaatgcacttgtgtctatgtgctcttaatgtatcagactattaagattgcaaggttgccataagctaaggtattggttgtatacttttattgagagtgtgataatgtgatatcatataaaatacctccatgaagttttttacaaagaattcctcaagaacattttgtttgcctacaagcagaggatcagagtcccagccgttgtatcttccaaagggctgcagttcctatatacgaatccttgcaaaggcttagtgtacaatttctatgttatgcataataaattaagtaaactagtatattgcttgtgctaacactgcaatagtatttggcaatacaaatcaaataaccaaaatattcaaaaa

SEQ ID NO: 208589 - DNA, 3047 bp, Zea Mays
ccgccgccgctctcttcggttttacgccttctttgttgcgcgcacgactgctcctccccctccaaagaagagaaggttggctgccggccagctgactacctgcccagcgaaccacgttgcctccgccaccgctgtccgctacctctcgtcctcaaccccgtcgctgcttcgttttcctctgcggcctcgggcctctgccttctctaaaaggccaatttcccaacatggaatttgaaagcactctttaacaattgttgattgaacagcacagtgcctggttttaaaaggttcaaaaggaagaaaattcatctgacaccagcactatcacagccactgaaagacctcaatgtccaaagatttggaaaaatgttcacctagtggcaccacacctacgacttcagtttcacctgtagagtcaaaaaagcatgagaagactgtaccaaattatctcagagctactagaggttcgtgccatgatttttgcaagtatggacataaaaacccttctgaagaggaggcgggtatttcaggaggaagaagaaagaaaattcctgctcatctgattaatttgacactacacagatcagctattttggatagatccaaggatataaaaaataggagtgtttcactaaccaagtcgagcatatctctgggtgaagctgaacggtttgcacccaagaaagcatcagcaagtcgaaaaggagttctatccagtgagcatatggttcccaggacagctacaccatctcaacataaatctctgaactctgatagaagaaagatgcattcaattgttgcacagaaggctccaacaaatctaaggtgttcaaatggagttccaaaaattgataaaaaagaaacaacgccagccaagggggctatatttcctgcgaaattgaagtttccagagaagaccttgctggagaaatctagaaatgtggatagagtcacaatggccaatcaatcattgcacaagaggccagcttcttctctcactaagctcaacatggttaaacaggggcctgttgcatctcaggcttctagtaagcatctactttcaaaacataaaaatactctggaggaacctgttgcagcaaatattacaagaatgcgtgctaaagctggacaaagtcctagaaggacgagcaatccttctaatataaatgggaaggaaggctcagatatgcccagatcacccctctctttgcaacccaagttgactgcttctatggaattacagatggatgattcacaaattacagggaattacaacgattcagcattggctgaactatctccagctattacagaatacagagacttttctcaaccagcactagaagaaacaagtaaaactatttcagaggacgatggggtgggaagaactgaaaagagcaaaatattaggaggtgaagccttcctggaaagcaccattgcccttcagctgcagcaatcattagatggaaaggaattcagcgttatcctagctgaatctgatctagaacagaaactatcagagcataatattgttcatagtcaagcttcaaaggattataatagccaaacagattatgcagctctttgtcaattaccagaacaagtaacaactgtggaaactgcagatgtgtttgactttatgtcaactcaaagtaattcaaaaactgaggatgatcaagttaaagtcaatgcgtctgtggagtctctaatccctgaaggtaaggaagaaatgagagttcatgaagattttgaaatatctccagaactactggtacttgacaaaaaacatgataaggagcctgagtcttgtcttgatcttgcttctggaaatatagcagagaatgataaggatggtaaagtttttgacagtaggatgaacaacagtgcttctcactgccaatcaatttcagaaacttcatcagatggtggactccttgaggaacctaagtccatgctaattgaacctagtgtttttgctggtgatgagttagcaagtatcagtaatgaaaatacctctgaacatggcggactgaaatcaaggatgtttattccccatcaatcaccagaagaactatcagataatgaattttatgaagagtatggttttgaattaagtgaatcagatgaatctggtacagaagatgaggagacaacaatcaagaaaaataggaatgaatcattgaagtctggtggccaaagatcaagaagaacctcagcacttgaattggatgatgctagtctcacaccttataagttaaagtttaagaggggtaaaattgtagaactcccactagacagcatgggcccaaggaggctgaaatttagaagaaagtctgcaaatgaagcttcaaatcgtgaaagccaaccagctagaaggatttatagaaggaacaacaccagtactgctgttcctactgatgtggaatctcctggtgtgaaactgagacatcaagatgcacaagagaagaaagatgcacaaggattgttcaataatgtaattgaagaaactgcaagcaagttagttgagtccaggaaaagcaaggtaaaagctttagttggcgcttttgaaacagtgatttctctccaggatggcaaacccacatcatcgacagcgcaagctggtaattcacaagatttaattcctgatgacgggggaaatgcacctgaggaaactggatagaatttgcatgcctctgaaatgttgcaatctttgcactcatgtttgggtctcctcctttatttggttccagaatcggatctgattggaagcattttgttcagtgtatacaacagatttctcctgtagaacgacagttgcggaagtggttttttcagacagtatatagtaatgtgttcaatggaacaagtgctttgaagtctacttcactgtaaatcaaatgagacattgtaagaccaattgtgtttttgttcggcttggttttcctaaatgcaatattaaaagagttggttttgctgcacctacctctagtttggttttcactggggtggtggtggtattgtttgtatttctatctattatatgaaag

SEQ ID NO: 208590 - DNA, 730 bp, Zea Mays
cctactccggtggagtccacctccactcctccagcgagtcaccactgggcactggccaccgccacctcggccccgctcctcacgttgtcatccgtccacactgcacccgctcctctccgtctccccaacagtttcattcctcgagggggatcgcttgtcggcggggaagcaaagcttagttcttgacgcccaacctccccgttgcctattcgcctcaggcacgtgactacatgctatacatatcattgctcgatgtgctcaaccggaatgatcaaatccctctgcaagcttacagcgagctctcgcttctgtttcagcatcacgaagatctgttagcggagctgtcgaagttcaggcccctcccatgcccaaacaacgtttatacacacggctcgatttggatgatcatattcctcatgccttttctgctcctgagccttgtcctcgccttgagaagccattgaagtgtttcctgctccatagactgttgcgagcctaaatgatttgtcgtagcactaacacctagttgttgtatatagatatatggatggggttctatatcctgtaatttctttatgatctccttgtacgctcgtgcgcacggaaataatcgtacaatattatttcagtcgcggcagtctggcagtatgtaaagcctaaacagagatcgtttgacctcgtccaatcggaaattcagctttgtacagagaatttttggtttttttagtct

SEQ ID NO: 208591 - DNA, 4385 bp, Zea Mays
gtttcaggtgctagcataccttctgatatcgtcatcagcaactgctcgagcaagtgatttgactgagaactgggggagcgattccttcccgaacatggcgaactgctcgagcatgacatcacaatggtcatcagttggtgtgcaatcagccaatcaccacatacatatactacggatcaaggttcataaaccataatgcagctccaacaacaccgtttacaagttgcaacagctggaactggcaagaattgcaaagatacgcaggctactacagcctaactatctggattttgtgtatgctgttaactgagagttcttaaaaattaatgaattaacgaatccccaaggcccagccggatgaactgcatgcattgtcatctgcttgcagctgcctctgcaacggcttggagctccacgtgagctcctgcacggcggccgggaagatgaccgtaggtttcctcctgctctcctccaggtacgggaagtcctcggtgaagtgcaggccgcggctctcgcgcctggccagcgcgctcctgacgacgagcttggcgcagcagaagaggttgcgcatctcgcagacctcgacgcccttcagccgccccgttgagcgcacgatgccgacatactcccacatcacctactgcagctccatcctggcctgcctcgtctgccccacgatgtccgacagcgcgccgtcgcccagcgccgaccgtggcagcgtcagccgtgcccacctcgccgccagcgacggtcgtggagaactctcgcgctctggagagattttgcgcccgtggatccgtcgtaagaaacagactgccgtaacaacaaggattactgggctaaaactgactcggatactaaaattccgaatttcaatggattataatactacaattccaattgctctgttcgggataccaatttttagaagcccgaatgttcgggatatcacggttccaaaaagctcctcctcgagcgcgtgcgcagcggctctcctccccacaggcagtcgcgcggcggcctcatccccgccggcgagcctccactcccctccgccggtacgcctctatcgccggtggcctcccctcggcagacagcctcgcctcgcttgcttctattgctgtgctccaccacagagccctaggtggagctacgaaccccgtgatccccgacggtgtggcaccggagctcggcggcgacagcgggcacatccccctcatgccctaggtggagcaacgaaccccgcgaggtcgtcctcaccctcggcctatggtggcagaccgtgctcaacattgccgccaagaatgcgactctcctcgccgcactgctctatctcggggacctcgcctagcattgccccctgccccgcatcgacgaggtggagtccttcctcgcccgcaccttccggatgatccagctgacttcccgacgccaccctcgcacaagatcccgatgtggcaatggcgaccagcgacgggcgctcaacgccaccgcgccgcctgcgaacccatggtgagaagtgtggtatcgatctagagccgaaggacttccccaacaccccttcctccatcggcgtgacatcggccagctcatctgcgacgacgaggcatcttcgaccgacttctcgacaccccatcctccatcaatgcggctccagtaccccttcctccatcggcgcagcagcatccaattcatctacgatgacaaggcatcttcgaccaaccacgccctactacaagtggtgtcagtccatctcagataagtggagtaatttgtttgtatctgtatcttctattttatttcttccctaatcctgattaatagcctaatcacgcgacaactaatacatgttgatttctttccttagtcggtgtcgtgcgcatgtgagatctagggagaggaagaggaggaagggttgtggggaccgggggtgcaagatggcggattcacctgcaactacaagaaaagaaagagcgagagatttacagaaaccttcagagccgcggaggaggagaaggagattaggaggatctctacggcgctgacggattagttaaggaacgaaatatcacatcgtgtccggtaaccagattcagatgtgggcaccatgcgtgggtgcagggccaggccgaggtgaaagagattcgacgattgagaatacatcaaagaataaaaatgtggaactcggattttcagatgaagagcgtgaccaagaatttcccgattttccatcatttattccattcttacctcctctgagtgcagctaacctaaaggtctactatgccacacgtttcaccatcatagttgggataatggtgttcggtggttttcttgcaccaatcttaaacttggtctaggggcacatcttatgaagactccatctgcagcgttcatctgtcgacgtagttgagatgaattctctatgcctacttctagagtgatgttcaaagaggttgacgctccttcaccatccccagctttgtggaatgggccacaggtagccatttaggatgacaaagccacaagggtgtccttcatcaaggctatgctagaagcctcagacttgtgtctgaggaaaattcataaaaatggtacacagaagctgggaagaaagtggaagaggaatttagcacttgccctctgtcagtcctaatgatgagcgttaagaacaacaccaagatactgaaagcaaacatggcttgttcagtcgggcagcggcagcagaggggatggggccaatgacggaggcggagaggagaacccatcgatttggtggcgtaagtgggagctcatcgaggccgccaccggccggtccacctcttcaataatcgtccttcatcgcccttcagttgacctgagatctagaaggacacaacaggcaaggtggatgtattcgtagttgattatatgttaaaagcaaattttggatgacattggtggagattgcttatctctaagacacatctactcattctttgaatggaaatcacatccacgttctagaaagtctatttttacttcaaaagtactccttctgttccaaataaattagtgttagcatctctgcactctattgcccacttcccccctcatcggtgttttttattgttgcatatcaattttgtggctcaaatgcccctttgaaacatatagcaccaaaattatcctaattaattaattggtttctaactggctactctatttgcaacaatggggatatataaccttaccatgtctgtttatcacagtgcatcttagattgcatcgtattgtaattgttttagttccttgacatactgtttgtgcaacaggaactgcttgatgtacttacggttgggtatctgtgtagctgtagctgccaagttgcctaaagaaaagttcccgacctttcacatgctgccacattgccacaataccttaagagcttttctatacttctatgatttgtgttttcgagatctgagttatttaaatgttgtctgctattttgaatttttatatgaagatcaaagttctcaattgataaagtaattaatataacaagcgaacaacacatagacaaactaattaatgtagcatatagacgaataaggaatcctgaaacattgaccgtgaagaaaattattgtgcacatatgcactctttctccaaaatttggcatttaatcttattgcaacatacttgtacagaggggcgagggttgttcagtgctttgacatgtgtgcaactattcaagcacaatggttagatgatatccccattcattttagattattacattgtggtgttcggcttcttcagtcaagcagcaatcatgcaacatgccttactgtagttttttatcactgcacatgttgctggacaaatttatggactggaggattatagaggactaacaagtgctactgggagattctcgagcaccattgaactaagagattccaaatagttctttggagtctattgttgatgttggcggggataatctagcagagatttgtcagattttttgtgcaacacggaggctacatgaggcagcaacgatcccattcttctcgcatgccactttacacaagctaaggatagcttctggtctcactcatggttgtggcagggaaagccgagtcagtagggtttgtcatgtagctggagttatctcagaccacatattagatgcagtgatgatgttaatggaggatgtttacatttaccgtgcaagcaagatgacttatattatgccttaggacaataagtattgttttcactctaatgaaatacttggtaaaaagttgtctctgtagttgtatatttgactgtgaatatttgaacccactgttacaattgttgctaattgaggtcagatttcagaggccaaataattc

SEQ ID NO: 208592 - DNA, 3700 bp, Zea Mays
cacggtcttgacctagtcccgtgcgttcgttgctgggccgcctcgaccgcaacaaagactacaggggggagacacatctctccccacctcgcttcgcacctctccagccgccgcctcctccttcgccggcgtcgacgatgggtgactatggccacggcggggggcagatgcggggcaacccggactcccgccccaggggccagggccagcgccctaacgtccagcagctcaagctcatggggcagatccacccgacggggctcacgcccaacctgcttaagctcttcgaaccgcgtccaccgctcgagtacaagcccccgctggagaagcgcaaattgccggcctacaccgggatggcacaatttgtgtcgcactttgctgagcccgaggatccagagtatgctccgccagtacccaagtgtgagaccagggcagagaagaaggctagaattcgcaataataagctcgagcaaggcgcagctaaggttgctgaagagcttcagaaatgacccacaaagtgaccccaatgctactggagatccatacaaaacactctttgttgctagacttaactatgagacatctgagcagaggatcaaacgcgagtttgaaggttatggtcctattaaaagggtaagtaatgtggtaattcctgtgcaggtgaagttattgcactttggtaaggtttatggatttttcaatcattctaaaatgtaaacaatcattggacaaaactgtggaaaagttgcctcattagtttatggcttccttttaagctcctccgacaagtgtttgcaacaccaggggtccttataaccgctttcttgctccatttcatatctagaatcaaaatctgcagtttcttcatttcctttctggtttctgaaaacttctctggaaatgctttcaaagaaactgggaactctcagtttcatagtcatttttggtaaacttagcatcaatgttttaattgaatttttgtttttggagccaacaacttgtttgctctgtttcacgcacatgtatagtgtttgctctagaatgtattccatgacaactttttttttatggttttgagctgtgaatttgatcatttagctgtaattcattttatttgattacttaattatgaaattggttctagaataaaatattttcagtagttttatacagttcaatgcaatgatgtaaaattttacctagttaagggtatttaaacatcagacaagaaatttttcatggggaggggtgtggagtaactcttggcagttgtgttgtcctaaactaaggaaataacaatcatttctgtggcacagaaggtctacaactcttcacaatctctctttttaagcgatctttataccttttggggcttagatggaatacatttcaaatggaaaattatatagggttcaggcatatgtatgctcgctggtaatttagttaaatcttttggactttcattggaaagccattttactatgtgcatggttggtacaaccaattaatgacaaggcatctctgggaacacaaatatgcgtaaacaggtaattatggctgcacctgtatgtggcccaggttctctatttcctagtacttttttgtcgtcagcaagaaatttcttgagaagagcaaattgcttctaacgaaggtagtaaatggttgagctgttctctcattccacagatttgcatctaccataatggtcaactgggggtaaacaagcttgaaaaatgctgacagtggcacaaattagcatagatcactttgtatttttcaaaaagcagcttgtctgtagacagggattttctactgtatgtaggcttaattgggtaggcttgctggtgagtatagtatttatagttccttcagattagctatgaaagctatcactgctaccaaattttggttgtggagcaatcagcaaccttacacaatactaattgcatctctcaactcctagagtcgaagatccatcgattttgtgcataaggggtatacatcactcacttggtatttatcacctttctgttaacttcgttatcattctgtttgtttggaaaacgaaggctgaacaaatttcaccgatggagggcaacttggtatagtatttagttctatcgtacaccctttcctttagtataaaattccctggtaaggggatatccaatttatttcccaacgtatgccaatcggccagacagcgcttttcctccaactgtgttgatctgtgctggatttcactcctcgtgtggaagctctacatgtgcaaggttcgtcttgtaactgagaaagatacaagtaaacctagaggatatgcattcattgagtatgtgcacacacgagacatgaaaaatgcctacaagcaagcagatgggagaaaagtggacaacaggagggtattagttgatgttgagcgaggcagaactgttccaaattggcgtcctaggagattgggtggtgggttgggatcaagcaggatgggtggtactgatactgacaaaaaggattccactagggagcaacaacaaggtggacgccctagatcagaagagcctcggagggatgatcgtcgtgccgatagggatcgtgaaaaatctcgtgaaagggtacgggaaagagaccgtgaggagaggacccgtgaacgttcgcatgaccggactcgtgatagagatctacgagatgagaagcatcaccatagagaccgtgagaggactcgggatagggagagaggaaaggaccgtgaaagagaccacggccgtgaccgggagcgtgatcgtcgtgacagggacaaggatcgtggtcgggactatgatagagaaagggaccgtggtcgctctcatgatcgccatcgtgagagaggcagggaccgtggtgaaagagattatgagcgcaccagccatgaacgtgaccgtggtcacatgcatgagagggatgcagactatggcaatggtgggacaaagcatgacaaaaatctgtctagttatgggcaggattatggctatggtcagtatgagcaacacaaaggtcatgatgcatatggttacagtcaagatgtacgtggacatgaaactgaacactcaaagcggcatgagcacgaatattatcgtgttgactcgtatggtaaaatggaagctaactatcagatgccgccaaacaatgctgagccagaaggccctgaggaaggtgaggcatatgaggaaggcgactaccagtatcaccggtctggtgaacacatgaaggaagcttgattgcagcgatgagatttgcctgcagctttatactgatacacaacgatggtttcaatgttggttctttgtatgaattagtttcagctgcatagtgcctgtcagttgtgttcttccatgttggggaattctcaaaaggaagcaaaatcttgcccaactgcgtggatttttgaatttgaagcctatggctgccaatatcttgtggaataagatatttgtgtaatctggttgtggagatccatatgatctgccgttatccatctactcttctgttaagaagttttgtatgacagttccttcaaattatttgttccaacattttgcagaacttcagaattgttgttctatttggccttctaacaaaaagttgcttggtaacaactgcaacctttgtcctctacatccaagcacataggtctcatcaataaaatgtaatcatttttttttgtaat

SEQ ID NO: 208593 - DNA, 2689 bp, Zea Mays
ttgattccccctcttcatatttccgttcccctgtacccgcgtggtcttcgatcttgccaagtttcacgttcgatctcgctgccccccaaaacttgtttcgtaaccatcctattttttctctcgaattctttcttgtgattaaggcctggctaatttctattcttcaggtttgcagatcggcgcagttttggtcgcaaaggcgtggtcgttctcctcgagcatcgatttagggttcttcggctttctatgatcaggaggagttgctggattattttatcagggaacagaatggtgtgattcgttgattggattacagtctggatctctcttgcatcaaatggttgagcaaggcaaaccacgaagcatcccgacgaaggcgaagaaatcgccgttcgtggaggtagaggttgacgagattggccaggctagtggggtggtgtttgcaagggaatcaccgctggcgcctaagagcgaccaaggatgcagcgttagccatagtcatggcgacgacgaaacacatgaatcggatgggtgcgtgcaaagccaggggctagacgagcatgggtgggtggacttcggtcactcactgcagctggtgctgttctcgcgacagtggagcctcgctgaaagtcttgttgacctagcagatcagcagccgatgctggattatggcctgtcgattgcccttgatgccatatggtttttgcggacgaaacaggatcttgaggggctcaacagtctgatatcgaagattgtggcctcaggggcaaaggattttgcaagagcaatcctcaggacatcgctgctcgcgtcatgtgttgcagcgtgccaaagcaaggctatcactgtgggtaacagcaaggagatcgtcgcagagaggtgctgagcatctaaaaatagaggcaggtgccaaggtgcagaagttcatggaatgggctttacagtgtattcatatgcatcattgttctgaagatacacatatgtacagatggaactacaatactctccaagaggtacagcttcatgtatcagcatttaggaccttcttggacatagctggtgacaacttaagtggcaagatttttactgaggcatttgatgcggtctgcttcccccttacactcttctcaagtttatttgaacctggatggtcttctgggagttcagcagtctccattaagggccttttatcattgctggtggaaggaggcgctgacaatgtaaatcagtgttttcttgaagcagcgcgctttggaagtactgaacttgtacgcattctgctgaaggtcgcatatcagaatagcttggctgtggacaccgatctggctctggtgtatgcctcacattactgcaagttcaaaacaatggaatgcctagttgatgaagggaacgtgagttctttccttggccctctgataaaagctgcagagcgtgggtgcttgcaggttgtccactggttcgtcagtcgaggcgtctctgacattgagatgtgccttgccctgacgactgctgcctccagcggccatttcgtagtggcgtcgtacatgcttgcacatatccctcagcaaatccttgaagctctcagcacacagatcctcaaagccgcgaggggccagggcagcaggccgcttgatggtgtcaccttccttctgagatccaacttcctaagagacgcagctgcaacatatgaggccgcagacatcattgcaaccgggggcaccaacggtgagctcccggacctggttgccttcctgaaagaacactggtcccaggacgcgtttgctgaaggggtgagcgccggtgaaatgcacttcgtgaatgtcatgagggtcctcaggagaggggcgtccccgatctgcctggaggacctcccgcctgagatggtgctcggcatcacgtacctgccactgtaccgtgagtgcctgagcgcgggtgggcagctgttgccccaaaggctgaggggggagctgctggaggcggtgcaccggctcggtgagcccgttggcccggagagccaggggaaggacctcgtgctggcactagagcgccacatgccgtcgttcttggttggatcctgagatgtttccaggttgtaaaagaagcttgtgcaggctataccttgctttaaaaaattgtatggagcagtgttgattaccaacttctggctgcggtggaatcagcaatagatttggcgcgtcacatgtctcgtgatcgtgtagaaagattttgtttttgttttgtattttgcatgagaaagaagtttctttcttgattgcctattgaaggggcctgttcttgttgccagctgagctcttccaattattttccgggctgcgcacgagacgtacatgtgtgctagtggtgctgttagtctagtttgtgttgtgttgtgttgagtgtatgcgttgtgtgcgcgcgggcgcgtgtggtggtgctaagagtagtttctgcgtatactgggccttcagtggtatgcctggtaatctcaataagtatcgctttcaagacatggattcttcagcaaaagggtatttgatgcatgccttggtgggagtaatgtctaggttccgttccttccaagtcggccgtatacattttgttttttagatttagtttacaacatctgaacccacaatcttaatgtgtcatgggttgtcatatattttataccacatttgtctaaggtcag

SEQ ID NO: 208594 - DNA, 2594 bp, Zea Mays
aacaaaggctaaaaattagttaggcaacaaacagtgtctaataaaatcacagcggggaaaaataagatactgtccccgtctacttccgcttttgctggcatatttgattccccctcttcatatttccgttcccctgtacccgcgtggtcttcgatcttgccaagtttcacatcggcgcagttttggtcgcaaaggcgtggtcgttctcctcgagcatcgatttagggttcttcggctttctatgatcaggaggagttgctggattattttatcagggaacagaatggtgtgattcgttgattggattacagtctggatctctcttgcatcaaatggttgagcaaggcaaaccacgaagcatcccgacgaaggcgaagaaatcgccgttcgtggaggtagaggttgacgagattggccaggctagtggggtggtgtttgcaagggaatcaccgctggcgcctaagagcgaccaaggatgcagcgttagccatagtcatggcgacgacgaaacacatgaatcggatgggtgcgtgcaaagccaggggctagacgagcatgggtgggtggacttcggtcactcactgcagctggtgctgttctcgcgacagtggagcctcgctgaaagtcttgttgacctagcagatcagcagccgatgctggattatggcctgtcgattgcccttgatgccatatggtttttgcggacgaaacaggatcttgaggggctcaacagtctgatatcgaagattgtggcctcaggggcaaaggattttgcaagagcaatcctcaggacatcgctgctcgcgtcatgtgttgcagcgtgccaaagcaaggctatcactgtgggtaacagcaaggagatcgtcgcagagagattgcatgatcgtctgcgagattgtccaggtgctgagcatctaaaaatagaggcaggtgccaaggtgcagaagttcatggaatgggctttacagtgtattcatatgcatcattgttctgaagatacacatatgtacagatggaactacaatactctccaagagtttatttgaacctggatggtcttctgggagttcagcagtctccattaagggccttttatcattgctggtggaaggaggcgctgacaatgtaaatcagtgttttcttgaagcagcgcgctttggaagtactgaacttgtacgcattctgctgaaggtcgcatatcagaatagcttggctgtggacaccgatctggctctggtgtatgcctcacattactgcaagttcaaaacaatggaatgcctagttgatgaagggaacgtgagttctttccttggccctctgataaaagctgcagagcgtgggtgcttgcaggttgtccactggttcgtcagtcgaggcgtctctgacattgagatgtgccttgccctgacgactgctgcctccagcggccatttcgtagtggcgtcgtacatgcttgcacatatccctcagcaaatccttgaagctctcagcacacagatcctcaaagccgcgaggggccagggcagcaggccgcttgatggtgtcaccttccttctgagatccaacttcctaagagacgcagctgcaacatatgaggccgcagacatcattgcaaccgggggcaccaacggtgagctcccggacctggttgccttcctgaaagaacactggtcccaggacgcgtttgctgaaggggtgagcgccggtgaaatgcacttcgtgaatgtcatgagggtcctcaggagaggggcgtccccgatctgcctggaggacctcccgcctgagatggtgctcggcatcacgtacctgccactgtaccgtgagtgcctgagcgcgggtgggcagctgttgccccaaaggctgaggggggagctgctggaggcggtgcaccggctcggtgagcccgttggcccggagagccaggggaaggacctcgtgctggcactagagcgccacatgccgtcgttcttggttggatcctgagatgtttccaggttgtaaaagaagcttgtgcaggctataccttgctttaaaaaattgtatggagcagtgttgattaccaacttctggctgcggtggaatcagcaatagatttggcgcgtcacatgtctcgtgatcgtgtagaaagattttgtttttgttttgtattttgcatgagaaagaagtttctttcttgattgcctattgaaggggcctgttcttgttgccagctgagctcttccaattattttccgggctgcgcacgagacgtacatgtgtgctagtggtgctgttagtctagtttgtgttgtgttgtgttgagtgtatgcgttgtgtgcgcgcgggcgcgtgtggtggtgctaagagtagtttctgcgtatactgggccttcagtggtatgcctggtaatctcaataagtatcgctttcaagacatggattcttcagcaaaagggtatttgatgcatgccttggtgggagtaatgtctaggttccgttccttccaagtcggccgtatacattttgttttttagatttagtttacaacatctgaacccacaatcttaatgtgtcatgggttgtcatatattttataccacatttgtctaaggtcag

SEQ ID NO: 208595 - DNA, 1398 bp, Zea Mays
agcagaatttaggatttctcttttcaggatctgatgaaaggactattcctgggaatactattgctgttcaagctgacatgccttttagcggtcttacaacatttgggactgcatttttatccaagtttgagtgctctcagatgcgacatccactgctagagcatatcacatttgttgacacacctggtgttctttctggtgaaaagcaacgcacacagcgcagctatgatttcactggtgtgacatcatggtttgctgcgaagtgtgatcttatccttctcctgtttgatcctcataagctcgatatcagtgatgagttcaaacgtgtcattggatcattacgtggccatgatgacaaaatacgcgtagttttgaacaaggcagaccaagtagacactcaacagcttatgagagtttatggtgcattgatgtggtctctcgggaaagtattgaatacacctgaggtttcacgtgtttatattggatcattcaatgacaaaccagtaaatgaatcagctgttggtccacttggaaaggaactatttgagagagagcaagatgatcttctttctgatctcaaagatatccccaagaaagcctgtgaccgccggatcaatgaatttgttaaacgtgctagagctgccaagatccatgcttatataataggtcatctaaagaaggagatgcctacaatgatgggcaaagcaaaagcccaacaacgactcatagacaatctgcctgatgagtttgcaaaggtgcaacgggaataccatcttccgtcgggagattttccttacgtggagcacttcaaagaggtgttgagcgggtacagctttgacaagtttgagaaggtgaagcccaagatggtacaggccgtggatgatatgcttggatatgacattcctgaacttctcaagaacttcagaaacccatacgagtgaacccatacaggcggttgaaagatgacttcgatctgcaacagaatgagggattgattgtcaggcgatgtgaatcatagtggtcaatgtctcttggggcgttcattgccatccatgcttagccattgttatataactttatgcataagaatcatagagccattgctcaagctttcaccagacatctgattatgtaaaatcgacaaaatagtgatgttagtgttaaagaatatactgtgatgttgtttcttcaaatgagtatttattcgtttggaacagctggagaatgtgggtttgtcaattatcagcccatgaagaatatttggaccaccgtggggtgttgtcctgagcatggctccttgttttgattttataatgtcatgtatgttgtggcgctgcaaaatctgctgtgatatgttgcaaatatatttttgaaagacgaacttttgagaaattaatt

SEQ ID NO: 208596 - DNA, 1168 bp, Zea Mays
ttgttggtgcagttagatgaagctgcaccggtgttgtcagggttgagtgagcctattgttgttgccaaagtcaacgctgataaatacagaaaactcggatcaaaatatggagtggatgggtccctaccctcatgctcctttatccatggggttccaattgaatacactggttcgaggaaagctgaccagcttgtccgcaatctgaagaagttcgtttcgccagatgtttctatccttgagtcagattctgcgataaagaactttgttgagaatgctgggataagctttccgatattccttggttttggggtgaatgactcattgattgctgagtatggaaggaaatacaagaaaagagcctggtttgctgttgctaaagatttctctgaggacatcatggtagcctatgaatttgataaggttcccagcactagttgctatcccatccaaagtataaggaacagagtttgttctatggccccatttgaaggtggatggttcagagagattagaagaaggtgaccaagcatctcaaataagccaattccttgagggatacagagcaggaagaacaacaaagaagaaaatcaccggcccttctttcatgggtttcctgaactctctggtcagcctgaactcgctgtacatccttatatttgtcatcgcccttctgtttgtcatggtgtactttgctgggcaagatgatactcctcagccaagacgaattcacgaagagtgatgaaagcttgttgggcttcttgcacctaaagatggctaatctaccgggagattagcttttgtattaattgtacaaaagcttcaactgacgcaagtcgtgaagagtggttttggcaatttggccattcatgctgagtttcttcaatctctattggcgacatcaatttctgcatcctgcctatttgtgtttctgctttgtgcccttcaatttgttctttaatttagagcttagaaattagcctctgcctgtgtattctggaacctgccattccagagtccatttctgtgaaaatatatttattattatcatactctgctaccgagcttttgtacaattaatacaggatatatagactgttctggtgctatgttactcgctagttgtgaagttgtcactaaaatgtaaaagaaatcaaatcattttgctgag

SEQ ID NO: 208597 - DNA, 920 bp, Zea Mays
ctcccaaattgtgtgttccttctccggggaaaccatgaatcctttaatatggtttcgagaaggagataatgactaaatacaaagatcaaggcccttaactttatcgaaagttttaaagatgttttggggaccttcctctagcggcaataatagcaggatgtgtgtacactgcacgtggaggtgtcttcactagttccatgatgggtctttctccgaataaagatcaagacattggattgctttggggtcctgatatcactcagcaatttctgaggacaaataatttgaagcgacgcacaggcgaattgatcatgtggaggcctggaagtgtaatggtggtttaccgagggagcatttacaaaaggcctctaaaatctcaagctctaaatggtgcctcatcatcggttaaaggcgaatttggtgcattgttcatcccaaatgcctcgaatgccgttgagaatgatattcaagggatatatttgtctgcaaaacatgcaactgtgtccctattgaatgtgtagaatattaagcacatgaatgaggaagggttggagttcaattagataatgatgagctaggtcctcattttgtggattggtgggaacggagctgactagccaaagttagtgaggaaccttccatgccattttgctctagggagaaaccagaactatcaagtttagcagcagtaatataataaggagcatgttgtaactgccccagcgttggtgtggacagcagtaatatattgctcatcgattgcaaataattttattctaatttttcatcacatcaccaagaggtatggacacaactttgcctttttctatttcctcttattgttatgaggatagcaatatcaatatataaatataacctcgacaaaacacatctgattactgtctcatgcctgaaaaatc

SEQ ID NO: 208598 - DNA, 3041 bp, Zea Mays
ctccctacaggctacagccaaacctcaaaccccagcggtcggtccaattcaaaaatcgaatcctgcgctccttccccaagctattcccaaactgccccacgtctcatcctcgcgagtcgcgacctcgcaagcctctccgacccccagctcaacgagatcgggcgagcgatcccctcttccccgaccaccagatcgcagcaatggagccggatccggtcgccgctggggcatcctcctcgccgccgccttcaccagcgccggccacgtccccgccgtggcaaacgcgagatgacgatgagccgggagcggtggattgcgcggatcccggaggagacctgaatcccgcgccgccgccgtcgcttcagcaggttgagaacgccgcggtgggcagcgaggtggagcaggaggaaccaaagaaggaggcgatggcaggagtaggggagactctccgcagcttcatggaggagtttggggatcaaggagaggactccattatcttgtcaccgcggctgaaggatattagtactcctgaccgccccgctgccctcggtttcctaggggagaagtataacaacctcatggagaggtacaagaagtacaagaagcaggtggtcaagtgttccgaggagtgtgaaccaagatataatggcctgaagaagaagtacacagacgagtgtgcagagaggcggcgtctgtacaatgagcttattgagctaagaggtaacattagggtgttctgcagatgcagacctctgagctccgatgaggtcaaccgtgggtgtttatctgttgttgagattgacccatcacaggagagtgagctgcagtttgtgcccagtgaaaaagaaaggaagccctttaagttcgatcatgtttttgggccagaggatgaccaagaggccgtcttttcagaaacagtgcatgttgttaggtcagtgatggatggttttaacgtatgcatctttgcatatgggcaaacaggaactgggaaaactttcacaatggaaggggttccagaaaataggggtgtaaattatcgggctttggaagaattgttcagaacgtcagagaaaagaagtgcatctgttgcatacacattttccgtaagcatcttggaagtttacaatgaaaagatcagagatcttcttgatgagagcaatgatcaatcaaaaaggttggatattaagcaaaatgctgatggaacacaagaagttcatggtttggttgaggctccagtttataacatagatgatgtgtgggagaaactgaagtttggtgctcaaaatagatctgttggctcaaccaattctaatgaactcagcagccgctcccacagtttggttagggtcactgttaggagcgagcatttggtgacttatcagaggagcagaagccacatgtggctggttgaccttgctggaagtgagagaatagctaaaactggggtagaaggagatcggctgaaagagtcacagttcatcaacaaatcactatctgccttgggtgatgttatatctgcccttgcctcaaaaaattcccatattccataccggaattccaagttgactcatttgctccaaagctctttaggcggcgattgcaagactctaatgttcgtgcagataagtccaagctctatggattcaggagaaactctcagttcactcaattttgccagtagagtccggactgtagaacatggccctgctcgtaagcaagtggatccagctgaaagtttgaagttcaagcagatgactgaaaaacttcggcacgaggaaaaggaaaatgcacagctgaaccaaagcttgcagctgatgcagctcaagtacgcttctcgtgagaatgtcttcaggacactaaacgaaaaggtgaaggatgctgaacaagcatgcagaaattatcagcaacggattagagagctggaaagtgaattaggcaatgagaaaagggtttctagggattctgctagatcctcaaggccgccacttgttcctacgagacagaagcagcctcacggaaggaacgcgccaccttcaggcccttctagatggaggctcaaagcccccacaatccacaacaaagagaacattccggtgatgatgaacaaatcaaatcctggggatgaccctaataaggctgttggcagagcaaggcgcgtttcacttactccggtgattcgacaaatccccatccagcccaagaggcggtcttcgatagcaatactaccatctgtgagagagcatctttctgtgctaaacgaaaagagagcagcgtctcgactgtcgcaagtcaacatgccaagaagatcagtcgcgacctttggtttgaatttgggtccaggaacaccccttgcaggacatggtggacctgttgacgccaccccagacggagcaaagttcaggagatttgatctaggaagcagcagcagcaagttcacgagccctcctccgaatgtcaccccgcagcggaagatgggaatggcaccggcgggaggtcctccaaacgcagccaagctgtgcttcagcatccagaaaagagttacgcctgcacatgttcgggcaaaacctggtatgggcatctttgacccagctcttcgtgagaatatggttgtggggagaaccggcaacgcgctgcgggtgctcaacggcaagaggagacagtccgttgtctaactctggtactgcaaacgtttggacgttcgaacggagctgcagtgtggtgagaatgatggtgcctttcagcttgttcttagtgaaaccgtgttaggacagaagatattcttctcagcatccgtaaatggattttgattggctcttactagttgataagaaagctatgttaacattgcccatggaagtcgttgattatatttgttcgtcacaaagaaagctatgttatggaagtcgtcgattgtatttttcgttactaagaaccgcttgctagtgcacttctaaaccatgttcacggaacacacccagattctgccgccgacataataataatgtttgttagtgatcgatcacaggttatggcaatcacat

SEQ ID NO: 208599 - DNA, 982 bp, Zea Mays
ctatgatccattccatatttccatcctccattcacgcatcacaagctggaaggcactgtgggcaataatggctctgctcacgctccagccagcgatacccttcctcctgctcctcctcctccccgccgcgtccgctgggctgcccggcggccggacactggtgttcatcctggctgggcagtccaacatgagcggccgcggcggcgccaccaacggcacctgggacggcatcgtcccgccggagtgcgcgccctcggaccgcatcgtccgtctctccccggcgcttcgctgggaggaggcgcgcgagccgctgcacgccggcgtcgacgtgggcaacgttctcggcgtcgggcccggcatgcccttcgcgcacgccgtgctcgccagcgagggcgcagccgcagagccccccgtcgtcgtcggactcgtgccgtgcgcgcagggcggcacgccgatcgccaactggtcccgggggacggagctgtacgagcggatggtgacgcgcgccagggcggccgtggccgagtgcagcggacgcggtcacctggccgccttgctttggtaccagggggaggcggacaccatgaggcgccaggatgctgagctctaccagcggcggatggagactctcgtgcgtgacgttcgctgcgacctcggccggcccgacctcctcgtcatccagtacaatggcaagttcctcggcgtggtgagggaagctcagaaggcagtgaagctcccaaatgtcaagtacgttgatgccatggggctgcccatcgcgagcgaccacacgcatctcaccacggaggctcaagtccagctcggcaacaaactagccgagtcgtatttagaaacgctgtaattttcaaataccggtatgcctaccaaaaacaaggcattcccccacgatttggaaacggacagagcaagcaatatgtacactcaaattacgatgctgcgttgagattaatattttccgtgctat

SEQ ID NO: 208600 - DNA, 2014 bp, Zea Mays
ctcaacatcatcagctcgcgttgcgtgctcggcccgcctaatcctctttctttagctcaagaccggcgactaaatttggcgccagccggcagcagggggtataagtagtcgccgccgccgtcttcctcgcacctccccgctccgctctcccttgtcgagttctcagcaccggccgatccatcctcctccgcctccctcggttcggcctctggcctgcacaccatgaactctcgcttccggagcctctggagagccatggctggggctttgcagccgccgtgccgcctcggagctgccgcgtgtagcttgctcgctaagcagcagctatagtagctgagcgagtgcgtccatcgatcggagtcgtccacctccgtctccctttgcgattcggcgtcgtgaactcgtgttcttgagcgtgggggcaaggggcagagcaacaaggagacacttcttcttcttctttacaacaaataagaaagcaacggcaatggagggagctggtctgcagtgacagtgacacgagccatggatcccgagccattcgtgcggctctcagttgggcagctcggtctgaagctccccggcgggaacgctagcaaggcggccggccggctctgcgactgcgagatccggctgggcgggttcccggtgcagaccgctccggtgccgctggtccactccccggcgttcaacctcgacccattcaccaacgcggcggttttctccctcgaggaatccgacctcaaggcgctggcggcgccggggtgcttccgggccccgcggtcgtcgtgccttgaggtcgcggtgtactacctggcccgcttcggcgcttcacgctgtggtgtcctcgcctgcgggaggaagcggctggttggcgtgttcagggtggagctcgcttcgtcggaatggcgggacggcaagcccgtgctgctgcaccatgggtgggcgggcatcggcaagggggcggccaggccggagctccacctcagggtgaagctggaggctgacccccgctacatcttccagtttgacgacgagatcgcgctcaacccgcaggttgtccagctccatggcagcatccggcagcccgtgttcagctgcaagttcatccgcgacaggcgagtgaccctttgggcggcgggcagtactggtcgagctccagcagcgaggagcaggacatggagatggtgaggcgggagaggaaggcctggaaggtggtgatccacgacctgtccggctcggccgtagccgcggcgtttatggccaccccgtttgtgccggcgccgggcggggacacggtggcacggtccaacccgggcgcctggctcatcgtgcgcgccgacaccacggggtcctcggacagttggcagccgtggggccggctggaggcgtggcgcgaggcggcggcggcggcggcgagcagcggcaaggacacggtgcgcctgcggctgcacctgctcccggaccgccacgacgactgcgtgctcgtgtcggaggcgcccctgagcagcgacaagggcggggagttcttcatcgacatggacaggcaggcgccctccgccacggcggcggagcactgcgcggcgagcctgggcgccgcgtgcgccggcggcggcttcgtcatgagctgcagggtggagggggaggcgaggagcagcaggccgttcgtgcagcttgccatgcggcatgtcacgtgcatggaggacgccgccatgttcgtcgcgctcgccgcggccgtcgacctcagcgtcaaggcgtgccgcccgttccgcaggaaaccgaacaagaaggccgcctcgccgtcgcccgaccacctcgagctcgacacctaggaacgcagaacaggaaggccccgccgactagcacccatggccgcccatggatccatctaactcgacctgtaaattcacttaatttcaagagctggactgaatcgtttgccacaatcaaaactctgttgtttgactggcctcagcagttagtacatgtttggaagtaaattaattttacagtc

SEQ ID NO: 208601 - DNA, 2062 bp, Zea Mays
atctctcatcccgtgcgacactccacagcatccatcaactcaacatcatcagctcgcgttgcgtgctcggcccgcctaatcctctttctttagctcaagaccggcgactaaatttggcgccagccggcagcagggggtataagtagtcgccgccgccgtcttcctcgcacctccccgctccgctctcccttgtcgagttctcagcaccggccgatccatcctcctccgcctccctcggttcggcctctggcctgcacaccatgaactctcgcttccggagcctctggagagccatggctggggctttgcagccgccgtgccgcctcggagctgccgcgtgtagcttgctcgctaagcagcagctatagtagctgagcgagtgcgtccatcgatcggagtcgtccacctccgtctccctttgcgattcggcgtcgtgaactcgtgttcttgagcgtgggggcaaggggcagagcaacaaggagacacttcttcttcttctttacaacaaataagaaagcaacggcaatggagggagctggtctgcagtgacagtgacacgagccatggatcccgagccattcgtgcggctctcagttgggcagctcggtctgaagctccccggcgggaacgctagcaaggcggccggccggctctgcgactgcgagatccggctgggcgggttcccggtgcagaccgctccggtgccgctggtccactccccggcgttcaacctcgacccattcaccaacgcggcggttttctccctcgaggaatccgacctcaaggcgctggcggcgccggggtgcttccgggccccgcggtcgtcgtgccttgaggtcgcggtgtactacctggcccgcttcggcgcttcacgctgtggtgtcctcgcctgcgggaggaagcggctggttggcgtgttcagggtggagctcgcttcgtcggaatggcgggacggcaagcccgtgctgctgcaccatgggtgggcgggcatcggcaagggggcggccaggccggagctccacctcagggtgaagctggaggctgacccccgctacatcttccagtttgacgacgagatcgcgctcaacccgcaggttgtccagctccatggcagcatccggcagcccgtgttcagctgcaagttcatccgcgacaggcggccatctcagagtgaccctttgggcggcgggcagtactggtcgagctccagcagcgaggagcaggacatggagatggtgaggcgggagaggaaggcctggaaggtggtgatccacgacctgtccggctcggccgtagccgcggcgtttatggccaccccgtttgtgccggcgccgggcggggacacggtggcacggtccaacccgggcgcctggctcatcgtgcgcgccgacaccacggggtcctcggacagttggcagccgtggggccggctggaggcgtggcgcgaggcggcggcggcggcggcgagcagcggcaaggacacggtgcgcctgcggctgcacctgctcccggaccgccacgacgactgcgtgctcgtgtcggaggcgcccctgagcagcgacaagggcggggagttcttcatcgacatggacaggcaggcgccctccgccacggcggcggagcactgcgcggcgagcctgggcgccgcgtgcgccggcggcggcttcgtcatgagctgcagggtggagggggaggcgaggagcagcaggccgttcgtgcagcttgccatgcggcatgtcacgtgcatggaggacgccgccatgttcgtcgcgctcgccgcggccgtcgacctcagcgtcaaggcgtgccgcccgttccgcaggaaaccgaacaagaaggccgcctcgccgtcgcccgaccacctcgagctcgacacctaggaacgcagaacaggaaggccccgccgactagcacccatggccgcccatggatccatctaactcgacctgtaaattcacttaatttcaagagctggactgaatcgtttgccacaatcaaaactctgttgtttgactggcctcagcagttagtacatgtttggaagtaaattaattttacagtc

SEQ ID NO: 208602 - DNA, 2065 bp, Zea Mays
atctctcatcccgtgcgacactccacagcatccatcaactcaacatcatcagctcgcgttgcgtgctcggcccgcctaatcctctttctttagctcaagaccggcgactaaatttggcgccagccggcagcagggggtataagtagtcgccgccgccgtcttcctcgcacctccccgctccgctctcccttgtcgagttctcagcaccggccgatccatcctcctccgcctccctcggttcggcctctggcctgcacaccatgaactctcgcttccggagcctctggagagccatggctggggctttgcagccgccgtgccgcctcggagctgccgcgtgtagcttgctcgctaagcagcagctatagtagctgagcgagtgcgtccatcgatcggagtcgtccacctccgtctccctttgcgattcggcgtcgtgaactcgtgttcttgagcgtgggggcaaggggcagagcaacaaggagacacttcttcttcttctttacaacaaataagaaagcagcaacggcaatggagggagctggtctgcagtgacagtgacacgagccatggatcccgagccattcgtgcggctctcagttgggcagctcggtctgaagctccccggcgggaacgctagcaaggcggccggccggctctgcgactgcgagatccggctgggcgggttcccggtgcagaccgctccggtgccgctggtccactccccggcgttcaacctcgacccattcaccaacgcggcggttttctccctcgaggaatccgacctcaaggcgctggcggcgccggggtgcttccgggccccgcggtcgtcgtgccttgaggtcgcggtgtactacctggcccgcttcggcgcttcacgctgtggtgtcctcgcctgcgggaggaagcggctggttggcgtgttcagggtggagctcgcttcgtcggaatggcgggacggcaagcccgtgctgctgcaccatgggtgggcgggcatcggcaagggggcggccaggccggagctccacctcagggtgaagctggaggctgacccccgctacatcttccagtttgacgacgagatcgcgctcaacccgcaggttgtccagctccatggcagcatccggcagcccgtgttcagctgcaagttcatccgcgacaggcggccatctcagagtgaccctttgggcggcgggcagtactggtcgagctccagcagcgaggagcaggacatggagatggtgaggcgggagaggaaggcctggaaggtggtgatccacgacctgtccggctcggccgtagccgcggcgtttatggccaccccgtttgtgccggcgccgggcggggacacggtggcacggtccaacccgggcgcctggctcatcgtgcgcgccgacaccacggggtcctcggacagttggcagccgtggggccggctggaggcgtggcgcgaggcggcggcggcggcggcgagcagcggcaaggacacggtgcgcctgcggctgcacctgctcccggaccgccacgacgactgcgtgctcgtgtcggaggcgcccctgagcagcgacaagggcggggagttcttcatcgacatggacaggcaggcgccctccgccacggcggcggagcactgcgcggcgagcctgggcgccgcgtgcgccggcggcggcttcgtcatgagctgcagggtggagggggaggcgaggagcagcaggccgttcgtgcagcttgccatgcggcatgtcacgtgcatggaggacgccgccatgttcgtcgcgctcgccgcggccgtcgacctcagcgtcaaggcgtgccgcccgttccgcaggaaaccgaacaagaaggccgcctcgccgtcgcccgaccacctcgagctcgacacctaggaacgcagaacaggaaggccccgccgactagcacccatggccgcccatggatccatctaactcgacctgtaaattcacttaatttcaagagctggactgaatcgtttgccacaatcaaaactctgttgtttgactggcctcagcagttagtacatgtttggaagtaaattaattttacagtc

SEQ ID NO: 208603 - DNA, 1976 bp, Zea Mays
actggaaaggccgagttttagctccggttccagaaaaaaactcggaaccagatctcaaaccacacaatccacggctgctccttcgctggacaccgagaaaccgtcaaggcgcaacgaacgaacttgcagcaaaatttcccggagaccctcgagcaaaaatctggtctggttcaaactcgccttttgcctgtgggcggccgcgttcttacgggccatgtcgcagcgcgacggcgacctcgccgccggagctcatccggaagaaggagaccgccacgccgttcgaatggatggctccgacgatgagctggaccaacctacgagtaaagcgactgagcacatcacggctatggacgtgaggaaggggaaggatatgcaagggatcccctggaacgtgatgccgactacaagggacaagtacaggcagtcacggctgcaggggaatgcatgcctgcagagaaaggccaactctactacgagtttcagcacagcacgagttgaggaatttagtgtgggcaacaacaaggcacgatgtgtatcttatgtcaaacttttctgtgcttcattggtcagcaatgacttataagaagcaagaagtcattaatcttcaaggacatgtgacaccgtgcgagaagcaccatcggaatcactacgagggtttttatcagactccagtcagtactttggcggtgaagcataacttgcttgttactggtgggtttcatggggagataatatgcaagtttctggatcgtcaaggagtaagctactgttgcaagacaacaaatgatgacgacggtattactaattctctggagatatttgagaagcctagtggttctctgcacttccttgcgtcaaacaatgattgtggacttagagactttgacatggaaaagtttcgaatatgcaaccacttccattttgcttggcctgtgaatgtaagcctgcagtgcttgttgaattttcaattttctatctaaatctagctgctgaagtcaatgctcatgttttgtcaaagagcatgtcttaaataaggacagaaacacattactgcatcctgtgttggcccctgttttaattttctgcagcatacatcgttgagcccagatggtaaacttgctgctattgtgggggacagtcctgatggacttctgattgacgctaattcaggaaagacggttcacaaactccatggccatttggattactcctttgcgtcggcatggaatccagacggccgaacattcgccacggggaaccaagacaagacgtgcagggtctgggacgtccgcaatctctccagatcagttgttgtattgggtggcaacatcggagccgtcaggtcgattcgctacacgccagacgggaagttcatggcgatgactgaacccgcggacttcatccacatcttcgatgttgagagtgggtacagcaggaagcaggagctggacttctttggtgagatcgcaggcatatcgttcagtcctgacactgaagctctctttgtcggtgtgcatgatcgcttcttcaactgctgcctcctccagttcagtcggcgacggttctactcgtaccttgattcaacactgtgagcttgtgctggtgtagacctgtgaggtcgacatcacaggctttagaagcaagaaagttgtggctatgttcataggtgttgctgtgaagaaactggagaacgatacgtttacttttgctgaacaagctgtaggtattcggcgacccatcttttctgggtgatcagagtctcaattaagattcccgctttctgttatctatcccatacttacaccgtacgactacgattagatcatcctatcctacgggcgagacgtgagtctacgtaattgattgagacctgctgagggctttgctttcacatgcatgcatatgtaatcatcgatcatggaattgctaataagctgtctgtttgaaactcagtttcagttattccttcttgttac

SEQ ID NO: 208604 - DNA, 1798 bp, Zea Mays
cttccttgtagtatttcagtgggcatttgccaccacatcgtactggaaaggccgagttttagctccggttccagaaaaaaactcggaaccagatctcaaaccacacaatccacggctgctccttcgctggacaccgagaaaccgtcaaggcgcaacgaacgaacttgcagcaaaatttcccggagaccctcgagcaaaaatctgcgcgacggcgacctcgccgccggagctcatccggaagaaggagaccgccacgccgttcgaatggatggctccgacgatgagctggaccaacctacgagtaaagcgactgagcacatcacggctatggacgtgaggaaggggaaggatatgcaagggatcccctggaacgtgatgccgactacaagggacaagtacaggcagtcacggctgcaggggtacgccaactttgagaacgtgcctaattccggaaggctttctgagaaggaatgcatgcctgcagagaaaggccaactctactacgagtttcagcacagcacgaggtcggtgaaaccgaccatccgtcatttccagttgaggaatttagtgtgggcaacaacaaggcacgatgtgtatcttatgtcaaacttttctgtgcttcattggtcagcaatgacttataagaagcaagaagtcattaatcttcaaggacatgtgacaccgtgcgagaagcaccatcggaatcactacgagggtttttatcagactccagtcagtactttggcggtgaagcataacttgcttgttactggtgggtttcatggggagataatatgcaagtttctggatcgtcaaggagtaagctactgttgcaagacaacaaatgatgacgacggtattactaattctctggagatatttgagaagcctagtggttctctgcacttccttgcgtcaaacaatgattgtggacttagagactttgacatggaaaagtttcgaatatgcaaccacttccattttgcttggcctgtgaatcatacatcgttgagcccagatggtaaacttgctgctattgtgggggacagtcctgatggacttctgattgacgctaattcaggaaagacggttcacaaactccatggccatttggattactcctttgcgtcggcatggaatccagacggccgaacattcgccacggggaaccaagacaagacgtgcagggtctgggacgtccgcaatctctccagatcagttgttgtattgggtggcaacatcggagccgtcaggtcgattcgctacacgccagacgggaagttcatggcgatgactgaacccgcggacttcatccacatcttcgatgttgagagtgggtacagcaggaagcaggagctggacttctttgttcagtcggcgacggttctactcgtaccttgattcaacactgtgagcttgtgctggtgtagacctgtgaggtcgacatcacaggctttagaagcaagaaagttgtggctatgttcataggtgttgctgtgaagaaactggagaacgatacgtttacttttgctgaacaagctgtaggtattcggcgacccatcttttctgggtgatcagagtctcaattaagattcccgctttctgttatctatcccatacttacaccgtacgactacgattagatcatcctatcctacgggcgagacgtgagtctacgtaattgattgagacctgctgagggctttgctttcacatgcatgcatatgtaatcatcgatcatggaattgctaataagctgtctgtttgaaactcagtttcagttattccttcttgttac

SEQ ID NO: 208605 - DNA, 1531 bp, Zea Mays
tctctccttgggtgaaaactctgctgcgcaagcaaaagcggaacacgaaagcggggaggaacgacagcagccatcagaagaaagctccaatctttctcgccctctcgcggttcggaggagggacccgggcgcaaagactctaaagcgcagaagcaacaccgaaagctatcatgaggacaatgggagtgaagggcctcaccctttttcacttgaaaagccatcttcagaaatacagattgggaagacagtctggaaaagagttaacggagcaatcaaaagatgcttcttaccttatggaagctcaaagtggaacaactttgtctcctagaggttctactccagatgtgaaagagagtcaagaagttaaagaagcactcagagcacaaatggaagtgcaacgaagattgcacgaacaagtggaggtccagaagcatatgcagatccgaatggaggcgaaccagaagtacatcgacacgatactagataaggcgttcaagatagtatctgagcaactgagtggcttcagcatatctgaccaagacctaccgattctcacctctgctagggccatgcttagccctgcagatcacttgagttcgtctgtcttcccccagctctccgtcagctccgttagccttcacaatcctggtcctggaggagggaaaggccttccgcatgttgccgacagccacgtgttctcccagaggccacctgaacaattcaagcgcaaatcacgttgagaagcattgctagctcgacgcagatgcatgacctgatcaagggcacactggaaaatcagaggaatttcgtctgacatgtgcacggtgcaatcgttcacccatcctcccgtagcacatctgtgaaaatcaaggttatcttggtctatttcggtacatctagactgacctttattaatatctaatgtaatgcctaagtggactagataagtaattcgcttgatgtaaactgcccagctgtaggatccagttttaaagtcctgttccacgcacttaaaacttaggggccgtctctcgggcggcttcagcagctctggctctttgtcggatccctaccaaaggccatgtcccagaacagcttctgagcaggagctcatatacggctggaagccggagcctaagggggcgtttggttacttgtatgggtgagcctggctcgtatctagtgagcctggctcagactggactggctgagtgcatgcagtatagcgtgtttggttgtgtgtatgtggccagtctggttcacaagagatgtttggttgcttgcatgagtacatggtgcatgagttaaaaaaatttaaaaaatctattaatagacactaattatatggtaaattgcttaatagatactaattacatgttaatatacactaattatatattaatcttaatcacgtaatttttttatttgaaatatatatagtatgagtggtctagtttcgttcgcaaaaatgtcaggaacgcggatatgaaatcggttcggtgattaaatcttttaattagacgatataatg

SEQ ID NO: 208606 - DNA, 3025 bp, Zea Mays
gacaagctggtcctcaagggagggggagatgtcatgggcatcatagggagcggtcactcatgtggggtcgcacttatgtgcgccaaaagcgagaggccgcagggggcgctggcagcagcgcgcgcaaggaaggcacgggcgctggcagcagcgcacgcaaggaaggcatggcaaaggaaagcgcgcacaaggaaggcatggcaaaggaaggcatggcaaaggaaagcgcgcacaaggaaggcatggcaaaggaaagcgcgtgcaaggaaggcatggcaaaggaaggtgactgatttggtggctaaattgatagacctaaatttaggggagatgatttcaattagtcacttgcctaattagtggttgcctagtttgtcaaccggtggcctatatataggcctgtacgcaggagacaaatgaaggaggaatatattatcaaaccaatctctctctctcttgcaatgactctcaagcgcctagggctgctaccctagaaccaagcctgcggcagaggggtataacctcgccggagaagacagctatcctcatggaccgaaggtccatgacagacatgtaagactcgttttggaccaaaatctgatcatggaatggccacttcatctgcgggaagtatgactcctaggtctccaataacaactccaagatcaaatcatatagacatgcttttagccggtaaaaatgcaattaatgagagtgatgatcttccacagattgtcgaacttgctgatattgcacgatgcatagcaaatactcctctggatgaagaaagtgcattatctcaaatggttacctgcatagaagatctccaagaaattgtcaactgcaggaagcatgagtctctcacagtgcagacatttggaacacgaatagaaaaactacacagggagaagtatctgcagctctgtgactcggttgatatggacaaggttgattcagcaagcaccataatggatgaggaagacaacgttgttcgtagcttgcgcgcaagtcctgtccatccaatcaaggatcgcacttcaattgatgactttgaaatcatcaaacctattagccgtggagcatttggacgtgttttcttggccaagaaaagaactacgggagacctttttgctataaaggttcttaggaaggcagatatgattcggaaaaatgctgtcgagagtatattggctgaacgtgatatattgattacagtcaggaacccttttgtggtacggtttttctattcgtttacctcacgggacaatttgtatctggtcatggagtacctgaatggaggggacctttactcattactgaggaatttagggtgcctggatgaagacgttgttcgtgtatatcttgcagaagttgtactagctttggaatatttgcactctatgcacatagtccatagggatctaaagcctgacaacttgttgatagcccatgatggacatattaagttgacagattttgggttgtccaaggttggtttgattaacaacacatatgatctgtctcgtcctgttgttagtggggcttcactgtatggagatgatgagcctcagatgaatgaattcgagcaaatggatcaccgagcacggagacaaaatcgttctgctgttggaactcctgattatttagcaccagaaatccttttggggacaggacatggttgcagtgcagattggtggtccgttggtgtcattctatttgagctcattgttggcatacctccgttcaatgcagaacacccccagacaatttttgacaatattctgaattgcaaaataccttggccgcatgtcccagaagagatgagttttgatgcacaagatttaattgacaaattattgacagaagatcctcatcaacgactaggagcaaatggcgcctcagaggttaaacaacatccatttttcaaagacattagctgggatacccttgctaggcagaaggctgccttcgttccctcctcagatagtgcatttgatactagctacttcaccagtcgctattcttggaatccatcagatggaaacatatatgaagcatacgagtttgaggattccagtgataatggaagccttagtggaagcagtagttgtgtgagcaaccgccaagatgacatgggggaggacagcgatggcctcaatgagtttgaatctagtgcaaatgtcaattattctttcagcaacttctcgttcaagaatctatcacaacttgcttccatcaattatgatatgctcaccaaaggattgaaggatgatccaccgccaagaactgaaacgtagcaatcaatctaaatttggactctcatccgagtaatcaaacagtctacaaggtgttcgcgggatgtaggtcttgtacatatcaaagtgtgaggcatggtctgttccaattgaggctgttcctacatctcgcggagccgagtacagttttgttgttaccttgttttcatgaccaattgacatgccatcatcagtgaatcacccttgaccgaattgggcagagcgctgtctttttgttcccctttgctttttttttaaaaaaaaaatcagtccattatgagccttgggtttggggagattggcccaggttactgtattcagaatacaacccctgaagatgtaggtgggttttaggaaattgtcattctagaatttattctggacacatttagctaactgaacaagccctaagctggtagcccgctggatttcctgcggccagaaatgttcacagcattcttgatggccatgggatacagcattttgctaaatgtgtccagtgtcccacagaatctgggacattataagaataggaaccgattgaggctggtgctgtttgtttcaacagagagtacgggaacggtaatgcaactagcaaacggtgataattgtcaaaggaataaaaacgctctctgtttggttcagctttgggagcgcagcatccaaatagttgccgctgagactgaaagtttggctactgtatttcaaaatattgatgactaggataaaat

SEQ ID NO: 208607 - DNA, 1300 bp, Zea Mays
aagactcgttttggaccaaaatctgatcatggaatggccacttcatctgcgggaagtatgactcctaggtctccaataacaactccaagatcaaatcatatagacatgcttttagccggtaaaaatgcaattaatgagagtgatgatcttccacagattgtcgaacttgctgatattgcacgatgcatagcaaatactcctctggatgaagaaagtgcattatctcaaatggttacctgcatagaagatctccaagaaattgtcaactgcaggaagcatgagtctctcacagtgcagacatttggaacacgaatagaaaaactacacagggagaagtatctgcagctctgtgactcggttgatatggacaaggttgattcagcaagcaccataatggatgaggaagacaacgttgttcgtagcttgcgcgcaagtcctgtccatccaatcaaggatcgcacttcaattgatgactttgaaatcatcaaacctattagccgtggagcatttggacgtgttttcttggccaagaaaagaactacgggagacctttttgctataaaggttcttaggaaggcagatatgattcggaaaaatgctgtcgagagtatattggctgaacgtgatatattgattacagtcaggaacccttttgtggtacggtttttctattcgtttacctcacgggacaatttgtatctggtcatggagtacctgaatggaggggacctttactcattactgaggaatttagggtgcctggatgaagacgttgttcgtgtatatcttgcagaagttgtactagctttggaatatttgcactctatgcacatagtccatagggatctaaagcctgacaacttgttgatagcccatgatggacatattaagttgacagattttgggttgtccaaggttggtttgattaacaacacatatgatctgtctcgtcctgttgttagtggggcttcactgtatggagatgatgagcctcagatgaatgaattcgagcaaatggatcaccgagcacggagacaaaatcgttctgctgttggaactcctgattatttagcaccagaaatccttttggggacaggacatggttgcagtgcagattggtggtccgttggtgtcattctatttgagctcattgttggcatacctccgttcaatgcagaacacccccagacaatttttgacaatattctgaattgcaaaataccttggccgcatgtcccagaagagatgagttttgatgcacaagatttaattgacaaactgttggcctcacaaactttaa

SEQ ID NO: 208608 - DNA, 2357 bp, Zea Mays
aagactcgttttggaccaaaatctgatcatggaatggccacttcatctgcgggaagtatgactcctaggtctccaataacaactccaagatcaaatcatatagacatgcttttagccggtaaaaatgcaattaatgagagtgatgatcttccacagattgtcgaacttgctgatattgcacgatgcatagcaaatactcctctggatgaagaaagtgcattatctcaaatggttacctgcatagaagatctccaagaaattgtcaactgcaggaagcatgagtctctcacagtgcagacatttggaacacgaatagaaaaactacacagggagaagtatctgcagctctgtgactcggttgatatggacaaggttgattcagcaagcaccataatggatgaggaagacaacgttgttcgtagcttgcgcgcaagtcctgtccatccaatcaaggatcgcacttcaattgatgactttgaaatcatcaaacctattagccgtggagcatttggacgtgttttcttggccaagaaaagaactacgggagacctttttgctataaaggttcttaggaaggcagatatgattcggaaaaatgctgtcgagagtatattggctgaacgtgatatattgattacagtcaggaacccttttgtggtacggtttttctattcgtttacctcacgggacaatttgtatctggtcatggagtacctgaatggaggggacctttactcattactgaggaatttagggtgcctggatgaagacgttgttcgtgtatatcttgcagaagttttgacagattttgggttgtccaaggttggtttgattaacaacacatatgatctgtctcgtcctgttgttagtggggcttcactgtatggagatgatgagcctcagatgaatgaattcgagcaaatggatcaccgagcacggagacaaaatcgttctgctgttggaactcctgattatttagcaccagaaatccttttggggacaggacatggttgcagtgcagattggtggtccgttggtgtcattctatttgagctcattgttggcatacctccgttcaatgcagaacacccccagacaatttttgacaatattctgaattgcaaaataccttggccgcatgtcccagaagagatgagttttgatgcacaagatttaattgacaaattattgacagaagatcctcatcaacgactaggagcaaatggcgcctcagaggttaaacaacatccatttttcaaagacattagctgggatacccttgctaggcagaaggctgccttcgttccctcctcagatagtgcatttgatactagctacttcaccagtcgctattcttggaatccatcagatggaaacatatatgaagcatacgagtttgaggattccagtgataatggaagccttagtggaagcagtagttgtgtgagcaaccgccaagatgacatgggggaggacagcgatggcctcaatgagtttgaatctagtgcaaatgtcaattattctttcagcaacttctcgttcaagaatctatcacaacttgcttccatcaattatgatatgctcaccaaaggattgaaggatgatccaccgccaagaactgaaacgtagcaatcaatctaaatttggactctcatccgagtaatcaaacagtctacaaggtgttcgcgggatgtaggtcttgtacatatcaaagtgtgaggcatggtctgttccaattgaggctgttcctacatctcgcggagccgagtacagttttgttgttaccttgttttcatgaccaattgacatgccatcatcagtgaatcacccttgaccgaattgggcagagcgctgtctttttgttcccctttgctttttttttaaaaaaaaaatcagtccattatgagccttgggtttggggagattggcccaggttactgtattcagaatacaacccctgaagatgtaggtgggttttaggaaattgtcattctagaatttattctggacacatttagctaactgaacaagccctaagctggtagcccgctggatttcctgcggccagaaatgttcacagcattcttgatggccatgggatacagcattttgctaaatgtgtccagtgtcccacagaatctgggacattataagaataggaaccgattgaggctggtgctgtttgtttcaacagagagtacgggaacggtaatgcaactagcaaacggtgataattgtcaaaggaataaaaacgctctctgtttggttcagctttgggagcgcagcatccaaatagttgccgctgagactgaaagtttggctactgtatttcaaaatattgatgactaggataaaat

SEQ ID NO: 208609 - DNA, 820 bp, Zea Mays
attcgttccctattgcacaagtaaatctatcacaacttgcttccatcaattatgatatgctcaccaaaggattgaaggatgatccaccgccaagaactgaaacgtagcaatcaatctaaatttggactctcatccgagtaatcaaacagtctacaaggtgttcgcgggatatcaaagtgtgaggcatggtctgttccaattgaggctgttcctacatctcgcggagccgagtacagttttgttgttaccttgttttcatgaccaattgacatgccatcatcagtgaatcacccttgaccgaattgggcagagcgctgtctttttgttcccctttgctttttttttaaaaaaaaaatcagtccattatgagccttgggtttggggagattggcccaggttactgtattcagaatacaacccctgaagatgtaggtgggttttaggaaattgtcattctagaatttattctggacacatttagctaactgaacaagccctaagctggtagcccgctggatttcctgcggccagaaatgttcacagcattcttgatggccatgggatacagcattttgctaaatgtgtccagtgtcccacagaatctgggacattataagaataggaaccgattgaggctggtgctgtttgtttcaacagagagtacgggaacggtaatgcaactagcaaacggtgataattgtcaaaggaataaaaacgctctctgtttggttcagctttgggagcgcagcatccaaatagttgccgctgagactgaaagtttggctactgtatttcaaaatattgatgactaggataaaat

SEQ ID NO: 208610 - DNA, 2086 bp, Zea Mays
cactggcgtaaacgcgcgcctcgcagccccaaagcaagaacaactttggttagtttaactgccgcatctaccattcgtccattccaccccccatctgccctcaccagagcttccccttcctcactgtggtggcttggtgggggggatccgcgcctcccccatcgctggccagctcatggcgccccccgccgccggaggatctccaatgcgccgtgaacgtcaagtgcgccgcgccgccggcgctggccgcgggggacggcgagctccggtggctgcggcggtgcgtggaggcggcagcgaagggcttcgccatcggcgcaggcctcaagggcggcctcgcgctcttctccgtcctcgtccgcatccgcagccgccgctcccccagatcgaggaaggccggagctatgaccaacgaggaggccgtggtgctcgcggtcaaggagactgtgaggtatggcttgttcttggggacctttgccggcagctacgtctccgtcgatgagtacatcgccgccgtctggggacgtaagagaacagcaaggtggaggtcatttttagctgggttgattgctggtccttctatgctcctgacaggaccaggaactcagcatactagcttggctatatacattctgatgcgtgcagcagtgcttgcatcccgttgtggaataaagagcaagcgttttggaaagatctgtaaacctttgacttggtcacatggtgatgtcttccttatgtgcctctcatctgcacaaattttgtcagcatacattttaaagcaggacagtttgccatcatcatataaatcatttctaaacaagcatggtggaaaagatcttactattttgcaagattgtgcatggtaaccagtcatgtacaggacatgtcttttcattcttgttacaagcatatggaagagcagttcctgtatatgttccagtctacttagtccctgcacttgtagttcataggcagcatctcatgaaaaggccttactcaattatagggaagagttttctaggagtagcaagatctagtctgtttctctcagtatactgtgcatctgcatgggcttggacctgcctgctttttaggatcttccggagagccaatacccctcttgtcatccttggcacgtttccaacaggtctggctttgctcatcgagaagaagagcaggaggattgagatatccctgtactgtcttgccagagctatcgagagttttttcacatggatgaccgatgcaggactctgccctccaatacttcagataaagcgagctgatgtggttgtgttcagcatagctacctctatcattatgcactgctatgcgcaggaaagagaagtcttccggtccaagtacctgaatgtgctggactgggtatttggtgtgccgccaccacccgacagtgaggataagaactgctatctaccagatgaagccaagaaatgccagtgacatactggcttgtagagttcattgcatgatttttgtatggtcacccatgtgatcctagcgcgagactagacccattagagggtttagtgaacgaaccttgtacaggactcttcggaaaatcgggactttagtggatatagcaagatagattttttaattaattgatttgtccaaacgatgccctggtcattaaatgaccatatgtggttgtaacttatgacctttattgttgttgttgtcatgcgaatataacttatggtccttgaaattgtttaaatggaatttctcattcttttgttttcttatagaccgttctggctgaagaacttggagatggagttcagagcttgcacaattgaccacatctcccgcccatagactcactttaccaagccatctccagcaggtcatgtaaatgactgtttataccgtttgcagagtgaagtttgaaataaggagtatgatatggagtatgatggagatagtctacgattttcttaattagagatgagggttaagggtagcaatgggctctaaaatttatactggcaatttaaggattgaactctatttatgtacatttttaactaaaattaattaaggactcgaatgaatcgtggatcca

SEQ ID NO: 208611 - DNA, 3320 bp, Zea Mays
cgtccttctccttgcggcggccgcgggcggcgcggccagtcggcggccacccgcccccatctcctactttagcctcccaacctcaccgccgctgctcgcctctcccccgcccccttccccactccgccccgtatttcttctccttggcgctcaggaggacccctcaatccacctggtgggatctgatcgcaatcggatccctctcttccgccgcggccgcctctccggggaggagccccgggctcgaagagacggaggcgagggtagacgacggaggcgaggaggacgacgaggcggaggaggggaagcccatgccggccgccggttcccgccgattcactcgcgtcttcatgcccaaggcccccaagccgccgcaatcccaggaccaggccgaccgcgccacccgggtccttcgctccggtaagcgcctagccgccgacaggatccgctgggacgccaaggaggccgcagcctttcacgtcgacatcaaccacggccacgtccagaagcgccaaaaagaggattttcccaaaccgggattgccacctctgacgaagtccttcggtatcgtgtacagaagaaaacggcgccgccggaggcaccccaccgctgaggttgtccccgaggacgaggacggcatcaggaggtttgggatagtatacaccaggaagaagggcaagcgatccaaggtcagccctctcctgctcccgcaagagccagaggccccctgtgacctcgccgctgcgattccatgctcctcctcccgggagtttgcttcacgaactggcttcttggatgcccatttctcggccctggtagatggtgtctccactcactctggggttcagacgctcgttgtccttgttgatacgtcttgctctgggagctctcaccggctccttggatttcttctacccgtgctgtggtggatgcgccacagtaggcagcggggaaagttccagaaccttgccactttcattttgtctgctggtgtggcggttgcgtttgcatcccacggggtgcactttgtcaagctccagagtgcctctgcattgttacataggcctcttgcgcattgtgggtggtgtgcgcttcatggttccacgaaatctgaaccacttttctggctgctggttgggggatctgaagaaatctatcctcacactcctttgtatgtggattctggggctcagagcagtggttttgccactacgaacatggacagcaatgaaccttgcagagtggttccaaactacatgccccttgaacagggtgctggtctagtggttcatggtctgaggctaaagaagcatcaaaggcggaggagaactatgaggcatccccaaaattggcggtgtcttatagcaagattaccttacaatggaattgggatgaagcagagcacgtctgccatgcaaacaggagtaaagctgcggtcaagcaggcaagaatctcctgtggagcctgtccaacctaaagcagcattaggaatttctcttgatttgcttgaaaacatggacgaaagtgatgtttcaactcccatgggatcaactaggagaaagagatctttgaagagccctgttgagagaatgaatgaaaagctggccttggctgaggtgagacaggacatagattctgttcacagcaaagcaaaccttttagtttttcaagctgataggtgctggagggaggaaggtgccgaagttatgctagaactatcagaaaccaataagtggtgtatagttgtgaagatacaaggtgttactaggtacttgcttaaaccttcagatatgaggtcatatgtcattaatcgtcatactcaagcctacatgtggacagttgatgatgcatggaagcttgagttcactgataggtgggactggctgttattcaaagagttgcatgttgtgggctgtgagcgtaattctcagggaaaggcaatcccaattcctggggtacatgaagtttctggtgagatggaagggattgttacagatcctttcttacgccctgtgccagactatatcaggatggtggatgatgaagttgggcgagctctctcaagggattctatttatgacatggactcagaagatgaacaatggctcattcagttgaaccattcagattctgatccaaacagctctcaaaggaatcatatctcttacgaagactttgaagtgttaataagcatatttgaaaaggatgcctacaacaatccccaagggaaaaatgatttgagcgagcttctttccagatatcctgctttactaaaggatgataacgtgcatgctgtgtatgggtattggacgagtaagaggtccaagagagctgcaccattgctaagggtatttcaggtaattttgtggggtttgtcatacccatttccatgctcatcgatactttgttatatcgtttcccttttctactgtctagccttgtttacaccatctaactgataccagttacctaataccaaagattaattctttttacagctattccctgttgtttctctttttgtcaagttttcatttattgtatattatctaattgatagtgtttaaatcttagggcgcacccataaggcgaggacatctaccacaaaagtctgccatgaagcgaaagagatctttcaagagacaaaaaagccgagctggccgtggaaagcatgaagctttattgcaagacaatgctgaagatgaggcagctttgcagagagttgcccaagctgatcgtgcagcaaaacgggctctagaaacagctattcaactgcgcaacagagcccagtctctcatgacaaacgcagagctcgcagcatacaaatccatcatggctctcaggatcgctgaggctgctaggatatctgactcttcccgagatattgtttgtacaatcctcgactaaagatggatatgggctgatcgatttgtgtggagggcatggggaatactctttttttttctttggttgcatcattgcccatgatgttggcttttcgacaagctgtggggctattttttcgccctcccctcgggttgtcaactttgtcaagccaattttgaggtggaatgcttgaactgaaaactgtaattccttgtataaattaaagtagctagctaggttctgtatcttatgggatctgatatgtagaaatgatgaaaggaaaaggtaaaaaaaatgcatgagatgaagcgaaatcaagcatctgtttgcatcctttttgtgtgtgtgtgtgtgtctatatatatatatatatatatatatatatatatatatatatatataagcaaaataaagcttatatttgtattggataa

SEQ ID NO: 208612 - DNA, 781 bp, Zea Mays
cttttctttccccttttttctgatagaaactggtggtcatatgcaagtaggcatctggagttattccccaatgattgcttgatggaaagaattttgtagagcagtggctttcttctctccagaactaataccgtccgacctgtcctagctaccctgtaaatagtatcactctgttttgttctactacgtttgtcctagtcgcagaatgtatcgatgaaggaagacatggaaaagccctaaaaaaagaaggaaatctaaaaagaaaaatgaggagcagtgggattctgaagcggcaccaaatgggtatgtccttcctgaggtgttcccagaatcccaggctattctactcttgcaaagcaatgcgaaagctgaactacacaaactgcacgccatcaaaaatgattttgccgtcctgatatgtgcggagtgctaacctgatgattgataacacgtagagatgaactgctattccattgttaatttgtcccacttgctcgtggacctcgaattctactgcatgtacattctgttcttgcagtgtatatatatatagtcttgcccagagctgcagtggcgtgattgttcagtctgcctgtatatagtgttcttgcagtgtatatagccttgcgcagagctgcagttgcgtgatttagtgtgtggtgcgtgtgtcctattcttgtacatgggaattgtattctgatgaatgaatctatgaatgaatctatctatctgctgtatacaaattttgtgacaatgtgagctcaattctgctgagtcttcc

SEQ ID NO: 208613 - DNA, 1856 bp, Zea Mays
cgtcgccgcaaatcgggatcttcctgtggctctggcatcgatggtggcagttctggtactcggcctcgcctgtgcagaggcggagccacagtgcacgcggcgccgcccgcccgcgccgccgcggccgcacagcgtgacgatcaccgagttcggggccgttggtgacggcgtcaccctcaacaccgtgtccttccagaacgccgtcttctacctgcgctccttcgccgacaagggcggcgcgcagctgtacattcccaggggccggtggctcaccggcagtttcaatctcaccagccaccttaccctcttcctggagagtggcgctgtcatcgttggcacgcaggacgtttcacagtggcctgttgtcgaacctttgccatcatatggacgaggaatggaccttccaggttcgaggcatcgaagcttaataaacgggcagaatctagttgatgttgtaattacgggaaacaatggaacaatcgatggccagggttctacatggtggaactggtttcgttcgaataagttgaactatagtcgccctcatcttgtggagtttgtggactctgagcaaatcgtcatttcgaacataacatttttaaattcccctgcttggagtatacatccagtgtattgcagcaatgtagtggtccatagtgtcacaattcagacttcattggatgctccacttaatcatggaatcgttccagattcatgctcaaatatgtgcatcgaggacagcagtatcagtgttagccacgacgccatatcactaaaaagcgggtgggacaagcaaggcattgctttcgggaggccaacctcagacatccacataagcagactggatctgcagtcctcactgggcgccgctctcgcgttcgggagcgagatgtcgggcgggatctcggacatccatgcggaccgcctcctcatccactcttcgtccagaggcgtcttcttcaagaccgcgccgggacgcggaggctatatcagagacaccgtgatctcagacgtccagatggaagacgtcgacgtcgccatcgcattcaccggtgactggccaagccacccagatgaccagttcgacccggccgcgctcccggtggtcagccacatcaccctgaagaacatgactggaacaagaatctcggtcgctggcgttttgtcaggaatcgccggcgacccgttcaccgacatctgcctctccaacatcaacttctcactggccgattcggccagtcccacctcccactggtcttgctccaacgtctccggatactccgagctggtcttccccgagccttgcctggatctgcagacccaatcctcagacgcttccgtctgctccaccctccctagcttccacgccgccgccattgcagcagcgtaaatgcacagagagtacaaagtgtccatcctttttcctgttcccggtcccctgtacacttcagaggatctctcaagccgccttttcctcccccgacaattctttgaagctataggcgcgcccctgtcgttgaagaaaagaatcgttcaccgtttttctccggccgtcggcttcgagggctcagctgcatcgcctttcttgcgggaggcaagcctggcggcggacggtcgacatcgagctgttaatttgcttgtacagttatgatttcttcattcaatctgtaagaaggaatttttgtggtagtagagggttgagtcgagtccagagagttgcttcatacgattgtcgatttggtgaataaaacacatgatgaattcatgatccagtggctctgtatacatcctgtcatccttgtgggtacatccatccatgatccatccaatctaacaaacaaccagtacaccaacac

SEQ ID NO: 208614 - DNA, 1780 bp, Zea Mays
gccaaccggcaaccgccatccgattcacgtagtttgatcttaaccgtcggattaagattttgacttgacgaaacggatcggttggacaggccgaaaccgcgacgtccacttcggggcatctgtgtcttttgggtttggcccatttcttcgcttccttccgcaaccgcaaccgtgcgttcctcccccgttccaacccccgacaccccccaatcgcaacagtttcactgcgccacagtacaaatcctgtctcgcaccgccccagccggccagaacagcgacaggcccctcgcgccgatcgccgggcaatgggagctgggcgggggcggtgatgggcgcggcgggctccaggttggagaaggcgctgggcgagcagttccccgagggcgagcgctacttcggcctcgagaacttcggaaacacctgctactgcaacagcgtgctgcaggcactttatttttgtgttcctttccgtgatcaattgctggagtactatgcaaacaataaaaacaccggagatgttgaagagaacatgctaacctgcctggctgatctgttctctcagtagccagaagaagaaaacaggggttattgctcctaagcgttttatacaacgattgaagaaacaaaatgagattttccgcagctatatgcatcaggatgctcatgagtttctgaattttttactgaatgagctagttgacattctagagaaagaacataatgctgcaagagagtctcttcaaaatctctcactccaaaagaattcaaatggccctattgatggccaacccaatggtagtcacaaagaattagctgtcacatgggttcataaatgcttccagggaatattgactaatgaaacaaggtgtctgagatgtgaaactgtgactgatagagatgaaacattttttgacctgagcctggacatcgaacagaatagttcactcaccagctgtcttaagaacttcagctcaacagagactttgaatgcagaggacaagttcttctgtgacaaatgctgcagtttgcaggaagcacaaaaaaggatgaaaataaaaaaaccaccaaacattctagtaattcatctcaagcggttcaagtatattgagcagcttcagcgctacaaaaaactatcatacagagtggttttcccactggagcttaaacttcttaatacagttgataattcggacttggaatactcccttttcgctgtggtagttcatgttggaagtgggccaaaccatggccactatatcagtttggttaagagccacaatcattggttattctttgatgacgagaacgttgagatgactgatgagtccatggtacaggcattctttggctcaccgcaggagttcagtggtaatactgataatggctacatactcttctatgaaagccttgctgaaagaagttgatgtccttctcataccatgtgattagttatacactttcctttcccttccatttctgctggggatatatagaatattcagtgaaaaccagaataagctgaatgagaggccttcagcttcagttggtatggtacgatcaacgcttggcaataaaacaagttacctggaggggctataggctgactagtttgtagttcctactttatctgtttttatgcatatacaggttgtatcaattcctgaataatgtttgttgaagacctttattatcatgtaaagagattctatctaggaagccttttttggattcgagtaaaaaaattgtttcttaaataaatagctcatgccgatcttcattc

SEQ ID NO: 208615 - DNA, 1886 bp, Zea Mays
attgactcgaccactaccatcttggacgtccagggtgtgtttgattgttattgctttcttcaggggtttaagaatttctccaagactgccagagaacttgtgcaccggatgcagaagattgatagcgactattatcccgagacactccaccaaatgtttgttgtgaacgctgggagtggatttaagtggatctggaacagcgtgaagggcttccttgacccaaagacttcatccaagattcatgtgcttggttcgaactaccagagcaggcttcttgaagtaatggattcgagtgagctgccagaattccttggcggttcatgcacatgtagtgacaagggtggttgtcttggatcgaacaaagggccgtggaatgatccttatatattgaagctgatccacaatttggaagctggatgcgcgagggaaatcaaacctgtttctgagggggaagaaagaaacagctcatcctttcggttggaacagatgaaatggcagggcttgctaagtgatacatcaaatgctgaatctggatctgatgttgatgattttggtgcatcatttgttcataaagtttctgactatggttgcttgactccagttcatgaggaagtaaagggcacagatcgtgtgacatacttcagctatgatgatcaaagccacccggatatggctcctgaatcttaccatggagcgcgacgagctactggaatggagcaccacaaaccaatggctgatttcagccaatattctgccaatagaaggcctggggacagtgctcttaacgtcaatggtacggccgctcaaagcggctgggaaaacgtggtgaagctagtggttacaactttggtcaagctcttctacttcatccggcttttcctctccacagccgagaggaggctcgagagcatccatcgccctgctccaccagcggccccagcagcggcagaggagccaagacctcgcgccatcagtgatgaagaggtgtgcgcctgcctgcagcgccttgacaatcttgagtcgatgtgcagtcacctcgccgccaaaccgccgcagatcccagaggacaaggaactcattctgttgagctcgttcgagcggatcagatccgttgaggctgacctcgagaggaccaaaagagtattgaatgcgaccgtggtgaagcagaaggcactggtggagactctggaatccgtacaggagtcgtcgtctagagtcaagaagaggatgttctgttcataggacattgagccgagctgagcaccagcagatcccaggaaccatgccatctgcgtcgtcattaaccaacaaactgtgaagctgacgtgcgaagctgccagcagccggagcggagccgccattttgacctcgtcgcgaccacccacttcgtcagccctccgaggaggatgaaccagcctacaccaaaatggaagagaagaccgtagcacccatgtcccttcctttcattcccactcgtttttgtagcctccgtacggttgtatttgttccctgccttccggcgctcccgttttttgattggtgaattctctgctccggccggccgccgagcgccatgccaagtgctgtgttacatcttcttttccttggtgccgtccgaatggctggagtcgttcttctgtatactgatgagtacagagtagtgacccccgcggcaggagctgagctggggagaagcacggtggcgagcttggtctggctgcagctcctgtgctgtcgtctgtacatggcacagactgcttctggtggccctgctaatacagattgctatgaaatggcctgtttgggttctgtgctgggatttgtcgctggatggattggtttaggccacctccccggctgacggcattgctgaacgtatggtgccc

SEQ ID NO: 208616 - DNA, 1868 bp, Zea Mays
gcacgaagcgatgaacgcactctgacggtcttgccactacaaataagccgcaccgcatttcggaaggccacgcgaccgccacctccccgaagctgccgcgaccgatcgagcgaagcgtcgctccccgcgccgccgccaaaaccctagcttctcctactccatggccactgtctcgctcaccccgcaggctgtcttctccacggagtccggtggcgccctggcctctgctaccatcctccgctttccgccaaactttgtccgccagcttagcaccaaggcacgccgcaactgcagcaacatcggcgtcgcgcagatcgtcgccgccgcgtggtccgactgccccgccgctcgcccccacttaggcggcggcggcggaggtcagcgcaattcccaacgctaaggttgcgcaaccgtccgccgtcgtcttggccgagcgtaacctgctcggctccgacgccagcctcgccgtccacgcgggggagaggctgggaagaaggatcgccacggatgcgatcaccacaccggtagtgaacacgtcggcctactggttcaacaactcgcaagagctaatcgactttaaggaggggaggcatgctagcttcgagtatgggaggtatgggaacccgaccacggaggcattagagaagaagatgagcgcactggagaaagcagagtccacagtgttcgtggcatcggggatgtatgcagctgtggctatgctcagtgcacttgttccggctggtgggcacattgtgaccaccacggattgctaccggaaaacaaggatttacatggaaactgagctccccaagaggggaatttcgatgactgtcattaggcctgctgacatggatgctctacaaaatgcgttggacaacaataatgtatctcttttcttcacggagactcccacaaatccatttctcagatgcattgatattgaacatgtatcaaatatgtgccatagcaagggagcgttgctttgtatcgacagtacttttgcctcccctatcaatcagaaggcactgactttaggcgctgacctagttattcattctgcaacaaagtacattgctggacacaacgatgttattggaggatgcgtcagtggcagagatgagttggtttccaaagtccgtatttatcaccatgtggttggtggtgttctaaacccgaatgctgcgtaccttatccttcgaggcatgaaaacacttcatctccgtgtgcaatgtcagaataacactgctcttcggatggcccagtttttagaggaacatctaaagattgcccgtgtctactatcctggcttgcctagccaccctgaacatcacattgccaagagtcaaatgactggctttggtggtgtggttagttttgaggttgctggagactttgatgccacaaggaaattcatcgattctgttaagataccctatcatgccccttctttcggaggctgtgagagcataattgatcagcctgctatcatgtcctactgggattcaaaggagcagagggacatctatgggatcaaggacaacctgatcaggttcagcattggagtggaggattttgaggaccttaagaatgatcttgttcaggccctcgagaagatataagctccaatccatttgcattaataaagttatgaggtgatggttgtctggatcttgtagagatttgtgatgatacatgagctgttgactgcgattaagttctcttgtgcttattttattctttgaattcaataagctgtggttgctgcatcttgcatgtagtgttggacttaattttacttgtcaaattacaatagtttggtcccataataagaaaaaagtacaaatgagaagcattataatatgtcgaag

SEQ ID NO: 208617 - DNA, 2418 bp, Zea Mays
  misc_feature (2417)..(2418): n is a, c, g, or t
caaaccaatcaggcaatcgtgcccagttccgcttcccctcgccatttcgccccgcctcccgcccctactccctacaccttcaccgctgtcgggggaggcggctcgccgtgacatcgacctcaccccacccccagcgtagcatcccgccactccatcgcactgtccatggaggatgacgagtacgaggaggggatggagatgggctacggcgggcatcaccagcacggcggcggccacgcggggtacggcgcggaggaggacgacgaggtggggtacggcggcgggggcggggaagagatggatgaggatgcggacggggacgctgagcagcaggaggatatcactcaggacgacgcctgggccgtcatatccgcctacttcgaggagaagggcctcgtgcgccagcagctcgattccttcgacgagttcatccagaacaccatgcaggagattgttgatgagtccgccgacatcgagatccgccccgagtcgcagcacaaccctggccgccaggccgaatttgccgagactctgcacaggatcagctttggtcaaatctatctcagcaagccaatgatgactgaagccgatggagagacagctactttatttccaaaatcagcaaggctcaggaacttgacatactctgcaccactgtatgttgatgtgtcatacagagtaatgaagaaaggacatgactgtgaggaagttacagagactgcagagtatccaaaagtgtttattgggaaggttccaatcatgttgcgctctagttactgcacactgtatcaacaatctgagaaggatctcactgaacttggggagtgtccttatgaccaaggtggttatttcattatcaatggaagcgaaaaggttcttattgcccaggagaagatgagcactaaccatgtctatgtttttaagaagaggcagcctaataaatttgcatatgtggctgaagtccgttccatggctgagaaccagaacagaccagccagtggcatgtttgtacggatgctttcacgagcaggagcaaaagggggatcatctggtcaatatatccgtgctactctaccttatattcgtgcggacattcccattatcattgtatttcgagcattaggatttgttgctgacaaggatatactggagcatatatgttatgacttttctgatacacaaatgatggaattgctacgcccatccctggaggaagcttttgtcattcaaaatcaacaggttgctctagactacattggaaaacgtggcgcaacagttggtgtcactcgagaaaagagaattaaatatgcaaaagaaatacttcaaaaggaaatgttgcctcatgttggtgttggggaattctgtgaaactaagaaggcatactattttggtcgaagagctgaggatgaccgagatcattatggaaacaaaagactagatcttgctggtccactgcttggagggctgtttagaatgcttttcaggaagttaacaagggatgtgagatcttacgtgcaaaagtgtgtagataatggaaaggaagttaatttgcaatttgctatcaaagcaaaaactgttaccagtggcttgaagtactcacttgctactggaaactggggacaggctaaccaagctggaaccagagcaggggtttctcaggtgcttaatcgcctgacctatgcttctaccctttcacatctccggaggctgaactctcccattgggcgtgaaggaaaattggcaaaaccccgccagttgcataattcacattggggaatgatgtgtcctgctgaaacaccagaaggacaagcttgtggcttggtgaaaaatcttgccttgatggtatatatcacggttggttctgctgcaaatccaattttggagtttttggaggagtggggcacagaaaattttgaggagatatcaccagctgtcattccacaagctgctaaaatttttgtcaatggttgttgggttggaattcatagaaaccctgacctgttggttaagactcttaggcgtttaagaagacagattgatgtcaacactgaagttggtgtggttcgtgatatccgtcttaaagaacttcgactttacacggattatggacgctgcagtcgtccattatttattgttgagggccagaggctgctcatcaagaaggcgcacatccgagccttgcaacaaagggagactcctgatgaaggctggcatgaattggtctcaaaaggatatatagagtatatagatactgaagaagaggagactaccatgatctccatgaccataaatgaccttcaaaatgcaaggcacaacccagaagaggcttactctgaaacttacacacattgtgagattcatccttcattgatacttggtgtttgtgcgtcgattattccgtttcctgaccacaaccnn

SEQ ID NO: 208618 - DNA, 2450 bp, Zea Mays
  misc_feature (2449)..(2450): n is a, c, g, or t
aaaaccccaaaccaatcaggcaatcgtgcccagttccgcttcccctcgccatttcgccccgcctcccgcccctactccctacaccttcaccgctgtcgggggaggcggctcgccgtgacatcgacctcaccccacccccagcgtagcatcccgccactccatcgcactgtccatggaggatgacgagtacgaggaggggatggagatgggctacggcgggcatcaccagcacggcggcggccacgcggggtacggcgcggaggaggacgacgaggtggggtacggcggcgggggcggggaagagatggatgaggatgcggacggggacgctgagcagcaggaggatatcactcaggacgacgcctgggccgtcatatccgcctacttcgaggagaagggcctcgtgcgccagcagctcgattccttcgacgagttcatccagaacaccatgcaggagattgttgatgagtccgccgacatcgagatccgccccgagtcgcagcacaaccctggccgccaggccgaatttgccgaggatcagctttggtcaaatctatctcagcaagccaatgatgactgaagccgatggagagacagctactttatttccaaaatcagcaaggctcaggaacttgacatactctgcaccactgtatgttgatgtgtcatacagagtaatgaagaaaggacatgactgtgaggaagttacagagactgcagagtatccaaaagtgtttattgggaaggttccaatcatgttgcgctctagttactgcacactgtatcaacaatctgagaaggatctcactgaacttggggagtgtccttatgaccaaggtggttatttcattatcaatggaagcgaaaaggttcttattgcccaggagaagatgagcactaaccatgtctatgtttttaagaagaggcagcctaataaatttgcatatgtggctgaagtccgttccatggctgagaaccagaacagaccagccagtggcatgtttgtacggatgctttcacgagcaggagcaaaagggggatcatctggtcaatatatccgtgctactctaccttatattcgtgcggacattcccattatcattgtatttcgagcattaggatttgttgctgacaaggatatactggagcatatatgttatgacttttctgatacacaaatgatggaattgctacgcccatccctggaggaagcttttgtcattcaaaatcaacaggttgctctagactacattggaaaacgtggcgcaacagttggtgtcactcgagaaaagagaattaaatatgcaaaagaaatacttcaaaaggaaatgttgcctcatgttggtgttggggaattctgtgaaactaagaaggcatactattttgggtatattattcaccgcctactgatgtgtgctcttagtcgaagagctgaggatgaccgagatcattatggaaacaaaagactagatcttgctggtccactgcttggagggctgtttagaatgcttttcaggaagttaacaagggatgtgagatcttacgtgcaaaagtgtgtagataatggaaaggaagttaatttgcaatttgctatcaaagcaaaaactgttaccagtggcttgaagtactcacttgctactggaaactggggacaggctaaccaagctggaaccagagcaggggtttctcaggtgcttaatcgcctgacctatgcttctaccctttcacatctccggaggctgaactctcccattgggcgtgaaggaaaattggcaaaaccccgccagttgcataattcacattggggaatgatgtgtcctgctgaaacaccagaaggacaagcttgtggcttggtgaaaaatcttgccttgatggtatatatcacggttggttctgctgcaaatccaattttggagtttttggaggagtggggcacagaaaattttgaggagatatcaccagctgtcattccacaagctgctaaaatttttgtcaatggttgttgggttggaattcatagaaaccctgacctgttggttaagactcttaggcgtttaagaagacagattgatgtcaacactgaagttggtgtggttcgtgatatccgtcttaaagaacttcgactttacacggattatggacgctgcagtcgtccattatttattgttgagggccagaggctgctcatcaagaaggcgcacatccgagccttgcaacaaagggagactcctgatgaaggctggcatgaattggtctcaaaaggatatatagagtatatagatactgaagaagaggagactaccatgatctccatgaccataaatgaccttcaaaatgcaaggcacaacccagaagaggcttactctgaaacttacacacattgtgagattcatccttcattgatacttggtgtttgtgcgtcgattattccgtttcctgaccacaaccnn

SEQ ID NO: 208619 - DNA, 2419 bp, Zea Mays
ccgggagagggaagcgaaatgcgaaaggcagccgaggccgcgagccgacgcacgcggctcgttgcttcctccatcccctttcctcacgccgacgccaaagtataccaacgaattcctcctcgggctcccacctaatcgtgttcgccgcctgcctctcccaaaccctagcaacccacgatcgaacccaaatccgctcctcccacccgaggaattatgcgaaattccccgagatcctagcccagcactagcagatcgatccatcgcttgcccacctgccggccaccaacccttgtagtctcagtcaatctgtagattgagactacgatgagcctgtcaccgctcgactcctcctccccgccggccgcggctgcggctgctgctacggaggtgcccctcgccccgggcttccgcttccaccccaccgacgaggagctcgtctcctactacctccgccgccgcgtcctcggccgccgcctccgcgtcgacgccatcgccgagatcgacctctaccgcctcgagccctgggacctcccctccctctcccgcatccgcagccgcgacgcccagtggtacttcttcgcccgtctcgaccgcaaggtcgccggcgctggcgccgggggccggggcggtcccggcaacaggaccaaccgcgctacgccgagggggtactggaagaccacgggcaaggaccgcgaggtgcaccaccgcggcaagcccgtcgggatgaagaagacgctcgtcttccacgccgggagggcgcctaagggcgagaggaccaactgggtcatgcacgagtaccgcctcctcgatgcagacggacctcaggatctgcatgtggtttgtagaatcttccagaagcatgggtctggaccacagaacggtgcgcagtatggtgcaccatacatggaagaggaatgggaagaggatgatgatgctattgagaatggttctacccacgatgcatctggtcaaattgctgcaaccacctgtgctgtagatgaggagtcaaatgaggacgatgagaatgcatattgtgaaacaaacagacctgctcgagtagaaccatctcatctgccttcggtccatgaaatgctcaatccaccagagatggctcctctccaagggaatgataccaatggggttgcatattccaggcagcagcaagctgatggcttcccagcacctcgccaagttgatgaaagtatggtattttatgatgccccatctgattacaacttggtggatggaaaagatgacttcgtatatctgaacgacattctgaatgagccacttggaaatgaatcgctctttgatggagatgatatgatggcttactttgatgccacagagaatgatttcaagtatgacattttgggctctggtcagggtttggattatccacttgcagacatgccgttgaactttgcccaaaagagtgacaaggaagacaagtttacattcgaagggatctctgaggttccggaagcaaatcctcagtacggtgcatcctcatctggttcacatgaagatctgtatactgatactgaatttctaggtgtaccaacagatgacactgctgataaaacttacggaaatcgcctggccagcatgttaggctctatcccagctccacctgcaatggcctcagaattcccgccgtcaacagggaaatctgctgggatgctttcggctgtcagctcgagctcaattcgttttactgctggtatcatccaacttgatggcctcactttcagcagcggctccggtcagtggcccttgcagaagaatggagacttgagtttgcttgtctcttttgctgtggagggcgacgtggcatccaagctccctgttggtcttgggcgtgctactcggattagcaccgttcccatggtgctgcgcagtggtttttaccttttctttatgtcggccatgattctcttgtttagctacaaagtagggtcgtgtatctacagcaggtaagttgaagttgatggcgcctcttgtccggccagacctgtgggctgtttattttagttcaacacgtggatcattccctcagtgatgggggtatagcagtcgttcgacaccttttttacacatttaccattttgacctgtcaaaacatacagcaataaactttcgaactggtggtggtgatcatgccgggaccatgttctcgtcagggaaagcagtgcactgtgaatttggtgctctgctcttattattgtaaccaaaattaactgcaatatgttatattctgtcctgtagaggaaaagctattttatctggttattgtaaccaagattataccttggtgggttgctgtcaaagaaacaatggaaatatgattattatcaggccgtgttatttgctccaggccagataattaccatttgatcaacataaacctcaggtctca

SEQ ID NO: 208620 - DNA, 4729 bp, Zea Mays
ccgctgaccagctgtgcgcctgcctcataattgatagacacaggtcatctcatcaaccctgtaggcctctcccttcttctgctctccctcccttctcaaggcttcctcctgcagtccagctcaccaggaccaggaggaacaaagaagttgcatcgaacacagctgagttcctccctcttccctgaaatgcgcccggcagctagaaaggagcagctagcgggcgggctgcccatacgtcgttgagatagatacctaagcgggccgcttccgctgcacagccacaggcatggggtgcggggcgtcgagccacaaggacgccggggcgcgccggagacggcctgggagcgtcggcgacgtggtcgttttcctcccgggcctccgggtgccgagggccgtcgacttcgcccaggcgctcggcggctgcctggccagggctatagtcgagcggctgtcggctctgaggtcgcgggtcgtcgagatggcaatgcaagaatcggcggcggcgctcaagcccaggcggaaggcggctgcacggcacgggtctagtacagccaatcttctacaggccctcgaagactacttgccagttctgctgggactagcacaacaaggtagcgtcttgagacacaaagtgcagttcacctggagtaaccaagaggataatgctgaggagacagccatttcagatgtctggtacgaggtgctgtccgtgctgcacttgatggccatggtctgcttgctgcaggccaacaccctgcttctcccaaggtcatacggcgatggctacgccccaagagtttctgaagagagtagacgggccactgttgatgtcttcttgaaggcagctggatacctagactgcgcaattcgtcatgtacttccgaagatgccactggaactaaggagacaacttccagtcgacctggctgaaggaaatctcaaagctctaagcctgcaagcctttgggtcagggggttgacatgcagctcggcttggctattgatagtccaaaggccactttagcagtcaaaaggcgcttagcctgtgagatggtcaaatattggcaacaagttcaagagagcattccagagcttccagtctctgatggatggggaaaaaagcaccggctatttgtaaagtggaagtatgttgaagccaaggctgcagcatactatttccacggtttgattcttgacgagggaaataccgagaaatcccatggaatggcaatagctgcactacaagcttcagaagaatttctgaaagaaagcaaaatggtttcggaagccttccatgcaactcctccaacatcgaggagtccgaatgcattcggaacagcaaaatatctgtttgacaagatcccaagagatgcttccagcaaggtccgaatcaaacaggacctgtatactcaagaaaaggtcattggagcaccacccccattaccagattttgcattggcgctaacacctgaagattatgatcttcctccactagatccactttggaacaaagaagatacacaccattaagtgtctatacagcagattggttgcttctggcaaaaaattggctctggagagaaaggaggaccaagatctaccatgtcaaaggtcgaacatggtaacaaatgaagtgtacaaaatattttcaaacaaaattacatgtcaacaaaattaagcaaggcttgaagataatctgaagagctctgtacaggcaattttcttctgacaagggaaatgatatgtcaaagggttcattgatcattgtcgatcctgattcctgatgcttttattttttcaacaacagattttcagcattcgaaatggaactggaatcagcctctgatcgaagtggaaacctttttttagtcgtaaacatttacattggcaccttaaaatatactctggaacaatcagtctcagctgaacagtttataatacatgaactagctaaagtacagacatgcccaaaccttaggcaccacagtacattctgaatgacttttggcagtatcaaatgtacgtgaagccagtaagccaccgccgccacccctgcgaagcctgcagcaacactagaggcaaaaggggatatagggcctgcttcttctagattactcaaaactggcaaaagattaggataaactaaaaaaatgttacttcacaaagttaccgtgctgtccctatcattacttcaaatcaatttcgctagcatcattccatacctaggttcagggctcatattaactgccttccaggtgaacatcgctgtgcgtaggaattgccaaatagaaaaaaaaaacatagcaccaaatacagtctcgagctatctgatctgagccctctccaaagagcaccccatccttcaagcaatatcactctagaaggtagatgcacatcagacggcaatgggggtttcccagagccagtaagcatccatgggtgctgtttcagagcacccaacatgtcgggatgcttggagaaagatcagataaaaggcccgccgtgttgttccacaccgttatatcaagaacatacccagcaacagttgaaaaccactggaaatgatccttaacaacatttgcagggcccatagcttttgaaggaatcacaaaactaactagctttcgaagtttgaaaagttcaaatggtgtgcagaaaacagtctctacagcaccagcaactatgccagccaacatagcctcagaataatagacatagttgtcctcccttccatctgccaagacatctgttaacagttcataggtcacaaaatgtgctcccaacccaggaagtttacccattatggaccatccaatgccactgtaaaaacctaaaagtcatacaatgatttagaatatgataatttcatatgtgaagtaacacataactaaatccgaagccattaggcatgattgcatgaactagaaagttttatacaaaaatcaggatttatatgcttttctactgctgccttctcccgcttcggcctctccctaccgcttccgatccaatgaagcttcactagagcctttcctaatttaaaatatacacaatataacgtagcgctgcgacagtttagttcagtccctcctaatttttttccggcctacgtccctgagcaaccgaccaaacctacagggccagaagcggcctgagccggtccaccaactgccggagcccagctgcagatgcaaggaaacaccgcgcagataccaaaattagaccttgagaaagcaacagtacagcaacacaaggaggtgaggtgggtgagtgcgctcgcctggaagctggaggagtgcttaaccgtgtcgagggggtgcacggcgacggcggaggcgctgatcgctgccgcaccgaaagccgcgtggcccgcgtgacgctgtcctccatcggtttgccgcctcccacggtcccaccatctcggcggcctgcaaggcaggaactggaacacacgctccccgagaaatagcgaaaagcggcgagcgacgtttaggggaagacaagaagagagaagccgcgggagaatttggggcccattgagaaacctgcccacctcgggtattggtgttcggcccacagagttccgtggccaagcgaagatcggatggctggcacctggcactggcaggcaggctgggagccggggacgcgccggaccgccggtgctagtcgaactcgggtcgaagtttccttccgaggttggtcgctgcctcgactccagcgttgagccaactccgccgccctgtcgttttcgcctctccctagcatttaccggaagaaacgagcgtgaccgccgccttctcccgctcccgctcccgctctgcatctctccatgggccagatcgagagccaggtcactcctccagcggaggagccttctccacccaccgtggagccgtcgccgtcgtctcctgccccgcctccgtcttcccttgaggcgattgctgcagaagccatgtcatttgatgaggatgacactgaggagtcaatcgatgtgaaggtacagaaagctctggactgtccatgtgttgctgatttgaaaaatggtccttgtggaggtcaattcgtcgatgcattttcctgctttctcaggagcagagaagaagagaagggatcagattgcgtgaaacccttcatcacattgcaggactgcatcaaagcaaatccagaggcattctctaaggagattctggaggaagaggaaaatgatgaggaggcagataagtccaacctgaaagttagagctccatcatggtccagagaatccaaacctaaggtttgagattgcttggtattaactgatagtgatattcatccagtgtgcagactcaccttattcaactataagggcttgttcgctttcctctcaatccatgtgatctcaatccatgtggattgggtgggattggatgagtttaaatcctgaacaagtcaaaatccttcatattttttctaatctcatccaatccacatgggacaggaataaccgaacaagccctaagtttgccagtagtagactgatttcagagagcgaggtatcataaattgattaacagaaatacccatattttgtgtataagaaatgcttcatggtatccacaattttagaatgtacatgtcatttcaagtatcaatcgagaactgatgaacttgtaattcgattcctagatacagggcatatttgatcaccactgtattattatactatgaaatatacatatgattatcat

SEQ ID NO: 208621 - DNA, 4427 bp, Zea Mays
ccgctgaccagctgtgcgcctgcctcataattgatagacacaggtcatctcatcaaccctgtaggcctctcccttcttctgctctccctcccttctcaaggcttcctcctgcagtccagctcaccaggaccaggaggaacaaagaagttgcatcgaacacagctgagttcctccctcttccctgaaatgcgcccggcagctagaaaggagcagctagcgggcgggctgcccatacgtcgttgagatagatacctaagcgggccgcttccgctgcacagccacaggcatggggtgcggggcgtcgagccacaaggacgccggggcgcgccggagacggcctgggagcgtcggcgacgtggtcgttttcctcccgggcctccgggtgccgagggccgtcgacttcgcccaggcgctcggcggctgcctggccagggctatagtcgagcggctgtcggctctgaggtcgcgggtcgtcgagatggcaatgcaagaatcggcggcggcgctcaagcccaggcggaaggcggctgcacggcacgggtctagtacagccaatcttctacaggccctcgaagactacttgccagttctgctgggactagcacaacaaggtagcgtcttgagacacaaagtgcagttcacctggagtaaccaagaggataatgctgaggagacagccatttcagatgtctggtacgaggtgctgtccgtgctgcacttgatggccatggtctgcttgctgcaggccaacaccctgcttctcccaaggtcatacggcgatggctacgccccaagagtttctgaagagagtagacgggccactgttgatgtcttcttgaaggcagctggatacctagactgcgcaattcgtcatgtacttccgaagatgccactggaactaaggagacaacttccagtcgacctggctgaaggaaatctcaaagctctaagcctgcaagcctttgggtcagggggttgacatgcagctcggcttggctattgatagtccaaaggccactttagcagtcaaaaggcgcttagcctgtgagatggtcaaatattggcaacaagttcaagagagcattccagagcttccagtctctgatggatggggaaaaaagcaccggctatttgtaaagtggaagtatgttgaagccaaggctgcagcatactatttccacggtttgattcttgacgagggaaataccgagaaatcccatggaatggcaatagctgcactacaagcttcagaagaatttctgaaagaaagcaaaatggtttcggaagccttccatgcaactcctccaacatcgaggagtccgaatgcattcggaacagcaaaatatctgtttgacaagatcccaagagatgcttccagcaaggtccgaatcaaacaggacctgtatactcaagaaaaggtcattggagcaccacccccattaccagattttgcattggcgctaacacctgaagattatgatcttcctccactagatccactttggaacaaagaagatacacaccattaagtgtctatacagcagattggttgcttctggcaaaaaattggctctggagagaaaggaggaccaagatctaccatgtcaaaggtcgaacatggtaacaaatgaagtgtacaaaatattttcaaacaaaattacatgtcaacaaaattaagcaaggcttgaagataatctgaagagctctgtacaggcaattttcttctgacaagggaaatgatatgtcaaagggttcattgatcattgtcgatcctgattcctgatgcttttattttttcaacaacagattttcagcattcgaaatggaactggaatcagcctctgatcgaagtggaaacctttttttagtcgtaaacatttacattggcaccttaaaatatactctggaacaatcagtctcagctgaacagtttataatacatgaactagctaaagtacagacatgcccaaaccttaggcaccacagtacattctgaatgacttttggcagtatcaaatgtacgtgaagccagtaagccaccgccgccacccctgcgaagcctgcagcaacactagaggcaaaaggggatatagggcctgcttcttctagattactcaaaactggcaaaagattaggataaactaaaaaaatgttacttcacaaagttaccgtgctgtccctatcattacttcaaatcaatttcgctagcatcattccatacctaggttcagggctcatattaactgccttccaggtgaacatcgctgtgcgtaggaattgccaaatagaaaaaaaaaacatagcaccaaatacagtctcgagctatctgatctgagccctctccaaagagcaccccatccttcaagcaatatcactctagaaggtagatgcacatcagacggcaatgggggtttcccagagccagtaagcatccatgggtgctgtttcagagcacccaacatgtcgggatgcttggagaaagatcagataaaaggcccgccgtgttgttccacaccgttatatcaagaacatacccagcaacagttgaaaaccactggaaatgatccttaacaacatttgcagggcccatagcttttgaaggaatcacaaaactaactagctttcgaagtttgaaaagttcaaatggtgtgcagaaaacagtctctacagcaccagcaactatgccagccaacatagcctcagaataatagacatagttgtcctcccttccatctgccaagacatctgttaacagttcataggtcacaaaatgtgctcccaacccaggaagtttacccattatggaccatccaatgccactgtaaaaacctaaaaggccagaagcggcctgagccggtccaccaactgccggagcccagctgcagatgcaaggaaacaccgcgcagataccaaaattagaccttgagaaagcaacagtacagcaacacaaggaggtgaggtgggtgagtgcgctcgcctggaagctggaggagtgcttaaccgtgtcgagggggtgcacggcgacggcggaggcgctgatcgctgccgcaccgaaagccgcgtggcccgcgtgacgctgtcctccatcggtttgccgcctcccacggtcccaccatctcggcggcctgcaaggcaggaactggaacacacgctccccgagaaatagcgaaaagcggcgagcgacgtttaggggaagacaagaagagagaagccgcgggagaatttggggcccattgagaaacctgcccacctcgggtattggtgttcggcccacagagttccgtggccaagcgaagatcggatggctggcacctggcactggcaggcaggctgggagccggggacgcgccggaccgccggtgctagtcgaactcgggtcgaagtttccttccgaggttggtcgctgcctcgactccagcgttgagccaactccgccgccctgtcgttttcgcctctccctagcatttaccggaagaaacgagcgtgaccgccgccttctcccgctcccgctcccgctctgcatctctccatgggccagatcgagagccaggtcactcctccagcggaggagccttctccacccaccgtggagccgtcgccgtcgtctcctgccccgcctccgtcttcccttgaggcgattgctgcagaagccatgtcatttgatgaggatgacactgaggagtcaatcgatgtgaaggtacagaaagctctggactgtccatgtgttgctgatttgaaaaatggtccttgtggaggtcaattcgtcgatgcattttcctgctttctcaggagcagagaagaagagaagggatcagattgcgtgaaacccttcatcacattgcaggactgcatcaaagcaaatccagaggcattctctaaggagattctggaggaagaggaaaatgatgaggaggcagataagtccaacctgaaagttagagctccatcatggtccagagaatccaaacctaaggtttgagattgcttggtattaactgatagtgatattcatccagtgtgcagactcaccttattcaactataagggcttgttcgctttcctctcaatccatgtgatctcaatccatgtggattgggtgggattggatgagtttaaatcctgaacaagtcaaaatccttcatattttttctaatctcatccaatccacatgggacaggaataaccgaacaagccctaagtttgccagtagtagactgatttcagagagcgaggtatcataaattgattaacagaaatacccatattttgtgtataagaaatgcttcatggtatccacaattttagaatgtacatgtcatttcaagtatcaatcgagaactgatgaacttgtaattcgattcctagatacagggcatatttgatcaccactgtattattatactatgaaatatacatatgattatcat

SEQ ID NO: 208622 - DNA, 3205 bp, Zea Mays
acaacggtagctgcttgatcactcgtgtcgctcgttgcattagacagatagccagcacacccccgtcgttcatcgggctcacaactgcactcgcctcgccagttgtattggagaggatagatagctcttcgccagagaaggattgccctcttgagatgggctgttctttcatctctatcttggttccatcctaatggatccaaatctatggccgccaagcaaatcacggatgacgatgaactgtgtcttctcctgccactgtcagggcctcagccctatgaacgtcagatacttgtatgcggctatcttcctccagctggcgaacctgtctgcgtggttcgcacgagagaataccgtatcgtattacctgaagcagcgactcagcggcgcctgtcagggtgaccggggttgtctcgcggctgaaagcgtgctcgtggcgagccatgcattctttctcttttttatggccatgttcttctccactgtacgcaccggcaaggtgaatgagttgagaaatttatggcactgcgggtggtggccagtgaagattgccctcttcatggtctattttctcgtctctgtcttggctccatcctggtggatccaaatctatggatatttcttgtagttcagctcataagttttatgagatttatcacaaggctgaactacaaattgtgccaaaccaattaccaaggaaggtacctcgtggtgtttgggatctctatctttgccaacattggctctacggggttgataatattcatgattgtcaagctcagacactactggctcgacatcgagtttcttggcaccacgctggtgctagtgtatattatgtgcgctctctcattaatatccaaggccaataaattattcatggagcctgggataatttgtgggtatattttgttcctcttgcctgttagcgattacaagtgagcccaaatcaagctgctaccagaaacacaaagcaggtccacatgctatttggataacaatttcctgttttgtttttggactgctcggcaccatttattctactttttccacaggcagcgactacaaatgcatacaattgtggaacattatagagtcagaagacgacgtaccatatggcttagtaccaagcagaaagaatgccaaaggcctagggcaaattaagggtggcaattactagagccccggccaggacgtgtctctgttcttggaaagcccgaagaacgccctctcaacggcctgattcccgttctaacgctgcatcagattaacatccacagcacgggatgcagcggcaccatgggatgtgagcaaagcgtgtaaccaaggcgaagacaactcgaacaccattgtccggcatcctcatcaaagaacaaagagctagctagcgagcagcgaggtatcacagtgcaaatgcaatacagacggacatctgaatcggccacgttgcatgcatgtatcggacgacggggagacgagaagcactatttagaacagggacagacaccatagcttctagctctgtatcgcttgggagcttgcttatgaagaccgtcatccatggtcgggcttgtgcttgagcctgcgtctgcgtgctagctgccggcgcgcgggcagcatttccttaccggtacgctaggctaactaatctcagcagaacatggacgacgatcgacgaaagcaatactgttgatctctcgcctctcgctctcgtccaacacgcgctcacactgcaatactgttggttgatcgtctcgcccgttgtgttggagaggtcttctccacgttcagtccatctctctgcaggcagccaagctagcgaagcacggacgacaataatgaactgtgtcttctcctgccagggcctcagccctatgaacgtcagatacctgtatgcggctatcttcctcgtggcgaacctgtctgcgtggttcgcacgagagaacaccgtatcgtattacctgaagcagcgactcagcggcgcctgtcagggtgaccggggttgtctcgcggctgaaagcgtgctcgtggcgagccatgccttctttgtatcctacagtttaaacaacattgttttttatctaacaattttctgtattatgattgctctgaccttaacaaatcgtccagctcttttttatggccatgttcttctccactgtacgcaccggcaaggtgaatgagttgagaaattcatggcactgcgggtggtggccagtgaagattgccctcttcatggtctgttctctcatatctgtcttggcttcatactggtggatccaaatctatggtcagttccctaccatgacctatcatatatatatactaactacaatgctctctgctagctagcttgtatcattgatatcattgatacacatggtgtttgtctgaattgtattttcaagaaaaattgcgcagctaggagcagggtaactacctatctcaaataatccagctaaaggcttgttcgtttcacagttgatccatgtgaattgaatgatattgagtcggtttaaatctatagcaagttaaaatctattccaatctatttcaatccacatggaaatataatacccgaacaagtcctagcaatatgtacgatgatgttgatatgtgttatatctgggacttttgaacaggatatctcttgtagtttagctcataagttttatgagatttatcataaggctgaactacaaattgcgccaaaccaattatgaagaaaggtagctcgtggtgctagggagggatcaaatgactcgggtgggaagtgggacaaggagtgaagcgtcgaggaaaatttagataaaaattaaaatttcattagatttaaccatacctactatgtaaaagtttgtttattttgatgtatatatatatatatctaaacctagtataagaggttacaaaattaaggtggggccatagcctaccttgcccacccgttgcatgcacctctggtcggtggtgtgatagtatagatctccactgtacagtaccggtgatcgatggtgctccatggaaaaaaataacatgtacgttttgattgaggcgcgccaatcataacaccctaaccaatgcaatactagctaattctcttgtactgtgttatatagacatatacacggtgcagacgtgtttattgtatggatatgtttgacatggtaagacatgttagccatactcctcttgaatagtaaag

SEQ ID NO: 208623 - DNA, 2997 bp, Zea Mays
acaacggtagctgcttgatcactcgtgtcgctcgttgcattagacagatagccagcacacccccgtcgttcatcgggctcacaactgcactcgcctcgccagttgtattggagaggatagatagctcttcgccagagaaggattgccctcttgagatgggctgttctttcatctctatcttggttccatcctaatggatccaaatctatggccgccaagcaaatcacggatgacgatgaactgtgtcttctcctgccactgtcagggcctcagccctatgaacgtcagatacttgtatgcggctatcttcctccagctggcgaacctgtctgcgtggttcgcacgagagaataccgtatcgtattacctgaagcagcgactcagcggcgcctgtcagggtgaccggggttgtctcgcggctgaaagcgtgctcgtggcgagccatgcattctttctcttttttatggccatgttcttctccactgtacgcaccggcaaggtgaatgagttgagaaatttatggcactgcgggtggtggccagtgaagattgccctcttcatggtctattttctcgtctctgtcttggctccatcctggtggatccaaatctatgaaaaaattacgcagcttggggcagggatatttcttgtagttcagctcataagttttatgagatttatcacaaggctgaactacaaattgtgccaaaccaattaccaaggaaggtacctcgtggtgtttgggatctctatctttgccaacattggctctacggggttgataatattcatgattgtcaagctcagacactactggctcgacatcgagtttcttggcaccacgctggtgctagtgtatattatgtgcgctctctcattaatatccaaggccaataaattattcatggagcctgggataatttgtgggtatattttgttcctcttgcctgttagcgattacaagtgagcccaaatcaagctgctaccagaaacacaaagcaggtccacatgctatttggataacaatttccgtaagtatatatatggtctatttcgatctagggttcttatctagtatcgtcagtgatatttaaaaaaacattatgttgacatatatatatcaacactggtagtgttttgtttttggactgctcggcaccatttattctactttttccacaggcagcgactacaaatgcatacaagtatgttaattattcacatgaagagattagtcataactatcaacaaaactgatgaatgtgtgttttattaactgaaaatgcctcaaaccttccatgcagttgtggaacattatagagtcagaagacgacgtaccatatggcttagtaccaagcagaaagaatgccaaaggcctagggcaaattaagggtggcaattactagagccccggccaggacgtgtctctgttcttggaaagcccgaagaacgccctctcaacggcctgattcccgttctaacgctgcatcagattaacatccacagcacgggatgcagcggcaccatgggatgtgagcaaagcgtgtaaccaaggcgaagacaactcgaacaccattgtccggcatcctcatcaaagaacaaagagctagctagcgagcagcgaggtatcacagtgcaaatgcaatacagacggacatctgaatcggccacgttgcatgcatgtatcggacgacggggagacgagaagcactatttagaacagggacagacaccatagcttctagctctgtatcgcttgggagcttgcttatgaagaccgtcatccatggtcgggcttgtgcttgagcctgcgtctgcgtgctagctgccggcgcgcgggcagcatttccttaccggtacgctaggctaactaatctcagcagaacatggacgacgatcgacgaaagcaatactgttgatctctcgcctctcgctctcgtccaacacgcgctcacactgcaatactgttggttgatcgtctcgcccgttgtgttggagaggtcttctccacgttcagtccatctctctgcaggcagccaagctagcgaagcacggacgacaataatgaactgtgtcttctcctgccagggcctcagccctatgaacgtcagatacctgtatgcggctatcttcctcgtggcgaacctgtctgcgtggttcgcacgagagaacaccgtatcgtattacctgaagcagcgactcagcggcgcctgtcagggtgaccggggttgtctcgcggctgaaagcgtgctcgtggcgagccatgccttctttctcttttttatggccatgttcttctccactgtacgcaccggcaaggtgaatgagttgagaaattcatggcactgcgggtggtggccagtgaagattgccctcttcatggtctgttctctcatatctgtcttggcttcatactggtggatccaaatctatggatatctcttgtagtttagctcataagttttatgagatttatcataaggctgaactacaaattgcgccaaaccaattatgaagaaaggtagctcgtggtgctagggagggatcaaatgactcgggtgggaagtgggacaaggagtgaagcgtcgaggaaaatttagataaaaattaaaatttcattagatttaaccatacctactatgtaaaagtttgtttattttgatgtatatatatatatatctaaacctagtataagaggttacaaaattaaggtggggccatagcctaccttgcccacccgttgcatgcacctctggtcggtggtgtgatagtatagatctccactgtacagtaccggtgatcgatggtgctccatggaaaaaaataacatgtacgttttgattgaggcgcgccaatcataacaccctaaccaatgcaatactagctaattctcttgtactgtgttatatagacatatacacggtgcagacgtgtttattgtatggatatgtttgacatggtaagacatgttagccatactcctcttgaatagtaaag

SEQ ID NO: 208624 - DNA, 1479 bp, Zea Mays
ctattgctgtcagtcacttttgcggagagggagagacgcgcacgccagcagcgtcacaaaaagcgagcgcgcgccaccgcttccgctcccccgagaatatccatatccattatcacagtgtctcctactatttctttttactcactgtggtggactcgtctctatatattgcaagggtaatgacacttgtctgactcccctcacatacagatacagtacagttcacacactctcctgtctcctatccatccagccaccgaagctagccaagaccaagatgtctcagttgctgcacctgccggacctcgcggcgccgcggaccaggatgggctcggcgctggcggcgggggcccgcgtcaagcagggggaggcggggacggcgagggggcgggtgctcagggtcgccgaccccgtgcggcgggagtgcctggtgccggtcccgccgccgccggtcctcgccgcggggaggcgcggagacgacgacgacgtcgacgaggagaggcagcggtactacctcaacctgggctacgcgatccggacgctcagggaggagctccccgacgtgctctgcaaggaccacagcttcgacatctacagacattgtcttcagagaccctctcaacacattcaagggcctgggaaactacaagaggctcttctgggcgctgcgcctcaccggccgggtcttcttcagggcgtcgtgggttgaagtggtcagcatatggcagcccgccgagaacagcatcctgcttcgctggaccgcccacggcgtccctcgggtgccctggggctggtgggacgccgcccacgcccgcttcgacggcgcgtccgtgtacaagctcgacaggaacggcaagatctacgagcacaaggtgcacaacgtcgctacgaacccgccggccaagtccaaggtcctgccggtccacgagctggtcaggtcactcggttgcccctccactgcccaacccacatgttctgacttctgaagctttcgtcgtcgcagtgatgtgccatcttatatcttattattcgagattaattagcatggataggatgctacgtcgagattaattatctggaagaaggattggcgtgggtttaacatgataccctccattttttttgtttttcagtgtgatttgatagcgcacaaagttacagagcactcctgcaggctgcagttgtatatatgtacagttatagaataagaacatcagttattgattgttaaagcatcagtcagcaaataactagtctgacatgtttctgttcccagtaacatcaggaacatgctgcgatcctctagtgtggtgacctgcaatgccaactaattaacatcttcgtcatattccgggaacaagctaatcttgatgcacctgctgcagcttggagcacttaaagtcgaccacgtgtttagataccttaaaactcgcaatgaaagtaagaatgcctgattatgaagtgatatcaaatttacat

SEQ ID NO: 208625 - DNA, 3321 bp, Zea Mays
aaaaaatggcatggccattgtggtgtggctttacctggttttctcacggtcacggcttgcttcgtctcccttccgtcgccgaccgagaaggagtgggaagaaatggattggaaaagctagggttttcgccatggccatcgcccacctccagctccccgttgtcgaatccattctccccacgctctcctcctagctgcggcatctcacatcgccgaaaaaaggggcccgcccgcttctactccgctccccaattggagggtttccctccccttcccccaaatcgaatcgcagcattacccgccgagcaagcaacccacacccactcacccgcctttcaaggttcctactgcgctggcgatccagctgggggcgagcgcagcggtggcggccggataatccaatgtgtatgctctgcgccgtgcagcgctggtcgcggcgcgtcgccaccatgctcccgtggctcgtcgtcccgctcattgccatctgggctgctacccagctactcctcccggccgcctaccgcttggaggtcacctccccgcgcctcgcctgtgtctccgtcctcctcctcaccctcttctggtatgagatcctcctcccgcggctctccctctggcgcgctcgtcgctccgcgcgcctccgggaggagcgccgcgcccacgccctcgagctccacaagctccgcaagattgccacccgacgctgccgcaactgcagcaacccctacagggagcagaaccccggcggcggcaagttcatgtgctcctactgcggccacgtctccaagcgccccgtgctcgaccttaattcgaccgggaaggcctcctccaggtggccctgcgctcaagattgtggagactggctcgacctgcgctgctctgccagccccagtacctccttctgggggttctcatggcacctactgttgtcgttttttacaacaacagtgaggtggctcttgaggaagacattcagatttacatcgtcaggtgacggtgagggcttgggcccagatggtaagaggttggcaaaggcaggggataatggaggaaaagctgaggagagcagggtcgagaaggcgaggaggaaggcagaggagaagaggctggcaaggctggagagggaaatgctggaggaggaagaaaggaagcagcgggaagagatgacaaagctggtggaggaacgcaggagactgagggatgagaaagctgcggcagaggagcggtccaaaagcgctacccctgttggggagaaggatgctaggaaggaggcagagaggcggcgccaggagaggaggaagaaagaggacaaggggccaagcaagagtaattcagattgtgaggacattgatagacggttgggccgagaaggcgacatgaagcgggccttcgatagaaagattgagtctgacagacgtgagggttacaagcctcattactttgaagctaacaatcgtagtaataagacagtggagagcagggcaaagtactttggccgtatgacgggtggtttcttatcttcgtcaagagggtttggtggtggttccttctttggcagaagtatccaggcccctgcccctcaagttaacaaggttagtagacccatagttcctgcaactgaccagggcaatgcagccaaaagggatgtccaacatgcatccacacaagctgcagccaaatctacttcagctggggaaaccagaaattcatggactaattttaatcgaccggtcagcccaaatgtgcagccagcccctaccagctttaaaaagtcatggcatcagctgtttagtcgttcagcatcagtctccccttgtcctgatgctacaacttcagctcgtgatacgaatcagaagccagagccaaatggagcgcaactaagcaatgcttatacattcctctttcagtaccctcctcttgacagcaagccaagttcgagccagtccatgcaatttccaggttttccaccgcttaatggagcacctcccaataagccactacctcattttcctgctggacatatgccattctatgatgatgcagaatctgtggtatttgaagatccagaacagtttgaggacccatgctatgatcccgatgcaatcgcattgcttgggccagtttcagagtctttagataatttccctccagacttggattgtggattcatctcgagtgatgttgtcaaggaatcacatgggaggccttcaccaattgagtctcctctctctaggtctcgtatggttgaagaaaatcctatcaagcccctgcacttgttagttgcaaaaaggcctggtggtcctattcagcctgaggctagcagtgagcaacgcacatggcaaatgtggagcacaccattggttcatgaaagtttaggtctccaaggtcatcaaagtcagtggcttcaacagacaaatcaattaaactatagtgccaatgttttcaatggcagaacaaacgcccccctgggtactggtttgaatgacagtgatccttggctgcagaaagcacctttcaagcaattgccacctgatactccaagcctgttccttccacatgaaataccagggaaattacacaacgacttggtttttgggtctccaaacaaatcagcacgtgaacacccctttggatcacctggtccttcttggcccaaggaggaactgtcgttgagtggagcccaggaaggtggtggccatttttcattgctgtcgggcgcacatgttggcggcagcggagacttattttgctccacaagtcctgatgtgcagtccttggtgtggtctttcaacgaaaaggagacagcatagcagggacggactttgttgtggaaggaaatggaggatgtctgactgagccaaaacctccttgcctcctctgagtgtcacagggcggggttaatcggcgaggagataagtagtctccctccatgtcccttggcgcaaagaagatttgggggggggggggggggggcattttgtttagtatcgactcctctcacctgacctgttaccacgcgccatcttactttcacctgatgggtcgttgtatgaactctgggattcaatgaaaaatggggctgatttgtttcaaggtggctgttgggctgtagtaagtattccttggttgctggatgtagatgctaaggttttcagttagtttctccgtgacatacagtacaaagctctgctacatttccagtacaaacaagccaccacccaagatgtgcagtgaacctctctggtcggcctacaaggcaccgacgacggtggcggcgcgcatccatgacggcggcaaactctccctctctgttcgtttctcg

SEQ ID NO: 208626 - DNA, 2201 bp, Zea Mays
gtggctctccattgctcgggagctgggtattgcggcatctgaattggtgagcgacatcactgttcgtatagggactacaaagttttaccttcacaagtttccgctcctctccaagtgtgctcgctttcagaagttgattccaaccactggtgatgaaaatattgagatccacatccatgatattcctggtggcgcaaaggcttttggggtctgtgccaagttttgctacggcatgattgtcacactcaatgcctacaatgtgattgcagcccgctgtgctgcagagtacttggagatgaatgagactgttgacaagggcaatctgatctacaagattgatgtcttcctcagctcaagcatattccggagctggaaagactctattattgttcttggtacaacaaaggctcatctaccttgggcagaggatcttaagctggttagccaatgcattgactctgttgcttcaaaagcctctatcgacgtttcaaaagttgaatggtcatacacatacaatcggaagaagctcccaactgagaatggtcatgattcgccgtggaatggagtcaaccagcggcaggttgttccgaaggattggtgggtagaagatctgacggatctcgacattgatgcctacaagcaagtcataacagcagtcaaaaccaagggtatggtggccaaggacgtgatcggtgaggcaattaaagcctacacttacaagaagctgccgtcactaagcaaggtctcaatgatccatggcgacgcaaaagttcgggcgatgctagttacaatcacatgcctgttgccatctgagaaaggctcagtttcatgcagcttcctcttgaagctactgaaggcaaccaatttgctgaagtgcggcgatatgtgcaggaaagagcttatgaagcgcattgcacggcaattggaagaagcatcagtgtcagatcttctgatccctgcagtggatgaggacaccagtgtttacgacattgacctgattcttagcattgttgaagaatttatcagacaggatagtaagaatgcccagagacataatggtggcgaagtgaatgaccatgtatcagctcctagtgcatcaatgattacagtggcaaagattgttgatgggtatctggcagaggttgcgaaggacccaaatataccggtctacaagtttttcagtctcgctgagacagtctcggccaattcaaggccagtccatgacgggctctatcgcgccattgatatgtatctgaaggagcacccaagcttgggcaagagcgacaagaagaggctctgtgccctcatggactgcaggaagttgtcgcccgatgcatgcgctcacgctgtgcagaacgagcgcctgcctctgagggttgtggtgcaggtgctgtaccacgagcagacgagggcttctgcagcagccaccgtccgagctgacagcatcggcatcggctcctacgagagctcaaggtcaggggccacaacaaacacagaagacgagtgggacggcgtcatggccgtggaagacctcagtctgtcgtccaagacgacgaagctagagaaatgtgacgcagctagcaccgtctcggagaagaaccacggcggcaacaagggtgccaacggcagggcgaaaggtggcgtgatgccgaagaaggcggtcgggaggacgacgatgtcaggcaacaaagggcaggctggggagcgcagcagctcggactcatccgacagcgccattttgccttgccagctggagcatcccaagagggccgcagcaaggagcaccaccaagtcagccgctgtgtagtagtagctgcccggccctttgctcagtgagatgctcaaggagcactaggttttagcagtcgtcgtccgttcttttctttgcgttatgaatgttgcatagaagcaaggaccatgttcttaaacgtcttgtaggccgggagcccgggatggtacgcgtacgttgttaggtgatgttgttagcatgtaggcttgccatgaaacctatgagaccttgggttgtgctgtgagggtttatgtcataagaagcctactttgttagagagttgaagcacgactgttctgcagctgtgaattcttggtgttctgctgtgagatctgttaggtcgttcgaatggtcatctgaatatctgatcacagtgacttgtagctaggggctgtggtaaagggccctaaat

SEQ ID NO: 208627 - DNA, 2229 bp, Zea Mays
gttcgctgctccctgcctcctcctcctccttcttcttggcatcttccgtcaaaggtattgcggcatctgaattggtgagcgacatcactgttcgtatagggactacaaagttttaccttcacaagtttccgctcctctccaagtgtgctcgctttcagaagttgattccaaccactggtgatgaaaatattgagatccacatccatgatattcctggtggcgcaaaggcttttggggtctgtgccaagttttgctacggcatgattgtcacactcaatgcctacaatgtgattgcagcccgctgtgctgcagagtacttggagatgaatgagactgttgacaagggcaatctgatctacaagattgatgtcttcctcagctcaagcatattccggagctggaaagactctattattgttcttggtacaacaaaggctcatctaccttgggcagaggatcttaagctggttagccaatgcattgactctgttgcttcaaaagcctctatcgacgtttcaaaagttgaatggtcatacacatacaatcggaagaagctcccaactgagaatggtcatgattcgccgtggaatggagtcaaccagcggcaggttgttccgaaggattggtgggtagaagatctgacggatctcgacattgatgcctacaagcaagtcataacagcagtcaaaaccaagggtatggtggccaaggacgtgatcggtgaggcaattaaagcctacacttacaagaagctgccgtcactaagcaaggtctcaatgatccatggcgacgcaaaagttcgggcgatgctagttacaatcacatgcctgttgccatctgagaaaggctcagtttcatgcagcttcctcttgaagctactgaaggcaaccaatttgctgaagtgcggcgatatgtgcaggaaagagcttatgaagcgcattgcacggcaattggaagaagcatcagtgtcagatcttctgatccctgcagtggatgaggacaccagtgtttacgacattgacctgattcttagcattgttgaagaatttatcagacaggatagtaagaatgcccagagacataatggtggcgaagtgaatgaccatgtatcagctcctagtgcatcaatgattacagtggcaaagattgttgatgggtatctggcagaggttgcgaaggacccaaatataccggtctacaagtttttcagtctcgctgagacagtctcggccaattcaaggccagtccatgacgggctctatcgcgccattgatatgtatctgaaggagcacccaagcttgggcaagagcgacaagaagaggctctgtgccctcatggactgcaggaagttgtcgcccgatgcatgcgctcacgctgtgcagaacgagcgcctgcctctgagggttgtggtgcaggtgctgtaccacgagcagacgagggcttctgcagcagccaccgtccgagctgacagcatcggcatcggctcctacgagagctcaaggtcaggggccacaacaaacacagaagacgagtgggacggcgtcatggccgtggaagacctcagtctgtcgtccaagacgacgaagctagagaaatgtgacgcagctagcaccgtctcggagaagaaccacggcggcaacaagggtgccaacggcagggcgaaaggtggcgtgatgccgaagaaggcggtcgggaggacgacgatgtcaggcaacaaagggcaggctggggagcgcagcagctcggactcatccgacagcgccattttgccttgccagctggagcatcccaagagggccgcagcaaggagcaccaccaagtcagccgctgtgtagtagtagctgcccggccctttgctcagtgagatgctcaaggagcactaggttttagcagtcgtcgtccgttcttttctttgcgttatgaatgttgcatagaagcaaggaccatgttcttaaacgtcttgtaggccgggagcccgggatggtacgcgtacgttgttaggtgatgttgttagcatgtaggcttgccatgaaacctatgagaccttgggttgtgctgtgagggtttatgtcataagaagcctactttgttagagagttgaagcacgactgttctgcagctgtgaattcttggtgttctgctgtgagatctgttaggtcgttcgaatggtcatctgaatatctgatcacagtgacttgtagctaggggctgtggtaaagggccctaaat

SEQ ID NO: 208628 - DNA, 1113 bp, Zea Mays
aaattattaatctggaatatttgttcaacagcatttgatgtgcattactctgatttgggactagatagtgaatcatacgtacttgtaaaatctttggttattatgtagcacacatacttcaaattgatcggttcacaactattatgatgccctttctcaattcattttgttttggcaatgcatactttataatgatcaggatgcgatgtaaaatttaaataatcaccatagctttattatatcattctcagatgagggcatttacgagcttggttgacaccaactacatattagatgctatccgtggttctgagttattggaagtgcagggagataatgttcggaggcgcaatgattggatggaatggctacttcattaacgctgtccactagcaaatcaggttaagatgccaaaatgcagccgcatgctatcttcggggaactgaatagaagtcttgtggaaaattatatggaggagtcctgcaaattgacgcatttacatgacaatctcgatgcatgctacacgtctctgcgtactaatgtgaaactagatcaaatcttggcacgtttaggagccagtgtccctgcccaggccatcgataggtcgactccatgttgtatattggctagctctgtagcttggctcactggctcttaaacgtgggaaggcttgatctagtttgagattggtgcacaagggcatgtggcatggatcaagatcgtactataaacgcgtcggtttgcaggatatagattttattttctaagtcttgggtgatttgatcatgggcaccgggtaccggatccgtggactgatgtacagtgggtctattggaagcgggaagattttgtttgtttagatcggacatgatggctgcacgtaaagccactattgaggggataaataacaggaaataaatttacttaaaagtactttttttgcggtgtgtatagttgttcgaaaagaagtgtgatcctaccttttcatcatggattattggtcctggtgaacgatttggtgctacctagggtttattcttggaatcttagttttgtggtttgagtagtataccctgtatttgactctccttatgagcgaatttttatctctcg

SEQ ID NO: 208629 - DNA, 1689 bp, Zea Mays
gtttactatccttcttatgttagttaatgtttgtttttggttattacttagtttgtgatttgttcctctcatagtggcatgagtatggtgtgttatctctgttgtttgatgacatactgatttacctaatctatgatttgtttctctcatagtgacatgagtttgatgtgttatctccattgtttgttttataatgattatagcttatttatactacttccatctggaaagggacatgattctatttccatctctagtcaaactttctaaagtttgaccaaatctataaaaagagcatcaatatttatagcacgaaataggtattactatggaaatatatctcatgaagggtctattgacactggttatcataaatattgataccttttgtataaagttggtcaaactcaatagtttgactccataatatgctagaattgcattctttccctgaatggaggaagtttgtttaactaaaccgactaatcgagcaaaaaaattacaatggggatattggattgatcagtgcaacactacagcttgaacttgcaattgcaatcatctgttgtatatttcagcctttgttctactctcttctgtgtttattcttcttactgggtaataagcagattgcaatttaggctagcttctcccttttgtgttttgttattataataacttaattttgccttctgcatttgcatacattcaataccatctgcccttgccacggtacttatgcttactatactttcttgtttgcaatcatttcttgtttgcaaattgttctactgaacttctaacggtaatttgaagaattgttgaagatgagggcatttacgagcttggttgacaccaactacatattagatgctatccgtggttctgagttattggaagtgcagggagataatgttcggaggcgcaatgattggatggaatggctacttcattaacgctgtccactagcaaatcaggttaagatgccaaaatgcagccgcatgctatcttcggggaactgaatagaagtcttgtggaaaattatatggaggagtcctgcaaattgacgcatttacatgacaatctcgatgcatgctacacgtctctgcgtactaatgtgaaactagatcaaatcttggcacgtttaggagccagtgtccctgcccaggccatcgataggtcgactccatgttgtatattggctagctctgtagcttggctcactggctcttaaacgtgggaaggcttgatctagtttgagattggtgcacaagggcatgtggcatggatcaagatcgtactataaacgcgtcggtttgcaggatatagattttattttctaagtcttgggtgatttgatcatgggcaccgggtaccggatccgtggactgatgtacagtgggtctattggaagcgggaagattttgtttgtttagatcggacatgatggctgcacgtaaagccactattgaggggataaataacaggaaataaatttacttaaaagtactttttttgcggtgtgtatagttgttcgaaaagaagtgtgatcctaccttttcatcatggattattggtcctggtgaacgatttggtgctacctagggtttattcttggaatcttagttttgtggtttgagtagtataccctgtatttgactctccttatgagcgaatttttatctctcg

SEQ ID NO: 208630 - DNA, 2727 bp, Zea Mays
atgacccttgacccgagctgagctgagcagcgttcaaacattcaaaccctagacgaggccccttgcaacggtcggatccattcccatataatatccctccgcccccgacctcctcagcatcccatttttgctctattcgccacccacaaatccactgcagccagcgcatcaggagaagaaggtaagagacgaggggggagatggaggcggcggccatggatttccacacgctctcgcgccgggagctccaggcgctgtgcaagcgcaacggcctccgcgccaacatgaccaacgccgccatggccgaggcgctccaggggctaacctcggtcgacgggatcgacgaaatcggcaccagtctctgtctcccgacgccaggacggtcggcgatgaagtcggcggcgaagatggtggccgtggccgtcgaggagcagcagcacggtagcccgctcccccgcggccgccgcgtatcggtgaaaccaccagaggccatccggatggaggttgaagagggggaggacgagatgaaggagatcgtgaagactcccggcgtggcgctgcgcagcactcgccgcggcactcgggccactcccgcgccgcttcctactccggtggcggcgtgcagtacgcgcgcaacagcggggaggaccgccgctcgtaagacgcgcgacgtggcgccgaccccagccacccggaggagccagaggacagcgtctcgcaaggccgcgggggctgttgaggtggaccgacgcgccgaagatgtatccgaggaaaagacgtcggatatgacgatagctttggatcaggaagctgaggtgttagcggccgcatcaaaggaggagaaggttcagcaagacgaaaagaaagatgtgaaatgtgatgacccaaaggaggaggacaaggtgcagcaagaggaaccaaaagatgttgcctcagatgtgaaaattgatgacccagagcaggaggaagttgccaataaagatgaggaatcggaggagggcgacgaagatgtttcggttaagagctgcaatgatcctaaggtggatgaagtggttgttgtcataggggaacaatcaacaaagtcccatgatgggattgtgaaagagcaggaacctatcagtgttgagaaatctgctcacttgacggtcatggaggattcaacaatcctaggtgtcattgaggacttggctgaattgtcacctgcaagggagatgcctgatgagatcattcctgttactgaagataatgaagtggccatcaatgaggagaccatcaaggaagatgattttgctgacgctattcagactgatcctactccaaaggagattaatctaactgctgcgggggaagataagatcattgaaggcaaagaaggtgctgatgataagatgccacaggctgctgaaactagtgaacatgatgaggacactgaatttaaagaaggggcagctgatgaggtgctgcaggctgagctggcagacaatgaaacaagtgatggtgaagatgaccgtactgaagtgagagaaggggctgctgctaagacgttgcagggtgaactgacagacgatgagactagtgaagatgacctccatgaagatgaagaatgggcttcagatgatgaggaaactgcctctagtgacgagagcgatgaaggtactgagtccaatgaagggagttacattgctgatgcagtgcagatgttgcagggaactgggatagtggaagtggccgacgaagatgcctctactgaagatgatttcagtggcgacctaccaccagagtttgacaatatcatgatattccgtgatgctgaaactgatagtgacagtgttcctccagcgctcgaggaaaaccaggctgttgcatttgcaaccaaagctgcagagtccctaggtgattctgccatgaatgcagagcattatgagggtcctgaggaggctgatgctactgaaaaaacaatgaaagtggttgaggacattgtgaagtccctggatgaatcctccttcaaggagggagaatcaaaggagacgcaaaagaagcagccgcaggattatgatatcatgagcctaataaagcttagaagcacgtacaagaaatgtcttattgcccgaaaggaggggaagaggcctcctctcgaggaggtggatgggaacgcctgcattgaccactgaacagaacaagctgtgtcagtcacaaaattttcgtgaggatggcagctgccacgacgggattgaatagaggaatgctctggttgtgaagtgataactaaggctaccttcaaggcttaatgatcaagggttaatgaaactgtggtttcagccaaccaacctgcaattcctgtggtttttgtccatgttgattaactagtacgaatgccaagttccttgaaagttatacaaatccgttaatgttcagatggcattcagcatgctccatgtgctgcatgccaacatatcattcggcaaattggcaatgcaaactagaattgctaacgcagagtgaattttctagccctgttcgtttttttttccgtggaacctgtttccctttgtatgtcatcgttgaatacaagcctttggacggcccagctcagatgctactcggcccagtttacgacggcctaactgcccaacttttttccaatttagttttgtgtttttttcacggtcctttacaatttcatttcaaaaaatggactccaacctcggcgccatcatagatcttggg

SEQ ID NO: 208631 - DNA, 1372 bp, Zea Mays
cgctcggcgcccatcgaaaaaccctctcctctcccggacaggcggacagcggcaagctggccaccgcgtcaccgcctctacagccccaggctccactgctaaacgccggtaatggcccaggctccggcgcgcgccgcttccgccgtacgtctcttcgacgcgcactgccacctgcaagacccccgcatcgcggccgtcgcccctgcccttatacgagccgccggcgcatccggcgtcgcacgcttcgctgtcaacggcacctccgagaaggactggcacctggtgaagcagatggccgaggatcacccagccgtcgtcccctgcttcggcctgcacccttggtgggtacccgagaggtcgccggattggatgaatttgctccggcggttcttcgccgaaaccccggaggcggctgttggggagattggtctggacaaaggttcacatggaaaaaccatcaacttcggagaacaggttgaagtgttccagcgacagctcgaactagctaaggaattggagagacctgtttctgttcattgtgtgcgggcatttggtgatcttctggaagtattgaagtaagacatgctatttagagcatctccaacaatgcctcaatttggtacctcaaattgaaatatggagctctacgcagcaaactggacctttcccagcaggcgtgttgttacattcttatatgggatctgcagaaatggtgtctgcccttgcaaatttaggctgttacttttcactatctggcttcttgacaggcatgaaatccactaaagctaagcacatgctgaagtcgattcccctggataggattcttttagagacagatgcacctgatgcattaccaagattggacaatgtttctgtatcaccagtccatgttcacagttcagatgcagatactgaaaagcgtcacatggattcagagtcacaggctgctaatgcatcaaatgagtccttgaaccatccagaaaatatccatattgttttggagtatgtcgcatcactccttgaaatgacagagtcagaattggcggagttgagttacaagaatgctaccaagctgttttcttatcctggctccaaagttcaacatgaacctgaagacatctaaatcgggttcaacactaccttactcactgggtcctcccagacacaatgtttgagaaactgaaatggctgtacatcactgttaatattggtgaaataaaacagataccgaatcaaagtagtgcaactggtttccttaaaaaaaaagtctctgattttttgtttgacgagaagtacagcactagttagcaacaagacatccaaatcagtggtatccattgttttcatgttgccattgaatgatgaaccgtag

SEQ ID NO: 208632 - DNA, 1282 bp, Zea Mays
cgctcggcgcccatcgaaaaaccctctcctctcccggacaggcggacagcggcaagctggccaccgcgtcaccgcctctacagccccaggctccactgctaaacgccggtaatggcccaggctccggcgcgcgccgcttccgccgtacgtctcttcgacgcgcactgccacctgcaagacccccgcatcgcggccgtcgcccctgcccttatacgagccgccggcgcatccggcgtcgcacgcttcgctgtcaacggcacctccgagaaggactggcacctggtgaagcagatggccgaggatcacccagccgtcgtcccctgcttcggcctgcacccttggtgggtacccgagaggtcgccggattggatgaatttgctccggcggttcttcgccgaaaccccggaggcggctgttggggagattggtctggacaaaggttcacatggaaaaaccatcaacttcggagaacaggttgaagtgttccagcgacagctcgaactagctaaggaattggagagacctgtttctgttcattgtgtgcgggcatttggtgatcttctggaagtattgaagcaaactggacctttcccagcaggcgtgttgttacattcttatatgggatctgcagaaatggtgtctgcccttgcaaatttaggctgttacttttcactatctggcttcttgacaggcatgaaatccactaaagctaagcacatgctgaagtcggattcttttagagacagatgcacctgatgcattaccaagattggacaatgtttctgtatcaccagtccatgttcacagttcagatgcagatactgaaaagcgtcacatggattcagagtcacaggctgctaatgcatcaaatgagtccttgaaccatccagaaaatatccatattgttttggagtatgtcgcatcactccttgaaatgacagagtcagaattggcggagttgagttacaagaatgctaccaagctgttttcttatcctggctccaaagttcaacatgaacctgaagacatctaaatcgggttcaacactaccttactcactgggtcctcccagacacaatgtttgagaaactgaaatggctgtacatcactgttaatattggtgaaataaaacagataccgaatcaaagtagtgcaactggtttccttaaaaaaaaagtctctgattttttgtttgacgagaagtacagcactagttagcaacaagacatccaaatcagtggtatccattgttttcatgttgccattgaatgatgaaccgtag

SEQ ID NO: 208633 - DNA, 833 bp, Zea Mays
atgcagagcgggagcgggagcgggagaaggcggcggtcacgctcgtttcttccggtaaatgctagggagaggcgaaaacgacagggcggcggagttggctcaacgctggagtcgaggcagcgaccaacctcggaaggaaacttcgacccgagttcgactagcaccggcggtccggcgcgtccccggctcccagcctgcctgccagtgccaggtgccagccatccgatcttcgcttggccacggaactctgtgggccgaacaccaatacccgaggtgggcaggtttctcaatgggccccaaattctcccgcggcttctctcttcttgtcttcccctaaacgtcgctcgccgcttttcgctatttctcggggagcgtgtgttccagttcctgccttgcaggccgccgagatggtgggaccgtgggaggcggcaaaccgatggaggacagcgtcacgcgggccacgcggctttcggtgcggcagcgatcagcgcctccgccgtcgccgtgcaccccctcgacacggttaagcactcctccagcttccagatggaagggaggacaactatgtctattattctgaggctatgttggctggcatagttgctggtgctgtagagactgttttctgcacaccatttgaacttttcaaacttcgaaagctagttagttttgtgattccttcaaaagctatgggccctgcaaatgttgttaaggatcatttccagtggttttcaactgttgctgggtatgttcttgatataacggtgtggaacaacacggcgggccttttatctgatctttctccaagcatcccgacatgttgggtgctctga

SEQ ID NO: 208634 - DNA, 6544 bp, Zea Mays
ccgcaaggcccgcaactgccatcgtcctctgctcgtcgcgtcgttctcctctcgaccgcatcgcgcccgtggcggggaacgagccatcgacgccgcgtcgcgtgcctttcttcttcgtcccccccctgcctgcctagctgtctcaggctgccgcccgcccagccccaaaacattcggcagccgagtcaaccgagaacacgagccatccacccaccctgtcccttccccggctttcccccgtcctcggctccaccaattgctctcgcgtcagtggaaggaaaaaccaagggcgagggagggaggagcgcatctccgccccgcccgcgttcccgtaccccgatccgccacatgatctgacaccgcattgccgccgaggtgacccctcccgcccccagaatggaggcgctcaacgagctctgcgacctggtggccgcgcacccggatctcctcctcgccgacaagcttgcatggctctcctcccgctgcgccgccgccccgggtgccgccgccccgcagcgtgcgtcgagggcgcaccttcattcgctcctcgcgttggcgcgcctcctcccggcgggtggcgccggtgccggtgccgaaggcgatgcggcgcccccggccccactcctattcttcctcgcgtcccacgccttcctctcgccggccttctggccccagtctttcgccccggcgccgtttctcgctaggctcctcccgctcctcgccgcggccccatcctcccccgccctttcttccgcgctctccgccgccctcctcgcggcgctcgacgtcgccgacccgacctccgcgccgctcgcccgcgcgtttctctccgccgccgctgccgcggcgcccctgccgctcctccccgcggatgccgcgcccatcgctgcccggctgctcctcgagtttcttggctccgaggaggagccgatcagggccaaggggaagggagaggacaccttgggcgaggaaaacggtggggcaaaggaggtagtgcggaggttcgaggaggaggaggtcgatgagctggagcggaaggaagtcgcattcagactgaccgtgcatatgcttgggggcgagggtgggctagagaccgagcagattgggaaggtcaggaatgctgctgcgcgacaggtccgatcactcacggattttctcaagattagaaagcgggactggagggagcagggtacacagctcagggcaaggataaacaccaaattgatgtgttgtcaagctgcagtgggggtgctggtgcgaagcgtttccaccatggatactgatatcaaatcttcgaaggatatgctccagcagactctagcttggttcatcgaggccaccaagtcgtgcatcctgtcatcctggcggaaactgaagatatgcgaggagctattttgcacactgctcaatgggatcagccagataactgtctcacgtgggggccaacttctgccggtgcttttgattcccttaaaaccgcttgttgtgagcacatgttcgcaggctgacatggcaggcagtagtcctggggctctatttgaagcagttgtgaagttgagctgtgagatcatagagtttggctggacaaaggatagggcccttgttgacacatttgttatgcgtctagctgcttatgttcgtgagcggaatgattacgaggaggaggatggcaaaggaaaagaggcagttccagttattcgacttaatgtcatacgccttttggctgagttatgtgtttgcttgaaaaaatgggaagttgtggacatgattttaccccttttcattgaacatctagaagagggtgatgcttcatctccaagttcattgcgtttacgattattagatgcaatatctcgtgttgcgtgcttgggttttgaaaaatcatatcgtgagagtattgtcttgatgacaagaagctatcttgacaaagttaaagctctaggggcttcagaaaacaatacagttccatcagaagcaacaactgagcgaacagaaactcttcctgcaggctttctgcttgttgcttccaaccttacaagcacaaaactcaggtctgattatcgtcataggttactgtctctgtgctcagatgtggggctagttgctgaatctaaaagtgggaggagtggtgctgatttgatgggtccgttacttcctgcagttgctgatatatgttctgattttgatccagtgtccactgttgagccatcattattgaaactattccgaaacctttggttctacgttgtattgtttgggctagctccacccatacagaataatgaggcacctacaaaaccggtttccacttcattaggtacagcagaaagcagcagtgctatagcccttcaagctgtagctggaccatacatgtggaacagccaatggtctgtagcagtgcaacgtattgcgcaaggaacacctcctctggttgttagttctgtaaaatggcttgaagatgagctagagttaaacactctacacaacccaggtagtcgtggtggtaatggtaatgaaaattctgctgttgggcagagagctgcactttctgctgctttgggaggtcgagttgaggtagcagcaatgaacactatttcaggggtaaaagctacgtacctacttgcagttgctttcctggagatactacgttttagttgcaatggtggcatactctcggctacatctacattgaatagatcaaacagtgctttcagttgtgtatttgaatacctgctcactccaaatttgacaccagcagtaactcagtgtttgacggcagttgcacatagagcttttgaaacagtgctgtcgtggctggatgatcgcatatctgacataggtgaaggagctgatgttagagaatcggttctttctgttcatgcttgctttctgataaaaagcatgtcccagagagacgagcatgttcgtgatgtgagtgttaagcttttaacgcagctgaaggaaaagttcccacaggtcctctggaactcttcatgcttggatttacttcttatttctgttcacaatgagttgacttctggtccagtcagtgatcctgcttgggttgcaactgtacgctcactgtatcaaaagatcgctagggaatggttaacaagtgctctttcatatgctccatgtaccacacaaggccttatacaggaaaatttttgcaagccaagtggagtacaaagaacacaacatacagcagatgttgtttcacttttatctgagatacgtatttgtagtggaaagaatgattggaacggtattaggacggccaatgttcctgcagttatggactcagcagcagcagcatcgggagccaaaaaagaagcacctgacttcactttggaagtactctctactgcagtagtgagtgcaactgtgaagtgcaatcatgctggtgagattgctggtatgagaaggctgtttagtactatgggaggcataaacatgggcatgtctcctcctgggacacaatctttgcacccccatcagtcatttgatgaagtttttgtctccaagtttgtcagtcttcttcagaactttgttgttgcagctgagaaacaaccaatagataattcacaatttcgtgaaacatgttctcaagctacagcattacttcttgatcatatggtgtctgattctagagcaaacctggaagggttttctcagcttatacggcttctatgttggtgtcctgcttatatttctacccctgatgcaatggaaactggaatctacatctggacatggctagtatcggctgcgccttctttaggtcctcttgtgcttgcggaacttgttgatgcatggctgtggaccatagatacaaagcgtggattgtttgcatcagatatgaattactgtggcccagatgcaaaattgaggccgcatcttatcgctggtgagcctgaggcaccaccagaaaaggacccagtagaagcaataatagcccatagactctggcttggcttcttcattgatcggtttgaggtggttcggcatgacagcattgaacaacttctacttctaggtcgaatgttacaaggaacaatgaagtctccagctcatttttctcaccatcctgctgctactggcactttctttactgcgatgctccttggattgaagttttgctcatgccagtctcaatctaacttgcagaagtgtaatatggggcttcagttgttagaggacagggtataccgtgctgctttgggatggttttcttatgcgcctgagtggtatgaatctccaaacaaaacttatgctcagagagaagctcaatctgtgtcagtatttgttcattttctacaaaatgagcgcaccagtggtcctgtcgattcggtttcaaagttacagggacgtgaaggtgaacctagcatggcagatcacattcatcctgtttggggctgtgttgacaactacacaaatgcaagggaaaagcgtaaacagttacttctgacactttctcagaatgaggcagacagacttgaagtctgggcacaaccaatacatacaaaagatacaacgacttttcgcggtaaaatcagctcggataaatggattgatcatgtcagaactgcttttgctgttgatcctcgaattgctctttctatgcctttgaggtttccaacgaatgctacaatgcaatctgagattactcagttggtacagacacgattactggagcttcgtacaattcctgaagcattaccctttttcattactccaaaagcagtagatgaaaattcagtgctgttacagcaactaccacactgggctccatgttctgttacacaggcattggagtttcttactcctccttataaaggacatccacgtgttatggcctatgtccttcgtgtcttggagacttacccccctgagactgttaccttttttatgccacaattggtacaatctctcagatatgatgaagggaaactggttgaagggtacttgcttggagctactcgaagaagtaatatatttgctcatatcttgatatggcatctgcagggagaatatgttgatgaatctgagaaagatgcagctgctctgaagggcagtgcattccagtccttgctcccagctgttaaggacaaaattatagagagttttactccagaggctcgtgacatgtttgaaagagaatttgatttctttgacaaagtcacatctatttctggtgttcttttccctctccccaaggacgagcggagagcgggtataagaagggaactggagaagatttctattccaggtgatgacctctacctacctactgcaacaaacaagctagtacggggtatacagttggacagcggtattcctctccagtctgctgcaaaagttccaataatgattacttttaacgttgttgaccgtgacggggacccaaatgatgtaaaaccacaggcttgtatttttaaggttggtgatgactgtagacaagatgtgctggcgctgcaagtgattgctctattaagggatgtatttcaagctgtcggattaaacctgtatctttttccatatggtgttttgcctactggaccaggccgaggcataattgaggtggtcccagatactcgaagtagaaatcaaatgggtgaaacaactgatggtggtttattagagatatttcagcaagattatggtcctgtaggttcaccttcttttgaaactgctcgagaaatgtttatgatcagtagtgctggatatgctgttgctagcttactccttcaaccgaaggatcggcataatggcaatcttctctttgatagccatgggagattagttcacattgattttggttttattttggagatttcacctggaggtaacatggggtttgagagtgcacatttcaagctaagccacgagatgactcaattgctggatccatctggaactatgaagagtgatacatggaaccaatttctcaggttgtgtgtcaaaggatacctagcagcaaggaggcatatgaatgggattttaagtacagtcaacctaatggtggacagtggccttccttgctttagcaggggagatcctatcaataatcttcggaagcggtttcatccagagatgaatgaacgtgaggccgctaacttcatggtacgaacatgtgctgatgcttacaacaagtggactaccgcagggtatgacttgattcagtacttgcagcagggtattgagaaatagtttgtttctcgttttttaagtggcgttcgtgtacatcaattgtatgtagccactatctttttatgtagaatttattttttgagttgtatcatcgggcaaggatggaattcatgtgattaacgtaggatgcttggtgcaaagaggcaattctttttttttcttgcactgtaaaactgccaagaaagtagctagtaagttgatcaagattctgtattgctgtcgcagaatgcattttcgtttactagacatgtatgattcgcatttttatcatgtgatttcattttttccctcgtcaccagatacgagtggctcattgttagacggcatctcgttg

SEQ ID NO: 208635 - DNA, 5082 bp, Zea Mays
cgcaactgccatcgtcctctgctcgtcgcgtcgttctcctctcgaccgcatcgcgcccgtggcggggaacgagccatcgacgccgcgtcgcgtgcctttcttcttcgtcccccccctgcctgcctagctgtctcaggctgccgcccgcccagccccaaaacattcggcagccgagtcaaccgagaacacgagccatccacccaccctgtcccttccccggctttcccccgtcctcggctccaccaattgctctcgcgtcagtggaaggaaaaaccaagggcgagggagggaggagcgcatctccgccccgcccgcgttcccgtaccccgatccgccacatgatctgacaccgcattgccgccgaggtgacccctcccgcccccagaatggaggcgctcaacgagctctgcgacctggtggccgcgcacccggatctcctcctcgccgacaagcttgcatggctctcctcccgctgcgccgccgccccgggtgccgccgccccgcagcgtgcgtcgagggcgcaccttcattcgctcctcgcgttggcgcgcctcctcccggcgggtggcgccggtgccggtgccgaaggcgatgcggcgcccccggccccactcctattcttcctcgcgtcccacgccttcctctcgccggccttctggccccagtctttcgccccggcgccgtttctcgctaggctcctcccgctcctcgccgcggccccatcctcccccgccctttcttccgcgctctccgccgccctcctcgcggcgctcgacgtcgccgacccgacctccgcgccgctcgcccgcgcgtttctctccgccgccgctgccgcggcgcccctgccgctcctccccgcggatgccgcgcccatcgctgcccggctgctcctcgagtttcttggctccgaggaggagccgatcagggccaaggggaagggagaggacaccttgggcgaggaaaacggtggggcaaaggaggtagtgcggaggttcgaggaggaggaggtcgatgagctggagcggaaggaagtcgcattcagactgaccgtgcatatgcttgggggcgagggtgggctagagaccgagcagattgggaaggtcaggaatgctgctgcgcgacaggtccgatcactcacggattttctcaagattagaaagcgggactggagggagcagggtacacagctcagggcaaggataaacaccaaattgatgtgttgtcaagctgcagtgggggtgctggtgcgaagcgtttccaccatggatactgatatcaaatcttcgaaggatatgctccagcagactctagcttggttcatcgaggccaccaagtcgtgcatcctgtcatcctggcggaaactgaagatatgcgaggagctattttgcacactgctcaatgggatcagccagataactgtctcacgtgggggccaacttctgccggtgcttttgattcccttaaaaccgcttgttgtgagcacatgttcgcaggctgacatggcaggcagtagtcctggggctctatttgaagcagttgtgaagttgagctgtgagatcatagagtttggctggacaaaggatagggcccttgttgacacatttgttatgcgtctagctgcttatgttcgtgagcggaatgattacgaggaggaggatggcaaaggaaaagaggcagttccagttattcgacttaatgtcatacgccttttggctgagttatgtgtttgcttgaaaaaatgggaagttgtggacatgattttaccccttttcattgaacatctagaagagggtgatgcttcatctccaagttcattgcgtttacgattattagatgcaatatctcgtgttgcgtgcttgggttttgaaaaatcatatcgtgagagtattgtcttgatgacaagaagctatcttgacaaagttaaagctctaggggcttcagaaaacaatacagttccatcagaagcaacaactgagcgaacagaaactcttcctgcaggctttctgcttgttgcttccaaccttacaagcacaaaactcaggtctgattatcgtcataggttactgtctctgtgctcagatgtggggctagttgctgaatctaaaagtgggaggagtggtgctgatttgatgggtccgttacttcctgcagttgctgatatatgttctgattttgatccagtgtccactgttgagccatcattattgaaactattccgaaacctttggttctacgttgtattgtttgggctagctccacccatacagaataatgaggcacctacaaaaccggtttccacttcattaggtacagcagaaagcagcagtgctatagcccttcaagctgtagctggaccatacatgtggaacagccaatggtctgtagcagtgcaacgtattgcgcaaggaacacctcctctggttgttagttctgtaaaatggcttgaagatgagctagagttaaacactctacacaacccaggtagtcgtggtggtaatggtaatgaaaattctgctgttgggcagagagctgcactttctgctgctttgggaggtcgagttgaggtagcagcaatgaacactatttcaggggtaaaagctacgtacctacttgcagttgctttcctggagatactacgttttagttgcaatggtggcatactctcggctacatctacattgaatagatcaaacagtgctttcagttgtgtatttgaatacctgctcactccaaatttgacaccagcagtaactcagtgtttgacggcagttgcacatagagcttttgaaacagtgctgtcgtggctggatgatcgcatatctgacataggtgaaggagctgatgttagagaatcggttctttctgttcatgcttgctttctgataaaaagcatgtcccagagagacgagcatgttcgtgatgtgagtgttaagcttttaacgcagctgaaggaaaagttcccacaggtcctctggaactcttcatgcttggatttacttcttatttctgttcacaatgagttgacttctggtccagtcagtgatcctgcttgggttgcaactgtacgctcactgtatcaaaagatcgctagggaatggttaacaagtgctctttcatatgctccatgtaccacacaaggccttatacaggaaaatttttgcaagccaagtggagtacaaagaacacaacatacagcagatgttgtttcacttttatctgagatacgtatttgtagtggaaagaatgattggaacggtattaggacggccaatgttcctgcagttatggactcagcagcagcagcatcgggagccaaaaaagaagcacctgacttcactttggaagtactctctactgcagtagtgagtgcaactgtgaagtgcaatcatgctggtgagattgctggtatgagaaggctgtttagtactatgggaggcataaacatgggcatgtctcctcctgggacacaatctttgcacccccatcagtcatttgatgaagtttttgtctccaagtttgtcagtcttcttcagaactttgttgttgcagctgagaaacaaccaatagataattcacaatttcgtgaaacatgttctcaagctacagcattacttcttgatcatatggtgtctgattctagagcaaacctggaagggttttctcagcttatacggcttctatgttggtgtcctgcttatatttctacccctgatgcaatggaaactggaatctacatctggacatggctagtatcggctgcgccttctttaggtcctcttgtgcttgcggaacttgttgatgcatggctgtggaccatagatacaaagcgtggattgtttgcatcagatatgaattactgtggcccagatgcaaaattgaggccgcatcttatcgctggtgagcctgaggcaccaccagaaaaggacccagtagaagcaataatagcccatagactctggcttggcttcttcattgatcggtttgaggtggttcggcatgacagcattgaacaacttctacttctaggtcgaatgttacaaggaacaatgaagtctccagctcatttttctcaccatcctgctgctactggcactttctttactgcgatgctccttggattgaagttttgctcatgccagtctcaatctaacttgcagaagtgtaatatggggcttcagttgttagaggacagggtataccgtgctgctttgggatggttttcttatgcgcctgagtggtatgaatctccaaacaaaacttatgctcagagagaagctcaatctgtgtcagtatttgttcattttctacaaaatgagcgcaccagtggtcctgtcgattcggtttcaaagttacagggacgtgaaggtgaacctagcatggcagatcacattcatcctgtttggggctgtgttgacaactacacaaatgcaagggaaaagcgtaaacagttacttctgacactttctcagaatgaggcagacagacttgaagtctgggcacaaccaatacatacaaaagatacaacgacttttcgcggtaaaatcagctcggataaatggattgatcatgtcagaactgcttttgctgttgatcctcgaattgctctttctatgcctttgaggtttccaacgaatgctacaatgcaatctgagattactcagttggtacagacacgattactggagcttcgtacaattcctgaagcattaccctttttcattactccaaaagcagtagatgaaaattcagtgctgttacagcaactaccacactgggctccatgttctgttacacaggcattggagtttcttactcctccttataaaggacatccacgtgttatggcctatgtccttcgtgtcttggagacttacccccctgagactgttaccttttttatgccacaattggtacaatctctcagatatgatgaagggaaactggttgaagggtacttgcttggagctactcgaagaagtaatatatttgctcatatcttgatatggcatctgcagggagaatatgttgatgaatctgagaaagatgcagctgctctgaaggttacaagtatcaatgcagatt

SEQ ID NO: 208636 - DNA, 6351 bp, Zea Mays
cgcaactgccatcgtcctctgctcgtcgcgtcgttctcctctcgaccgcatcgcgcccgtggcggggaacgagccatcgacgccgcgtcgcgtgcctttcttcttcgtcccccccctgcctgcctagctgtctcaggctgccgcccgcccagccccaaaacattcggcagccgagtcaaccgagaacacgagccatccacccaccctgtcccttccccggctttcccccgtcctcggctccaccaattgctctcgcgtcagtggaaggaaaaaccaagggcgagggagggaggagcgcatctccgccccgcccgcgttcccgtaccccgatccgccacatgatctgacaccgcattgccgccgaggtgacccctcccgcccccagaatggaggcgctcaacgagctctgcgacctggtggccgcgcacccggatctcctcctcgccgacaagcttgcatggctctcctcccgctgcgccgccgccccgggtgccgccgccccgcagcgtgcgtcgagggcgcaccttcattcgctcctcgcgttggcgcgcctcctcccggcgggtggcgccggtgccggtgccgaaggcgatgcggcgcccccggccccactcctattcttcctcgcgtcccacgccttcctctcgccggccttctggccccagtctttcgccccggcgccgtttctcgctaggctcctcccgctcctcgccgcggccccatcctcccccgccctttcttccgcgctctccgccgccctcctcgcggcgctcgacgtcgccgacccgacctccgcgccgctcgcccgcgcgtttctctccgccgccgctgccgcggcgcccctgccgctcctccccgcggatgccgcgcccatcgctgcccggctgctcctcgagtttcttggctccgaggaggagccgatcagggccaaggggaagggagaggacaccttgggcgaggaaaacggtggggcaaaggaggtagtgcggaggttcgaggaggaggaggtcgatgagctggagcggaaggaagtcgcattcagactgaccgtgcatatgcttgggggcgagggtgggctagagaccgagcagattgggaaggtcaggaatgctgctgcgcgacaggtccgatcactcacggattttctcaagattagaaagcgggactggagggagcagggtacacagctcagggcaaggataaacaccaaattgatgtgttgtcaagctgcagtgggggtgctggtgcgaagcgtttccaccatggatactgatatcaaatcttcgaaggatatgctccagcagactctagcttggttcatcgaggccaccaagtcgtgcatcctgtcatcctggcggaaactgaagatatgcgaggagctattttgcacactgctcaatgggatcagccagataactgtctcacgtgggggccaacttctgccggtgcttttgattcccttaaaaccgcttgttgtgagcacatgttcgcaggctgacatggcaggcagtagtcctggggctctatttgaagcagttgtgaagttgagctgtgagatcatagagtttggctggacaaaggatagggcccttgttgacacatttgttatgcgtctagctgcttatgttcgtgagcggaatgattacgaggaggaggatggcaaaggaaaagaggcagttccagttattcgacttaatgtcatacgccttttggctgagttatgtgtttgcttgaaaaaatgggaagttgtggacatgattttaccccttttcattgaacatctagaagagggtgatgcttcatctccaagttcattgcgtttacgattattagatgcaatatctcgtgttgcgtgcttgggttttgaaaaatcatatcgtgagagtattgtcttgatgacaagaagctatcttgacaaagttaaagctctaggggcttcagaaaacaatacagttccatcagaagcaacaactgagcgaacagaaactcttcctgcaggctttctgcttgttgcttccaaccttacaagcacaaaactcaggtctgattatcgtcataggttactgtctctgtgctcagatgtggggctagttgctgaatctaaaagtgggaggagtggtgctgatttgatgggtccgttacttcctgcagttgctgatatatgttctgattttgatccagtgtccactgttgagccatcattattgaaactattccgaaacctttggttctacgttgtattgtttgggctagctccacccatacagaataatgaggcacctacaaaaccggtttccacttcattaggtacagcagaaagcagcagtgctatagcccttcaagctgtagctggaccatacatgtggaacagccaatggtctgtagcagtgcaacgtattgcgcaaggaacacctcctctggttgttagttctgtaaaatggcttgaagatgagctagagttaaacactctacacaacccaggtagtcgtggtggtaatggtaatgaaaattctgctgttgggcagagagctgcactttctgctgctttgggaggtcgagttgaggtagcagcaatgaacactatttcaggggtaaaagctacgtacctacttgcagttgctttcctggagatactacgttttagttgcaatggtggcatactctcggctacatctacattgaatagatcaaacagtgctttcagttgtgtatttgaatacctgctcactccaaatttgacaccagcagtaactcagtgtttgacggcagttgcacatagagcttttgaaacagtgctgtcgtggctggatgatcgcatatctgacataggtgaaggagctgatgttagagaatcggttctttctgttcatgcttgctttctgataaaaagcatgtcccagagagacgagcatgttcgtgatgtgagtgttaagcttttaacgcagctgaaggaaaagttcccacaggaaaatttttgcaagccaagtggagtacaaagaacacaacatacagcagatgttgtttcacttttatctgagatacgtatttgtagtggaaagaatgattggaacggtattaggacggccaatgttcctgcagttatggactcagcagcagcagcatcgggagccaaaaaagaagcacctgacttcactttggaagtactctctactgcagtagtgagtgcaactgtgaagtgcaatcatgctggtgagattgctggtatgagaaggctgtttagtactatgggaggcataaacatgggcatgtctcctcctgggacacaatctttgcacccccatcagtcatttgatgaagtttttgtctccaagtttgtcagtcttcttcagaactttgttgttgcagctgagaaacaaccaatagataattcacaatttcgtgaaacatgttctcaagctacagcattacttcttgatcatatggtgtctgattctagagcaaacctggaagggttttctcagcttatacggcttctatgttggtgtcctgcttatatttctacccctgatgcaatggaaactggaatctacatctggacatggctagtatcggctgcgccttctttaggtcctcttgtgcttgcggaacttgttgatgcatggctgtggaccatagatacaaagcgtggattgtttgcatcagatatgaattactgtggcccagatgcaaaattgaggccgcatcttatcgctggtgagcctgaggcaccaccagaaaaggacccagtagaagcaataatagcccatagactctggcttggcttcttcattgatcggtttgaggtggttcggcatgacagcattgaacaacttctacttctaggtcgaatgttacaaggaacaatgaagtctccagctcatttttctcaccatcctgctgctactggcactttctttactgcgatgctccttggattgaagttttgctcatgccagtctcaatctaacttgcagaagtgtaatatggggcttcagttgttagaggacagggtataccgtgctgctttgggatggttttcttatgcgcctgagtggtatgaatctccaaacaaaacttatgctcagagagaagctcaatctgtgtcagtatttgttcattttctacaaaatgagcgcaccagtggtcctgtcgattcggtttcaaagttacagggacgtgaaggtgaacctagcatggcagatcacattcatcctgtttggggctgtgttgacaactacacaaatgcaagggaaaagcgtaaacagttacttctgacactttctcagaatgaggcagacagacttgaagtctgggcacaaccaatacatacaaaagatacaacgacttttcgcggtaaaatcagctcggataaatggattgatcatgtcagaactgcttttgctgttgatcctcgaattgctctttctatgcctttgaggtttccaacgaatgctacaatgcaatctgagattactcagttggtacagacacgattactggagcttcgtacaattcctgaagcattaccctttttcattactccaaaagcagtagatgaaaattcagtgctgttacagcaactaccacactgggctccatgttctgttacacaggcattggagtttcttactcctccttataaaggacatccacgtgttatggcctatgtccttcgtgtcttggagacttacccccctgagactgttaccttttttatgccacaattggtacaatctctcagatatgatgaagggaaactggttgaagggtacttgcttggagctactcgaagaagtaatatatttgctcatatcttgatatggcatctgcagggagaatatgttgatgaatctgagaaagatgcagctgctctgaagggcagtgcattccagtccttgctcccagctgttaaggacaaaattatagagagttttactccagaggctcgtgacatgtttgaaagagaatttgatttctttgacaaagtcacatctatttctggtgttcttttccctctccccaaggacgagcggagagcgggtataagaagggaactggagaagatttctattccaggtgatgacctctacctacctactgcaacaaacaagctagtacggggtatacagttggacagcggtattcctctccagtctgctgcaaaagttccaataatgattacttttaacgttgttgaccgtgacggggacccaaatgatgtaaaaccacaggcttgtatttttaaggttggtgatgactgtagacaagatgtgctggcgctgcaagtgattgctctattaagggatgtatttcaagctgtcggattaaacctgtatctttttccatatggtgttttgcctactggaccaggccgaggcataattgaggtggtcccagatactcgaagtagaaatcaaatgggtgaaacaactgatggtggtttattagagatatttcagcaagattatggtcctgtaggttcaccttcttttgaaactgctcgagaaatgtttatgatcagtagtgctggatatgctgttgctagcttactccttcaaccgaaggatcggcataatggcaatcttctctttgatagccatgggagattagttcacattgattttggttttattttggagatttcacctggaggtaacatggggtttgagagtgcacatttcaagctaagccacgagatgactcaattgctggatccatctggaactatgaagagtgatacatggaaccaatttctcaggttgtgtgtcaaaggatacctagcagcaaggaggcatatgaatgggattttaagtacagtcaacctaatggtggacagtggccttccttgctttagcaggggagatcctatcaataatcttcggaagcggtttcatccagagatgaatgaacgtgaggccgctaacttcatggtacgaacatgtgctgatgcttacaacaagtggactaccgcagggtatgacttgattcagtacttgcagcagggtattgagaaatagtttgtttctcgttttttaagtggcgttcgtgtacatcaattgtatgtagccactatctttttatgtagaatttattttttgagttgtatcatcgggcaaggatggaattcatgtgattaacgtaggatgcttggtgcaaagaggcaattctttttttttcttgcactgtaaaactgccaagaaagtagctagtaagttgatcaagattctgtattgctgtcgcagaatgcattttcgtttactagacatgtatgattcgcatttttatcatgtgatttcattttttccctcgtcaccagatacgagtggctcattgttagacggcatctcgttg

SEQ ID NO: 208637 - DNA, 6569 bp, Zea Mays
cgcaactgccatcgtcctctgctcgtcgcgtcgttctcctctcgaccgcatcgcgcccgtggcggggaacgagccatcgacgccgcgtcgcgtgcctttcttcttcgtcccccccctgcctgcctagctgtctcaggctgccgcccgcccagccccaaaacattcggcagccgagtcaaccgagaacacgagccatccacccaccctgtcccttccccggctttcccccgtcctcggctccaccaattgctctcgcgtcagtggaaggaaaaaccaagggcgagggagggaggagcgcatctccgccccgcccgcgttcccgtaccccgatccgccacatgatctgacaccgcattgccgccgaggtgacccctcccgcccccagaatggaggcgctcaacgagctctgcgacctggtggccgcgcacccggatctcctcctcgccgacaagcttgcatggctctcctcccgctgcgccgccgccccgggtgccgccgccccgcagcgtgcgtcgagggcgcaccttcattcgctcctcgcgttggcgcgcctcctcccggcgggtggcgccggtgccggtgccgaaggcgatgcggcgcccccggccccactcctattcttcctcgcgtcccacgccttcctctcgccggccttctggccccagtctttcgccccggcgccgtttctcgctaggctcctcccgctcctcgccgcggccccatcctcccccgccctttcttccgcgctctccgccgccctcctcgcggcgctcgacgtcgccgacccgacctccgcgccgctcgcccgcgcgtttctctccgccgccgctgccgcggcgcccctgccgctcctccccgcggatgccgcgcccatcgctgcccggctgctcctcgagtttcttggctccgaggaggagccgatcagggccaaggggaagggagaggacaccttgggcgaggaaaacggtggggcaaaggaggtagtgcggaggttcgaggaggaggaggtcgatgagctggagcggaaggaagtcgcattcagactgaccgtgcatatgcttgggggcgagggtgggctagagaccgagcagattgggaaggtcaggaatgctgctgcgcgacaggtccgatcactcacggattttctcaagattagaaagcgggactggagggagcagggtacacagctcagggcaaggataaacaccaaattgatgtgttgtcaagctgcagtgggggtgctggtgcgaagcgtttccaccatggatactgatatcaaatcttcgaaggatatgctccagcagactctagcttggttcatcgaggccaccaagtcgtgcatcctgtcatcctggcggaaactgaagatatgcgaggagctattttgcacactgctcaatgggatcagccagataactgtctcacgtgggggccaacttctgccggtgcttttgattcccttaaaaccgcttgttgtgagcacatgttcgcaggctgacatggcaggcagtagtcctggggctctatttgaagcagttgtgaagttgagctgtgagatcatagagtttggctggacaaaggatagggcccttgttgacacatttgttatgcgtctagctgcttatgttcgtgagcggaatgattacgaggaggagattgcaagcacaccgattcagattgttaaattgattatggttgaggatggcaaaggaaaagaggcagttccagttattcgacttaatgtcatacgccttttggctgagttatgtgtttgcttgaaaaaatgggaagttgtggacatgattttaccccttttcattgaacatctagaagagggtgatgcttcatctccaagttcattgcgtttacgattattagatgcaatatctcgtgttgcgtgcttgggttttgaaaaatcatatcgtgagagtattgtcttgatgacaagaagctatcttgacaaagttaaagctctaggggcttcagaaaacaatacagttccatcagaagcaacaactgagcgaacagaaactcttcctgcaggctttctgcttgttgcttccaaccttacaagcacaaaactcaggtctgattatcgtcataggttactgtctctgtgctcagatgtggggctagttgctgaatctaaaagtgggaggagtggtgctgatttgatgggtccgttacttcctgcagttgctgatatatgttctgattttgatccagtgtccactgttgagccatcattattgaaactattccgaaacctttggttctacgttgtattgtttgggctagctccacccatacagaataatgaggcacctacaaaaccggtttccacttcattaggtacagcagaaagcagcagtgctatagcccttcaagctgtagctggaccatacatgtggaacagccaatggtctgtagcagtgcaacgtattgcgcaaggaacacctcctctggttgttagttctgtaaaatggcttgaagatgagctagagttaaacactctacacaacccaggtagtcgtggtggtaatggtaatgaaaattctgctgttgggcagagagctgcactttctgctgctttgggaggtcgagttgaggtagcagcaatgaacactatttcaggggtaaaagctacgtacctacttgcagttgctttcctggagatactacgttttagttgcaatggtggcatactctcggctacatctacattgaatagatcaaacagtgctttcagttgtgtatttgaatacctgctcactccaaatttgacaccagcagtaactcagtgtttgacggcagttgcacatagagcttttgaaacagtgctgtcgtggctggatgatcgcatatctgacataggtgaaggagctgatgttagagaatcggttctttctgttcatgcttgctttctgataaaaagcatgtcccagagagacgagcatgttcgtgatgtgagtgttaagcttttaacgcagctgaaggaaaagttcccacaggtcctctggaactcttcatgcttggatttacttcttatttctgttcacaatgagttgacttctggtccagtcagtgatcctgcttgggttgcaactgtacgctcactgtatcaaaagatcgctagggaatggttaacaagtgctctttcatatgctccatgtaccacacaaggccttatacaggaaaatttttgcaagccaagtggagtacaaagaacacaacatacagcagatgttgtttcacttttatctgagatacgtatttgtagtggaaagaatgattggaacggtattaggacggccaatgttcctgcagttatggactcagcagcagcagcatcgggagccaaaaaagaagcacctgacttcactttggaagtactctctactgcagtagtgagtgcaactgtgaagtgcaatcatgctggtgagattgctggtatgagaaggctgtttagtactatgggaggcataaacatgggcatgtctcctcctgggacacaatctttgcacccccatcagtcatttgatgaagtttttgtctccaagtttgtcagtcttcttcagaactttgttgttgcagctgagaaacaaccaatagataattcacaatttcgtgaaacatgttctcaagctacagcattacttcttgatcatatggtgtctgattctagagcaaacctggaagggttttctcagcttatacggcttctatgttggtgtcctgcttatatttctacccctgatgcaatggaaactggaatctacatctggacatggctagtatcggctgcgccttctttaggtcctcttgtgcttgcggaacttgttgatgcatggctgtggaccatagatacaaagcgtggattgtttgcatcagatatgaattactgtggcccagatgcaaaattgaggccgcatcttatcgctggtgagcctgaggcaccaccagaaaaggacccagtagaagcaataatagcccatagactctggcttggcttcttcattgatcggtttgaggtggttcggcatgacagcattgaacaacttctacttctaggtcgaatgttacaaggaacaatgaagtctccagctcatttttctcaccatcctgctgctactggcactttctttactgcgatgctccttggattgaagttttgctcatgccagtctcaatctaacttgcagaagtgtaatatggggcttcagttgttagaggacagggtataccgtgctgctttgggatggttttcttatgcgcctgagtggtatgaatctccaaacaaaacttatgctcagagagaagctcaatctgtgtcagtatttgttcattttctacaaaatgagcgcaccagtggtcctgtcgattcggtttcaaagttacagggacgtgaaggtgaacctagcatggcagatcacattcatcctgtttggggctgtgttgacaactacacaaatgcaagggaaaagcgtaaacagttacttctgacactttctcagaatgaggcagacagacttgaagtctgggcacaaccaatacatacaaaagatacaacgacttttcgcggtaaaatcagctcggataaatggattgatcatgtcagaactgcttttgctgttgatcctcgaattgctctttctatgcctttgaggtttccaacgaatgctacaatgcaatctgagattactcagttggtacagacacgattactggagcttcgtacaattcctgaagcattaccctttttcattactccaaaagcagtagatgaaaattcagtgctgttacagcaactaccacactgggctccatgttctgttacacaggcattggagtttcttactcctccttataaaggacatccacgtgttatggcctatgtccttcgtgtcttggagacttacccccctgagactgttaccttttttatgccacaattggtacaatctctcagatatgatgaagggaaactggttgaagggtacttgcttggagctactcgaagaagtaatatatttgctcatatcttgatatggcatctgcagggagaatatgttgatgaatctgagaaagatgcagctgctctgaagggcagtgcattccagtccttgctcccagctgttaaggacaaaattatagagagttttactccagaggctcgtgacatgtttgaaagagaatttgatttctttgacaaagtcacatctatttctggtgttcttttccctctccccaaggacgagcggagagcgggtataagaagggaactggagaagatttctattccaggtgatgacctctacctacctactgcaacaaacaagctagtacggggtatacagttggacagcggtattcctctccagtctgctgcaaaagttccaataatgattacttttaacgttgttgaccgtgacggggacccaaatgatgtaaaaccacaggcttgtatttttaaggttggtgatgactgtagacaagatgtgctggcgctgcaagtgattgctctattaagggatgtatttcaagctgtcggattaaacctgtatctttttccatatggtgttttgcctactggaccaggccgaggcataattgagatactcgaagtagaaatcaaatgggtgaaacaactgatggtggtttattagagatatttcagcaagattatggtcctgtaggttcaccttcttttgaaactgctcgagaaatgtttatgatcagtagtgctggatatgctgttgctagcttactccttcaaccgaaggatcggcataatggcaatcttctctttgatagccatgggagattagttcacattgattttggttttattttggagatttcacctggaggtaacatggggtttgagagtgcacatttcaagctaagccacgagatgactcaattgctggatccatctggaactatgaagagtgatacatggaaccaatttctcaggttgtgtgtcaaaggatacctagcagcaaggaggcatatgaatgggattttaagtacagtcaacctaatggtggacagtggccttccttgctttagcaggggagatcctatcaataatcttcggaagcggtttcatccagagatgaatgaacgtgaggccgctaacttcatggtacgaacatgtgctgatgcttacaacaagtggactaccgcagggtatgacttgattcagtacttgcagcagggtattgagaaatagtttgtttctcgttttttaagtggcgttcgtgtacatcaattgtatgtagccactatctttttatgtagaatttattttttgagttgtatcatcgggcaaggatggaattcatgtgattaacgtaggatgcttggtgcaaagaggcaattctttttttttcttgcactgtaaaactgccaagaaagtagctagtaagttgatcaagattctgtattgctgtcgcagaatgcattttcgtttactagacatgtatgattcgcatttttatcatgtgatttcattttttccctcgtcaccagatacgagtggctcattgttagacggcatctcgttg

SEQ ID NO: 208638 - DNA, 6579 bp, Zea Mays
cgcaactgccatcgtcctctgctcgtcgcgtcgttctcctctcgaccgcatcgcgcccgtggcggggaacgagccatcgacgccgcgtcgcgtgcctttcttcttcgtcccccccctgcctgcctagctgtctcaggctgccgcccgcccagccccaaaacattcggcagccgagtcaaccgagaacacgagccatccacccaccctgtcccttccccggctttcccccgtcctcggctccaccaattgctctcgcgtcagtggaaggaaaaaccaagggcgagggagggaggagcgcatctccgccccgcccgcgttcccgtaccccgatccgccacatgatctgacaccgcattgccgccgaggtgacccctcccgcccccagaatggaggcgctcaacgagctctgcgacctggtggccgcgcacccggatctcctcctcgccgacaagcttgcatggctctcctcccgctgcgccgccgccccgggtgccgccgccccgcagcgtgcgtcgagggcgcaccttcattcgctcctcgcgttggcgcgcctcctcccggcgggtggcgccggtgccggtgccgaaggcgatgcggcgcccccggccccactcctattcttcctcgcgtcccacgccttcctctcgccggccttctggccccagtctttcgccccggcgccgtttctcgctaggctcctcccgctcctcgccgcggccccatcctcccccgccctttcttccgcgctctccgccgccctcctcgcggcgctcgacgtcgccgacccgacctccgcgccgctcgcccgcgcgtttctctccgccgccgctgccgcggcgcccctgccgctcctccccgcggatgccgcgcccatcgctgcccggctgctcctcgagtttcttggctccgaggaggagccgatcagggccaaggggaagggagaggacaccttgggcgaggaaaacggtggggcaaaggaggtagtgcggaggttcgaggaggaggaggtcgatgagctggagcggaaggaagtcgcattcagactgaccgtgcatatgcttgggggcgagggtgggctagagaccgagcagattgggaaggtcaggaatgctgctgcgcgacaggtccgatcactcacggattttctcaagattagaaagcgggactggagggagcagggtacacagctcagggcaaggataaacaccaaattgatgtgttgtcaagctgcagtgggggtgctggtgcgaagcgtttccaccatggatactgatatcaaatcttcgaaggatatgctccagcagactctagcttggttcatcgaggccaccaagtcgtgcatcctgtcatcctggcggaaactgaagatatgcgaggagctattttgcacactgctcaatgggatcagccagataactgtctcacgtgggggccaacttctgccggtgcttttgattcccttaaaaccgcttgttgtgagcacatgttcgcaggctgacatggcaggcagtagtcctggggctctatttgaagcagttgtgaagttgagctgtgagatcatagagtttggctggacaaaggatagggcccttgttgacacatttgttatgcgtctagctgcttatgttcgtgagcggaatgattacgaggaggagattgcaagcacaccgattcagattgttaaattgattatggttgaggatggcaaaggaaaagaggcagttccagttattcgacttaatgtcatacgccttttggctgagttatgtgtttgcttgaaaaaatgggaagttgtggacatgattttaccccttttcattgaacatctagaagagggtgatgcttcatctccaagttcattgcgtttacgattattagatgcaatatctcgtgttgcgtgcttgggttttgaaaaatcatatcgtgagagtattgtcttgatgacaagaagctatcttgacaaagttaaagctctaggggcttcagaaaacaatacagttccatcagaagcaacaactgagcgaacagaaactcttcctgcaggctttctgcttgttgcttccaaccttacaagcacaaaactcaggtctgattatcgtcataggttactgtctctgtgctcagatgtggggctagttgctgaatctaaaagtgggaggagtggtgctgatttgatgggtccgttacttcctgcagttgctgatatatgttctgattttgatccagtgtccactgttgagccatcattattgaaactattccgaaacctttggttctacgttgtattgtttgggctagctccacccatacagaataatgaggcacctacaaaaccggtttccacttcattaggtacagcagaaagcagcagtgctatagcccttcaagctgtagctggaccatacatgtggaacagccaatggtctgtagcagtgcaacgtattgcgcaaggaacacctcctctggttgttagttctgtaaaatggcttgaagatgagctagagttaaacactctacacaacccaggtagtcgtggtggtaatggtaatgaaaattctgctgttgggcagagagctgcactttctgctgctttgggaggtcgagttgaggtagcagcaatgaacactatttcaggggtaaaagctacgtacctacttgcagttgctttcctggagatactacgttttagttgcaatggtggcatactctcggctacatctacattgaatagatcaaacagtgctttcagttgtgtatttgaatacctgctcactccaaatttgacaccagcagtaactcagtgtttgacggcagttgcacatagagcttttgaaacagtgctgtcgtggctggatgatcgcatatctgacataggtgaaggagctgatgttagagaatcggttctttctgttcatgcttgctttctgataaaaagcatgtcccagagagacgagcatgttcgtgatgtgagtgttaagcttttaacgcagctgaaggaaaagttcccacaggtcctctggaactcttcatgcttggatttacttcttatttctgttcacaatgagttgacttctggtccagtcagtgatcctgcttgggttgcaactgtacgctcactgtatcaaaagatcgctagggaatggttaacaagtgctctttcatatgctccatgtaccacacaaggccttatacaggaaaatttttgcaagccaagtggagtacaaagaacacaacatacagcagatgttgtttcacttttatctgagatacgtatttgtagtggaaagaatgattggaacggtattaggacggccaatgttcctgcagttatggactcagcagcagcagcatcgggagccaaaaaagaagcacctgacttcactttggaagtactctctactgcagtagtgagtgcaactgtgaagtgcaatcatgctggtgagattgctggtatgagaaggctgtttagtactatgggaggcataaacatgggcatgtctcctcctgggacacaatctttgcacccccatcagtcatttgatgaagtttttgtctccaagtttgtcagtcttcttcagaactttgttgttgcagctgagaaacaaccaatagataattcacaatttcgtgaaacatgttctcaagctacagcattacttcttgatcatatggtgtctgattctagagcaaacctggaagggttttctcagcttatacggcttctatgttggtgtcctgcttatatttctacccctgatgcaatggaaactggaatctacatctggacatggctagtatcggctgcgccttctttaggtcctcttgtgcttgcggaacttgttgatgcatggctgtggaccatagatacaaagcgtggattgtttgcatcagatatgaattactgtggcccagatgcaaaattgaggccgcatcttatcgctggtgagcctgaggcaccaccagaaaaggacccagtagaagcaataatagcccatagactctggcttggcttcttcattgatcggtttgaggtggttcggcatgacagcattgaacaacttctacttctaggtcgaatgttacaaggaacaatgaagtctccagctcatttttctcaccatcctgctgctactggcactttctttactgcgatgctccttggattgaagttttgctcatgccagtctcaatctaacttgcagaagtgtaatatggggcttcagttgttagaggacagggtataccgtgctgctttgggatggttttcttatgcgcctgagtggtatgaatctccaaacaaaacttatgctcagagagaagctcaatctgtgtcagtatttgttcattttctacaaaatgagcgcaccagtggtcctgtcgattcggtttcaaagttacagggacgtgaaggtgaacctagcatggcagatcacattcatcctgtttggggctgtgttgacaactacacaaatgcaagggaaaagcgtaaacagttacttctgacactttctcagaatgaggcagacagacttgaagtctgggcacaaccaatacatacaaaagatacaacgacttttcgcggtaaaatcagctcggataaatggattgatcatgtcagaactgcttttgctgttgatcctcgaattgctctttctatgcctttgaggtttccaacgaatgctacaatgcaatctgagattactcagttggtacagacacgattactggagcttcgtacaattcctgaagcattaccctttttcattactccaaaagcagtagatgaaaattcagtgctgttacagcaactaccacactgggctccatgttctgttacacaggcattggagtttcttactcctccttataaaggacatccacgtgttatggcctatgtccttcgtgtcttggagacttacccccctgagactgttaccttttttatgccacaattggtacaatctctcagatatgatgaagggaaactggttgaagggtacttgcttggagctactcgaagaagtaatatatttgctcatatcttgatatggcatctgcagggagaatatgttgatgaatctgagaaagatgcagctgctctgaagggcagtgcattccagtccttgctcccagctgttaaggacaaaattatagagagttttactccagaggctcgtgacatgtttgaaagagaatttgatttctttgacaaagtcacatctatttctggtgttcttttccctctccccaaggacgagcggagagcgggtataagaagggaactggagaagatttctattccaggtgatgacctctacctacctactgcaacaaacaagctagtacggggtatacagttggacagcggtattcctctccagtctgctgcaaaagttccaataatgattacttttaacgttgttgaccgtgacggggacccaaatgatgtaaaaccacaggcttgtatttttaaggttggtgatgactgtagacaagatgtgctggcgctgcaagtgattgctctattaagggatgtatttcaagctgtcggattaaacctgtatctttttccatatggtgttttgcctactggaccaggccgaggcataattgaggtggtcccagatactcgaagtagaaatcaaatgggtgaaacaactgatggtggtttattagagatatttcagcaagattatggtcctgtaggttcaccttcttttgaaactgctcgagaaatgtttatgatcagtagtgctggatatgctgttgctagcttactccttcaaccgaaggatcggcataatggcaatcttctctttgatagccatgggagattagttcacattgattttggttttattttggagatttcacctggaggtaacatggggtttgagagtgcacatttcaagctaagccacgagatgactcaattgctggatccatctggaactatgaagagtgatacatggaaccaatttctcaggttgtgtgtcaaaggatacctagcagcaaggaggcatatgaatgggattttaagtacagtcaacctaatggtggacagtggccttccttgctttagcaggggagatcctatcaataatcttcggaagcggtttcatccagagatgaatgaacgtgaggccgctaacttcatggtacgaacatgtgctgatgcttacaacaagtggactaccgcagggtatgacttgattcagtacttgcagcagggtattgagaaatagtttgtttctcgttttttaagtggcgttcgtgtacatcaattgtatgtagccactatctttttatgtagaatttattttttgagttgtatcatcgggcaaggatggaattcatgtgattaacgtaggatgcttggtgcaaagaggcaattctttttttttcttgcactgtaaaactgccaagaaagtagctagtaagttgatcaagattctgtattgctgtcgcagaatgcattttcgtttactagacatgtatgattcgcatttttatcatgtgatttcattttttccctcgtcaccagatacgagtggctcattgttagacggcatctcgttg

SEQ ID NO: 208639 - DNA, 6486 bp, Zea Mays
cgcaactgccatcgtcctctgctcgtcgcgtcgttctcctctcgaccgcatcgcgcccgtggcggggaacgagccatcgacgccgcgtcgcgtgcctttcttcttcgtcccccccctgcctgcctagctgtctcaggctgccgcccgcccagccccaaaacattcggcagccgagtcaaccgagaacacgagccatccacccaccctgtcccttccccggctttcccccgtcctcggctccaccaattgctctcgcgtcagtggaaggaaaaaccaagggcgagggagggaggagcgcatctccgccccgcccgcgttcccgtaccccgatccgccacatgatctgacaccgcattgccgccgaggtgacccctcccgcccccagaatggaggcgctcaacgagctctgcgacctggtggccgcgcacccggatctcctcctcgccgacaagcttgcatggctctcctcccgctgcgccgccgccccgggtgccgccgccccgcagcgtgcgtcgagggcgcaccttcattcgctcctcgcgttggcgcgcctcctcccggcgggtggcgccggtgccggtgccgaaggcgatgcggcgcccccggccccactcctattcttcctcgcgtcccacgccttcctctcgccggccttctggccccagtctttcgccccggcgccgtttctcgctaggctcctcccgctcctcgccgcggccccatcctcccccgccctttcttccgcgctctccgccgccctcctcgcggcgctcgacgtcgccgacccgacctccgcgccgctcgcccgcgcgtttctctccgccgccgctgccgcggcgcccctgccgctcctccccgcggatgccgcgcccatcgctgcccggctgctcctcgagtttcttggctccgaggaggagccgatcagggccaaggggaagggagaggacaccttgggcgaggaaaacggtggggcaaaggaggtagtgcggaggttcgaggaggaggaggtcgatgagctggagcggaaggaagtcgcattcagactgaccgtgcatatgcttgggggcgagggtgggctagagaccgagcagattgggaaggtcaggaatgctgctgcgcgacaggtccgatcactcacggattttctcaagattagaaagcgggactggagggagcagggtacacagctcagggcaaggataaacaccaaattgatgtgttgtcaagctgcagtgggggtgctggtgcgaagcgtttccaccatggatactgatatcaaatcttcgaaggatatgctccagcagactctagcttggttcatcgaggccaccaagtcgtgcatcctgtcatcctggcggaaactgaagatatgcgaggagctattttgcacactgctcaatgggatcagccagataactgtctcacgtgggggccaacttctgccggctgacatggcaggcagtagtcctggggctctatttgaagcagttgtgaagttgagctgtgagatcatagagtttggctggacaaaggatagggcccttgttgacacatttgttatgcgtctagctgcttatgttcgtgagcggaatgattacgaggaggaggatggcaaaggaaaagaggcagttccagttattcgacttaatgtcatacgccttttggctgagttatgtgtttgcttgaaaaaatgggaagttgtggacatgattttaccccttttcattgaacatctagaagagggtgatgcttcatctccaagttcattgcgtttacgattattagatgcaatatctcgtgttgcgtgcttgggttttgaaaaatcatatcgtgagagtattgtcttgatgacaagaagctatcttgacaaagttaaagctctaggggcttcagaaaacaatacagttccatcagaagcaacaactgagcgaacagaaactcttcctgcaggctttctgcttgttgcttccaaccttacaagcacaaaactcaggtctgattatcgtcataggttactgtctctgtgctcagatgtggggctagttgctgaatctaaaagtgggaggagtggtgctgatttgatgggtccgttacttcctgcagttgctgatatatgttctgattttgatccagtgtccactgttgagccatcattattgaaactattccgaaacctttggttctacgttgtattgtttgggctagctccacccatacagaataatgaggcacctacaaaaccggtttccacttcattaggtacagcagaaagcagcagtgctatagcccttcaagctgtagctggaccatacatgtggaacagccaatggtctgtagcagtgcaacgtattgcgcaaggaacacctcctctggttgttagttctgtaaaatggcttgaagatgagctagagttaaacactctacacaacccaggtagtcgtggtggtaatggtaatgaaaattctgctgttgggcagagagctgcactttctgctgctttgggaggtcgagttgaggtagcagcaatgaacactatttcaggggtaaaagctacgtacctacttgcagttgctttcctggagatactacgttttagttgcaatggtggcatactctcggctacatctacattgaatagatcaaacagtgctttcagttgtgtatttgaatacctgctcactccaaatttgacaccagcagtaactcagtgtttgacggcagttgcacatagagcttttgaaacagtgctgtcgtggctggatgatcgcatatctgacataggtgaaggagctgatgttagagaatcggttctttctgttcatgcttgctttctgataaaaagcatgtcccagagagacgagcatgttcgtgatgtgagtgttaagcttttaacgcagctgaaggaaaagttcccacaggtcctctggaactcttcatgcttggatttacttcttatttctgttcacaatgagttgacttctggtccagtcagtgatcctgcttgggttgcaactgtacgctcactgtatcaaaagatcgctagggaatggttaacaagtgctctttcatatgctccatgtaccacacaaggccttatacaggaaaatttttgcaagccaagtggagtacaaagaacacaacatacagcagatgttgtttcacttttatctgagatacgtatttgtagtggaaagaatgattggaacggtattaggacggccaatgttcctgcagttatggactcagcagcagcagcatcgggagccaaaaaagaagcacctgacttcactttggaagtactctctactgcagtagtgagtgcaactgtgaagtgcaatcatgctggtgagattgctggtatgagaaggctgtttagtactatgggaggcataaacatgggcatgtctcctcctgggacacaatctttgcacccccatcagtcatttgatgaagtttttgtctccaagtttgtcagtcttcttcagaactttgttgttgcagctgagaaacaaccaatagataattcacaatttcgtgaaacatgttctcaagctacagcattacttcttgatcatatggtgtctgattctagagcaaacctggaagggttttctcagcttatacggcttctatgttggtgtcctgcttatatttctacccctgatgcaatggaaactggaatctacatctggacatggctagtatcggctgcgccttctttaggtcctcttgtgcttgcggaacttgttgatgcatggctgtggaccatagatacaaagcgtggattgtttgcatcagatatgaattactgtggcccagatgcaaaattgaggccgcatcttatcgctggtgagcctgaggcaccaccagaaaaggacccagtagaagcaataatagcccatagactctggcttggcttcttcattgatcggtttgaggtggttcggcatgacagcattgaacaacttctacttctaggtcgaatgttacaaggaacaatgaagtctccagctcatttttctcaccatcctgctgctactggcactttctttactgcgatgctccttggattgaagttttgctcatgccagtctcaatctaacttgcagaagtgtaatatggggcttcagttgttagaggacagggtataccgtgctgctttgggatggttttcttatgcgcctgagtggtatgaatctccaaacaaaacttatgctcagagagaagctcaatctgtgtcagtatttgttcattttctacaaaatgagcgcaccagtggtcctgtcgattcggtttcaaagttacagggacgtgaaggtgaacctagcatggcagatcacattcatcctgtttggggctgtgttgacaactacacaaatgcaagggaaaagcgtaaacagttacttctgacactttctcagaatgaggcagacagacttgaagtctgggcacaaccaatacatacaaaagatacaacgacttttcgcggtaaaatcagctcggataaatggattgatcatgtcagaactgcttttgctgttgatcctcgaattgctctttctatgcctttgaggtttccaacgaatgctacaatgcaatctgagattactcagttggtacagacacgattactggagcttcgtacaattcctgaagcattaccctttttcattactccaaaagcagtagatgaaaattcagtgctgttacagcaactaccacactgggctccatgttctgttacacaggcattggagtttcttactcctccttataaaggacatccacgtgttatggcctatgtccttcgtgtcttggagacttacccccctgagactgttaccttttttatgccacaattggtacaatctctcagatatgatgaagggaaactggttgaagggtacttgcttggagctactcgaagaagtaatatatttgctcatatcttgatatggcatctgcagggagaatatgttgatgaatctgagaaagatgcagctgctctgaagggcagtgcattccagtccttgctcccagctgttaaggacaaaattatagagagttttactccagaggctcgtgacatgtttgaaagagaatttgatttctttgacaaagtcacatctatttctggtgttcttttccctctccccaaggacgagcggagagcgggtataagaagggaactggagaagatttctattccaggtgatgacctctacctacctactgcaacaaacaagctagtacggggtatacagttggacagcggtattcctctccagtctgctgcaaaagttccaataatgattacttttaacgttgttgaccgtgacggggacccaaatgatgtaaaaccacaggcttgtatttttaaggttggtgatgactgtagacaagatgtgctggcgctgcaagtgattgctctattaagggatgtatttcaagctgtcggattaaacctgtatctttttccatatggtgttttgcctactggaccaggccgaggcataattgaggtggtcccagatactcgaagtagaaatcaaatgggtgaaacaactgatggtggtttattagagatatttcagcaagattatggtcctgtaggttcaccttcttttgaaactgctcgagaaatgtttatgatcagtagtgctggatatgctgttgctagcttactccttcaaccgaaggatcggcataatggcaatcttctctttgatagccatgggagattagttcacattgattttggttttattttggagatttcacctggaggtaacatggggtttgagagtgcacatttcaagctaagccacgagatgactcaattgctggatccatctggaactatgaagagtgatacatggaaccaatttctcaggttgtgtgtcaaaggatacctagcagcaaggaggcatatgaatgggattttaagtacagtcaacctaatggtggacagtggccttccttgctttagcaggggagatcctatcaataatcttcggaagcggtttcatccagagatgaatgaacgtgaggccgctaacttcatggtacgaacatgtgctgatgcttacaacaagtggactaccgcagggtatgacttgattcagtacttgcagcagggtattgagaaatagtttgtttctcgttttttaagtggcgttcgtgtacatcaattgtatgtagccactatctttttatgtagaatttattttttgagttgtatcatcgggcaaggatggaattcatgtgattaacgtaggatgcttggtgcaaagaggcaattctttttttttcttgcactgtaaaactgccaagaaagtagctagtaagttgatcaagattctgtattgctgtcgcagaatgcattttcgtttactagacatgtatgattcgcatttttatcatgtgatttcattttttccctcgtcaccagatacgagtggctcattgttagacggcatctcgttg

SEQ ID NO: 208640 - DNA, 6603 bp, Zea Mays
cgcaactgccatcgtcctctgctcgtcgcgtcgttctcctctcgaccgcatcgcgcccgtggcggggaacgagccatcgacgccgcgtcgcgtgcctttcttcttcgtcccccccctgcctgcctagctgtctcaggctgccgcccgcccagccccaaaacattcggcagccgagtcaaccgagaacacgagccatccacccaccctgtcccttccccggctttcccccgtcctcggctccaccaattgctctcgcgtcagtggaaggaaaaaccaagggcgagggagggaggagcgcatctccgccccgcccgcgttcccgtaccccgatccgccacatgatctgacaccgcattgccgccgaggtgacccctcccgcccccagaatggaggcgctcaacgagctctgcgacctggtggccgcgcacccggatctcctcctcgccgacaagcttgcatggctctcctcccgctgcgccgccgccccgggtgccgccgccccgcagcgtgcgtcgagggcgcaccttcattcgctcctcgcgttggcgcgcctcctcccggcgggtggcgccggtgccggtgccgaaggcgatgcggcgcccccggccccactcctattcttcctcgcgtcccacgccttcctctcgccggccttctggccccagtctttcgccccggcgccgtttctcgctaggctcctcccgctcctcgccgcggccccatcctcccccgccctttcttccgcgctctccgccgccctcctcgcggcgctcgacgtcgccgacccgacctccgcgccgctcgcccgcgcgtttctctccgccgccgctgccgcggcgcccctgccgctcctccccgcggatgccgcgcccatcgctgcccggctgctcctcgagtttcttggctccgaggaggagccgatcagggccaaggggaagggagaggacaccttgggcgaggaaaacggtggggcaaaggaggtagtgcggaggttcgaggaggaggaggtcgatgagctggagcggaaggaagtcgcattcagactgaccgtgcatatgcttgggggcgagggtgggctagagaccgagcagattgggaaggtcaggaatgctgctgcgcgacaggtccgatcactcacggattttctcaagattagaaagcgggactggagggagcagggtacacagctcagggcaaggataaacaccaaattgatgtgttgtcaagctgcagtgggggtgctggtgcgaagcgtttccaccatggatactgatatcaaatcttcgaaggatatgctccagcagactctagcttggttcatcgaggccaccaagtcgtgcatcctgtcatcctggcggaaactgaagatatgcgaggagctattttgcacactgctcaatgggatcagccagataactgtctcacgtgggggccaacttctgccggtgcttttgattcccttaaaaccgcttgttgtgagcacatgttcgcaggctgacatggcaggcagtagtcctggggctctatttgaagcagttgtgaagttgagctgtgagatcatagagtttggctggacaaaggatagggcccttgttgacacatttgttatgcgtctagctgcttatgttcgtgagcggaatgattacgaggaggaggatggcaaaggaaaagaggcagttccagttattcgacttaatgtcatacgccttttggctgagttatgtgtttgcttgaaaaaatgggaagttgtggacatgattttaccccttttcattgaacatctagaagagggtgatgcttcatctccaagttcattgcgtttacgattattagatgcaatatctcgtgttgcgtgcttgggttttgaaaaatcatatcgtgagagtattgtcttgatgacaagaagctatcttgacaaagttaaagctctaggggcttcagaaaacaatacagttccatcagaagcaacaactgagcgaacagaaactcttcctgcaggctttctgcttgttgcttccaaccttacaagcacaaaactcaggtctgattatcgtcataggttactgtctctgtgctcagatgtggggctagttgctgaatctaaaagtgggaggagtggtgctgatttgatgggtccgttacttcctgcagttgctgatatatgttctgattttgatccagtgtccactgttgagccatcattattgaaactattccgaaacctttggttctacgttgtattgtttgggctagctccacccatacagaataatgaggcacctacaaaaccggtttccacttcattaggtacagcagaaagcagcagtgctatagcccttcaagctgtagctggaccatacatgtggaacagccaatggtctgtagcagtgcaacgtattgcgcaaggaacacctcctctggttgttagttctgtaaaatggcttgaagatgagctagagttaaacactctacacaacccaggtagtcgtggtggtaatggtaatgaaaattctgctgttgggcagagagctgcactttctgctgctttgggaggtcgagttgaggtagcagcaatgaacactatttcaggggtaaaagctacgtacctacttgcagttgctttcctggagatactacgttttagttgcaatggtggcatactctcggctacatctacattgaatagatcaaacagtgctttcagttgtgtatttgaatacctgctcactccaaatttgacaccagcagtaactcagtgtttgacggcagttgcacatagagcttttgaaacagtgctgtcgtggctggatgatcgcatatctgacataggtgaaggagctgatgttagagaatcggttctttctgttcatgcttgctttctgataaaaagcatgtcccagagagacgagcatgttcgtgatgtgagtgttaagcttttaacgcagctgaaggaaaagttcccacaggtcctctggaactcttcatgcttggatttacttcttatttctgttcacaatgagttgacttctggtccagtcagtgatcctgcttgggttgcaactgtacgctcactgtatcaaaagatcgctagggaatggttaacaagtgctctttcatatgctccatgtaccacacaaggccttatacagatggtcactgtcctgtcaatgttaaggttgccgattgcttgtctggttgaggttaagcttgcttatcatgaaaatttttgcaagccaagtggagtacaaagaacacaacatacagcagatgttgtttcacttttatctgagatacgtatttgtagtggaaagaatgattggaacggtattaggacggccaatgttcctgcagttatggactcagcagcagcagcatcgggagccaaaaaagaagcacctgacttcactttggaagtactctctactgcagtagtgagtgcaactgtgaagtgcaatcatgctggtgagattgctggtatgagaaggctgtttagtactatgggaggcataaacatgggcatgtctcctcctgggacacaatctttgcacccccatcagtcatttgatgaagtttttgtctccaagtttgtcagtcttcttcagaactttgttgttgcagctgagaaacaaccaatagataattcacaatttcgtgaaacatgttctcaagctacagcattacttcttgatcatatggtgtctgattctagagcaaacctggaagggttttctcagcttatacggcttctatgttggtgtcctgcttatatttctacccctgatgcaatggaaactggaatctacatctggacatggctagtatcggctgcgccttctttaggtcctcttgtgcttgcggaacttgttgatgcatggctgtggaccatagatacaaagcgtggattgtttgcatcagatatgaattactgtggcccagatgcaaaattgaggccgcatcttatcgctggtgagcctgaggcaccaccagaaaaggacccagtagaagcaataatagcccatagactctggcttggcttcttcattgatcggtttgaggtggttcggcatgacagcattgaacaacttctacttctaggtcgaatgttacaaggaacaatgaagtctccagctcatttttctcaccatcctgctgctactggcactttctttactgcgatgctccttggattgaagttttgctcatgccagtctcaatctaacttgcagaagtgtaatatggggcttcagttgttagaggacagggtataccgtgctgctttgggatggttttcttatgcgcctgagtggtatgaatctccaaacaaaacttatgctcagagagaagctcaatctgtgtcagtatttgttcattttctacaaaatgagcgcaccagtggtcctgtcgattcggtttcaaagttacagggacgtgaaggtgaacctagcatggcagatcacattcatcctgtttggggctgtgttgacaactacacaaatgcaagggaaaagcgtaaacagttacttctgacactttctcagaatgaggcagacagacttgaagtctgggcacaaccaatacatacaaaagatacaacgacttttcgcggtaaaatcagctcggataaatggattgatcatgtcagaactgcttttgctgttgatcctcgaattgctctttctatgcctttgaggtttccaacgaatgctacaatgcaatctgagattactcagttggtacagacacgattactggagcttcgtacaattcctgaagcattaccctttttcattactccaaaagcagtagatgaaaattcagtgctgttacagcaactaccacactgggctccatgttctgttacacaggcattggagtttcttactcctccttataaaggacatccacgtgttatggcctatgtccttcgtgtcttggagacttacccccctgagactgttaccttttttatgccacaattggtacaatctctcagatatgatgaagggaaactggttgaagggtacttgcttggagctactcgaagaagtaatatatttgctcatatcttgatatggcatctgcagggagaatatgttgatgaatctgagaaagatgcagctgctctgaagggcagtgcattccagtccttgctcccagctgttaaggacaaaattatagagagttttactccagaggctcgtgacatgtttgaaagagaatttgatttctttgacaaagtcacatctatttctggtgttcttttccctctccccaaggacgagcggagagcgggtataagaagggaactggagaagatttctattccaggtgatgacctctacctacctactgcaacaaacaagctagtacggggtatacagttggacagcggtattcctctccagtctgctgcaaaagttccaataatgattacttttaacgttgttgaccgtgacggggacccaaatgatgtaaaaccacaggcttgtatttttaaggttggtgatgactgtagacaagatgtgctggcgctgcaagtgattgctctattaagggatgtatttcaagctgtcggattaaacctgtatctttttccatatggtgttttgcctactggaccaggccgaggcataattgaggtggtcccagatactcgaagtagaaatcaaatgggtgaaacaactgatggtggtttattagagatatttcagcaagattatggtcctgtaggttcaccttcttttgaaactgctcgagaaatgtttatgatcagtagtgctggatatgctgttgctagcttactccttcaaccgaaggatcggcataatggcaatcttctctttgatagccatgggagattagttcacattgattttggttttattttggagatttcacctggaggtaacatggggtttgagagtgcacatttcaagctaagccacgagatgactcaattgctggatccatctggaactatgaagagtgatacatggaaccaatttctcaggttgtgtgtcaaaggatacctagcagcaaggaggcatatgaatgggattttaagtacagtcaacctaatggtggacagtggccttccttgctttagcaggggagatcctatcaataatcttcggaagcggtttcatccagagatgaatgaacgtgaggccgctaacttcatggtacgaacatgtgctgatgcttacaacaagtggactaccgcagggtatgacttgattcagtacttgcagcagggtattgagaaatagtttgtttctcgttttttaagtggcgttcgtgtacatcaattgtatgtagccactatctttttatgtagaatttattttttgagttgtatcatcgggcaaggatggaattcatgtgattaacgtaggatgcttggtgcaaagaggcaattctttttttttcttgcactgtaaaactgccaagaaagtagctagtaagttgatcaagattctgtattgctgtcgcagaatgcattttcgtttactagacatgtatgattcgcatttttatcatgtgatttcattttttccctcgtcaccagatacgagtggctcattgttagacggcatctcgttg

SEQ ID NO: 208641 - DNA, 3759 bp, Zea Mays
cctcacttgagcagtctgttggaacatatttggatgatcgcatatctgacataggtgaaggagctgatgttagagaatcggttctttctgttcatgcttgctttctgataaaaagcatgtcccagagagacgagcatgttcgtgatgtgagtgttaagcttttaacgcagctgaaggaaaagttcccacaggtcctctggaactcttcatgcttggatttacttcttatttctgttcacaatgagttgacttctggtccagtcagtgatcctgcttgggttgcaactgtacgctcactgtatcaaaagatcgctagggaatggttaacaagtgctctttcatatgctccatgtaccacacaaggccttatacaggaaaatttttgcaagccaagtggagtacaaagaacacaacatacagcagatgttgtttcacttttatctgagatacgtatttgtagtggaaagaatgattggaacggtattaggacggccaatgttcctgcagttatggactcagcagcagcagcatcgggagccaaaaaagaagcacctgacttcactttggaagtactctctactgcagtagtgagtgcaactgtgaagtgcaatcatgctggtgagattgctggtatgagaaggctgtttagtactatgggaggcataaacatgggcatgtctcctcctgggacacaatctttgcacccccatcagtcatttgatgaagtttttgtctccaagtttgtcagtcttcttcagaactttgttgttgcagctgagaaacaaccaatagataattcacaatttcgtgaaacatgttctcaagctacagcattacttcttgatcatatggtgtctgattctagagcaaacctggaagggttttctcagcttatacggcttctatgttggtgtcctgcttatatttctacccctgatgcaatggaaactggaatctacatctggacatggctagtatcggctgcgccttctttaggtcctcttgtgcttgcggaacttgttgatgcatggctgtggaccatagatacaaagcgtggattgtttgcatcagatatgaattactgtggcccagatgcaaaattgaggccgcatcttatcgctggtgagcctgaggcaccaccagaaaaggacccagtagaagcaataatagcccatagactctggcttggcttcttcattgatcggtttgaggtggttcggcatgacagcattgaacaacttctacttctaggtcgaatgttacaaggaacaatgaagtctccagctcatttttctcaccatcctgctgctactggcactttctttactgcgatgctccttggattgaagttttgctcatgccagtctcaatctaacttgcagaagtgtaatatggggcttcagttgttagaggacagggtataccgtgctgctttgggatggttttcttatgcgcctgagtggtatgaatctccaaacaaaacttatgctcagagagaagctcaatctgtgtcagtatttgttcattttctacaaaatgagcgcaccagtggtcctgtcgattcggtttcaaagttacagggacgtgaaggtgaacctagcatggcagatcacattcatcctgtttggggctgtgttgacaactacacaaatgcaagggaaaagcgtaaacagttacttctgacactttctcagaatgaggcagacagacttgaagtctgggcacaaccaatacatacaaaagatacaacgacttttcgcggtaaaatcagctcggataaatggattgatcatgtcagaactgcttttgctgttgatcctcgaattgctctttctatgcctttgaggtttccaacgaatgctacaatgcaatctgagattactcagttggtacagacacgattactggagcttcgtacaattcctgaagcattaccctttttcattactccaaaagcagtagatgaaaattcagtgctgttacagcaactaccacactgggctccatgttctgttacacaggcattggagtttcttactcctccttataaaggacatccacgtgttatggcctatgtccttcgtgtcttggagacttacccccctgagactgttaccttttttatgccacaattggtacaatctctcagatatgatgaagggaaactggttgaagggtacttgcttggagctactcgaagaagtaatatatttgctcatatcttgatatggcatctgcagggagaatatgttgatgaatctgagaaagatgcagctgctctgaagggcagtgcattccagtccttgctcccagctgttaaggacaaaattatagagagttttactccagaggctcgtgacatgtttgaaagagaatttgatttctttgacaaagtcacatctatttctggtgttcttttccctctccccaaggacgagcggagagcgggtataagaagggaactggagaagatttctattccaggtgatgacctctacctacctactgcaacaaacaagctagtacggggtatacagttggacagcggtattcctctccagtctgctgcaaaagttccaataatgattacttttaacgttgttgaccgtgacggggacccaaatgatgtaaaaccacaggcttgtatttttaaggttggtgatgactgtagacaagatgtgctggcgctgcaagtgattgctctattaagggatgtatttcaagctgtcggattaaacctgtatctttttccatatggtgttttgcctactggaccaggccgaggcataattgaggtggtcccagatactcgaagtagaaatcaaatgggtgaaacaactgatggtggtttattagagatatttcagcaagattatggtcctgtaggttcaccttcttttgaaactgctcgagaaatgtttatgatcagtagtgctggatatgctgttgctagcttactccttcaaccgaaggatcggcataatggcaatcttctctttgatagccatgggagattagttcacattgattttggttttattttggagatttcacctggaggtaacatggggtttgagagtgcacatttcaagctaagccacgagatgactcaattgctggatccatctggaactatgaagagtgatacatggaaccaatttctcaggttgtgtgtcaaaggatacctagcagcaaggaggcatatgaatgggattttaagtacagtcaacctaatggtggacagtggccttccttgctttagcaggggagatcctatcaataatcttcggaagcggtttcatccagagatgaatgaacgtgaggccgctaacttcatggtacgaacatgtgctgatgcttacaacaagtggactaccgcagggtatgacttgattcagtacttgcagcagggtattgagaaatagtttgtttctcgttttttaagtggcgttcgtgtacatcaattgtatgtagccactatctttttatgtagaatttattttttgagttgtatcatcgggcaaggatggaattcatgtgattaacgtaggatgcttggtgcaaagaggcaattctttttttttcttgcactgtaaaactgccaagaaagtagctagtaagttgatcaagattctgtattgctgtcgcagaatgcattttcgtttactagacatgtatgattcgcatttttatcatgtgatttcattttttccctcgtcaccagatacgagtggctcattgttagacggcatctcgttg

SEQ ID NO: 208642 - DNA, 1936 bp, Zea Mays
gtcagtatgtgtaaagatttgtagtcctgcaggaatatactagtgaatttaggctccacccatgttgattgaacacgattactggagcttcgtacaattcctgaagcattaccctttttcattactccaaaagcagtagatgaaaattcagtgctgttacagcaactaccacactgggctccatgttctgttacacaggcattggagtttcttactcctccttataaaggacatccacgtgttatggcctatgtccttcgtgtcttggagacttacccccctgagactgttaccttttttatgccacaattggtacaatctctcagatatgatgaagggaaactggttgaagggtacttgcttggagctactcgaagaagtaatatatttgctcatatcttgatatggcatctgcagggagaatatgttgatgaatctgagaaagatgcagctgctctgaagggcagtgcattccagtccttgctcccagctgttaaggacaaaattatagagagttttactccagaggctcgtgacatgtttgaaagagaatttgatttctttgacaaagtcacatctatttctggtgttcttttccctctccccaaggacgagcggagagcgggtataagaagggaactggagaagatttctattccaggtgatgacctctacctacctactgcaacaaacaagctagtacggggtatacagttggacagcggtattcctctccagtctgctgcaaaagttccaataatgattacttttaacgttgttgaccgtgacggggacccaaatgatgtaaaaccacaggcttgtatttttaaggttggtgatgactgtagacaagatgtgctggcgctgcaagtgattgctctattaagggatgtatttcaagctgtcggattaaacctgtatctttttccatatggtgttttgcctactggaccaggccgaggcataattgaggtggtcccagatactcgaagtagaaatcaaatgggtgaaacaactgatggtggtttattagagatatttcagcaagattatggtcctgtaggttcaccttcttttgaaactgctcgagaaatgtttatgatcagtagtgctggatatgctgttgctagcttactccttcaaccgaaggatcggcataatggcaatcttctctttgatagccatgggagattagttcacattgattttggttttattttggagatttcacctggaggtaacatggggtttgagagtgcacatttcaagctaagccacgagatgactcaattgctggatccatctggaactatgaagagtgatacatggaaccaatttctcaggttgtgtgtcaaaggatacctagcagcaaggaggcatatgaatgggattttaagtacagtcaacctaatggtggacagtggccttccttgctttagcaggggagatcctatcaataatcttcggaagcggtttcatccagagatgaatgaacgtgaggccgctaacttcatggtacgaacatgtgctgatgcttacaacaagtggactaccgcagggtatgacttgattcagtacttgcagcagggtattgagaaatagtttgtttctcgttttttaagtggcgttcgtgtacatcaattgtatgtagccactatctttttatgtagaatttattttttgagttgtatcatcgggcaaggatggaattcatgtgattaacgtaggatgcttggtgcaaagaggcaattctttttttttcttgcactgtaaaactgccaagaaagtagctagtaagttgatcaagattctgtattgctgtcgcagaatgcattttcgtttactagacatgtatgattcgcatttttatcatgtgatttcattttttccctcgtcaccagatacgagtggctcattgttagacggcatctcgttg

SEQ ID NO: 208643 - DNA, 4867 bp, Zea Mays
attgtatcgtcacttgttttatctacgatatgattcgattcatggattgatccaatggtgctggtgattcttgctgcaatttgcagggacggacagctaaagtagctgtggttgtgggatatggaagccgaagtaagcgctccagccgatcttaaggcgcctgataagacgacggtacacggtgatgacaaagaaaatataccgaatggtaatgcaaatttgcaagtgaaggaagccgacaatgatgaagacgatggaacaagatctgatgggtttgagctgatagatgtgaagcaaaacttcgattcagcaagagtggaggaagagatggccgctccaagaagtactacagtcgatacatctcctgttacagaagaaagtgaaacacaagaagacaaaacaacagcacatgaagaacaatcagttgcaacaaacacaagacatctagagtcctcaatgttgaaccaacaaacagaacaattggaaaagctgacaatgcgtattgaggagcttgaatctgaaaatgacaaactggtaaaggacttgacagaagcagaaaataagcagagcctgcactacagttgtctacaagaagctcaatgctctcttgcaatgaaagataaggagctggctgaagtaacagagtcgctgaaagatctgggttctgagcttggaacctcaaaaaagaggattcaagaaattgaagctgaattggattcatcagcagataagctttgtaaacttgaagagttgaaggatgaaagaagcttgcatgctgcacaggaggcgaagagggcctcagaacttgataagatgctagaactggcacaatcaaacatgaaagaaatggaaaaacatattggcagtcttcaagaagaagtgaagggttatcaagacaaggccgctgaccatcagcaaatagaagaatcactgagaaacacaatctcagaactcaaggtggtacaagaggcattggagctgtcaaagtcacaagtggaaaatttgaaacagaagcttgcctcacaggacactgatttcagtaaactaactgaagagttgaatctccattgttcatctgaagaatcccttaaagagaagtctcttaaactagagactgaacttactactgtacttgaagaactacaagcaaaggttttgagtttgcgagaagccgagaaatggaaacaaaacttgatgagcagttgaaagatagacaaacaagtgaggctacacgagagaagcaaaatgaacagctactcatcttgcagggtgggcttgacaaattgaaggatgaaaataaaactctccaagggtcacttgttgatcttaactcaaaactttctgagaaagattcaatactgcatcaggctgaagatgagctttcaaaagcacagttggtcctcttagaagcattgtcacaaaaagaagagttggagctgaatctgaactctctcagtgagcagcatggcaaatccaaagcttttggagaaaatgcaaaccagaagattctcgatcttgaagcacaaatacaggcaatgcatgcagctgaacaggcactcaagtttgagctaaaagaagccgaggcaagtgtccaagctgctgagaagaaaggctcagaccttgagcaacaactcagtgagattgagaataaatttgttaaatcaagtgaagaaatagagttgctgaaagagcgtattcaacaagaagctgctgtatcagcagaaagaggaatgcagcttcaagaaactgtgaccagtgtagagggatacaaagaaaaaattattgagctacaatcctccctaggttcctcagtgtctaaaaatcagctacttgaacaagaagtcatggagctgactgataaatgttcagagcatcaagaacaagcgcattcagttcggcaaagaagtctggagctggaagatttgcttcacacatcaaagactcatgctgaaggtgtatactcacggacacaggagctggagcaggagctgaataacacatatgaaatgttcaagggggttgaagaagaactcgagcagtacagaagcaaggcttcacagctctctgatgatctggaagcttatcagacaaaagcagctagtcttgaagccgtggtggaagcagcaagcgagaaagaaaaggaatttatggagtcattgagccaaataactgaagaaaagaagaaaagtgaagagctagctgcaaaatatgactgaggtgcacagtagaggtatagaactccaatccgcagctgaatcaaggaatgcggaaattgaagctcaattgcaggaagctcttgaggcagtaggacagaaagaggctgagtcgagaaacttgaatgaaaagctggttgcacttgagtccgaaattgaaagttcgatgcatgtaaatgaagcgttgaaacaggaaatcaatgctaagctggtaatggtggatgagctgcaggagaagtgtagttttataagttctgagaaagaagaagttgcagagaagctgtctattcatgaggagaagttagaacatttgacagaagaacactcaagaggcttggagctcctttctgtagctgaatctcggaataaagaaactgagagtcaactgcgtgaagttcttgaaaagctagcacaaaaagaagctgaagttacagacttgacagagaagctggctttgctcgaagctgagaatgaaaagatgacttgtttgaacgaggcgttaaaagaagtggatgctaagctggtcatgtttgatgagctacaggaacggtttagttctactcttgctgagaaggaagaagctgcagagaagctagctgttcatgagaggacaatctcacaactgacagaggtacacacaagaaccttggagctccattctgtagctgaatcaaagaatgaagaaattggagctcagttccttgaggctcttgaaacaatatcacagaaagaaggtgaagttaaagaatcgtcttcacagaagataaagatattggaggaacaacttgcagagacacatagcaaggtcgagcatttccttacagagaaggaaagcttggttcaagaaactagtagtctgaataaggagtttgaggtacatcagaacaagttgaacgacttacaacttgcacttgctgctgcactagcagaaaaggaggcggcatttgaagagattcattcactgtgtaaaacactcgatggaatgatcgagcacaaagcagaactagaaatacaggtatcttctactatacaagagcacgaagaactgaagagcaagtaccaaaatacaatggaagagaagcagatgttgagtgataaatatgaaacagcaaagaaagagcttgaggatgcaatagccaagttggaggaggaaatgaatgtagacaagtcagaaaaagagtctcacatctcaaagctggagcgacagattacattatcagagataaaatacatggaggagataaagactatgcaagtggaaacaactgaaaagaatgaagcactaacagccaagatgcaggaacacacagacttacaacatgagaaacacgaattggaacaacagttgctggaagttaggaaggaactggatggtgcttaccataccatagtaaatcaggaagaacaagcttctttgagagagataaagtgggacacttttaggatttattcagaggatcgtctggaagctgagcagcagcgtgctgaggagctggaactacaagtagcagctcttaaacaacagctccaagaagctgaggtccattataagcaaaagaacaagtttctttaagggaggttcaatgggaaggggatcaaaatcattcactgaatgagctgaaatctcagcgtcagtatgccacggacttggagaaacaaatcgaagatcttactcagaagttaagatcagccgatgcacactacaaacagaaggccacagaagagagagataaacttgccgagatcaccacagagttcagcaagttgacacataaagtaagcaagagtgtcgaattggagaagaaggtgcaggaccttgagcagaagctgcagctagcttattccaagtctgacgaacaggcaacggatgtcttggagtcgagatcccgtgagtttagcctggactcgttatcaagtttggtcaaacagcaggacagaactcaggctgccgacaaggcctcgccgagcccgaccctgcaagaagtacaagaaccttctggcaccatggctttcaagttcatcctgggagtcgccctgctgtccgtactcgccggcgtgtttctcgggaagcggtactagcgctcagtctgtggaactctgttggcgcccatcatcagctcatggaaaacccccgctgttaatattgctcccagcgaaattcggttatcagtttgtagctggaaggggggcgtagccagcagaagtttgagaggattgttggccttgatggtgatggttcgacgactttctgggaggaagttggagaccttggaagcccttttgttctcttgttgttgattttcgtcttcattttcagtttttgggtaaagtggggcaaggaatttgatttttgttcattcctaccctttgcgtgcaaaaggccaagtgcacgcaactggttctgcggacagctagttttccgtgtacatttcttctctgtaaagaccaggagtccatggacgcaaaacatgaagcctctgcttgctgtatatgctcgtgtggagagtgcatgtttcgttacctgtgccttttgatgtacacctgaattgcttgaacgagaaatgtcatattattatcagatggtttgaaggacgtgtacacagtggttggattcagatcctctaattttgcagcaagtgtttgttgttttggtc

SEQ ID NO: 208644 - DNA, 4498 bp, Zea Mays
caatttgcagggacggacagctaaagtagctgtggttgtgggatatggaagccgaagtaagcgctccagccgatcttaaggcgcctgataagacgacggtacacggtgatgacaaagaaaatataccgaatggtaatgcaaatttgcaagtgaaggaagccgacaatgatgaagacgatggaacaagatctgatgggtttgagctgatagatgtgaagcaaaacttcgattcagcaagagtggaggaagagatggccgctccaagaagtactacagtcgatacatctcctgttacagaagaaagtgaaacacaagaagacaaaacaacagcacatgaagaacaatcagttgcaacaaacacaagacatctagagtcctcaatgttgaaccaacaaacagaacaattggaaaagctgacaatgcgtattgaggagcttgaatctgaaaatgacaaactggtaaaggacttgacagaagcagaaaataagcagagcctgcactacagttgtctacaagaagctcaatgctctcttgcaatgaaagataaggagctggctgaagtaacagagtcgctgaaagatctgggttctgagcttggaacctcaaaaaagaggattcaagaaattgaagctgaattggattcatcagcagataagctttgtaaacttgaagagttgaaggatgaaagaagcttgcatgctgcacaggaggcgaagagggcctcagaacttgataagatgctagaactggcacaatcaaacatgaaagaaatggaaaaacatattggcagtcttcaagaagaagtgaagggttatcaagacaaggccgctgaccatcagcaaatagaagaatcactgagaaacacaatctcagaactcaaggtggtacaagaggcattggagctgtcaaagtcacaagtggaaaatttgaaacagaagcttgcctcacaggacactgatttcagtaaactaactgaagagttgaatctccattgttcatctgaagaatcccttaaagagaagtctcttaaactagagactgaacttactactgtacttgaagaactacaagcaaagggtgggcttgacaaattgaaggatgaaaataaaactctccaagggtcacttgttgatcttaactcaaaactttctgagaaagattcaatactgcatcaggctgaagatgagctttcaaaagcacagttggtcctcttagaagcattgtcacaaaaagaagagttggagctgaatctgaactctctcagtgagcagcatggcaaatccaaagcttttggagaaaatgcaaaccagaagattctcgatcttgaagcacaaatacaggcaatgcatgcagctgaacaggcactcaagtttgagctaaaagaagccgaggcaagtgtccaagctgctgagaagaaaggctcagaccttgagcaacaactcagtgagattgagaataaatttgttaaatcaagtgaagaaatagagttgctgaaagagcgtattcaacaagaagctgctgtatcagcagaaagaggaatgcagcttcaagaaactgtgaccagtgtagagggatacaaagaaaaaattattgagctacaatcctccctaggttcctcagtgtctaaaaatcagctacttgaacaagaagtcatggagctgactgataaatgttcagagcatcaagaacaagcgcattcagttcggcaaagaagtctggagctggaagatttgcttcacacatcaaagactcatgctgaaggtgtatactcacggacacaggagctggagcaggagctgaataacacatatgaaatgttcaagggggttgaagaagaactcgagcagtacagaagcaaggcttcacagctctctgatgatctggaagcttatcagacaaaagcagctagtcttgaagccgtggtggaagcagcaagcgagaaagaaaaggaatttatggagtcattgagccaaataactgaagaaaagaagaaaactgaatcaaggaatgcggaaattgaagctcaattgcaggaagctcttgaggcagtaggacagaaagaggctgagtcgagaaacttgaatgaaaagctggttgcacttgagtccgaaattgaaagttcgatgcatgtaaatgaagcgttgaaacaggaaatcaatgctaagctggtaatggtggatgagctgcaggagaagtgtagttttataagttctgagaaagaagaagttgcagagaagctgtctattcatgaggagaagttagaacatttgacagaagaacactcaagaggcttggagctcctttctgtagctgaatctcggaataaagaaactgagagtcaactgcgtgaagttcttgaaaagctagcacaaaaagaagctgaagttacagacttgacagagaagctggctttgctcgaagctgagaatgaaaagatgacttgtttgaacgaggcgttaaaagaagtggatgctaagctggtcatgtttgatgagctacaggaacggtttagttctactcttgctgagaaggaagaagctgcagagaagctagctgttcatgagaggacaatctcacaactgacagaggtacacacaagaaccttggagctccattctgtagctgaatcaaagaatgaagaaattggagctcagttccttgaggctcttgaaacaatatcacagaaagaaggtgaagttaaagaatcgtcttcacagaagataaagatattggaggaacaacttgcagagacacatagcaaggtcgagcatttccttacagagaaggaaagcttggttcaagaaactagtagtctgaataaggagtttgaggtacatcagaacaagttgaacgacttacaacttgcacttgctgctgcactagcagaaaaggaggcggcatttgaagagattcattcactgtgtaaaacactcgatggaatgatcgagcacaaagcagaactagaaatacaggtatcttctactatacaagagcacgaagaactgaagagcaagtaccaaaatacaatggaagagaagcagatgttgagtgataaatatgaaacagcaaagaaagagcttgaggatgcaatagccaagttggaggaggaaatgaatgtagacaagtcagaaaaagagtctcacatctcaaagctggagcgacagattacattatcagagataaaatacatggaggagataaagactatgcaagtggaaacaactgaaaagaatgaagcactaacagccaagatgcaggaacacacagacttacaacatgagaaacacgaattggaacaacagttgctggaagttaggaaggaactggatggtgcttaccataccatagtaaatcaggaagaacaagcttctttgagagagataaagtgggacacttttaggatttattcagaggatcgtctggaagctgagcagcagcgtgctgaggagctggaactacaagtagcagctcttaaacaacagctccaagaagctgagaaacaaatcgaagatcttactcagaagttaagatcagccgatgcacactacaaacagaaggccacagaagagagagataaacttgccgagatcaccacagagttcagcaagttgacacataaagtaagcaagagtgtcgaattggagaagaaggtgcaggaccttgagcagaagctgcagctagcttattccaagtctgacgaacaggcaacggatgtcttggagtcgagatcccgtgagtttagcctggactcgttatcaagtttggtcaaacagcaggacagaactcaggctgccgacaaggcctcgccgagcccgaccctgcaagaagtacaagaaccttctggcaccatggctttcaagttcatcctgggagtcgccctgctgtccgtactcgccggcgtgtttctcgggaagcggtactagcgctcagtctgtggaactctgttggcgcccatcatcagctcatggaaaacccccgctgttaatattgctcccagcgaaattcggttatcagtttgtagctggaaggggggcgtagccagcagaagtttgagaggattgttggccttgatggtgatggttcgacgactttctgggaggaagttggagaccttggaagcccttttgttctcttgttgttgattttcgtcttcattttcagtttttgggtaaagtggggcaaggaatttgatttttgttcattcctaccctttgcgtgcaaaaggccaagtgcacgcaactggttctgcggacagctagttttccgtgtacatttcttctctgtaaagaccaggagtccatggacgcaaaacatgaagcctctgcttgctgtatatgctcgtgtggagagtgcatgtttcgttacctgtgccttttgatgtacacctgaattgcttgaacgagaaatgtcatattattatcagatggtttgaaggacgtgtacacagtggttggattcagatcctctaattttgcagcaagtgtttgttgttttggtc

SEQ ID NO: 208645 - DNA, 1842 bp, Zea Mays
taggcgtagctttccttctccaccttctccttcttcttcttcggctgcctatatataagtgctacatgcgtatgcagtgttcctcgcccggtttatttgccgatggactcttggtggtgagcagcgagcgagagatagagagggtgaaactacatatgcatatacaaatacatgtagctagcggcgtagtactggatactgtgccatacggagtatagtatatatactcgctgtattagcagtagaggcggccgtgcagcgatcggtcgacgatggttgttgccgccatgagagacgagggagaggagggacgacgacgggcggtggtggcgatacgggactacgatcccaagacggaccgcgacggcacggaggccgtcgagcgggagtgcgaggtcggcccggccgccgccgccggcgggatgtcgctgcacgccgacctgctcggcgaccccgtcgcgcgcatccgccactcgccgcactacctcatgctggtagctgagacgtccgggccggacggccggatcgtcgccctcgtccggggaaccgtcaagtctgtcgcctccggcaagagccgccctggcgcgcccgccttcgccagagtcggctacattcttggcctccgcgtcgcgccttcccacaggcggatgggcatcgcgcggcagctggtgcatcggctggagcagtggttcgagctgatgggcgccgagtacgcgtacatggccaccgacaggtccaacgaggcgtcgctgcggctcttcaccggccgctgcggctactccaagttccggacgccgtcgctgctggtgcacccggtgcactcgcaccgcctcaggccgcccccgcgcgccacggtggtccgcctgggcgcccgcgacgccgagcggctgtaccgcagccggctcgcgcacgtcgagttcttccccgccgacatcggcgccgtcctgggcaacgcgctctcccgcggcacgttcctggccaccgtgggcggctacgagtggggcggcgtcgaccgcttcctggcgtgcccgccggcgtcgtgggccgtggccagcgcgtgggactgcggcggcgtgttccggctccaggtgcgcggcgcgtcgcgcctgcgccgcgccgccgcggccgccacccgcgcgctggaccgcgccgccaagtggctgcgcgtgccgtccgtgcccgacttcttccgccccttcgcgggctggttcgtctacggcctcgccgggagcggcggccgcgacgccgcgatggccgccgaggcggtcttcgcgtccatcgtcaacatggcgcgcggcagggcggccgccgtggcggtggaggttgcggccatggaccccctccgcgggcgcatcccgcactggcgccgactgtcgtgcaccgaggacctgtggtgcatgaagcggctcggcgctggtggtggcggccacgcggacggatgggactgggccaggtcggcccctggtcgatccatcttcgtggaccctagggaggtgtgagggtgactcggcggccgcttcagagcagagctctagtgctctgtttttctttctttcttttttgccactgagcttcattctctctttttttttcccctaacacttccaaattttgcgacccttcagttttgttctggttctggtagacgagatactgtcttttttcttttgtagaatcaccagggagtacgacgatggaaaatctatgatgtagatacatttcccttgactcttgtcattgtccgccgtgttctatgcatcatgtacgcaccatgtcaagtgtgcggttgcaaggcgatcgttcttgtccagccacacgtacacggacggaatagtatcgttg

SEQ ID NO: 208646 - DNA, 680 bp, Zea Mays
gtcagtaacaaaaggagcagactccagcttcaaaagcaaaaactcaagctgtttgctattcttaggggacagatgtcatatctagaggcctggtctcatatcgaaaaacatcattcaagtgctttatcagcagcaatcaaagctctgaaggctagtactcttcgtcttccagttgttgatggcgcaaaggctgatgctcaagccgtgaaggaagcagttaactcagcagtggatgtgatgcacacaatgacatcctcgatttgtaatttgctatctaaggtcgagggaacaagctctgtggtgtctgagcttgccaaagttgcaacgcaagaacaaatgttgttggaccaatcaaaggatctcttgtccacggttgcagcaatacatgtatggacatctcctacgatcattcttacccaatctccataattcaactgtatttagctcggtgttgactatctgtttggggaaaaaaaaacaggtcaaaaattgcagcctgcaaactcatatgctacaacgtaaccaaaagcagagcccgacacaattgtagaccagtttgcctcgccacgttggtggtcactaacatcacacggcctcatgttttctcaccggagactgtggtacaggtgcctggattttaagataatttcagacaacaacattacacccttagctaacac

SEQ ID NO: 208647 - DNA, 1832 bp, Zea Mays
aactacctgggccgccaccgccacagccccgccccgccccgcccccgcctcccgagctgagcgagcgactcagcaagcgcgcaacggaaccagccgccgcggcgcgccatggcgccgttccagatgcgtttcgggctccagatctctcccgcgcgctccgacgacgacgaggaggaggacgacgacgacgacaacgaggaggagtatgacgagatggcgagcgaggggacggcctcgccgccgatgatgctccggccagggaggggagggggagggctggtgagcgccgtcgtgggcgcgctgcggaggtcgctggtgatgtgcagcgctggcgccgtggatatcgacgacgacgacgacgaggaggagggcgggatcgagatcgggcggcccacggacgtgcaccacgtctcgcacgtcaccttcgaccgctttggtggcttcctcggcctccccgcggacctcgaacccgaagtgccgcggcgcacgccgagtgccagtgtaagcgtatttggggtttcacctacctctctgcaatgttcatatgatccaagaggaaacagtgtgcccacaatattgctaatgatgcagaggaagttatatgatcgcggaggacttaaggttgaagggatctttaggattaatgcagaaaatagccaggaagtctatgtgagggaccaattaaacagtggagtggttccaaatgaagttgacttgcactgccttgccgggttgataaaggcatggtttcgggagcttccttcaggtgtattggatgcactgacaccagaacaagtgatgcactgcaacacggaaggggggtgcgctctccttgcttctatgctaccaccagtggaagcagcattacttgactgggcaattaatctgatggccgatgttgtagagcaagaaaactacaacaagatgaacgcccggaacatcgcgatggtttttgcgcccaatatgactcaggtgatgaatttcctcaagaccttaatcttgaagactctaaaggaacgaaacaaaaaggatgaggcacttgaggcgttgcaaccatgctccagctctccaaatgaccaagacgaacatcaggtgtccgagcatttggagaaaccttcagttctgccaaatcaaaaaggcttcggtttccacatgaatgatagtgccactcctgttcaagtccttggagctgagaaaactctccatcatcactcacaaatccgttctcacgagccaaaaaagtttggaaccgatatggaccacaagaaaagacagagtgatgcctcctctctcctcggcagcgattcgagcaaccgattcaacagttctgggagagaattcggtagcagaaatggcgcgtccgacagatttagttttaggaaaggggtggagaggctttgcaggcatcccgtgtttcagttgaataggtccatgaagaagtctacagatgccgtggtcttcgatgccccccgagaaacaagacaggcttgggtgtgatacaataacgacattgtatgtattatgtagttctgtttccacctgtgtttcagctgataagccgttcccactagtctgtgtgagtagaatcggttagcctcttaggtgttacaaaatcgaggttatttggagtgtacattatcgcagtttactcttccgacgaaagtgtcaggagaagtagtacacactgtacactagcacttggcttctgcggaacgaacgaaagcgagagtgaactcaggctccatggctgcgcgctgcgtacctcgagcgttagtgaccccttgatattataaccttgcaccttgctgatattttgtaacagtatcggcttg

SEQ ID NO: 208648 - DNA, 1482 bp, Zea Mays
caaaaaatgcagatattctgaacggcacccgtcatatatgttctggcttgactagcaggttgagggaagttgaagcaaaagtctaagcaaaaatgttttacgggggatatgcttaccatggcaactcgtttgagcaaacataccgttgttatccagcatcgttttttgataagccacacctggaaggcggtgataaagtaataatgccaccttctgcccttgatcgtcttgcttccttgcacatcgagtaccctatgctatttgagctgcacaatgatgcaacccagcggatttcacactgtggtgttttggagtttgttgcagaagaaggcatgatcatcatgccctattggatgatgcaaaacatgctgcttcaagagggtgacactgtccatgtaaaaaatgcgactcttcccaagggcacatatgtgaaattgcaacctcacacaactgattttctggatatttcaaacccgaaagccatcttggaaaaaactttaagaaatttctcctgcttaaccacgggagacagcatcatggtagcctacaacaacaaacaatattatattgatattgttgaaacaaagcctgcttctgcggttagcattattgagacagactgtgaagtggactttgcgcctcctcttgattataaagaacctgagaaaccacgacaaccaacagttcctgcaagcaaggcacctgctgaagatggcaacactgcagtggaggatgaaccaaaattcaaaccatttactggttttggaaagcggttggatggaaaagcctcaaaactgcaagcatcagaggttccttccactgcactttctgcaccttcagattcaaacaaaagagcaaatcagcaaatctcagcacccgcagcttcaggagctagcaattacagtcgacagaaaactgggaaacttgtttttggttcaagtgcaagcaacaataaggaaccacaaaaggctcctgctaaagaggagcaacccgcaaagaaggacgacgagctgaggttccaagcgttcagcgggaagagctactcattgaaacgttagctgcttcagttaaccttcaaattcgccgctactctttcgtttcgtgcatggtgggtgttctggcacctggtcaccaccatgtagatatgaattgaagtatgtatatgcttatcttgatggaaacatgacagtctgtttatttaagcccaaaagtttaaaacagcgctattgttcttacccagtgtgtgttttggaatctgctcctgttaattttcgggccatggtttcggattagtagaccaaagcaggatactgaacgtgtcagcaatcattattagcggcagacgagatgtgatgatcgttgggccctgggagtttggtcatgtaccaatattatagaccgtactccaagtctccaatactgattgctgaatattgaacgaggagcaagtaaacaagctccttcaggtctcagttgccattc

SEQ ID NO: 208649 - DNA, 1567 bp, Zea Mays
ctagtcatttgctagtgattccttcgctatcccatccatccatgtttgcggttccgtgcgattagtggtttgctcttccgtgcacgaaagattgatcccggggcccaagtggttgctccacgcacgcaacgccactacgccaggttgagggaagttgaagcaaaagtctaagcaaaaatgttttacgggggatatgcttaccatggcaactcgtttgagcaaacataccgttgttatccagcatcgttttttgataagccacacctggaaggcggtgataaagtaataatgccaccttctgcccttgatcgtcttgcttccttgcacatcgagtaccctatgctatttgagctgcacaatgatgcaacccagcggatttcacactgtggtgttttggagtttgttgcagaagaaggcatgatcatcatgccctattggatgatgcaaaacatgctgcttcaagagggtgacactgtccatgtaaaaaatgcgactcttcccaagggcacatatgtgaaattgcaacctcacacaactgattttctggatatttcaaacccgaaagccatcttggaaaaaactttaagaaatttctcctgcttaaccacgggagacagcatcatggtagcctacaacaacaaacaatattatattgatattgttgaaacaaagcctgcttctgcggttagcattattgagacagactgtgaagtggactttgcgcctcctcttgattataaagaacctgagaaaccacgacaaccaacagttcctgcaagcaaggcacctgctgaagatggcaacactgcagtggaggatgaaccaaaattcaaaccatttactggttttggaaagcggttggatggaaaagcctcaaaactgcaagcatcagaggttccttccactgcactttctgcaccttcagattcaaacaaaagagcaaatcagcaaatctcagcacccgcagcttcaggagctagcaattacagtcgacagaaaactgggaaacttgtttttggttcaagtgcaagcaacaataaggaaccacaaaaggctcctgctaaagaggagcaacccgcaaagaaggacgacgagctgaggttccaagcgttcagcgggaagagctactcattgaaacgttagctgcttcagttaaccttcaaattcgccgctactctttcgtttcgtgcatggtgggtgttctggcacctggtcaccaccatgtagatatgaattgaagtatgtatatgcttatcttgatggaaacatgacagtctgtttatttaagcccaaaagtttaaaacagcgctattgttcttacccagtgtgtgttttggaatctgctcctgttaattttcgggccatggtttcggattagtagaccaaagcaggatactgaacgtgtcagcaatcattattagcggcagacgagatgtgatgatcgttgggccctgggagtttggtcatgtaccaatattatagaccgtactccaagtctccaatactgattgctgaatattgaacgaggagcaagtaaacaagctccttcaggtctcagttgccattc

SEQ ID NO: 208650 - DNA, 1778 bp, Zea Mays
gccctaggcaagatcattttagacccaagaatactgatcctggcctcatgggcccatggatgctccgtgcgatcgtgcattcgtgctcgtgtcgagaacccaatccggtccactgagcccaaccataccggcggctctctgtttctcgaatacccgatcctatcgcatcgaatcgaaactgttccgctcccactccgatcggattcggtgggacggtggcatctatgcgcccgtcgcaccgtcgctcaaactgtataaacctgcgcccgaacacttcgagctcacccgcaacctcctccgggaagcgcgatcgccgtctcgaaggagctgaaatccaagattccaagctcttctgttgagggaagttgaagcaaaagtctaagcaaaaatgttttacgggggatatgcttaccatggcaactcgtttgagcaaacataccgttgttatccagcatcgttttttgataagccacacctggaaggcggtgataaagtaataatgccaccttctgcccttgatcgtcttgcttccttgcacatcgagtaccctatgctatttgagctgcacaatgatgcaacccagcggatttcacactgtggtgttttggagtttgttgcagaagaaggcatgatcatcatgccctattggatgatgcaaaacatgctgcttcaagagggtgacactgtccatgtaaaaaatgcgactcttcccaagggcacatatgtgaaattgcaacctcacacaactgattttctggatatttcaaacccgaaagccatcttggaaaaaactttaagaaatttctcctgcttaaccacgggagacagcatcatggtagcctacaacaacaaacaatattatattgatattgttgaaacaaagcctgcttctgcggttagcattattgagacagactgtgaagtggactttgcgcctcctcttgattataaagaacctgagaaaccacgacaaccaacagttcctgcaagcaaggcacctgctgaagatggcaacactgcagtggaggatgaaccaaaattcaaaccatttactggttttggaaagcggttggatggaaaagcctcaaaactgcaagcatcagaggttccttccactgcactttctgcaccttcagattcaaacaaaagagcaaatcagcaaatctcagcacccgcagcttcaggagctagcaattacagtcgacagaaaactgggaaacttgtttttggttcaagtgcaagcaacaataaggaaccacaaaaggctcctgctaaagaggagcaacccgcaaagaaggacgacgagctgaggttccaagcgttcagcgggaagagctactcattgaaacgttagctgcttcagttaaccttcaaattcgccgctactctttcgtttcgtgcatggtgggtgttctggcacctggtcaccaccatgtagatatgaattgaagtatgtatatgcttatcttgatggaaacatgacagtctgtttatttaagcccaaaagtttaaaacagcgctattgttcttacccagtgtgtgttttggaatctgctcctgttaattttcgggccatggtttcggattagtagaccaaagcaggatactgaacgtgtcagcaatcattattagcggcagacgagatgtgatgatcgttgggccctgggagtttggtcatgtaccaatattatagaccgtactccaagtctccaatactgattgctgaatattgaacgaggagcaagtaaacaagctccttcaggtctcagttgccattc

SEQ ID NO: 208651 - DNA, 1737 bp, Zea Mays
gccctaggcaagatcattttagacccaagaatactgatcctggcctcatgggcccatggatgctccgtgcgatcgtgcattcgtgctcgtgtcgagaacccaatccggtccactgagcccaaccataccggcggctctctgtttctcgaatacccgatcctatcgcatcgaatcgaaactgttccgctcccactccgatcggattcggtgggacggtggcatctatgcgcccgtcgcaccgtcgctcaaactgtataaacctgcgcccgaacacttcgagctcacccgcaacctcctccgggaagcgcgatcgccgtctcgaaggagctgaaatccaagattccaagctcttctgtcacaggttgagggaagttgaagcaaaagtctaagcaaaaatgttttacgggggatatgcttaccatggcaactcgtttgagcaaacataccgttgttatccagcatcgttttttgataagccacacctggaaggcggtgataaagtaataatgccaccttctgcccttgatcgtcttgcttccttgcacatcgagtaccctatgctatttgagctgcacaatgatgcaacccagcggatttcacactgtggtgttttggagtttgttgcagaagaaggcatgatcatcatgccctattggatgatgcaaaacatgctgcttcaagagggtgacactgtccatgtaaaaaatgcgactcttcccaagggcacatatgtgaaattgcaacctcacacaactgattttctggatatttcaaacccgaaagccatcatcatggtagcctacaacaacaaacaatattatattgatattgttgaaacaaagcctgcttctgcggttagcattattgagacagactgtgaagtggactttgcgcctcctcttgattataaagaacctgagaaaccacgacaaccaacagttcctgcaagcaaggcacctgctgaagatggcaacactgcagtggaggatgaaccaaaattcaaaccatttactggttttggaaagcggttggatggaaaagcctcaaaactgcaagcatcagaggttccttccactgcactttctgcaccttcagattcaaacaaaagagcaaatcagcaaatctcagcacccgcagcttcaggagctagcaattacagtcgacagaaaactgggaaacttgtttttggttcaagtgcaagcaacaataaggaaccacaaaaggctcctgctaaagaggagcaacccgcaaagaaggacgacgagctgaggttccaagcgttcagcgggaagagctactcattgaaacgttagctgcttcagttaaccttcaaattcgccgctactctttcgtttcgtgcatggtgggtgttctggcacctggtcaccaccatgtagatatgaattgaagtatgtatatgcttatcttgatggaaacatgacagtctgtttatttaagcccaaaagtttaaaacagcgctattgttcttacccagtgtgtgttttggaatctgctcctgttaattttcgggccatggtttcggattagtagaccaaagcaggatactgaacgtgtcagcaatcattattagcggcagacgagatgtgatgatcgttgggccctgggagtttggtcatgtaccaatattatagaccgtactccaagtctccaatactgattgctgaatattgaacgaggagcaagtaaacaagctccttcaggtctcagttgccattc

SEQ ID NO: 208652 - DNA, 730 bp, Zea Mays
ctcgtttttccaggccatttttctgcagctcctcgttgttgacgatgacataaattctcccgtcttatcacatcatttttttaaaatccgcatgctgacatctagcagtaatgctaatggaggcgcatcacgcagggacgtctccctatcttaagaagaggagctgcaggaagccaaaggaaacgaagcatagccgtagaagcatttcacaagtcttgaagggattgtgcttgctgcttgcatagtggtaggagatggagcgtccatctgtgctgattttgctgatatttgcatttgctggaggaaatctgctcgtgggcatcgcctctaacgcaagaagcatcaagaacacaggaacgatatacttttaccatccgaaagacaaggggcctggaaaatgtcaggacggacgactaccaacccgttgacccgagcccaagctccaaagccacgatcaggccaggtccaattgagcatggagctccgcttcttccttatgtaccgcggtacccgccgccgccgcctgcctcctgttgaatcccctggatcccctttcaggctttcacttggatacatctggtcgtcaaaatctgctgtcatacttttattaaggtcactagtgtgaccatatatgtatcaaatataagtgtgttactgttaccaataccatattgcttgagtgctgcatgttttactatgtttcgcgaagtggtgaatggttgtcaagggc

SEQ ID NO: 208653 - DNA, 1960 bp, Zea Mays
gcttccttccttcgcaccccgcctcggccggcgtcgccacgcgcaccccgcctcatccatccaccaatccaccgcctttcgcaggattgcgcttgctaccccgggtccccaccacacgcacgcgagcccgcggccaccacctcgatgccactgacgggctggaatccgctggcgcccgtcctccagaccgtcgccgctttctcccgccacatcctcatcgcccccgacgccgggctcgacgaccaccgcctccgcccccttctagcgctctccctctccccgccttcgccggcaccaccgcaaccggaggtccggaaggagaagaaggatgccaaggaggcgccactgacgaaggaggaggtcggccgggccacgtggatgctgcttcacaccatcgcagcgcagttccctgacgaacctacgaggcaacaaagacgggatgcaaaggagttgatgcatataatctcgagactatatccttgcaaagaatgtgctgatcacttcaaggaagttttgaagtaagcatttctcaccaacaacttggataaatacttgtaatatcaattttaattgcttgattccttgatgtttctttgtgttacaacttacaagtattctctctgtgaagtggtcacatggttcccttgacagtttgctgctttataatatgatgcaaaatagcacatattagctacgaactcttgctactttctgcagtttgagatctgtgcatgaatcttagtttctggtgctctgaagtcatgggtttggctggtagcctgatacagtatacacctatttattaagtgtttacacagttttttgtccatatgatgcacagggtgagtaagctctttttttttaataaggaatgtgtaagctctttacatgctcatctattgatgacttgaatataacaatgaatcacaatgattgtttgtgtttatatttgtgaaggttcatgttgttaatatctgatacggaaacatggctgagttgcgtgttattttatctaacttttggttatctgaaagtttatgtagaggacagccctctcattcatcaggctgaatatatcatagttcagtgatagcaataattcttgaaaactaaactgacttaactgtgttgtacttctgtagagcaaatcctgtgcaggcaggatctcaggctgatttctcccagtggttatgttatgtccataacgtggttaatcgaagaatcataggaaaagtaaggtctcagggccaaaaagaggaaaactgaggcacacccttttactcctacaataagggccttgggaagccaatatttccctgccaaagagtaactgcacgttggggtaaactggattgtcctgagcgctcgtgtgatctagaaggcagcatcgacatcatgccaaaccgatgacatggccaagaaatcgcttgaactttctacccgtagatgatttcatttcaataccactcattgatgagcacttgagcaataccagggagataagaaagagaattcaggactccgtgctgacatagcagggcgtccatatgcttctgtatctttggcgttggaccgttgtagtaaaagatatgaatgtctcgtgatatttgtacttgtctatgcctagtctgatgtctgacgactcttccataacccataccagtccgtgcagattttcatttttgtgcaaccgtcttatgtctgagcagtttttttataatatcacaggagtcagaagtgtactcccctttcgagggtaggaagatgtgtcgtcctttctaatacttaaatttctgtatcacaggagtcagaagtgtactcctttctatatagaattctggaaaacaagatgctgatgacacttctactaggatggatccatatacttattaggatgttaaatatctgatcttttttcaattgcgaataaatatgatagctatataaatttatattcttg

SEQ ID NO: 208654 - DNA, 1349 bp, Zea Mays
actaccctattccgatctcgaggacgccacgccacttttaacccccccacccccccttctgtcgtggtgcctcggcccaagtgctaacgcccaactgccaaggcggggaggggggatccggtgcgcgcgcgcgcggaaatgaacaccggctgattagtaggtgggagatcgaggtcgcgcccttgccccacacgccactaaaggccgcgccgacgggctcatcaggcgctctggacgggctcgcttctgccgctccgcgcttgtgcggtgggtgaagtgctgctgctggtgcgggaagcgtcgccaaacgtgcagaccttggtgggggagcgaggagtcgaaacaagaaccatgagtgaaacagggcacactgtacaagtcactaacctctcgagcagagtatctgaaagtgatctttatgagttcttttcgttctctggccctattgaacatgttgaacttatcagatcaggagaatacggtgctactgcttatgtgacattcaaggagcgctttgccttggaaactgcggtattgctcagtggggctactattgtggatcagccggtatgcataacttattggggacaacctgaggagacttttaatttctgggacaggccaacttgggaggttgaagaggaaattgaatacacgagttatcaatcatgccagtacaacactactccgcaggaagctcttacagtggctcaagatatcgtgaagacgatgctagcaaaggggtacgtgctcagcaaggacgctttggctaaggctagagcctttgatgagtcccgcggattaacagctgcagctgcagccaaggctgcagagctgagcaagagaattggtttaactgacagggtcagtgctggtgtcggtgcaatgcgatcggtcgatgagacatatcgcgtaacggagacgaccaagacggtagctactgccactggaagaactgcagctaaggtggtaaatggtatcgtcaccagcagctacttctctgcaggagccatgatgttgtctgatgctcttactagggctgccaaggccgcggctgatctggccgctcatggcagacagagttaagtgaaaaacaaaacatacaatccatcctttttcagttactaaacatgaggacgaacaccttaataggatgcttgaagtgttgttgttcgatgtatatttataacagacaacattgttgatttgttgtataaattaaaaggagacgtacactgcgtttgcactaataagtttgattattgcaaatggagtcgagtgatcgtgcagtcatgtttctgactttctgctcatttcatattctcgcatcgctgttgggtgctgccttc

SEQ ID NO: 208655 - DNA, 2689 bp, Zea Mays
atgacgacatgcagatgggacgagtgcgagttcgtgcagcagagcccgtggccagtcgttcttgcttgggaaagcttttccctgccgcaacatgtggattggagcaacatctccagcattagcgagtggtgggagaagacggagactctctttccgcaagatcgcaaaagggagttcaatggcctggtccatcaggacatgaacgcgccgctatcgcactattttatatacactggacacaactcgtatctgaccggtaatcaactcagcagtgactgcagtgatgttcccatcatcaaggcacttcaattaggtgttcgtgtaattgaattggacatatggccaaattcttgtaaagatgacattgatgttctccatggaaggacactcactgccccagtatcacttatcaaatgcttgagatccatcaaagaatatgcttttgttgcatctccctatcctgttattataactctagaagaccaccttacacctgatcttcaggagagagtagctaagatggtccttgaagtgtttggagacatcctgtattaccctgaatcgaaacatcttcaagaatttccttcacctgaagctctaaaggggcgtgtcatgctgtcaacaaaacccccaaaggagtatctcgaagcaaagggtgacaccatgaaggagaaagaaattgaggcccggattaaaaggggagaaagggaagcagcagcatggggagtagaagttccagatattcaggatgagatgcaagtcgccgacaaggatgaagatgagctattataccgcgaaagaggtgcagatggcgatgatgggaaggaaacaaagcatgttgcagcagagtacaaacacctcatcactatcaaggcaggaaagccaaagggtcctctcgtggatgccataaagaacgatccagacaaagttaggcgactcagtttgagcgagcaagagcttgcaaaagttgcagcacatcatggtcccaacattgtgagtttcacgcatagaaatatgctgagaatatacccaaagggaacccgcttcaattcatccaactataatccatttcttggctgggtgcatggtgctcaaatggtggcattcaatatgcagggatatggaagagcactttggttaatgcatggtttttataaagccaatggcggttgcggttacgtgaaaaaaccagatttcttgatgcaaacttgtccagatggaaaggtgtttgattcgaaggcagatttgccggtgaaggcaacattgaaggtcaaggtgtacatgggggaaggttggcaaaaggacttcaagcagacacatttcgactcatactcacctccagatttttatgtaaaggttggcatcgccggagttccattagactcggtgatgagaaagacgaaagccgtggaggacagctgggtgccggtgtgggaggaagagttcgccttcccgctgaccgtacctgagatcgcggtactccgcgtggaggtgcacgagcaggacgtgaacgaagacgacttcggcgggcagacggcgctgcctgtggcggagctgcggccagggatccgcgccgtgccgctgttcgaccacaaggggctcaagttcaagagcgtcaagataagagtgacatggaaacgaacgcgactgagcgaggcctcaattgacaagcagcaagtggaagtgggcatggctatgggtgctgcggcggccgcatccacctgcaccaggcccgcgtcccctggcctggcccgacgtcgcgtcagggcgcaggcgacgtcgtcgtgggccggaggcgccgaggcgctggtgcggtcgggcgcggtgagggccgtgcggccgagggacgctgcggaggcgctgggcggcgaggggttccgcctgctggacgtccggccggagtgggagcgcgcccgcgccagcgtgcggggctcggtgcacgtgccgctgttcgtgggggacgacgacatgggccccgtgacgctgctgaagaagtgggtccacttgggctacatcgggctctggaccggccaggccttcaccaagatgaacgagcgcttcgtcgacgacgtcgccgccgccgtcgacggcagcaaggacgccaagcttctcgtcgcttgtggcgaaggcctcaggtcgttgatcgcggtgaggatgctgcacgacgacgggtacaggaacctggcgtggctcgccggcgggttcagcaagtgcgcggacggcgatttcgcagatgtggagggggagagcaagctgcagtacgccaccatcgggggcgcgtcctacatcttcctccagatcctgctgtttctgggagtggtgaaatgatccgttcgatcgatgttgttatgacttcctcggccgttcgatctggtctgttttgctttttgctagtactaccgttgtcagatgttgtactgcattgcatatgcgaacagcatgtcggtggcagtggtagagctactgagctaggcgcgcacacatttgacattcctatctcgtccctctcgtgttcaggacccttaatgtacatgttcaggacccttaaggcaatcggctcttaatttgatttgcggcccctaatgtacatgttcaggaccggtcgtaggcccctaacgtgcatgcacggctgagaagtgagaaacaaaaagaaatgagcattgcaagttgtgtttttataccatggaaa

SEQ ID NO: 208656 - DNA, 1930 bp, Zea Mays
atgacgacatgcagatgggacgagtgcgagttcgtgcagcagagcccgtggccagtcgttcttgcttgggaaagcttttccctgccgcaacatgtggattggagcaacatctccagcattagcgagtggtgggagaagacggagactctctttccgcaagatcgcaaaagggagttcaatggcctggtccatcaggacatgaacgcgccgctatcgcactattttatatacactggacacaactcgtatctgaccggtaatcaactcagcagtgactgcagtgatgttcccatcatcaaggcacttcaattaggtgttcgtgtaattgaattggacatatggccaaattcttgtaaagatgacattgatgttctccatggaaggacactcactgccccagtatcacttatcaaatgcttgagatccatcaaagaatatgcttttgttgcatctccctatcctgttattataactctagaagaccaccttacacctgatcttcaggagagagtagctaagatggtccttgaagtgtttggagacatcctgtattaccctgaatcgaaacatcttcaagaatttccttcacctgaagctctaaaggggcgtgtcatgctgtcaacaaaacccccaaaggagtatctcgaagcaaagggtgacaccatgaaggagaaagaaattgaggcccggattaaaaggggagaaagggaagcagcagcatggggagtagaagttccagatattcaggatgagatgcaagtcgccgacaaggatgaagatgagctattataccgcgaaagaggtgcagatggcgatgatgggaaggaaacaaagcatgttgcagcagagtacaaacacctcatcactatcaaggcaggaaagccaaagggtcctctcgtggatgccataaagaacgatccagacaaagttaggcgactcagtttgagcgagcaagagcttgcaaaagttgcagcacatcatggtcccaacattgtgagtttcacgcatagaaatatgctgagaatatacccaaagggaacccgcttcaattcatccaactataatccatttcttggctgggtgcatggtgctcaaatggtggcattcaatatgcagggatatggaagagcactttggttaatgcatggtttttataaagccaatggcggttgcggttacgtgaaaaaaccagatttcttgatgcaaacttgtccagatggaaaggtgtttgattcgaaggcagatttgccggtgaaggcaacattgaaggtagatggtcaaggtgtacatgggggaaggttggcaaaaggacttcaagcagacacatttcgactcatactcacctccagatttttatgtaaaggttggcatcgccggagttccattagactcggtgatgagaaagacgaaagccgtggaggacagctgggtgccggtgtgggaggaagagttcgccttcccgctgaccgtacctgagatcgcggtactccgcgtggaggtgcacgagcaggacgtgaacgaagacgacttcggcgggcagacggcgctgcctgtggcggagctgcggccagggatccgcgccgtgccgctgttcgaccacaaggggctcaagttcaagagcgtcaaggtcctcatgagcttcgagttcgcgtagcgtcccgcagcgtaaagcgattatgctgtcatgtgcgtcgatcgatgtttgtttgcaataagaatcgactttttttcctctgttattaggagtcccatgccgggttttttttgtacagatgcatttccgctaactatgtacaaacgggtcacctgacacgaacccagccaaagcacggtccatttgcatcagggcagccacgacacgacgtgccactagaccgtgcggagctgggttccgtacctgtctaacggtccagacatggcttgctgggtc

SEQ ID NO: 208657 - DNA, 2005 bp, Zea Mays
gaaaatggaaaagagtgcattatgagcacggcggctctatcagagcgtgatacattcacaagctgaagagggctcggtcatccggaccggaattcgtaaaggcattagtgcattagcatcgtcaccactcgcgccgtcgtactacctcgccgactccctcgcttcgcagaaacaatacgttgattgctattcgatagatcgcactaaagggaacacatggatctagcttgattttgtaccaaattcagagcaactgatcgtggggattcgattctccatagtttatttgcggggccgttccgatcagcgatggtgaagaggctcaggcgcaagggcgacgtctcctccgcgccgccgcctaaggccgccgcatctcggtcaaccaatcccgacaaatttaaaaagaagggggtcaaaaccgatccggagaaattgaaggcggcctgcactgaatccgcaaacattgctgaggcgtctgcttcagcgcagacacccaccccgaaaccagtcaagacgagtccggcggccgccgccgccgcagagattgcagatgatcgggtcgcccagagcaaaacggaggacggaaagtttagtaggaaggagacgatgaagggaagagaggagcagaagggagaaggggccagtgatggggtcacccagaccaagactgaggatatgaatgtgactaggaaggaaacgatgaaggggggagagaggaagggggacgggagtaggaaggagatgatgaaggggagggaagagcgtgtgaaaacggaagagaagacagggaaggaaaaggaggaggaaaagagtggctcaggattcatattcatgtgcagtgcaaggacgaagccagaatgctaccagaacggcgtgtttggccttcccagggggaagatggatgtggtggagaagatccagcgagggacgaagctgttcttgtatgattttgacctcaagctactgtatggggtgtacaaggcagatacaaggggaggattggatcttgtgcgtcacgcctttgatggcaaattccctgcacaggttaaatttagcgttttcaaggattgtcttcctattcctgagagtagtttcaagcatgccattaaggagaactacagctcaaagggcaggttcacccaagagctcaacactaaacaagttcaaagactattggcactgttcaagcctatcagcctttctaaaccagctccacaacatattgaggatattcgaaaaccaagtgattatgaagaaagaagacagttgcaacatattgaagaaagggctgcacctattaatgtccacgcacatcctcttgaagatcggtacaagatgacacggtcattacatccgccactttttgatgagcctcgacgtggtttggtgctaaatccttatcatatgcaagagcctcaacatgttcctcttaattactatcaccaagtggctactaggtctccataccatcaacctcatatggatattatgcacgaaagaactgcagctgaggtaactgtaagagatcaccaagcactgccaggagagcttgctgcacggtctgaacgcgtggatgagctgtaccgttcttacaaactctctacacgcgcaatggacctcagtccgggagcatcctacctgacaacttatgagcacccgactagtgtttatggtgagggcattcagaggccagctttgacaagggttagtggcccaagtgtgcctgtgtccacccgttattcctttgctggcccaccagcatattgatcatccagatgcaagcactcaaatcggccccagccgctgtacaagttactgtaggcaatggcttcttgtacaccgttggaagccaggatagaacctgatggtagtagctttgcagtttaattattgcctttggtttcttttgcaagataaatctatgagatgtaatgtggaccttgtttgacccaagttgttttaactaaaatgcaaaacgatggatgtctttgtgttgatttgcagc

SEQ ID NO: 208658 - DNA, 3012 bp, Zea Mays
aagctttcgactgactgcagttctgcggtgctgacatcggtgaaagatgaggaggatcaggcttgcctgtttgcttgttatctttgtgcaagtgcaatgggcggcccttggaacgcatgatgtgtacatcgtgaccatggaaggggatccggtcgttagctacagaggcggtgtccaaggatttccagcaaccgctgtggattcggacgaggaaattgatctaaccagcgaggctgtcaaatcgtatgccctccacctccgaggacaccatgacaagctgctagactcgcttttagtagaaggaacttacgagaagctttatagctaccatcatctcatcaatggcttcgcagttcacatgtcgccactgcaggctgagttcttgaagaaagccccaggagttaagcatgttgagagagacatgaaggtacagaaattgactacacacacacctcagtttcttggattgccaactggggtatggtcaacaggaggtgggcttgatagagctggtgaagatgttgtgatcggtttcgtggattctggaatttaccctgaacatccgagcttcgctgcgcacaagactgatccatatggacctgcccctcgttataaagggaaatgtgagatggatccagtaacacaaagaagtttctgtaatgggaagatagttggggctcagcattttgcaaaagctgcaatggctgctgtcacacagctgcaattgctgctggaaacaatggggtcccagtgcgaatgcatggtcacgaatttggcaaggcaagtggtatggccccacgtgctagggtagctgtctacaaggttctttacaggctttttggtggttacatagctgatgttgtggcagctattgatcaggctgttcaggatggtgttgacattctcaacctttctgttgggcccaatagcccaccaacagctacacggactacttttttgaatccttttgacgctgcacttctttctgctgtgaaagctggggtatttgttgcccaagctgcaggaaatggtggaccatttccaaaaacactggtgtctttcagcccatggataactactgttgctgctggagttgatgaccgcagatacaagaatcatttaacactaggaaatggaaaacttctctctgggcttggagtatcacctgcaacacatgggaatatgtcgttcagcttgatttctgcagctgatgctctattgggttcatctgcaaccaagtacagtgcattagattgccagaggcctgaactattgaataagaggaaagttcaggggagaattcttttgtgtggctattcgttcaattacatttctgggacagcttcaataaagaaagtgtctcagacggccaggaatcttggagcagctggctttgttgttgctgtggagaataattacccaggaacaaaatttgaccctgtaccattcagcatccctggaattctcatcacagatgtcagcaaaacggaggatcttatagactactacaattcttccaccataagagattgggctggaagggctacagccttcaaagcaacagcaggtattgcagatggtttggcaccaacactatacaattctgccccccaggttgcactgttctcttctcgaggacccgatgttaaagattttagctttcaagatgctgatgtccttaaaccagacatacttgctcctggcaatctcatatgggctgcatgggcgcctaatggaacggatgaatcaaactatgctggtgaaggatttgcaatggtttctggaactagcatggccgcaccgcatatcgctggcattgcggcactgataaagcagaagaacccaaagtggagcccctcagcaataaaatctgccatgatgacaacggccaatacactggacaaagggagccgtcctctcagagcgcagcagtacactgcatcggaaatgatgacactttctcgggccacaccgtttgattgtggtagtggcgctgttaacccaaaagctgcccttgatcctggtcttgttctagatgcaacccacgaagagtacatcgcatttttgtgctcgatccctgacgtcaaccagagcgaagtgtcaaacatcgccggttcagcttgcaactccagctccaaggggcgtcaacgccccttcgacctcaacctcccctcgatcgccatctctcagcttcgaggcaccgtgacggtgacgcggaccgtcacaagcgtgtccgaggagaccgagacctacaccatcatgacgagaatgccgccggaggttgccctggaggtgacgcctccggcggtgacggtgctgcccggagcatcgagagagctagctgtgaccctgacggcgaggtccgtgaccggcacctacagtttcggagagatcgccatgaaaggcgaccgcggccacctcgtcagaatcccagtggtagctatgggattcaagtagatagaagacgaccgcgaccggcgctagagagagtaagtacgaggagcgagttgtgcctctgagatccgaggtcttgagctgcagaggaatgctgtaatttttccatagtttgtagagaataagagttagggtctgtttggttgggctgtggctgtgaaaaaagttgctgtgggctgtgagctgtggaaaaagctgctgtaggctgcaagctgttaaaaagctaaaaactgtttggtggaaaccactaaaagtcgttaaaaattcttcgatatatgttttcacagtttcatctaaaaagccactaaaagcaggtccaggggtgctttcagatttgcactgcgagaaagtcggcttttagaaaaagctgcttcctggatctagccttttggttgacttttggcttttaggggggcaaaagccaaagccaaaagtcaaaccaaacacacccttagaatgccctcctggttgtaaaaatatgtatttgggtgtttaaatttaagcctatgttcagccttgctcttaaggcaaagtatcatgtgcacatcagctatcagt

SEQ ID NO: 208659 - DNA, 3078 bp, Zea Mays
atatgcagtgcatccaaggcgcaggcggttctgcggtgctgacatcggtgaaagatgaggaggatcaggcttgcctgtttgcttgttatctttgtgcaagtgcaatgggcggcccttggaacgcatgatgtgtacatcgtgaccatggaaggggatccggtcgttagctacagaggcggtgtccaaggatttccagcaaccgctgtggattcggacgaggaaattgatctaaccagcgaggctgtcaaatcgtatgccctccacctccgaggacaccatgacaagctgctagactcgcttttagtagaaggaacttacgagaagctttatagctaccatcatctcatcaatggcttcgcagttcacatgtcgccactgcaggctgagttcttgaagaaagccccaggagttaagcatgttgagagagacatgaaggtacagaaattgactacacacacacctcagtttcttggattgccaactggggtatggtcaacaggaggtgggcttgatagagctggtgaagatgttgtgatcggtttcgtggattctggaatttaccctgaacatccgagcttcgctgcgcacaagactgatccatatggacctgcccctcgttataaagggaaatgtgagatggatccagtaacacaaagaagtttctgtaatgggaagatagttggggctcagcattttgcaaaagctgcaatggctgctggcgcgtttaatcccgatgttgaatttgcatctccattagatggtgatggtcatggaagtcacacagctgcaattgctgctggaaacaatggggtcccagtgcgaatgcatggtcacgaatttggcaaggcaagtggtatggccccacgtgctagggtagctgtctacaaggttctttacaggctttttggtggttacatagctgatgttgtggcagctattgatcaggctgttcaggatggtgttgacattctcaacctttctgttgggcccaatagcccaccaacagctacacggactacttttttgaatccttttgacgctgcacttctttctgctgtgaaagctggggtatttgttgcccaagctgcaggaaatggtggaccatttccaaaaacactggtgtctttcagcccatggataactactgttgctgctggagttgatgaccgcagatacaagaatcatttaacactaggaaatggaaaacttctctctgggcttggagtatcacctgcaacacatgggaatatgtcgttcagcttgatttctgcagctgatgctctattgggttcatctgcaaccaagtacagtgcattagattgccagaggcctgaactattgaataagaggaaagttcaggggagaattcttttgtgtggctattcgttcaattacatttctgggacagcttcaataaagaaagtgtctcagacggccaggaatcttggagcagctggctttgttgttgctgtggagaataattacccaggaacaaaatttgaccctgtaccattcagcatccctggaattctcatcacagatgtcagcaaaacggaggatcttatagactactacaattcttccaccataagagattgggctggaagggctacagccttcaaagcaacagcaggtattgcagatggtttggcaccaacactatacaattctgccccccaggttgcactgttctcttctcgaggacccgatgttaaagattttagctttcaagatgctgatgtccttaaaccagacatacttgctcctggcaatctcatatgggctgcatgggcgcctaatggaacggatgaatcaaactatgctggtgaaggatttgcaatggtttctggaactagcatggccgcaccgcatatcgctggcattgcggcactgataaagcagaagaacccaaagtggagcccctcagcaataaaatctgccatgatgacaacggccaatacactggacaaagggagccgtcctctcagagcgcagcagtacactgcatcggaaatgatgacactttctcgggccacaccgtttgattgtggtagtggcgctgttaacccaaaagctgcccttgatcctggtcttgttctagatgcaacccacgaagagtacatcgcatttttgtgctcgatccctgacgtcaaccagagcgaagtgtcaaacatcgccggttcagcttgcaactccagctccaaggggcgtcaacgccccttcgacctcaacctcccctcgatcgccatctctcagcttcgaggcaccgtgacggtgacgcggaccgtcacaagcgtgtccgaggagaccgagacctacaccatcatgacgagaatgccgccggaggttgccctggaggtgacgcctccggcggtgacggtgctgcccggagcatcgagagagctagctgtgaccctgacggcgaggtccgtgaccggcacctacagtttcggagagatcgccatgaaaggcgaccgcggccacctcgtcagaatcccagtggtagctatgggattcaagtagatagaagacgaccgcgaccggcgctagagagagtaagtacgaggagcgagttgtgcctctgagatccgaggtcttgagctgcagaggaatgctgtaatttttccatagtttgtagagaataagagttagggtctgtttggttgggctgtggctgtgaaaaaagttgctgtgggctgtgagctgtggaaaaagctgctgtaggctgcaagctgttaaaaagctaaaaactgtttggtggaaaccactaaaagtcgttaaaaattcttcgatatatgttttcacagtttcatctaaaaagccactaaaagcaggtccaggggtgctttcagatttgcactgcgagaaagtcggcttttagaaaaagctgcttcctggatctagccttttggttgacttttggcttttaggggggcaaaagccaaagccaaaagtcaaaccaaacacacccttagaatgccctcctggttgtaaaaatatgtatttgggtgtttaaatttaagcctatgttcagccttgctcttaaggcaaagtatcatgtgcacatcagctatcagt

SEQ ID NO: 208660 - DNA, 3085 bp, Zea Mays
cttgcctctccctccattaaagacaagggaggcagccaaaaggcgacgcaccattagccaagccagtaccatcgcaagcacgcacctttgcctcccttccgctccccgcctcccccctcactcactgcccactgccactccactccccgctccccaaaccctaccccaacggcccaaccccccggagcggagcggagcgattcgctggtcccgccagcgccgcgcccgggcatgccgccgccattgggtggcgcgaccgacgacgcccactgagccgtgcgccggggagccgccgctgttccttcctcggtgtccagtggattggagtggagatcccgccggaagcggaggcaggaaccgcccctgctgtcgcgagttctgcggtgctgacatcggtgaaagatgaggaggatcaggcttgcctgtttgcttgttatctttgtgcaagtgcaatgggcggcccttggaacgcatgatgtgtacatcgtgaccatggaaggggatccggtcgttagctacagaggcggtgtccaaggatttccagcaaccgctgtggattcggacgaggaaattgatctaaccagcgaggctgtcaaatcgtatgccctccacctccgaggacaccatgacaagctgctagactcgcttttagtagaaggaacttacgagaagctttatagctaccatcatctcatcaatggcttcgcagttcacatgtcgccactgcaggctgagttcttgaagaaagccccaggagttaagcatgttgagagagacatgaagtcacacagctgcaattgctgctggaaacaatggggtcccagtgcgaatgcatggtcacgaatttggcaaggcaagtggtatggccccacgtgctagggtagctgtctacaaggttctttacaggctttttggtggttacatagctgatgttgtggcagctattgatcaggctgttcaggatggtgttgacattctcaacctttctgttgggcccaatagcccaccaacagctacacggactacttttttgaatccttttgacgctgcacttctttctgctgtgaaagctggggtatttgttgcccaagctgcaggaaatggtggaccatttccaaaaacactggtgtctttcagcccatggataactactgttgctgctggagttgatgaccgcagatacaagaatcatttaacactaggaaatggaaaacttctctctgggcttggagtatcacctgcaacacatgggaatatgtcgttcagcttgatttctgcagctgatgctctattgggttcatctgcaaccaagtacagtgcattagattgccagaggcctgaactattgaataagaggaaagttcaggggagaattcttttgtgtggctattcgttcaattacatttctgggacagcttcaataaagaaagtgtctcagacggccaggaatcttggagcagctggctttgttgttgctgtggagaataattacccaggaacaaaatttgaccctgtaccattcagcatccctggaattctcatcacagatgtcagcaaaacggaggatcttatagactactacaattcttccaccataagagattgggctggaagggctacagccttcaaagcaacagcaggtattgcagatggtttggcaccaacactatacaattctgccccccaggttgcactgttctcttctcgaggacccgatgttaaagattttagctttcaagatgctgatgtccttaaaccagacatacttgctcctggcaatctcatatgggctgcatgggcgcctaatggaacggatgaatcaaactatgctggtgaaggatttgcaatggtttctggaactagcatggccgcaccgcatatcgctggcattgcggcactgataaagcagaagaacccaaagtggagcccctcagcaataaaatctgccatgatgacaacggccaatacactggacaaagggagccgtcctctcagagcgcagcagtacactgcatcggaaatgatgacactttctcgggccacaccgtttgattgtggtagtggcgctgttaacccaaaagctgcccttgatcctggtcttgttctagatgcaacccacgaagagtacatcgcatttttgtgctcgatccctgacgtcaaccagagcgaagtgtcaaacatcgccggttcagcttgcaactccagctccaaggggcgtcaacgccccttcgacctcaacctcccctcgatcgccatctctcagcttcgaggcaccgtgacggtgacgcggaccgtcacaagcgtgtccgaggagaccgagacctacaccatcatgacgagaatgccgccggaggttgccctggaggtgacgcctccggcggtgacggtgctgcccggagcatcgagagagctagctgtgaccctgacggcgaggtccgtgaccggcacctacagtttcggagagatcgccatgaaaggcgaccgcggccacctcgtcagaatcccagtggtagctatgggattcaagtagatagaagacgaccgcgaccggcgctagagagagtaagtacgaggagcgagttgtgcctctgagatccgaggtcttgagctgcagaggaatgctgtaatttttccatagtttgtagagaataagagttagggtctgtttggttgggctgtggctgtgaaaaaagttgctgtgggctgtgagctgtggaaaaagctgctgtaggctgcaagctgttaaaaagctaaaaactgtttggtggaaaccactaaaagtcgttaaaaattcttcgatatatgttttcacagtttcatctaaaaagccactaaaagcaggtccaggggtgctttcagatttgcactgcgagaaagtcggcttttagaaaaagctgcttcctggatctagccttttggttgacttttggcttttaggggggcaaaagccaaagccaaaagtcaaaccaaacacacccttagaatgccctcctggttgtaaaaatatgtatttgggtgtttaaatttaagcctatgttcagccttgctcttaaggcaaagtatcatgtgcacatcagctatcagt

SEQ ID NO: 208661 - DNA, 1477 bp, Zea Mays
aatcataccaccagggagtaaaggttaggatgttgttgtggtgcttgaacctggaagcatgctccaccgggacctgggttcggtcgagcaacaactagtccgctaatgacgccagtcgccggctgctgttcggaggctagcaaaagggcgagagggtttgctagtacgtacagagcgtgcgcgagtaagtggctgggagcccgccgttgtcaagagagaagttgcgaggggcagaggatcatggcgctagaacttgtcgatgcgcagggagttcgccgaagggcgttaaagagcaccgaagccttggcgagtttcctccatactccgaaatttgtcgtcgtgccgttacagcgtgggtcgacgtcactgcggtctcgttgccggtcaagaacaggtaccgcaggatgaggcgcatggaggatgctgtggcgagttcgcgagaggtctaggtcgtcgtctcccagtcaactttgggttgctggaccgttgtctctgaaagggaaatgtgcccttgggccatttctaagtattttggtgatttagtgtccaacacaagtgcctaagtgtaaaaggtggacaaagtacaaatcaagaataaaggtatgtttctcagacttagtacattgttttgtggactaatgtattgtgtctaagtgctggaaacaggaaaaatccaattgaaaatgtcttggctcgagcagccaagactttgctcagtctggagcaccggactgtccggtggtgcaccggacagtgtccggtgcgccaggctggctcgagcaaactggccgctctcgggaattcaccggagacgtacggctataattcaccggactgtccggtgtgcaccggactgtccggtgagccaacggtcggtcgggccaacggtcggccgcgcgatctgcgtgggacacgtggccgagccaacggctagaaggaggcaccggactgtccggtgtgcaccggacatgtccggtgcgccaacggctctctggctgccaacggtcgactgtgccatttatggaaagaaatcgggcaccggacatgtccggtgtgcaccggactgtccggtgcgccagtcgacagaaggcaagatcagccttcctagattgctctcaatggctcctagcttccttggggctataaaagggacccctaggcgcatggaggagcataccaagcattcctacaacattcctaagcaccaagatatcgattccgcgcctttgattctttgcgatagcaattggagctctagttgagtggtgaactcattgagttgtattgtgagctctcgttgtgacttgtgtgcgtggtgttgctgtgatttcttgagtgcgttgctaatccctcccttgctccgtgtttctttgtgatcttaaagtgtaagggcgagaggctccaagttgtggagattcctcgcaaacaggattgagaaaaagcaagcaaaacaccatggtattcaagtgggtctttg

SEQ ID NO: 208662 - DNA, 4644 bp, Zea Mays
tgaacagggagatcttttgctctcacgcagaaaaaatgtttggatagaactttctgcttctccgtccttaagcccaagtggaagaaggaggagggggctttgacgccggcgagccatggcgggggctctgctctcctctccccattatctctggagccccacttctcagccctcgcttcgccccaggggaccgctcggcactggggcagtgcgtgttctgccgccgaggaggagggcccgtgtgctcgcttcgtgctctcgcgagcctgccgccatgaaccgcggtttggaggtggagaggaggcgccttctcatgtccgggctcgtgtcttctttcacaatcgtgctcccgatttcaggagcatatgctgttatggagactaatgaagacgtaaaaatgaacacacaagttgatgagatcaatgcatactcttttctttacccggtcgaactgccaggaaagaaattttccttcaaatgggtagagtccagaaaaccagagcgatattcctcagcagcaccactatcacctgatgcacggcaacgaattgtatcggagcgagttgacatgatacataatgttgtcatctcagtctcgaaggtgacgactggccagcgcatgacagagagttctgtccttgatgcacatgctacagaggttgacggagaaccatactggtattatgagtatcttgttcggaaatcaccaacaaaatctgcatcagaaccaaatttgtttcgacacaatgtaacgtgcactgctgagcgtgatggtattacttcatctttccagtttttgtcatcgaccattcactcccttacatttgaagcattctttgtccactcacctttttttatttctttcttttaatagggtacctgtactcactgaatgcttccactcttagcaaacagtgggaatctgtacgtctcgaatgtcccattgttgcataccacttcagcaaagaaatattcttttgtgtttgatttcattttgtgacttcaattacaggagggacatatatttgtcatacaaatatgtctatatatcagcttctaaccaatatttaactgttgtaacgcagatggggccctttctgcaacagactgttgcatcatttcgccttctcccacctacagaaaactatgttcctccctacaaggatccttggagattttggtgaatggagatccttttttgtagttaccatttttttcctcttcagattcaggttttagaccatatgtttttcacaccatatgtttagtgagtgttgtcctttcaacttgacagataaaattcagagacccattttggttacaccaatcctgtccgttctgattaattaacagtcatattcaccttaagagttactctctttgtcccaaaataaattaacttcttgaatcaccctaagtcaaactaccttgagtttgaccaactttatagtaaaaataacaaaaaaaatatgacattaaataagtagattataaaaaactcgatctgtgcatgtaggtaaggccgccgtcaggcattgtattaagaagtaaattttgtctaagacttgtgcttttggcgtgagatagatgatatattttttctataaaaaacttaggacataaggagtgctacttagatcataaaaccaacttagttagagactgttttgcgaataaacagattataaaagtatacttttcggtatgtcctgcaatactactttaatgtcacaagtattaataattttttctatagtttagttaacttaaaataatttgacttaggttaactttagaagttgatttgtcttaggaaggagtaggtatgtaaatggttggggaaaaatcatgttcgtttctaccgatttttatatttactctgcttgaatttgtattttcggacaaatgtgaaaacaatacgaaaacgagatggaaaatgaaaacagaacaaaaatggtttaggccatatttcgaccccgtttatcttgtattaatacaggattatgccgtattcaaatatagtatatctcgtttacattgtagtcagcccactaccgtgactataaggtgtatcttgtatttctatatgcaaaactatatatcatatttctatatataaaagtatagtatgataagaacatagatgggaaggactcggagcatgatgatttttagcttgagttactgaaagtcgtctagagggggtggatagatagaatctgaaatttacaactttaaccacacactacaagccgaggttggcgttagaatgaatattaagtccggaagatagagggaaaacaaatcaaccaagaaataaggcggatgaacacggtgatttgttttatcgaggttctgttcttaagaacctagtccccgttgaggtggtcacaaagaccgggtctctttcaaccctttccctctctcaaatggtcacttagaccgagtgagccttttccttaatcttctgggtcacttagaccccgcaaggaccactacacacttaggtgtctcttgcttcgattacaaatcacttgagaaaagaaatgagaaaggaagaaggtaatccaagaggcaagagctcaaaagaacacaaaatctctctctcacaagtcactaaatgtttgagatgaattggggacttggagaggctttgatcttttgaattgtgtttaggagtgaatgctagagctcttgtaataaatgtgatactcagaaatcttggatgcttggagtggtggtggttggggggtatttatagccctcaaccaccatatagtcgttgggagtggctgctgtcgatggacgcaccggacagtccggtgcgccagccacgtcacccaaccgttagggttcgggcgctgtcgaccgttggagctttatcttctagtggactcaacccactgccactgtatctcccaaacataccactcgtttgtacatagatgtatcagatgaagtagactcaattctcatgtttgatggtgtaacttctctttgtggggcttaactaaattattgatgagctgaaatccacactttaacttttgttgcatcacttgtgtttgcctggttgtatcctcgaattcacatctaaaaatcaaaatcatcctagtcatattttctagtgctctattaaaaataatcattgcataccacaagttaaattaaaaattttcttaaaaggtataaccaacctcatcataaccaaccgtatgaccgcataatgacatattctagcctctaaaaaactaggtcgtagtaggcttcaacaccatatttgcagagtactagaggctacaatatgttccttctctttctcttgctttggatccgtccaatgagatttaggtctatatacccactcattgtaatgacatttcccatattcgtgctacagactacgacaaattattaattttgtgctgacaaatacaaggttaaaaagaaacaaagatgaactcacttcattcttgttagcatactcaaactcaagcaaactcataggtgcaagcacaactagatctcctcagtcacaaagagaaggattctcaagtcgttcattggtgactttgttctacccatccatgattggtggagggttggagggagataaaaaccatcacttaaagttctcatgtggccatctccctctccaccggtcgttaaaaaggtaccttggattgacttgttaggatcatcgatctactaaaaggaaaggcacctctcatggtcctaaataagttgatgccaccaatttataagtagctcaataacatatatcaaggaacttgaaattaaatatttgcacataattacttacattaaaataaccaagcaatgtgcaattatgtatggatgctcgattgaaacatgtggtctggcttatcacagttagttagacatcagtggctcagggggacaagtgcatccttgaaggcgcatgagcaactttgtctggatgccttgattgtggtctggctcatcacagtcatagttaggcaccaatagctcaaaaggtataggttcatcctcgcaagattcattcaggtataaatcagatggccctgttttcgccacttctcccaccacatgtcctccatctatctaaatataagattataaaaaacaagtttctttgtctttatacaacaatctaagtattttaaattaatgtacatgtagacatataacctatactcacaaactaaatacactaaaattaagcctaagcattataactatcaaactaaaatataaatatgttgaccaaatgtaacctaaacttaaacacaccaactcaaatttatagctaattgacttaaacatatagcacatgcaactacattcggacgcattcaatcgaagtttcataatgcattcgatctacctaaaatactttacatctctagccaaatatacttttccttcgaacgctagcaatcaaggctaatctttaaatccaccatagaaacaagaaataagaagaatattactttcctcttaggcgagaggagcatggggaaccaacaacttgagctggtggtcgatgtggcaggaaagaccaatgtcgttggttggggaggaagaagaaaaagaggaagaaagaaaaaagatagagagggcgagaaccgagcaggggct

SEQ ID NO: 208663 - DNA, 1818 bp, Zea Mays
aagctgtaaacttgagctggaagcactgcgcccctgtcttcacaccagtttgctgtttctttttcaccccgagcgcgagaactagggcgaccgcagcactacgcccctgctgcccatgtcttcgtcggggcctttgccggcgaccggaacccaccacggcagtcaaagggcagagtgtaaatcccagggttccacttctgcacgcaaggtacaaaaggctgatcgtgagaagatgcgaagagataaattaaacgagcagttccaggacttgggaaatgcacttgatccagaccgtcccaggaacgataaggcaactatacttggtgacacaatccagatgctgaaagatttgactactcagttaacacaagaaaagaatgagcttagagatgagaaagcttcactgaaatctgaggttgataatttgaataatcagtatcagcaacgaatgcgggtgctatacccatgggttggaatggagccttctgttgtcatggggccacctcctgcatatccctacccagtcccagttccaataccctctggtgctgtacccatgcatccgcagttgcaaacataccacttcttccacagtcaagcttctggaaccatccaaaacacatgcatcccttacatggcatatacacaaccctgccatcctcccactgatcagccgtctaaccaacttaatactccagttgcccattcaagtagtcataggtctaactctccagctcaagactgtagaagcaagtcatctacattgcagcaaccaagctgtggagtgagaagcagtgatgctggtgatattgctactgatctggaattgaagactcctggttcttcatgtcaatcacatgcagagattgcttacaacgattcctcttcggatttgaaaacaaagaagcattgcataaagcagattaatgattgcactctcactgaaagcagtagttcaagcagatgctcttccaatggtcccccagatgtttctaatagtgctattgatgaataagctgcttgacgaccgattaacatacaaaccgttgactggtatagattgagaaaagatctcgtttaaccacccataagtgagctcccaactctatatgcagtgtaatttgctattgttgctagcttatttacatagaagtggtcagattctaatgtgatgactcacaaattgggaggcgtggactttgtagataatctcatgattgttagtggtaaaagtttggtggaagggaaaaaaggagagaacaaaatcatagacagcagcatctatggtggttcggtagggactccaggactaggtatggtgagcattgtcagtgttcggcatggcaggtagatattcataataactggattctagtaccattgcatagttcgtcctagactggcattttacataaatttctgtgtcaaatatgtaaataactcgagggcggataactggatatatagtgtctatgttggcctattcaacttgctgggtaacgccttgtttgggagcaagtgtattggatgggattgaggggtctaacatcccttactattaggggtgtttcggtagtgatcaattgcatctgaaactgctgcagcttcaagcttgttgtgttggtgtctagtgtctgcatgagtttgttccttggctacggtagctacagcatgctttactgaacaagcccttgaagtttgtacattgagctttggtatatatttgcattggactatagttcttggtgtagtcctattattctcacattacgtttaatggtaaattcgctcacttgtttgagttcgaaggtagatatt

SEQ ID NO: 208664 - DNA, 1623 bp, Zea Mays
aaacccttttccacgagcgaacccttcctaaagataagatccagaccgtcccaggaacgataaggcaactatacttggtgacacaatccagatgctgaaagatttgactactcaggtgaacaagctgaaagctgaatacacgtcactttctgaagaagcgtgtgagttaacacaagaaaagaatgagcttagagatgagaaagcttcactgaaatctgaggttgataatttgaataatcagtatcagcaacgaatgcgggtgctatacccatgggttggaatggagccttctgttgtcatggggccacctcctgcatatccctacccagtcccagttccaataccctctggtgctgtacccatgcatccgcagttgcaaacataccacttcttccacagtcaagcttctggaaccatccaaaacacatgcatcccttacatggcatatacacaaccctgccatcctcccactgatcagccgtctaaccaacttaatactccagttgcccattcaagtagtcataggtctaactctccagctcaagactgtagaagcaagtcatctacattgcagcaaccaagctgtggagtgagaagcagtgatgctggtgatattgctactgatctggaattgaagactcctggttcttcatgtcaatcacatgcagagattgcttacaacgattcctcttcggatttgaaaacaaagaagcattgcataaagcagattaatgattgcactctcactgaaagcagtagttcaagcagatgctcttccaatggtcccccagatgtttctaatagtgctattgatgaataagctgcttgacgaccgattaacatacaaaccgttgactggtatagattgagaaaagatctcgtttaaccacccataagtgagctcccaactctatatgcagtgtaatttgctattgttgctagcttatttacatagaagtggtcagattctaatgtgatgactcacaaattgggaggcgtggactttgtagataatctcatgattgttagtggtaaaagtttggtggaagggaaaaaaggagagaacaaaatcatagacagcagcatctatggtggttcggtagggactccaggactaggtatggtgagcattgtcagtgttcggcatggcaggtagatattcataataactggattctagtaccattgcatagttcgtcctagactggcattttacataaatttctgtgtcaaatatgtaaataactcgagggcggataactggatatatagtgtctatgttggcctattcaacttgctgggtaacgccttgtttgggagcaagtgtattggatgggattgaggggtctaacatcccttactattaggggtgtttcggtagtgatcaattgcatctgaaactgctgcagcttcaagcttgttgtgttggtgtctagtgtctgcatgagtttgttccttggctacggtagctacagcatgctttactgaacaagcccttgaagtttgtacattgagctttggtatatatttgcattggactatagttcttggtgtagtcctattattctcacattacgtttaatggtaaattcgctcacttgtttgagttcgaaggtagatatt

SEQ ID NO: 208665 - DNA, 6593 bp, Zea Mays
cgacagactaacctttcatttgctgttatatataatgcccttgctcagccaaacaagcgactgcgttcattgtctgagcacgttcctcatggttatcgtaggaaatcactttttgaaggtctcattcgatataatgttccattactaagagcaacatggtttattaaagttacatacctgaatcaggcccgaccggcacctaacagtacttcagtagttgcttctgataatcaacgatctaatcaatggacaaaggatgttgttgaatatttacaacagattttggacgaagtttgttctaaagagggtgccattgtacctccatcttttaaagagcagtcatcaccaggacttgctgctggaaccaatcaaataaaaatgaaaacggaatcatctccagctggagacagtgaagaacccttggtgcacttcaaatggcggtatatggttcgcctcatccaatggcatctcacagaagaattgcttgttccctcagtacttatcgaatggttatctaaccaacttcaggagagggattcagatgatgttttagagcttcttttgcctattatacttggtctggttgacaccattactctctcacaaacatatgtgcgcatgttcgtggagctactagtgagacgtctcaatgtcgatcgtccaaaaaggttttcagtttcttctgttatagcagagttactgcgatacatggtacttgcagtgccagatacatttgtttctttggattgctttcctttcccatcatttgtggttcctgatgtatatggtagaggtgctttgttgaagataaccagtggtggtggaattttatgttctaagaggcgtgatgcttatcggtatttgtcctgtggttatgctgtttcttccattcagaaacgtgcacatgatcttgcagcagttgctaaccctagccttcaagcacgtggtgcagccaaagtggtacaggctttggacaaagctcttgtcacaggaaatttgtcagtggcatatttttcactctttaatgatttatctgatgcgttaatggaagaaagatggattaaagaagtgaatccctgtttgcagtcttctctgatgtggattgggactgttgagctatcccttatctgttctatatttttcctttgtgaatgggcgacatgtgattaccgtgattgccgagcatctccctctcagaatgtgaaatttacaggaagaagagatttgtctcagatacacatggcagtgtctatcttgaagaataaaatggatgagatgaataacttgtctcgtcctaagagtagtactcgcatcacccttaataaagttgccaaaggttctttgaatgatgcttgtttgacagcagctgctgtggatgattcttctggactgagaagtaatgcaaaaaatgttgatgagaagaaggatacaaatgatatctttgaaagccctggtccactgcatgatattattgtgtgttggttggatcagcatgaagttagcaacgttgcaggttttacccgggtggatgttcttatcgcggagcttatccgcaatggtatatttttccctcaggtttatgtcaggcagctaattattagtggaattactgataagaacgatacaatgctggatgttgaaagaaaaaggaggcatcacagaactttgaagcagcttcctgggtcttctttatttgatgttcttgaggaaactaggactgcagaagagcaacagctatatgagatgatgtcaacatactctagtgagcgacgccttgttctctcagaactttcatgtggtcattcattttatgcaagtggcagaggtgagtacacttcaagttcctgcattcggaagcagagtgatcttccagttgcatcagaaggtgataagcatggaagagtgctagaacaagtagaagatgttaaagctcttttgtcaagtctgttgggttttacatatcctcccctagtggaatcaaaactttgtgaaatcaaaacaagctttcaagaatcagtaacgtcaacgctcacacaagttgagactggggaagccaaaagtggatgcgaggattgtatgaggtccaaggggcagaaattggatgacagcgccactcctttccaagggtttccattgattcaatcaggcgaggaggatatttggtgggtgaagaaagggacaaagttacaagaatctttcaacgttgaacctgtacagaagtctgttaagcaaacttctagaggtagggcaaaagttgttcgtaaaacacaaagtcttgcacagcttgcagctgctagaatcgaaggtagccagggggcatctactagtcatgtttgtgaaagcaagatgagctgtccccaccatgaacctaataacgatggtgacaacgtcaaagattttgatcacacaagggcagcaaacgtgactgcaatagggaagtcactaaaaagacttagattgctcgaaagacgatctgtctcttcatggttgttgaaatcaataagacagcttgttgatggaaacggaatgacagcttctaaagctaccaattctataagcatccttcctttgcagcctgatgataaaactgcatccaaatggaggctaggtgatgaagaactgctgtcagttctctatgtactggatacatgctgtgattcagtctctggagtgaagttcctcatatggttactagtgaaaattcgtggagtgggctcctcaggtcaacctgggaggacttatatgcttatgaggaacagagatcaccaagtttgtcaggtcaacgaggcacttgtgttctcatctctgcttaggtatgagaacatacttcttgcgaccgacatcttgcctgatgttctaagtgctttagtgaacagaaattctatgtcagcaactaccaggcatcctggttcaacagcttttgcttatgttcgatattttttgaagaaatatagagatgtggctagtgtggccaagtgggagaaaaactttcggaccacttgtgatcaacgcctgttagctgagcttgataatgggcggtccattgatggtgatttggtatcttcttcgggtattttagcaggcgaggagattgatgagcaggtccgccaaaagttgaatggaaggagttcaagactcgtgcagaatatgaaagagatagtgcaacggcaagctgatggaattcagcgcagtttaaaggaaaagaaagttcttgcaggcgcagcacccaggaatccactcacttttgagaaagaagatagttatcaaattgcacatgacattgttttgggcttagtagaatgcatcaggcaaaatgggggtgcaaatccagatggagacctttcaatagttgcttctgctgtttctgcaatcgttgtgaatgctgggcatatgatagcaaaacatttggattttgcaggaggaaactatcaaggtgttaattctgtggctacttcgctaaattttgttcggcacactttacttattcacataaattctctttgcttactaaaagaaactcttggagatcgcttcagccgtgcctttgaaatagctctggcggttgaaacttctgcagctgttacagcagcttttgctcctccaaagatgcaccgcaatcagtttcaaccatctcctgaggcccatgatgcatatggaaatcatacaagtgagctcagcaactcagggaaaggttttgttgggagaactgcaaaagtatctgctgctatttctgctcttgttgtgggggctgttgttcatggagctgttagccttgagcggatggttgctactctaaaaataaaagatggtctggatattatgcagcttttgagaggtttgaaatcaaatacgaatggtgtatcccatcctactggaggttttaggattgaaaattccacggaagtttcggtacattggtttaggattttattggggaactgcagaactgtctatgatgggcttattgcagatattcttggagatccatacattattgcactctcaaggttgcagcggatgcttcctctaactgtaatttttcctccagcctactcaatttttgccatggttctttggagacgatatatttttaactgtgaagatccacaactttatcagtctttttcaaatgcaataaacgatattaccagacatcagccttttcgagagatctacttccgtaatacacatcggctgtataatcttctggcttctgatgttggtgattcgaagtttgcagcaatgcttgaaagtcatagtccggaccggaattcaaaaatattgccatttatacctctccgtgcacgcctttttctggacgctattattgattgcaacacaccaactattcagggggatggtgcttcagagccttgtgatcccaaagataatgaactaaagctttcagagaggcttatgcaacttcttgatactcttcaacctgcaaaatttcactggcaatgggttgagatgaggcttcttttagatgaacaggctcttatggaaaaagttgcagcaggcaagacaacacttgaatcacttcggtcattatcccctaaagctgagggttttgccctttctgatagtgagaaaggatttactgaagtcattctatcaaggctacttgctagacctgacgctgctcctctgtattcagaacttgtccaccttcttggaaagcttcaagagtcacttgttatggatgtaaaatggattctacaagggcaagatgctattcttgggcgcaggtcaacaagacaacagcttgttcatattgcccaacgaaaaggtctttcaacaaaggcacaggtttggaaaccatggggttggtccagcttgcttagcgatgccattcctaataaaactgcaaaaaggaagttggaagtcacatcaattgaggaaggagaagttgtggatgacactgttgatgctaaaaggactaccaagactccccctcatagtgttgatagaagctttgaagggattagatcgataaataaatatttaactgagaaagcccttgctgaattagtattgccttgcatcgacagaagttctgctgatatccgtggtatactttctgttgatttgaccaaacagatgggggctattagtgaacatatcaaagcaatagcattgaatggtgctaaacaagctggttcagtttcttcaggaaatgaagtgccatcgaacaaatcaagtggccgtagaggaattcgaggtggaagcccaaacattggtagaagagctccggttggtaatgacccaagtcctccttcggcttctgctctgcgggcagcgttgtggttacgcctccagttcatcattaggttgcttccagtaatcatggcagataggagcatgagacatacgcttgcttctgcaattctaggcctgcttgcaacgcgcatgatttatgaagatgcagatttgccccttcctcctaccaacgcaactgctttaaggcgggatgtggattccttgctggaacctcccctggatgtcctgcttgaccggcctggcgaaagcctttttgagaagcttttatgcgttctccatgcactgcttggtagctacaaaccaagttggctgaagtcaaggtcagcctctaggtcgtcaattaaaagccaacgagatttctcagcatttgataacgaagcagccgagggcttacagtccgcgttggaccacatggaattgcctgaaacaatcaggcggaggatccaagcagccatgcctcttcttccaccatccaggcgcccttgtatgcaatgccaacctccgcagttgtcgttggctgcattatcaccactccagagcagtacctctggtgtaggtcctcaacagaaaagttcttgtgtgagttgggtgcccactaacgtatcagtcagaagcaaggcagcattgccttctcatgaccctgaaacggaggtagatccatggagcttgctggaagatggcacaaactgccccccctccacagcatctggaagcaatggctcgagtggagtgacgggagaccatgctaatctgaaagcttccagctggcttaagggtgccgtgagggtgaggaggacagaactgacctacattgggtctgtagatgacgacagctgatacgtgtatgattatcttggtgaattggaggcaaagaatttggtctcacttgttggcatttgtgtcgtgtgcaagttaaaagcaccaactgcatcgaattctttgagagctctgtaccacaaggtggaatggaaaccatatggcttttggttggttgttgtagtgttagaatacatcgctgcccccgatttgttttagttagggcctgtgggggcggctgtatatagttggaatccatttctggattcaatgggggagcttatttgagaatcaggcaggaagccatgtagtagatttctagccaagagccctgtacttgttttttttttgggtctgagatgtaattgtcatgtcacatatattcttttgatctaaggctgacggaagttgcattgcctatttgctttagctattactagtgcagcctagacatcatgagtttggatcgttctatgactaaaccgtcctactggttt

SEQ ID NO: 208666 - DNA, 6988 bp, Zea Mays
tttcattgggagagctaacagatattcttttatttgcattcttatgcttgggccacctgacttctatccacaaacactaaactgtcccgaagagacattaacaaaagactatgtacaatatggttataaggagactgttgaaggaattgaggaagcaagagagattgtaataagtcagatcccatacttctgtaagccagatgttgtcataaagtgcaaggaggtttcgattttcacagcctgcacattctactggatgtactgcataggcactaaagaagcgtttaagagctatcaatgaatctcgtgctcaaaagagaaaggccggacaagtttatggagttcctctttctggatctctattaatcaagcctggagtttacccagagcaaaggccatgtaatgaggacacacgtagaaaatgggttgaggcccttgctcagccaaacaagcgactgcgttcattgtctgagcacgttcctcatggttatcgtaggaaatcactttttgaaggtctcattcgatataatgttccattactaagagcaacatggtttattaaagttacatacctgaatcaggcccgaccggcacctaacagtacttcagtagttgcttctgataatcaacgatctaatcaatggacaaaggatgttgttgaatatttacaacagattttggacgaagtttgttctaaagagggtgccattgtacctccatcttttaaagagcagtcatcaccaggacttgctgctggaaccaatcaaataaaaatgaaaacggaatcatctccagctggagacagtgaagaacccttggtgcacttcaaatggcggtatatggttcgcctcatccaatggcatctcacagaagaattgcttgttccctcagtacttatcgaatggttatctaaccaacttcaggagagggattcagatgatgttttagagcttcttttgcctattatacttggtctggttgacaccattactctctcacaaacatatgtgcgcatgttcgtggagctactagtgagacgtctcaatgtcgatcgtccaaaaaggttttcagtttcttctgttatagcagagttactgcgatacatggtacttgcagtgccagatacatttgtttctttggattgctttcctttcccatcatttgtggttcctgatgtatatggtagaggtgctttgttgaagataaccagtggtggtggaattttatgttctaagaggcgtgatgcttatcggtatttgtcctgtggttatgctgtttcttccattcagaaacgtgcacatgatcttgcagcagttgctaaccctagccttcaagcacgtggtgcagccaaagtggtacaggctttggacaaagctcttgtcacaggaaatttgtcagtggcatatttttcactctttaatgatttatctgatgcgttaatggaagaaagatggattaaagaagtgaatccctgtttgcagtcttctctgatgtggattgggactgttgagctatcccttatctgttctatatttttcctttgtgaatgggcgacatgtgattaccgtgattgccgagcatctccctctcagaatgtgaaatttacaggaagaagagatttgtctcagatacacatggcagtgtctatcttgaagaataaaatggatgagatgaataacttgtctcgtcctaagagtagtactcgcatcacccttaataaagttgccaaaggttctttgaatgatgcttgtttgacagcagctgctgtggatgattcttctggactgagaagtaatgcaaaaaatgttgatgagaagaaggatacaaatgatatctttgaaagccctggtccactgcatgatattattgtgtgttggttggatcagcatgaagttagcaacgttgcaggttttacccgggtggatgttcttatcgcggagcttatccgcaatggtatatttttccctcaggtttatgtcaggcagctaattattagtggaattactgataagaacgatacaatgctggatgttgaaagaaaaaggaggcatcacagaactttgaagcagcttcctgggtcttctttatttgatgttcttgaggaaactaggactgcagaagagcaacagctatatgagatgatgtcaacatactctagtgagcgacgccttgttctctcagaactttcatgtggtcattcattttatgcaagtggcagaggtgagtacacttcaagttcctgcattcggaagcagagtgatcttccagttgcatcagaaggtgataagcatggaagagtgctagaacaagtagaagatgttaaagctcttttgtcaagtctgttgggttttacatatcctcccctagtggaatcaaaactttgtgaaatcaaaacaagctttcaagaatcagtaacgtcaacgctcacacaagttgagactggggaagccaaaagtggatgcgaggattgtatgaggtccaaggggcagaaattggatgacagcgccactcctttccaagggtttccattgattcaatcaggcgaggaggatatttggtgggtgaagaaagggacaaagttacaagaatctttcaacgttgaacctgtacagaagtctgttaagcaaacttctagaggtagggcaaaagttgttcgtaaaacacaaagtcttgcacagcttgcagctgctagaatcgaaggtagccagggggcatctactagtcatgtttgtgaaagcaagatgagctgtccccaccatgaacctaataacgatggtgacaacgtcaaagattttgatcacacaagggcagcaaacgtgactgcaatagggaagtcactaaaaagacttagattgctcgaaagacgatctgtctcttcatggttgttgaaatcaataagacagcttgttgatggaaacggaatgacagcttctaaagctaccaattctataagcatccttcctttgcagcctgatgataaaactgcatccaaatggaggctaggtgatgaagaactgctgtcagttctctatgtactggatacatgctgtgattcagtctctggagtgaagttcctcatatggttactagtgaaaattcgtggagtgggctcctcaggtcaacctgggaggacttatatgcttatgaggaacagagatcaccaagtttgtcaggtcaacgaggcacttgtgttctcatctctgcttaggtatgagaacatacttcttgcgaccgacatcttgcctgatgttctaagtgctttagtgaacagaaattctatgtcagcaactaccaggcatcctggttcaacagcttttgcttatgttcgatattttttgaagaaatatagagatgtggctagtgtggccaagtgggagaaaaactttcggaccacttgtgatcaacgcctgttagctgagcttgataatgggcggtccattgatggtgatttggtatcttcttcgggtattttagcaggcgaggagattgatgagcaggtccgccaaaagttgaatggaaggagttcaagactcgtgcagaatatgaaagagatagtgcaacggcaagctgatggaattcagcgcagtttaaaggaaaagaaagttcttgcaggcgcagcacccaggaatccactcacttttgagaaagaagatagttatcaaattgcacatgacattgttttgggcttagtagaatgcatcaggcaaaatgggggtgcaaatccagatggagacctttcaatagttgcttctgctgtttctgcaatcgttgtgaatgctgggcatatgatagcaaaacatttggattttgcaggaggaaactatcaaggtgttaattctgtggctacttcgctaaattttgttcggcacactttacttattcacataaattctctttgcttactaaaagaaactcttggagatcgcttcagccgtgcctttgaaatagctctggcggttgaaacttctgcagctgttacagcagcttttgctcctccaaagatgcaccgcaatcagtttcaaccatctcctgaggcccatgatgcatatggaaatcatacaagtgagctcagcaactcagggaaaggttttgttgggagaactgcaaaagtatctgctgctatttctgctcttgttgtgggggctgttgttcatggagctgttagccttgagcggatggttgctactctaaaaataaaagatggtctggatattatgcagcttttgagaggtttgaaatcaaatacgaatggtgtatcccatcctactggaggttttaggattgaaaattccacggaagtttcggtacattggtttaggattttattggggaactgcagaactgtctatgatgggcttattgcagatattcttggagatccatacattattgcactctcaaggttgcagcggatgcttcctctaactgtaatttttcctccagcctactcaatttttgccatggttctttggagacgatatatttttaactgtgaagatccacaactttatcagtctttttcaaatgcaataaacgatattaccagacatcagccttttcgagagatctacttccgtaatacacatcggctgtataatcttctggcttctgatgttggtgattcgaagtttgcagcaatgcttgaaagtcatagtccggaccggaattcaaaaatattgccatttatacctctccgtgcacgcctttttctggacgctattattgattgcaacacaccaactattcagggggatggtgcttcagagccttgtgatcccaaagataatgaactaaagctttcagagaggcttatgcaacttcttgatactcttcaacctgcaaaatttcactggcaatgggttgagatgaggcttcttttagatgaacaggctcttatggaaaaagttgcagcaggcaagacaacacttgaatcacttcggtcattatcccctaaagctgagggttttgccctttctgatagtgagaaaggatttactgaagtcattctatcaaggctacttgctagacctgacgctgctcctctgtattcagaacttgtccaccttcttggaaagcttcaagagtcacttgttatggatgtaaaatggattctacaagggcaagatgctattcttgggcgcaggtcaacaagacaacagcttgttcatattgcccaacgaaaaggtctttcaacaaaggcacaggtttggaaaccatggggttggtccagcttgcttagcgatgccattcctaataaaactgcaaaaaggaagttggaagtcacatcaattgaggaaggagaagttgtggatgacactgttgatgctaaaaggactaccaagactccccctcatagtgttgatagaagctttgaagggattagatcgataaataaatatttaactgagaaagcccttgctgaattagtattgccttgcatcgacagaagttctgctgatatccgtggtatactttctgttgatttgaccaaacagatgggggctattagtgaacatatcaaagcaatagcattgaatggtgctaaacaagctggttcagtttcttcaggaaatgaagtgccatcgaacaaatcaagtggccgtagaggaattcgaggtggaagcccaaacattggtagaagagctccggttggtaatgacccaagtcctccttcggcttctgctctgcgggcagcgttgtggttacgcctccagttcatcattaggttgcttccagtaatcatggcagataggagcatgagacatacgcttgcttctgcaattctaggcctgcttgcaacgcgcatgatttatgaagatgcagatttgccccttcctcctaccaacgcaactgctttaaggcgggatgtggattccttgctggaacctcccctggatgtcctgcttgaccggcctggcgaaagcctttttgagaagcttttatgcgttctccatgcactgcttggtagctacaaaccaagttggctgaagtcaaggtcagcctctaggtcgtcaattaaaagccaacgagatttctcagcatttgataacgaagcagccgagggcttacagtccgcgttggaccacatggaattgcctgaaacaatcaggcggaggatccaagcagccatgcctcttcttccaccatccaggcgcccttgtatgcaatgccaacctccgcagttgtcgttggctgcattatcaccactccagagcagtacctctggtgtaggtcctcaacagaaaagttcttgtgtgagttgggtgcccactaacgtatcagtcagaagcaaggcagcattgccttctcatgaccctgaaacggaggtagatccatggagcttgctggaagatggcacaaactgccccccctccacagcatctggaagcaatggctcgagtggagtgacgggagaccatgctaatctgaaagcttccagctggcttaagggtgccgtgagggtgaggaggacagaactgacctacattgggtctgtagatgacgacagctgatacgtgtatgattatcttggtgaattggaggcaaagaatttggtctcacttgttggcatttgtgtcgtgtgcaagttaaaagcaccaactgcatcgaattctttgagagctctgtaccacaaggtggaatggaaaccatatggcttttggttggttgttgtagtgttagaatacatcgctgcccccgatttgttttagttagggcctgtgggggcggctgtatatagttggaatccatttctggattcaatgggggagcttatttgagaatcaggcaggaagccatgtagtagatttctagccaagagccctgtacttgttttttttttgggtctgagatgtaattgtcatgtcacatatattcttttgatctaaggctgacggaagttgcattgcctatttgctttagctattactagtgcagcctagacatcatgagtttggatcgttctatgactaaaccgtcctactggttt

SEQ ID NO: 208667 - DNA, 6970 bp, Zea Mays
gtctgagttatggaccaaaggcagttcatttcattgggagagctaacagatattcttttatttgcattcttatgcttgggccacctgacttctatccacaaacactaaactgtcccgaagagacattaacaaaagactatgtacaatatggttataaggagactgttgaaggaattgaggaagcaagagagattgtaataagtcagatcccatacttctgtaagccagatgttgtcataaagtgcaaggaggcactaaagaagcgtttaagagctatcaatgaatctcgtgctcaaaagagaaaggccggacaagtttatggagttcctctttctggatctctattaatcaagcctggagtttacccagagcaaaggccatgtaatgaggacacacgtagaaaatgggttgaggcccttgctcagccaaacaagcgactgcgttcattgtctgagcacgttcctcatggttatcgtaggaaatcactttttgaaggtctcattcgatataatgttccattactaagagcaacatggtttattaaagttacatacctgaatcaggcccgaccggcacctaacagtacttcagtagttgcttctgataatcaacgatctaatcaatggacaaaggatgttgttgaatatttacaacagattttggacgaagtttgttctaaagagggtgccattgtacctccatcttttaaagagcagtcatcaccaggacttgctgctggaaccaatcaaataaaaatgaaaacggaatcatctccagctggagacagtgaagaacccttggtgcacttcaaatggcggtatatggttcgcctcatccaatggcatctcacagaagaattgcttgttccctcagtacttatcgaatggttatctaaccaacttcaggagagggattcagatgatgttttagagcttcttttgcctattatacttggtctggttgacaccattactctctcacaaacatatgtgcgcatgttcgtggagctactagtgagacgtctcaatgtcgatcgtccaaaaaggttttcagtttcttctgttatagcagagttactgcgatacatggtacttgcagtgccagatacatttgtttctttggattgctttcctttcccatcatttgtggttcctgatgtatatggtagaggtgctttgttgaagataaccagtggtggtggaattttatgttctaagaggcgtgatgcttatcggtatttgtcctgtggttatgctgtttcttccattcagaaacgtgcacatgatcttgcagcagttgctaaccctagccttcaagcacgtggtgcagccaaagtggtacaggctttggacaaagctcttgtcacaggaaatttgtcagtggcatatttttcactctttaatgatttatctgatgcgttaatggaagaaagatggattaaagaagtgaatccctgtttgcagtcttctctgatgtggattgggactgttgagctatcccttatctgttctatatttttcctttgtgaatgggcgacatgtgattaccgtgattgccgagcatctccctctcagaatgtgaaatttacaggaagaagagatttgtctcagatacacatggcagtgtctatcttgaagaataaaatggatgagatgaataacttgtctcgtcctaagagtagtactcgcatcacccttaataaagttgccaaaggttctttgaatgatgcttgtttgacagcagctgctgtggatgattcttctggactgagaagtaatgcaaaaaatgttgatgagaagaaggatacaaatgatatctttgaaagccctggtccactgcatgatattattgtgtgttggttggatcagcatgaagttagcaacgttgcaggttttacccgggtggatgttcttatcgcggagcttatccgcaatggtatatttttccctcaggtttatgtcaggcagctaattattagtggaattactgataagaacgatacaatgctggatgttgaaagaaaaaggaggcatcacagaactttgaagcagcttcctgggtcttctttatttgatgttcttgaggaaactaggactgcagaagagcaacagctatatgagatgatgtcaacatactctagtgagcgacgccttgttctctcagaactttcatgtggtcattcattttatgcaagtggcagaggtgagtacacttcaagttcctgcattcggaagcagagtgatcttccagttgcatcagaaggtgataagcatggaagagtgctagaacaagtagaagatgttaaagctcttttgtcaagtctgttgggttttacatatcctcccctagtggaatcaaaactttgtgaaatcaaaacaagctttcaagaatcagtaacgtcaacgctcacacaagttgagactggggaagccaaaagtggatgcgaggattgtatgaggtccaaggggcagaaattggatgacagcgccactcctttccaagggtttccattgattcaatcaggcgaggaggatatttggtgggtgaagaaagggacaaagttacaagaatctttcaacgttgaacctgtacagaagtctgttaagcaaacttctagaggtagggcaaaagttgttcgtaaaacacaaagtcttgcacagcttgcagctgctagaatcgaaggtagccagggggcatctactagtcatgtttgtgaaagcaagatgagctgtccccaccatgaacctaataacgatggtgacaacgtcaaagattttgatcacacaagggcagcaaacgtgactgcaatagggaagtcactaaaaagacttagattgctcgaaagacgatctgtctcttcatggttgttgaaatcaataagacagcttgttgatggaaacggaatgacagcttctaaagctaccaattctataagcatccttcctttgcagcctgatgataaaactgcatccaaatggaggctaggtgatgaagaactgctgtcagttctctatgtactggatacatgctgtgattcagtctctggagtgaagttcctcatatggttactagtgaaaattcgtggagtgggctcctcaggtcaacctgggaggacttatatgcttatgaggaacagagatcaccaagtttgtcaggtcaacgaggcacttgtgttctcatctctgcttaggtatgagaacatacttcttgcgaccgacatcttgcctgatgttctaagtgctttagtgaacagaaattctatgtcagcaactaccaggcatcctggttcaacagcttttgcttatgttcgatattttttgaagaaatatagagatgtggctagtgtggccaagtgggagaaaaactttcggaccacttgtgatcaacgcctgttagctgagcttgataatgggcggtccattgatggtgatttggtatcttcttcgggtattttagcaggcgaggagattgatgagcaggtccgccaaaagttgaatggaaggagttcaagactcgtgcagaatatgaaagagatagtgcaacggcaagctgatggaattcagcgcagtttaaaggaaaagaaagttcttgcaggcgcagcacccaggaatccactcacttttgagaaagaagatagttatcaaattgcacatgacattgttttgggcttagtagaatgcatcaggcaaaatgggggtgcaaatccagatggagacctttcaatagttgcttctgctgtttctgcaatcgttgtgaatgctgggcatatgatagcaaaacatttggattttgcaggaggaaactatcaaggtgttaattctgtggctacttcgctaaattttgttcggcacactttacttattcacataaattctctttgcttactaaaagaaactcttggagatcgcttcagccgtgcctttgaaatagctctggcggttgaaacttctgcagctgttacagcagcttttgctcctccaaagatgcaccgcaatcagtttcaaccatctcctgaggcccatgatgcatatggaaatcatacaagtgagctcagcaactcagggaaaggttttgttgggagaactgcaaaagtatctgctgctatttctgctcttgttgtgggggctgttgttcatggagctgttagccttgagcggatggttgctactctaaaaataaaagatggtctggatattatgcagcttttgagaggtttgaaatcaaatacgaatggtgtatcccatcctactggaggttttaggattgaaaattccacggaagtttcggtacattggtttaggattttattggggaactgcagaactgtctatgatgggcttattgcagatattcttggagatccatacattattgcactctcaaggttgcagcggatgcttcctctaactgtaatttttcctccagcctactcaatttttgccatggttctttggagacgatatatttttaactgtgaagatccacaactttatcagtctttttcaaatgcaataaacgatattaccagacatcagccttttcgagagatctacttccgtaatacacatcggctgtataatcttctggcttctgatgttggtgattcgaagtttgcagcaatgcttgaaagtcatagtccggaccggaattcaaaaatattgccatttatacctctccgtgcacgcctttttctggacgctattattgattgcaacacaccaactattcagggggatggtgcttcagagccttgtgatcccaaagataatgaactaaagctttcagagaggcttatgcaacttcttgatactcttcaacctgcaaaatttcactggcaatgggttgagatgaggcttcttttagatgaacaggctcttatggaaaaagttgcagcaggcaagacaacacttgaatcacttcggtcattatcccctaaagctgagggttttgccctttctgatagtgagaaaggatttactgaagtcattctatcaaggctacttgctagacctgacgctgctcctctgtattcagaacttgtccaccttcttggaaagcttcaagagtcacttgttatggatgtaaaatggattctacaagggcaagatgctattcttgggcgcaggtcaacaagacaacagcttgttcatattgcccaacgaaaaggtctttcaacaaaggcacaggtttggaaaccatggggttggtccagcttgcttagcgatgccattcctaataaaactgcaaaaaggaagttggaagtcacatcaattgaggaaggagaagttgtggatgacactgttgatgctaaaaggactaccaagactccccctcatagtgttgatagaagctttgaagggattagatcgataaataaatatttaactgagaaagcccttgctgaattagtattgccttgcatcgacagaagttctgctgatatccgtggtatactttctgttgatttgaccaaacagatgggggctattagtgaacatatcaaagcaatagcattgaatggtgctaaacaagctggttcagtttcttcaggaaatgaagtgccatcgaacaaatcaagtggccgtagaggaattcgaggtggaagcccaaacattggtagaagagctccggttggtaatgacccaagtcctccttcggcttctgctctgcgggcagcgttgtggttacgcctccagttcatcattaggttgcttccagtaatcatggcagataggagcatgagacatacgcttgcttctgcaattctaggcctgcttgcaacgcgcatgatttatgaagatgcagatttgccccttcctcctaccaacgcaactgctttaaggcgggatgtggattccttgctggaacctcccctggatgtcctgcttgaccggcctggcgaaagcctttttgagaagcttttatgcgttctccatgcactgcttggtagctacaaaccaagttggctgaagtcaaggtcagcctctaggtcgtcaattaaaagccaacgagatttctcagcatttgataacgaagcagccgagggcttacagtccgcgttggaccacatggaattgcctgaaacaatcaggcggaggatccaagcagccatgcctcttcttccaccatccaggcgcccttgtatgcaatgccaacctccgcagttgtcgttggctgcattatcaccactccagagcagtacctctggtgtaggtcctcaacagaaaagttcttgtgtgagttgggtgcccactaacgtatcagtcagaagcaaggcagcattgccttctcatgaccctgaaacggaggtagatccatggagcttgctggaagatggcacaaactgccccccctccacagcatctggaagcaatggctcgagtggagtgacgggagaccatgctaatctgaaagcttccagctggcttaagggtgccgtgagggtgaggaggacagaactgacctacattgggtctgtagatgacgacagctgatacgtgtatgattatcttggtgaattggaggcaaagaatttggtctcacttgttggcatttgtgtcgtgtgcaagttaaaagcaccaactgcatcgaattctttgagagctctgtaccacaaggtggaatggaaaccatatggcttttggttggttgttgtagtgttagaatacatcgctgcccccgatttgttttagttagggcctgtgggggcggctgtatatagttggaatccatttctggattcaatgggggagcttatttgagaatcaggcaggaagccatgtagtagatttctagccaagagccctgtacttgttttttttttgggtctgagatgtaattgtcatgtcacatatattcttttgatctaaggctgacggaagttgcattgcctatttgctttagctattactagtgcagcctagacatcatgagtttggatcgttctatgactaaaccgtcctactggttt

SEQ ID NO: 208668 - DNA, 7137 bp, Zea Mays
cggagatggagacggacggacgccgctgggtctgcagggcgagacagggcagtatcgtatggtttcctttcttcctccccaggagcgcaacagcaacgcacacagacacagccgcagtgaccagaggagaccagcagcaggccaccatcaccactaccaccagcagcagcagcaacgcaggcggcagcagcagctaactccgtacaagctaaagtgtgacaaggacccacttaataacaagcttgggccacctgacttctatccacaaacactaaactgtcccgaagagacattaacaaaagactatgtacaatatggttataaggagactgttgaaggaattgaggaagcaagagagattgtaataagtcagatcccatacttctgtaagccagatgttgtcataaagtgcaaggaggcactaaagaagcgtttaagagctatcaatgaatctcgtgctcaaaagagaaaggccggacaagtttatggagttcctctttctggatctctattaatcaagcctggagtttacccagagcaaaggccatgtaatgaggacacacgtagaaaatgggttgaggcccttgctcagccaaacaagcgactgcgttcattgtctgagcacgttcctcatggttatcgtaggaaatcactttttgaaggtctcattcgatataatgttccattactaagagcaacatggtttattaaagttacatacctgaatcaggcccgaccggcacctaacagtacttcagtagttgcttctgataatcaacgatctaatcaatggacaaaggatgttgttgaatatttacaacagattttggacgaagtttgttctaaagagggtgccattgtacctccatcttttaaagagcagtcatcaccaggacttgctgctggaaccaatcaaataaaaatgaaaacggaatcatctccagctggagacagtgaagaacccttggtgcacttcaaatggcggtatatggttcgcctcatccaatggcatctcacagaagaattgcttgttccctcagtacttatcgaatggttatctaaccaacttcaggagagggattcagatgatgttttagagcttcttttgcctattatacttggtctggttgacaccattactctctcacaaacatatgtgcgcatgttcgtggagctactagtgagacgtctcaatgtcgatcgtccaaaaaggttttcagtttcttctgttatagcagagttactgcgatacatggtacttgcagtgccagatacatttgtttctttggattgctttcctttcccatcatttgtggttcctgatgtatatggtagaggtgctttgttgaagataaccagtggtggtggaattttatgttctaagaggcgtgatgcttatcggtatttgtcctgtggttatgctgtttcttccattcagaaacgtgcacatgatcttgcagcagttgctaaccctagccttcaagcacgtggtgcagccaaagtggtacaggctttggacaaagctcttgtcacaggaaatttgtcagtggcatatttttcactctttaatgatttatctgatgcgttaatggaagaaagatggattaaagaagtgaatccctgtttgcagtcttctctgatgtggattgggactgttgagctatcccttatctgttctatatttttcctttgtgaatgggcgacatgtgattaccgtgattgccgagcatctccctctcagaatgtgaaatttacaggaagaagagatttgtctcagatacacatggcagtgtctatcttgaagaataaaatggatgagatgaataacttgtctcgtcctaagagtagtactcgcatcacccttaataaagttgccaaaggttctttgaatgatgcttgtttgacagcagctgctgtggatgattcttctggactgagaagtaatgcaaaaaatgttgatgagaagaaggatacaaatgatatctttgaaagccctggtccactgcatgatattattgtgtgttggttggatcagcatgaagttagcaacgttgcaggttttacccgggtggatgttcttatcgcggagcttatccgcaatggtatatttttccctcaggtttatgtcaggcagctaattattagtggaattactgataagaacgatacaatgctggatgttgaaagaaaaaggaggcatcacagaactttgaagcagcttcctgggtcttctttatttgatgttcttgaggaaactaggactgcagaagagcaacagctatatgagatgatgtcaacatactctagtgagcgacgccttgttctctcagaactttcatgtggtcattcattttatgcaagtggcagaggtgagtacacttcaagttcctgcattcggaagcagagtgatcttccagttgcatcagaaggtgataagcatggaagagtgctagaacaagtagaagatgttaaagctcttttgtcaagtctgttgggttttacatatcctcccctagtggaatcaaaactttgtgaaatcaaaacaagctttcaagaatcagtaacgtcaacgctcacacaagttgagactggggaagccaaaagtggatgcgaggattgtatgaggtccaaggggcagaaattggatgacagcgccactcctttccaagggtttccattgattcaatcaggcgaggaggatatttggtgggtgaagaaagggacaaagttacaagaatctttcaacgttgaacctgtacagaagtctgttaagcaaacttctagaggtagggcaaaagttgttcgtaaaacacaaagtcttgcacagcttgcagctgctagaatcgaaggtagccagggggcatctactagtcatgtttgtgaaagcaagatgagctgtccccaccatgaacctaataacgatggtgacaacgtcaaagattttgatcacacaagggcagcaaacgtgactgcaatagggaagtcactaaaaagacttagattgctcgaaagacgatctgtctcttcatggttgttgaaatcaataagacagcttgttgatggaaacggaatgacagcttctaaagctaccaattctataagcatccttcctttgcagcctgatgataaaactgcatccaaatggaggctaggtgatgaagaactgctgtcagttctctatgtactggatacatgctgtgattcagtctctggagtgaagttcctcatatggttactagtgaaaattcgtggagtgggctcctcaggtcaacctgggaggacttatatgcttatgaggaacagagatcaccaagtttgtcaggtcaacgaggcacttgtgttctcatctctgcttaggtatgagaacatacttcttgcgaccgacatcttgcctgatgttctaagtgctttagtgaacagaaattctatgtcagcaactaccaggcatcctggttcaacagcttttgcttatgttcgatattttttgaagaaatatagagatgtggctagtgtggccaagtgggagaaaaactttcggaccacttgtgatcaacgcctgttagctgagcttgataatgggcggtccattgatggtgatttggtatcttcttcgggtattttagcaggcgaggagattgatgagcaggtccgccaaaagttgaatggaaggagttcaagactcgtgcagaatatgaaagagatagtgcaacggcaagctgatggaattcagcgcagtttaaaggaaaagaaagttcttgcaggcgcagcacccaggaatccactcacttttgagaaagaagatagttatcaaattgcacatgacattgttttgggcttagtagaatgcatcaggcaaaatgggggtgcaaatccagatggagacctttcaatagttgcttctgctgtttctgcaatcgttgtgaatgctgggcatatgatagcaaaacatttggattttgcaggaggaaactatcaaggtgttaattctgtggctacttcgctaaattttgttcggcacactttacttattcacataaattctctttgcttactaaaagaaactcttggagatcgcttcagccgtgcctttgaaatagctctggcggttgaaacttctgcagctgttacagcagcttttgctcctccaaagatgcaccgcaatcagtttcaaccatctcctgaggcccatgatgcatatggaaatcatacaagtgagctcagcaactcagggaaaggttttgttgggagaactgcaaaagtatctgctgctatttctgctcttgttgtgggggctgttgttcatggagctgttagccttgagcggatggttgctactctaaaaataaaagatggtctggatattatgcagcttttgagaggtttgaaatcaaatacgaatggtgtatcccatcctactggaggttttaggattgaaaattccacggaagtttcggtacattggtttaggattttattggggaactgcagaactgtctatgatgggcttattgcagatattcttggagatccatacattattgcactctcaaggttgcagcggatgcttcctctaactgtaatttttcctccagcctactcaatttttgccatggttctttggagacgatatatttttaactgtgaagatccacaactttatcagtctttttcaaatgcaataaacgatattaccagacatcagccttttcgagagatctacttccgtaatacacatcggctgtataatcttctggcttctgatgttggtgattcgaagtttgcagcaatgcttgaaagtcatagtccggaccggaattcaaaaatattgccatttatacctctccgtgcacgcctttttctggacgctattattgattgcaacacaccaactattcagggggatggtgcttcagagccttgtgatcccaaagataatgaactaaagctttcagagaggcttatgcaacttcttgatactcttcaacctgcaaaatttcactggcaatgggttgagatgaggcttcttttagatgaacaggctcttatggaaaaagttgcagcaggcaagacaacacttgaatcacttcggtcattatcccctaaagctgagggttttgccctttctgatagtgagaaaggatttactgaagtcattctatcaaggctacttgctagacctgacgctgctcctctgtattcagaacttgtccaccttcttggaaagcttcaagagtcacttgttatggatgtaaaatggattctacaagggcaagatgctattcttgggcgcaggtcaacaagacaacagcttgttcatattgcccaacgaaaaggtctttcaacaaaggcacaggtttggaaaccatggggttggtccagcttgcttagcgatgccattcctaataaaactgcaaaaaggaagttggaagtcacatcaattgaggaaggagaagttgtggatgacactgttgatgctaaaaggactaccaagactccccctcatagtgttgatagaagctttgaagggattagatcgataaataaatatttaactgagaaagcccttgctgaattagtattgccttgcatcgacagaagttctgctgatatccgtggtatactttctgttgatttgaccaaacagatgggggctattagtgaacatatcaaagcaatagcattgaatggtgctaaacaagctggttcagtttcttcaggaaatgaagtgccatcgaacaaatcaagtggccgtagaggaattcgaggtggaagcccaaacattggtagaagagctccggttggtaatgacccaagtcctccttcggcttctgctctgcgggcagcgttgtggttacgcctccagttcatcattaggttgcttccagtaatcatggcagataggagcatgagacatacgcttgcttctgcaattctaggcctgcttgcaacgcgcatgatttatgaagatgcagatttgccccttcctcctaccaacgcaactgctttaaggcgggatgtggattccttgctggaacctcccctggatgtcctgcttgaccggcctggcgaaagcctttttgagaagcttttatgcgttctccatgcactgcttggtagctacaaaccaagttggctgaagtcaaggtcagcctctaggtcgtcaattaaaagccaacgagatttctcagcatttgataacgaagcagccgagggcttacagtccgcgttggaccacatggaattgcctgaaacaatcaggcggaggatccaagcagccatgcctcttcttccaccatccaggcgcccttgtatgcaatgccaacctccgcagttgtcgttggctgcattatcaccactccagagcagtacctctggtgtaggtcctcaacagaaaagttcttgtgtgagttgggtgcccactaacgtatcagtcagaagcaaggcagcattgccttctcatgaccctgaaacggaggtagatccatggagcttgctggaagatggcacaaactgccccccctccacagcatctggaagcaatggctcgagtggagtgacgggagaccatgctaatctgaaagcttccagctggcttaagggtgccgtgagggtgaggaggacagaactgacctacattgggtctgtagatgacgacagctgatacgtgtatgattatcttggtgaattggaggcaaagaatttggtctcacttgttggcatttgtgtcgtgtgcaagttaaaagcaccaactgcatcgaattctttgagagctctgtaccacaaggtggaatggaaaccatatggcttttggttggttgttgtagtgttagaatacatcgctgcccccgatttgttttagttagggcctgtgggggcggctgtatatagttggaatccatttctggattcaatgggggagcttatttgagaatcaggcaggaagccatgtagtagatttctagccaagagccctgtacttgttttttttttgggtctgagatgtaattgtcatgtcacatatattcttttgatctaaggctgacggaagttgcattgcctatttgctttagctattactagtgcagcctagacatcatgagtttggatcgttctatgactaaaccgtcctactggttt

SEQ ID NO: 208669 - DNA, 2135 bp, Zea Mays
atgcatgtttgttgcagcgcattccggcagcaatggcataacggcggcgggcctgcgtgtgtgcttagcgtcggcacagccaacccaggcaactgcgttcagcaagatgagtacactgactggtacttcagtatcaccaagaacgatcatcttacacacacgaaagcaatcatgaagaaaatgtgtgagaagatgatggtaaaaaaacgatacctgcaagtcaacgaggagctgttccgtgagcatcccgagttcttggaccctgcagctccaagtctagaaggcaagctagccgtcgtggccagtgtcatgccagggcttgtggccgctgccgcagagaaagccattgccgaatggggccgaccggctgaagacatcacgcacctcgtcttcgccaccagcagcagtgctcaactgccccacatcgatctccgcatcgcttcccttctcgggttaagcaccaccgtgcagcgtacggtgatcggctttcatggctgcagcggcagctccgcggcgctccgcgttgccaaggacatcgccgagaacaaccgcagcgcacgagtcctcgtcgcttgcgcagacatgttgagcgtcatggatggttacctagtccccaacgtagtagcccaccgctacggaatcatcggccacgccattttcggtgacggtgctggtgcagttgtcgtcggaagccggccgcaggaacccgtagagcgcccaatcttcgagatggtgtcagcgtcgcaggccacgctacccggctcggagctggcggttgctgccgagctcaccaatttcggcatggagtaccgcctcgagtttggagagctggcggcgggggtcggcgacaacatcgagcggtgtctgatcgacgcgctgtcgccgctcggcattggtagtgttggctggaataacctcttctgggcggtgcacccgggtggccccaagagcgatcatcttacgcacaccaaagcaatcatgaggaaaacgtgtgagaagatgatggtaaaaaaacgctacttgcaagtcaatgaggagctcttcagtgtgcaccccgagttcttggaccctgcagctccaagtctgcaaggcaagctagctgtcgtggccggtgccatgccagggcttgtggctgctgccgcagagaaagccattgccgactggggccgcccggccggagacatcacccacctcgtcttcgccaccagttccagtgcccagctgcctcacattgacctccgcatcgctgcccttctcgggttaagcaccactgtgcagcgcacggtgatcggctttcacgcctgcagcggcagctccgccgcgctccgcgttgccaagtacatcgccgagaacaaccgcagcgcgcgagtcctcgtcgcttgcgcggacatgtggagcgtcatggatagttacgtagttcctaacgtagaccaccgctacggaattattggccacgcctttatcggtgacggtgccggcgcagttgtcgtcggaagccgaccacaggaacccgttgagcgcccaatcttcgagatggtatcagcgtcgcaggccacggtgcccggctcggagcgggcggttgccgtcgagctcaccaattgtggcctggagtatcgcctcgagtttggagatgtggcggcggaggtcggtggcaacatcgagcggtgcctgcttgacgcgctgtcgccgttgggcattggtagtgttggctggaataacctcttctgggtggtgcacccgggtggccccaggatcatggacaccttcacggcggctctcaagctacagcccgagaagctgtctgccagtcggcgtgtgcttagggagtacggcaacatgaccggcccgactctgatctttgtcctcgacgaggctatacgccgtcgccagctcgaccacgaggaggggagctgcgagtgggggctcatggtgggattgggcccggggttcaccattgatgtaatggcattgcgtgcgtgcagtggtaaatccacaccaacaccaagaatcaagagtagtctgtaagggagagccagaactcagaagcggccctttggttgtctgtttgtcagtgcgtttgtacgtgtcttcatcccaataaaataaataaataactgtggtttggctttgtggca

SEQ ID NO: 208670 - DNA, 2458 bp, Zea Mays
catcttatttaccatgaaagcccatggcataaagcaaaaatacatttatgctataggtcggaggggtttaatgcaaatctatggcgtctagtcgagacgcagccttcttcaagcctcgaaccttccgctcgggaacgggaagttgtctgtcatttgagaatcgagttgtcgagagtcgagacgcacacgctcgtacgcaacttctcaaaaagcagcctgccctgttcattttctctctcctcccgtcggcgaaattttatacgccagcaaaaccgccctgtggaggaaatagagaaaaaaaacccgaatcatacggccagaaatattaaacagacagaaaggaagaggagaatagcggcgaggacgaagtggcccgcccaggaaatggcgtcgatgcagagctggcgcaaggcctacggcgccatcaaggacaccacaaccgttagcctcgccaacctcaactcggacttcaaggatctggatgtggcgatcgtgaaggcgactaatcacgtggagtgcccacccaaggagcgacacctgcgaaaggttgttgcggcgacatccatcgccaggcctagggcggatgtcgcctactgcatccacgcgcttgcccgccgtcttgccaagacccgcaactggattgttgctctgaaagcacttgtagtaatccatagacttcttcgtgagggtgatcctacatttcgagaagagcttcttaactttacacaaagggggcgtattctgcaactttcaaactttaaggatgactccagtccaattgcttgggattgttctgcctgggtgcgcacatatggtttgtttttggaagaaaggttggagtgcttcagagttctgaagtatgatgttgaagctgagcgtttgtccaaacaagggtcacagtagaaccagagagttggattcacaggatctgttagagcagctgccagcattgcagcagttactataccgactcgttggatgtcggcctgaaggagctgcaaataataactacctggtgcaatacgctttagctttggtgctaaaagaaagctttaaaatttattgtgcgataaatgatggaattatcaaccttgttgataagttttttgagatgccaagacatgaagcacataaagctcttgaaatatacagaagggctggccaacaggctggaaatctatctgatttctacgagaattgccggggtttagaacttgcgaggaattttcagtttcccactctgagggagccgccacaaacatttcttgcaactatggaggagtatgtgaaggaggctccacgcatggtcccagttcgagaacccctggaacttcctgagaggcttcttcttacatacaaacctgaagaatcggaggacattcctgagcctgcttctgttgaagaggaaaatgcaccagttgaagagcctgttctggtaccacctgttactgaagttgtttcacctcccaagaccgaggtggccgatactggtgacttactgggcttagatgatccaaatcctgctgtatcagctatagaggaaagcaatgctcttgccttggctattgttccaacagatggggcttccacaactggtaacactgcatttcaagataaggggtttgatcctacaggatgggaactcgcccttgttaccgcaccgagcaacacgacttcatctgcgtctgtcggtcaattgggtggtggatttgacaagctcattttggacagcctttatgatgacggggcctacaggcagaggcaacagcaacaggtgtatggttcagcagtgcctaatccattcatgacaaatgatcctttcgtgatgtcaaaccaagttgctcccccaccatcagttcaaatggctgccatgtctcagcagcatcagcagatccccacgatgatgcaaccaaatccttttggaccacctatgcagccacaggtaggcatgggcccagcaacaaacaatccctttctggatgctggattcggggcattcccagtggcgaacaatagccatcagcaacacaacccatttggcagtgcccaacttctgtaggctacgtagttacaagagcaaatttgtgcttcagcagatgcgattttttcggtgattatatcgtgcattgtgctcggccattcttccatgcgatgcgtgtattatgaattggcttcaccacacggggagctatggcttgacccaacccttgttgtaaagaaattagcgacttgtgtaacatcgaatgtatgtcaataaacagtaggcaatgttattataactataaacaaaatagcggtggtatgtaggagttctgtttatttcattgctgtttgattgccggtcttgcatgcacattgattggccatgtgttctaaccccagaactgaagcgttattgtacctatacacatgcatatactacttgcgattggtaattattttacgttgttcacattta

SEQ ID NO: 208671 - DNA, 1574 bp, Zea Mays
ccctgtgtcagcgctagtgtgtccgtgtgtggagctagcctagcacgcagcgatctgactggccatggtctccccttcgtcagctctccccaaggtcgccgacgaggccacccctcgccgcgccaagtggtggtacgtgacgttccacaacgtcaccgcgatggtcggcgccggcgtgctcagcctgccgtacgccatggctcacctgggatggggccccgggatggtggcgctgctggcgtcgtgggggatcacgctgtacacgctgcgtctgctgatcgagctgcacgagtgcgtgcccggcgtgcggttcgaccggctccgcgacctcggcgcgcacgcgctgggcccgcgcctggggccctgggtggtggtgccgcagcagctcatcgtgcagctcggctgcgacatggtgtacatggtgacggggggcaagtgcctgcagaagttcgccgagtccgcgtgcccgcgctgcgcgccgctgcaccggtcctactggatctgcatcttcggctcctcccaattcctgctgtcgcagctgcccaacctcgacgccatcaccgccgtgtccttcgccgccgcggccatgtcgctctgctactcgaccatctcgtgggccgcgtgcgtggcgcgcggtccggtgcccggggtgagctacgacgcgtacaaggccggcaccggcaccggcacggcggcggactcggcgttccgggtgttcagcgcgctggggcaggtggcgttcgcgtacgcggggcacggcgtggtgctggaaatccaggccaccatcccgtccacgcccaccaagccgtcccgggcgcccatgtggaagggcaccgtcgccgcgtacctcgtcaccgccgcgtgctacttccccgtggcggtcgccgggtactgggccttcgggcgcgacgtcggcgacaacgtcctcgtggcgctgcaacgcccgccctggctcgtcgccgccgccaacatgatggtcgtcatccatgtcgtcggaagctatcaggtatatgcgatgccgatgttcgaaagcatcgagacgattatggccacaaggttcaggctgccgcgagggttgctcctccgtctagtggcccgatcggcctacgttgcattcacactgttcgtggcggtgaccttcccgttcttcggcgacctcctaggcttcttcggagggtttgggttcacgccgacctcctacttcctcccctgcgttctgtggctgaagatcaagaagccgccgaggttcagcgcgtcgtggtgtgccaactggggctgcatcatcgtcggagtgctgctgatgcttgtgtccaccatcggcggcttacggagcatcgtccaagacgcatcgacgttccagttctactcctgaagccctcacacttgcatgtacctctacactcacatggttccagcaagtcgtcaccctcgctcgtccacgcagctctacctctacattttgttgcaagcttgagggtgtccgggtgtggctgcagcctgccgaaatgcagaggacgatgcagcaaactgtacactcgctaagacgtacggttgtgtgttctacggatgggggg

SEQ ID NO: 208672 - DNA, 2445 bp, Zea Mays
tctcttgctgtatgctctcatttttttcttcttcccagaactttgcattgcaatgccaaccaatacgacggtgtccacctaccgcccaccgctctcgttccaacctagttggaccaccccgtaaaaaatctgaggggagccggcctccacgaactcctccgctgcaacgacataaaagagccgcgtcgtcccttccctcccggcttcctggcctgcacctagcatctctccgcttcctccccatccgcgccgcctctgacgttgacctcggcggccgccaccggcgaggtcgcacctcgccggtcaccaccacccccgctgctcgatcttatatccctactccgaggatccctgtagcctcctccggccgcgcacccgcggaaccctagatctccgataccccgcgctccttcccgccgacggctacccgatcggaatgggccgccatcttcagtaaggtccaaggacccaggggtacccccctccgccttcgcgcgtgcgcggagcgccgccgcgatggccatccgcatcaccgtatcctattcgggctacctggcgcagaacctggccgcgtccttcggcctgcgctgcaccgccgccgcggctgcgggcgctggcgccgcgcccggtccagggtgccgcttcctccaggacgcgctatcccgccctttctgcctcttcgcctcctcccgccacgtcgacccccaccatgacgccgaggatcagaaccacccgaagcccgggcccaaggctctgtcccctgccgttgcagcaagaggagatggctactcactgttgctgccgcgatcgtgttccgcgaaggcgccgccgccggtggatgaccccccagcgtcgctggccgtggggctgctgtcggtgttcgcgtctgggatgggatcgactggcggcattgctggtgcatcctcccttgttgcgtcgccgtcaatatcaaccgggctcaaccctgcgtcgctcctcccgttcctgcaggcgagcaagtggctcccctgtagcgacatagtcgctgctgcaacgacgtcgcgcagctcaggacgcccagcaggtgcaacggctgcacctacaccgcgtacagctgcaccatcgcctcgtcctgcaccacgcgcagccgctccatcgccccgtcctgcaccatgcgcagccgttccatcgccccgtcatgtaccagtgccgtcacctgctgttgctgctccttccaaggggtgggaaggaagaccggttggctctcaaggtcaatgttcccaacatttgatgttggtgatcggatccttgctgagaagatttcgtacattttccgggaaccggaaattctggacattgtgatctttcgggcacctccagtccttcaggcattgggctacagcgcaggtgatgtgtttatcaagagagttgtggctaagggtggggatatcgttgaagtacgtgatggtaacttgattgttaatggagtagttcaggaggaagaatttgtgttggaaccagccgactacgaaatggatccgctggtataataactaatcttcttaccacatgctactaaagagccactattttgtagtcctactgtgcctgaaggctatgtctttgtactgggggataacagaaacaacagctttgattcacataactggggtccacttccagttaagaacatcctcgggagatctgtgctccgatactggccaccatctaggataacagatacaatatatcagcatgacatggtgcagcacacagctgttgcatcctgataatacattgtggcaataccacgtggtgcacgccaatttctcctttccctgcatagctttattgacaattgatatgcttagccgtggggttctttatttatttgttgtagccttgcctcaaatgtcgattgggcagcttggctgacagattagtttttttttccctccctacgggcagatgcttgtttaaagacagcaattcttgtactccgtagctaagaatgaatgccatataaatgttgcagtagataagcatcaaggagtgtaggatgaggatggcagttcttttgttttatgagatgagatggtgctctaaacttacgtaaaggaaatacgaagcatagaagagtgcccaagttgtgttatgtatttttttcattccttgatcttggatcaaagattcaaggcaaagtcagcctggtgcaaaggttttggttgaatccttgtatcctgccagataaggttttttgatggtgcaattttggattagcatttgccctagtatttagtgttttttagttctgtattcatttatgatgtaatacaactttgtgagcatagttctgtttggcctgctttgttcaatcgcagtgcgggttcaatactacgttgcctgatgttattgtctgttattttctttgtaactgtatatttttcatctggtactctgtttacc

SEQ ID NO: 208673 - DNA, 2045 bp, Zea Mays
cgaacacacccagtcagccgccaggccgccgctgtgccttccgccgtccgccgaggcaccgagccgctgtccctccccgtccgccgagccgttgcccctgtggctgtgctgtgcctccgttcgccggccgagccgctgtccgcctgtcactgtccctcagtccgccgagctgctgtgctttccggcttcgccgtccgccgaacaggttcgtccgcgagcgcgacgcgccgagcttccgccgtccgccgagcagggtcatctgcacaccaacagggtctacgacaatgtctggaccttcattctaacagatgcaaccttcaagagcgctgagattcaagaaacactgagcaaggtgaatttgttgtcccctctaagctttgtttgtgtgaatctaaacaatcggccatgcaattgactagagtaccatggctgccaacatgttatccgtattgaatatggaatatggtttgctcttttctgttgatagtttcacatgaatgactagatgaaccgatcatttgacatgaattcttggtgccttacatagttgtgctttgctttaggtgaacaggtcaaactagaagtaatatagaagatagatgtgtaaattccttgttccatcctctgctactttgatgcagatgggtctcaatgccgtggtggccgcctgctacgtctttccattacttgtctttgtgctcacagtccgcttcttctacgtactgtggcacagtggccaaccagagtcaaggttgtgcgccaccagattgcgttgtctcattgtccttggctccgaaaaggtccagattaccagctccgggtgatgctgatgagctatctgtcattgaagaccaaattgcatggatagttcacataattgcatccattgtcaagtaaggcaggtaacaggtgttaggaagagcccgtagagaggtcgaggagcagcactggctgtttctctggcattgatcaaggcgagcacatcaaggggtctcaggcacctccctctcattggtgtcgtcgttgaaccagttatggtacattggaatggctgcaaattgagggagaaagacctggaaacagtgatgcagcatgttcacacgaagatggcaacaatggtaacatttgcattggtcctgtaaataaggtattgaatatgcttgcttgatggattgaagatccaaattcgaatataacttcataagttcatatcccacgagtctaattacttgtggcttgctgaagatggcatgaagatgcaggatgaatcaatgctattatgatgcatctctatagattagacaactacagagttggtgctgttttaatgcagtccgggcacccaatagcttatttgagcaaggctttgggaactaaatctcaagggttgttcacctatgagaaagaatatctggcgattctggttgctgtagatcattggcgccattatttgcagttgaaggagtttcacatttacacggatcatcgcagcttcgttcaattggatgaacaatgtttgcacactccatggcaacagaaaatgtttactcgtttattgggattgcagtacaaaattatatacaaggggttgacaatagtgcggctgatgcattgtccaggcatccggaggttcagttctcctgttcggcattgtctacttgcactccacaatggataacaaatgtttctgattcttagcaccatgatgatatggcttcgactataatggccaagttagccattgatgctaaagcagtaccatcttattcatggcacaatggaattcttcgctataaaaaccgaatttgggtgggatagtcactgacactgcaccaaagattgttatcagcttttcatgagtctgcagtgggtggtcattccggcattccagttacttatgcgtagggatgaaaacggtcgggaacggtcggtaaacactaaaaccattaccgttttcatattttttatcggaaacaaaatcgaaaacggtaattccggaaacggaaacgatatcggtatttcggaaacatcggaaatgaaagttt

SEQ ID NO: 208674 - DNA, 1358 bp, Zea Mays
atggagtcgtcgttctcgtcgtccttgggtaataacagcagcaggatactggtcattggtggtacggggatgatggggcagcacctcgtcaaggccagcctcgccgccggccaccccacggccgtgctcgtccgcccagccagcagcagcaagctagagcttctcgagaccatcaagggtgacatctacgaccacgagagcttggtggcggcgttccaccaggttgacgtggtcatctccgccgtcggccaccacggaccgcatgacctagaagacggccagctcaggattgtggcagccatcaaggaagcaggcggcagcgtcaagcggttcgtgccgtccgagtacgggtgcgacgtggagcaggccgcgcgatcagcggcggtgctggagccggcgcggagcatcgtgctggccaaggtccgggtccgccaggccatcagagccgccgggatcccgcacaccttcgtctgcagttactgggcgcacggcttcgtgctgccgcgcctcggtgacccccacgccgacgggcttccggccaccagggccaccgtcttcggggacgacgccacgcgcgccatcttcgtgcacgaggcggacatggccgcggtcacggtgagggccgtggacgacccgcgggcgctcgacaagaccctctacctgcggccgccggccaacacctgctcgctcgcccacctggtgcgcctctgggaggacaagacggggagggcgctggacaagtactacatgcccgacgaggagctcgtcaacaggatcagggactcgccgctgccgctcaacttccagctggccatggtgcacgccaccgtcgtcgccggcgtctgcgaccagaccgtcgacgccgaggccggcggcgtcgaggccacggagctctacccggacgtcaactacgtcaccgtccacgactaccttgacggtctcaaggagagcctcacgcgcaacgtcaattcatgaccgcagctcgaacgattatatatacgtactactgtattatctatttgtgtcgtcttacgttgctatacgtgcgtgaataaaattccctacggctacagccggctatagctgcgcagcttcttttcgattcgtgacatatgtacgtccacctacgatgatctacttttttctagagcaaagtacattactagcggtttccgaacttggtacgttatgtcacttagtccttgaactcagaaaacctggcaagcgggtccttgaactttgttcggccatgtaaatcaacacaaagccgggtttgcaaaaccagatgacgacgtgacatgtcatgtctgaatcatttagggttcccaacttgacatattgtgtcacttaggtccccg

SEQ ID NO: 208675 - DNA, 1464 bp, Zea Mays
acagtccttaagtccaaatatccaatatatctcagctatatgttgtgtgttgagtgtcaagtgtgtgcaggtattgatatcacatagtttaggctaggatgaccagtggaagagggatgatctctgccttgtaactaataatgtctgatatcttgcatgcaatggagatggctcgacttatatgtggtggctgccagacattattgatgtatgctcgcagtgcaacaactgtaagatgctcatgttgtgacacagtcaatcttgtcagaccaggtactgatgtatgtgtaaacttatcttgcagatccataagcttttgattttccatctatgaacatgtttaaatttcaattttcaagagtaggatgcatgttctatgcaggcagaagagttgttttggcattaagttcccgagcaccgtatttgatactgtattgtgctagtagtttatctactcctagtgtacttaaatcaggataagcttctagcatgttgacgatttttgttcatcctgcagtgagtagcatagctcatgtgaactgtggccagtgccaaacagtgttgatgtatccatacggagcaccgtctgtcaaatgtgctgtttgcaacttcattacaaatgttggcggggtgactcccatgatacctttgccaccaccagcactaactgcatcaagtggaacttcatatatcatcccgtcaatttccgtggtatgtttattctatgatttaccgtgaaatccatgcgagtttaatgtgatttatcacaaagttgtttccgtccaacctgggcagccgacgaatcaaccgcggaatgtaactgttgtcgttgaaaacccaatgacagtagatgacaagggaaaattggtgagcaatgttgtagtaggggttacgagcggcgggaaaaagtgacggcatatcacaacccgtatagctttgtccaaactatctaaaaagggtttaagaatacataccttgtatcatactgctgtttggcgatcggctgctcgacggaggaatccccctccctggagagcgtagtggcaaggcagcgctgctttcgccactgcgatcgtgctagaacgagccaaaaaaaaaaacgaagtgcgggtgtgcatactcagagtatatctgtagcttgttaccccttgattcttttgtatgtaatatgggctctgcctgactttcactgtgtgatcaaatttccaagcccgtgggcgctgttgctgcgtgccttgttattagtgaataacaaacattgcaaatggctcttgaaatacagtgtgtgtgtgttttaatctctctgcatttatgttaatcagcaggtgccaccatttgctgttccagactgataatgcagagtttgtatccacgttctttggagaaaacatttgaggctcatacgctgtttcatgtcccatgtgtatattttctctattttcatgctgcttgcacgaatgtgtt

SEQ ID NO: 208676 - DNA, 1004 bp, Zea Mays
cttgttgacgctggacttaggacacagcaatggagatggctcgacttatatgtggtggctgccagacattattgatgtatgctcgcagtgcaacaactgtaagatgctcatgttgtgacacagtcaatcttgtcagaccagtgagtagcatagctcatgtgaactgtggccagtgccaaacagtgttgatgtatccatacggagcaccgtctgtcaaatgtgctgtttgcaacttcattacaaatgttggcggggtgactcccatgatacctttgccaccaccagcactaactgcatcaagtggaacttcatatatcatcccgtcaatttccgtgccgacgaatcaaccgcggaatgtaactgttgtcgttgaaaacccaatgacagtagatgacaagggaaaattggtgagcaatgttgtagtaggggttacgagcggcgggaaaaagtgacggcatatcacaacccgtatagctttgtccaaactatctaaaaagggtttaagaatacataccttgtatcatactgctgtttggcgatcggctgctcgacggaggaatccccctccctggagagcgtagtggcaaggcagcgctgctttcgccactgcgatcgtgctagaacgagccaaaaaaaaaaacgaagtgcgggtgtgcatactcagagtatatctgtagcttgttaccccttgattcttttgtatgtaatatgggctctgcctgactttcactgtgtgatcaaatttccaagcccgtgggcgctgttgctgcgtgccttgttattagtgaataacaaacattgcaaatggctcttgaaatacagtgtgtgtgtgttttaatctctctgcatttatgttaatcagcaggtgccaccatttgctgttccagactgataatgcagagtttgtatccacgttctttggagaaaacatttgaggctcatacgctgtttcatgtcccatgtgtatattttctctattttcatgctgcttgcacgaatgtgtt

SEQ ID NO: 208677 - DNA, 1447 bp, Zea Mays
ctaaaattcagcttgaatttgatccgcatacttgtacctggtctattgtcaggacttatggaaaatcaccggtttctcgcggaggtcagacagtgactcttgttggaacaacactagttttgttcggtggtgaagatgcaaaacggtgcctcttgaatgacttgcacattcttgatcttgaaaccatgacatgggatgatgtggatgcaataggcacccctcctccgagatcggatcatgctgctgcttgccatgctgaccgctatcttttgatttttggtgggggatctcatgcgacatgtttcaacgacctacatgtccttgatttgcagacgatggagtggtcaagacccaaacaacaaggcctgacgccaagcccaagagctggccatgctggtgcaactgtcggggagaactggtacatagttgggggtggcaataataaaagtggtgtctctgatactcttgttcttaacatgtcaactctgacatggtcagtggttagcactgcggaaggacgagttccccttgccagtgagggcatgactctagtgcatagcaattacaatggatacgattatctcatctcatttggaggatacaatggacgatacagcaatgaggtttatacacttagcctcaaatcagattttaagtccaccacaaaagaagaaactgtctcagatctagggtcgtcgaaccagaggttgaaatggtgattggcgtggacagtgctgattcagacctgaagaacagtagtacagtactgatgaagcaagtgaacagttcttagcagctctcaaagctgagaaagaggaactagaagcgacacttaacagggaacagctgcaaactgtacaacttaaagaatacattgctcaagcagaatccagaaatgtggaactcacaaaggaacttcaagccgtccgtggccaacttgctgctgagcagtcaagatgtttcaaacttgaggtcgatgttgcggaactacgacagaagcttcaaagtatggatgcattggaaaaggaggtcgagctgcttcgacgacacagagccgcgtcagagcaagcagcgctggacgcaaagcagcggcaaagttctgggggcatgtggagctggctcgttggtacccctcctgatgataaatctgaatcgtgatcgcgtcgtgagggcagcactttagttcatacaggccgtgattcatatattatacttgtaacatttatatacccgttgatattttttttacagttactgaattcgtgttcattttgaccacagaagataaggaaatcattagttttatgccttgttttggcgtattgcaatcactcaaatgtatcaggaagtttcaacattatttcttgaaaagctagatttcaacattgtcatcatgtattggtcctccttttgacgacatggttcaatatatgttattcgtttgaga

SEQ ID NO: 208678 - DNA, 2338 bp, Zea Mays
caatcctgaaaaaaacttgaatcagcacgcggactatccgcgccactgaccgtgcgcgaggaccttgtgtgttcaacagttaacaccctgcactctgcaaatttccatttccacgcgacgacgacgaagaggaggtgggattcggaggagtaaatcctaacagccgtctcgcgccggtggtccggtgcccgcgcgagatcggggggggggggggggggggggggggggcgacatctagggcgcggtgccggccatggcgagctctggactcgcctaccccgaccgcttctacgccgccgcagcctacgcggggttcggcgctggtggggccacctcctcctctacggcctgcacagcaggccacagttggtccgtgcaatgtgcccaagccaagggcgtggaaccccgtggagcagagcaaatgggccagttggcacggacttggaagcatgccatcggctgaggcgatgcgtctttttgtcaaaatcttggaggaggaagatcctggatggtactcaagggttcctgagttcaactctgagcccattgtagatattcaaatgcataaaccaaaagaagagccacagattgtaccggcttcaacgaatggaacatcaatttcagaaccaaaaatcatttctgaaaatggaagttctgtggaaacacaggacatagatgttattttggaaggccttagtactgttagttctcttgacgaatggacaccattagctatcagtggccatcgtccgaagcctcgttatgagcatggagcaactgtgttgcaggataagatgtatatatttggcggaaaccataacgggtgttaccttagtgacctccaggctttggatctgaagaatttgacttggtcaaagattgatgccaaattggaagcagaatcttctgattcagcaaaaacctcacaaattgctccttgtgctggccattcattgtttttctccattgctgggcataccaaagatccatctgaaggtgttacaggtttgctaaaattcagcttttaaggaatttgatccgcatacttgtacctggtctattgtcaggacttatggaaaatcaccggtttctcgcggaggtcagacagtgactcttgttggaacaacactagttttgttcggtggtgaagatgcaaaacggtgcctcttgaatgacttgcacattcttgatcttgaaaccatgacatgggatgatgtggatgcaatatggagtggtcaagacccaaacaacaaggcctgacgccaagcccaagagctggccatgctggtgcaactgtcggggagaactggtacatagttgggggtggcaataataaaagtggtgtctctgatactcttgttcttaacatgtcaactctgacatggtcagtggttagcactgcggaaggacgagttccccttgccagtgagggcatgactctagtgcatagcaattacaatggatacgattatctcatctcatttggaggatacaatggacgatacagcaatgaggtttatacacttagcctcaaatcagattttaagtccaccacaaaagaagaaactgtctcagatctagggtcgtcgaaccagaggttgaaatggtgattggcgtggacagtgctgattcagacctgaagaacagtagtacagtactgatgaagcaagtgaacagttcttagcagctctcaaagctgagaaagaggaactagaagcgacacttaacagggaacagctgcaaactgtacaacttaaagaatacattgctcaagcagaatccagaaatgtggaactcacaaaggaacttcaagccgtccgtggccaacttgctgctgagcagtcaagatgtttcaaacttgaggtcgatgttgcggaactacgacagaagcttcaaagtatggatgcattggaaaaggaggtcgagctgcttcgacgacacagagccgcgtcagagcaagcagcgctggacgcaaagcagcggcaaagttctgggggcatgtggagctggctcgttggtacccctcctgatgataaatctgaatcgtgatcgcgtcgtgagggcagcactttagttcatacaggccgtgattcatatattatacttgtaacatttatatacccgttgatattttttttacagttactgaattcgtgttcattttgaccacagaagataaggaaatcattagttttatgccttgttttggcgtattgcaatcactcaaatgtatcaggaagtttcaacattatttcttgaaaagctagatttcaacattgtcatcatgtattggtcctccttttgacgacatggttcaatatatgttattcgtttgaga

SEQ ID NO: 208679 - DNA, 2462 bp, Zea Mays
caatcctgaaaaaaacttgaatcagcacgcggactatccgcgccactgaccgtgcgcgaggaccttgtgtgttcaacagttaacaccctgcactctgcaaatttccatttccacgcgacgacgacgaagaggaggtgggattcggaggagtaaatcctaacagccgtctcgcgccggtggtccggtgcccgcgcgagatcggggggggggggggggggggggggggggcgacatctagggcgcggtgccggccatggcgagctctggactcgcctaccccgaccgcttctacgccgccgcagcctacgcggggttcggcgctggtggggccacctcctcctctacggcctgcacagcaggccacagttggtccgtgcaatgtgcccaagccaagggcgtggaaccccgtggagcagagcaaatgggccagttggcacggacttggaagcatgccatcggctgaggcgatgcgtctttttgtcaaaatcttggaggaggaagatcctggatggtactcaagggttcctgagttcaactctgagcccattgtagatattcaaatgcataaaccaaaagaagagccacagattgtaccggcttcaacgaatggaacatcaatttcagaaccaaaaatcatttctgaaaatggaagttctgtggaaacacaggacatagatgttattttggaaggccttagtactgttagttctcttgacgaatggacaccattagctatcagtggccatcgtccgaagcctcgttatgagcatggagcaactgtgttgcaggataagatgtatatatttggcggaaaccataacgggtgttaccttagtgacctccaggctttggatctgaagaatttgacttggtcaaagattgatgccaaattggaagcagaatcttctgattcagcaaaaacctcacaaattgctccttgtgctggccattcattgtttttctccattgctgggcataccaaagatccatctgaaggtgttacaggtttgctaaaattcagcttttaaggaatttgatccgcatacttgtacctggtctattgtcaggacttatggaaaatcaccggtttctcgcggaggtcagacagtgactcttgttggaacaacactagttttgttcggtggtgaagatgcaaaacggtgcctcttgaatgacttgcacattcttgatcttgaaaccatgacatgggatgatgtggatgcaataggcacccctcctccgagatcggatcatgctgctgcttgccatgctgaccgctatcttttgatttttggtgggggatctcatgcgacatgtttcaacgacctacatgtccttgatttgcagacgatggagtggtcaagacccaaacaacaaggcctgacgccaagcccaagagctggccatgctggtgcaactgtcggggagaactggtacatagttgggggtggcaataataaaagtggtgtctctgatactcttgttcttaacatgtcaactctgacatggtcagtggttagcactgcggaaggacgagttccccttgccagtgagggcatgactctagtgcatagcaattacaatggatacgattatctcatctcatttggaggatacaatggacgatacagcaatgaggtttatacacttagcctcaaatcagattttaagtccaccacaaaagaagaaactgtctcagatctagggtcgtcgaaccagaggttgaaatggtgattggcgtggacagtgctgattcagacctgaagaacagtagtacagtactgatgaagcaagtgaacagttcttagcagctctcaaagctgagaaagaggaactagaagcgacacttaacagggaacagctgcaaactgtacaacttaaagaatacattgctcaagcagaatccagaaatgtggaactcacaaaggaacttcaagccgtccgtggccaacttgctgctgagcagtcaagatgtttcaaacttgaggtcgatgttgcggaactacgacagaagcttcaaagtatggatgcattggaaaaggaggtcgagctgcttcgacgacacagagccgcgtcagagcaagcagcgctggacgcaaagcagcggcaaagttctgggggcatgtggagctggctcgttggtacccctcctgatgataaatctgaatcgtgatcgcgtcgtgagggcagcactttagttcatacaggccgtgattcatatattatacttgtaacatttatatacccgttgatattttttttacagttactgaattcgtgttcattttgaccacagaagataaggaaatcattagttttatgccttgttttggcgtattgcaatcactcaaatgtatcaggaagtttcaacattatttcttgaaaagctagatttcaacattgtcatcatgtattggtcctccttttgacgacatggttcaatatatgttattcgtttgaga

SEQ ID NO: 208680 - DNA, 2250 bp, Zea Mays
ggcgtctgcctagggtgggccctcacatgcagttttggctgcgatgcgagagagcccatgccatgccgctgtactctgtaccaccgccctctctccctccctatgcagccagtcactgcagctgtgtttagtgcctgggaagccagatattattgcagcctccggtcctcccttcccttccctcctcgtctccccctctggttgatttgagagctcgggcaccagatctgaagccctcttgttctgtggttgtgtgcctttcggctggtgtagcattgagaggaggcgctgttccagttccagttccaggatgagcaaggaggatgtgctcaagactttgatgctgagagtgaacatacactgtgacgggtgcgagaagaaggtcaagaagaccctccacaagatcgacgagcagcatcgacgcggaacaggggaaggtgacggtgtccggcctgctggatccggacaccatcatcaggaagctcaacaaggccggcaagccggcccagctgtggggctccaagcccggcgtccctcagaacggccatggcggcggcaagggccagcctaaggacgccggcggtggcaagggccattccaaggatgccggcggtggcaaggcccagaagggcggtgcgggtggcggcggtcacaagggtgccggtggtgccggtggcgggggtggtggggccaaggatcctaagatggtgatgccgcagccgacgccgcagcagctccagcagctgcagcagcagttgcagatgaaggggctgaagctcccgccgcacctcctgggcggcaacatgccggcgttccccgcggccgcgccgttgaaggaccaccccaagtccgtcaagttcgccctccccgaggacagcttcgacgacgacggtggcagcgagttcgacgatgacttcgacgacgacgacttcgatgacgacgaggactacgacgacgagggcttcgacgacgacgtctacgacgagcccaagatgatgaagcccatggccgtgccgccgccgtccggcgggggcgacaagaagggcggtggtggcaagaagggtggcggcgggaacgagatcccggtgcagatcaagggaaacaaccacggcggcgggcaaccgcacaacgcaaagggaggccccccgggcggcgggaacccgctggcccaggggaagaaaggcggtggcggtggtggcgccgtcggtgggccgatgggcggcatgctgccacagcaggccatgatgaggcccaacatgctgggtggcgctggtgccggcttccccggtacggcccagatgggcggcggacctatgggcatgccgatgggccacccgcacatgggtatcatgcagcagggcgggggcggcggcggcggcgtgccgggcctgggattctaccagggaaatgccaacggcggcggcggcggcggcatgcattctggcgcggagatgcttcaggccgccgcggcgtccgggaaccccatggcgcagcagcagtacatggccttgctgcagcatcagcagcagcagcatcagcagcagatgatgctgcaacacgggaacggcggaggagcagggtacccggcaatgggctacggctatggccggccaccgatgatgcattacccaatgcccccgcactcgcatcccgagccatacaacatcttcagcgacgagaaccccaacagcacctgctcactcatgtgatcagcatatcgtctcttgctgccctgttccaagtaaaacatctgaaggagctcaataccgctggccgccggcggacgtccgccatggttgaagcgccgtccgtgaatcaatcataaatcagtgtgcttggttggggggatgatcgtagctagaatttgccccttttcctcctcccgtttcacctttttctctacgcttattttcgccttcctttcagaaaaaaaggaacttccttgaatgcgaagtttggtatagtaattatgaatagtttccataagggaggagatggtgggggccttcttcatagccaacccacccaatagggggtgggtgggtggttcgcttgcgtcttcttccattctactagcttcataaaaggtggactgatggaagagcaaagttgtcaatctcagtaaaatcagtgtgcatatgtcgtggttccttttctgaccatatataatatatatatgtaatggtaataagttctgtttacggtagtcggctaatttctttagcacacaaattttctgttggatactgg

SEQ ID NO: 208681 - DNA, 799 bp, Zea Mays
ctattatgtatcctttgaaataagataggctctcgttcagtcatgcattgaaaatgttggagaattacttcgaacaaattttggcaaagaagtattgtatgagatggctgttggtggtaaagacaacgttctggatggcctcaccgataggatccacatgttgcacgatgcaatagcgtctgatgcggcccaaccgaagactgaagatacggaacatgcatttgaaaacttcttttccagccgtgtaatcagaagaatggtaatcgattgcccagcgtttgcagtcactctctggagaaaggctcttcaggggaagtgcaagatatgggctgaaggacacagttcgaaggtggttgcgagtttcctggagtcgccaagtacggaggtcaaggatcttgcaaaacctgagttgcagccgctggttgatgctggcatccttaaagtgccagaccctaaggttgttcaaaaatgactcgtgcgcgggggcctttttgcgccagtaaatgactcgaggaccatcccttgtttaagggatacggataggttttttgaagctcgttctgccgataaaaattgttaaatcactcgttcgtgtgtacgccagtccgttgtacacataccctggatatatggtgaatcggatacgttattttgttttaaactcggaatgctcctttttatctataaatttttttaggagatttgtgttcttgtcctgctttggaaggccaaaaattattttactcttgtttttttttaaaaaaatccgaggttcttgtaagctcactaaacgttgaag

SEQ ID NO: 208682 - DNA, 1717 bp, Zea Mays
ctcatgtgtgtagagaactgccaaatcgttgattatgcatttcagcgaggaacacaacgtcagaaaaggcaattgttagttgaactgtactcccctgaacttcagctattcaaggatctgactgtgcaaagttcctcctgatacaatttccaagcttgggttgcagatatcatctgtcctgcttcatatgactattgtgattgataaaatcttggagaaaggtactgttgagtacttaatagtgcacacggccatattggagtactttacaattgcagataagacctcagcctcggatgctatttgtcaacttatcccccttcttactcaaggggcattaatcatagatggagatgaacctacaaacgctccagaactaccaaagaaagcaaaagctaagaagaaaaggtcgaaagagccacttattgttcggatcatgcagacaagggaaggattaaaactaggaattagttgcgtcaagtatggcagtgcaaaggacaggaagaagattattaaaagtttgaagggccacattatgaagcttgctctaagtgattttggatgtctttttcttatctgcattatttctattgttgatgacacaaagcttgttaataagattgtcattcaagagctggtaaaacatttaaagcagctcatttttgacaagaatgggagacggccattgctgcaactacttcaccctttttgctcacgctatctttctccgaatgatctagcttgtctgaactacaatgtgccttctcttagttcaacagaggttgagacatcagagagtgctataggagttataacagaaaataaattagatgatgtgactgctcaagatcccaatggcttagaaggcaagcaaattgtgtttgagagcaagaaggatccattacaaaggcgacatgaactgttgataaaaagtgagcttgccgaggctctcgttcagtcatgcattgaaaatgttggagaattacttcgaacaaattttggcaaagaagtattgtatgagatggctgttggtggtaaagacaacgttctggatggcctcaccgataggatccacatgttgcacgatgcaatagcgtctgatgcggcccaaccgaagactgaagatacggaacatgcatttgaaaacttcttttccagccgtgtaatcagaagaatggtaatcgattgcccagcgtttgcagtcactctctggagaaaggctcttcaggggaagtgcaagatatgggctgaaggacacagttcgaaggtggttgcgagtttcctggagtcgccaagtacggaggtcaaggatcttgcaaaacctgagttgcagccgctggttgatgctggcatccttaaagtgccagaccctaaggttgttcaaaaatgactcgtgcgcgggggcctttttgcgccagtaaatgactcgaggaccatcccttgtttaagggatacggataggttttttgaagctcgttctgccgataaaaattgttaaatcactcgttcgtgtgtacgccagtccgttgtacacataccctggatatatggtgaatcggatacgttattttgttttaaactcggaatgctcctttttatctataaatttttttaggagatttgtgttcttgtcctgctttggaaggccaaaaattattttactcttgtttttttttaaaaaaatccgaggttcttgtaagctcactaaacgttgaag

SEQ ID NO: 208683 - DNA, 2629 bp, Zea Mays
gatagggcatgtcgggtctggtgggaaaccctttcatcgtcctcctgcgtcgccagagcggagcaacgaggggcgcgcgcgatggcaggcggcggtctccagggagcgaagaagcgcaagcgcgagcacgcggaagggaaggcaaagcctcggaagcaagtcaagggaggcggggacggagcgaagcggaagagccactcggccgccggcggctacacggcccatggcggcgccggcgaagttgtcgcgaggaagaagaccccggttacccccaaggagaagcgcctcgcggccaaggaaatgtcggaggccaggaagatgaagaggaggcagcattacagccttgagaaggaactaacgaaattgtgggaaaagatgagatgtcacgatgtgagcaaagaggagaggtccaaggcagtaagtcaggctatccataaaatggatgggaaatatttggacattgccacatcacatgttactgcacgtgttcttcaaacatgtgtaaagtggtgctcggagtcagagagggatgctatctttgatgttctacagccacatttgcttaccctttcttgcaagaaatatgccgtttttcttgtaaagaagcttatagaactcgcctctaaaaaacagtttgccagtttcatatcttcccttcatggtcgtgttgccaaccttcttcatcatactattggagctgcagtcgttgattatgcatttcagcgaggaacacaacgtcagaaaaggcaattgttagttgaactgtactcccctgaacttcagctattcaaggatctgactgtgcaaagttcctcctgatacaatttccaagcttgggttgcagatatcatctgtcctgcttcatatgactattgtgattgataaaatcttggagaaaggtactgttgagtacttaatagtgcacacggccatattggagtactttacaattgcagataagacctcagcctcggatgctatttgtcaacttatcccccttcttactcaaggggcattaatcatagatggagatgaacctacaaacgctccagaactaccaaagaaagcaaaagctaagaagaaaaggtcgaaagagccacttattgttcggatcatgcagacaagggaaggattaaaactaggaattagttgcgtcaagtatggcagtgcaaaggtatatctgcacaagttattatattttaacttcaggtcaaacacgttctccgctactatccactggtgttttattcagtgttgctttagttttgtaaattttgtggtgcttgtatatctttgcaaattgaattatgcactacaccgtaccgagtagtccttattgtgaatttattttctactgcatgtactgtcttcattaacaagactaagtgggcgcgagaatgtatttcaggacaggaagaagattattaaaagtttgaagggccacattatgaagcttgctctaagtgattttggatgtctttttcttatctgcattatttctattgttgatgacacaaagcttgttaataagattgtcattcaagagctggtaaaacatttaaagcagctcatttttgacaagaatgggagacggccattgctgcaactacttcaccctttttgctcacgctatctttctccgaatgatctagcttgtctgaactacaatgtgccttctcttagttcaacagaggttgagacatcagagagtgctataggagttataacagaaaataaattagatgatgtgactgctcaagatcccaatggcttagaaggcaagcaaattgtgtttgagagcaagaaggatccattacaaaggcgacatgaactgttgataaaaagtgagcttgccgaggctctcgttcagtcatgcattgaaaatgttggagaattacttcgaacaaattttggcaaagaagtattgtatgagatggctgttggtggtaaagacaacgttctggatggcctcaccgataggatccacatgttgcacgatgcaatagcgtctgatgcggcccaaccgaagactgaagatacggaacatgcatttgaaaacttcttttccagccgtgtaatcagaagaatggtaatcgattgcccagcgtttgcagtcactctctggagaaaggctcttcaggggaagtgcaagatatgggctgaaggacacagttcgaaggtggttgcgagtttcctggagtcgccaagtacggaggtcaaggatcttgcaaaacctgagttgcagccgctggttgatgctggcatccttaaagtgccagaccctaaggttgttcaaaaatgactcgtgcgcgggggcctttttgcgccagtaaatgactcgaggaccatcccttgtttaagggatacggataggttttttgaagctcgttctgccgataaaaattgttaaatcactcgttcgtgtgtacgccagtccgttgtacacataccctggatatatggtgaatcggatacgttattttgttttaaactcggaatgctcctttttatctataaatttttttaggagatttgtgttcttgtcctgctttggaaggccaaaaattattttactcttgtttttttttaaaaaaatccgaggttcttgtaagctcactaaacgttgaag

SEQ ID NO: 208684 - DNA, 2357 bp, Zea Mays
cataaaccctagatagggcatgtcgggtctggtgggaaaccctttcatcgtcctcctgcgtcgccagagcggagcaacgaggggcgcgcgcgatggcaggcggcggtctccagggagcgaagaagcgcaagcgcgagcacgcggaagggaaggcaaagcctcggaagcaagtcaagggaggcggggacggagcgaagcggaagagccactcggccgccggcggctacacggcccatggcggcgccggcgaagttgtcgcgaggaagaagaccccggttacccccaaggagaagcgcctcgcggccaaggaaatgtcggaggccaggaagatgaagaggaggcagcattacagccttgagaaggaactaacgaaattgtgggaaaagatgagatgtcacgatgtgagcaaagaggagaggtccaaggcagtaagtcaggctatccataaaatggatgggaaatatttggacattgccacatcacatgttactgcacgtgttcttcaaacatgtgtaaagtggtgctcggagtcagagagggatgctatctttgatgttctacagccacatttgcttaccctttcttgcaagaaatatgccgtttttcttgtaaagaagcttatagaactcgcctctaaaaaacagtttgccagtttcatatcttcccttcatggtcgtgttgccaaccttcttcatcatactattggagctgcagtcgttgattatgcatttcagcgaggaacacaacgtcagaaaaggcaattgttagttgaactgtactcccctgaacttcagctattcaaggatctgactgtgcaaagttcctcctgatacaatttccaagcttgggttgcagatatcatctgtcctgcttcatatgactattgtgattgataaaatcttggagaaaggtactgttgagtacttaatagtgcacacggccatattggagtactttacaattgcagataaggggcattaatcatagatggagatgaacctacaaacgctccagaactaccaaagaaagcaaaagctaagaagaaaaggtcgaaagagccacttattgttcggatcatgcagacaagggaaggattaaaactaggaattagttgcgtcaagtatggcagtgcaaaggacaggaagaagattattaaaagtttgaagggccacattatgaagcttgctctaagtgattttggatgtctttttcttatctgcattatttctattgttgatgacacaaagcttgttaataagattgtcattcaagagctggtaaaacatttaaagcagctcatttttgacaagaatgggagacggccattgctgcaactacttcaccctttttgctcacgctatctttctccgaatgatctagcttgtctgaactacaatgtgccttctcttagttcaacagaggttgagacatcagagagtgctataggagttataacagaaaataaattagatgatgtgactgctcaagatcccaatggcttagaaggcaagcaaattgtgtttgagagcaagaaggatccattacaaaggcgacatgaactgttgataaaaagtgagcttgccgaggctctcgttcagtcatgcattgaaaatgttggagaattacttcgaacaaattttggcaaagaagtattgtatgagatggctgttggtggtaaagacaacgttctggatggcctcaccgataggatccacatgttgcacgatgcaatagcgtctgatgcggcccaaccgaagactgaagatacggaacatgcatttgaaaacttcttttccagccgtgtaatcagaagaatggtaatcgattgcccagcgtttgcagtcactctctggagaaaggctcttcaggggaagtgcaagatatgggctgaaggacacagttcgaaggtggttgcgagtttcctggagtcgccaagtacggaggtcaaggatcttgcaaaacctgagttgcagccgctggttgatgctggcatccttaaagtgccagaccctaaggttgttcaaaaatgactcgtgcgcgggggcctttttgcgccagtaaatgactcgaggaccatcccttgtttaagggatacggataggttttttgaagctcgttctgccgataaaaattgttaaatcactcgttcgtgtgtacgccagtccgttgtacacataccctggatatatggtgaatcggatacgttattttgttttaaactcggaatgctcctttttatctataaatttttttaggagatttgtgttcttgtcctgctttggaaggccaaaaattattttactcttgtttttttttaaaaaaatccgaggttcttgtaagctcactaaacgttgaag

SEQ ID NO: 208685 - DNA, 2129 bp, Zea Mays
gtctctccatccttttagttccttgcttcgtctctactcccaaacccaaacctgattaatgcctcgcctccattccgtactctcctgctgaagcttttttctctgaaactagtatatcccccatctgtttggtcccgacgattttccgctttgggagcaccaccaagctcttccagcttgcagggctggagtctttgccagggacagcaatggtgccgacgcatggcgatacagccggaccgagctccagccaggatgacccggcagccagcgtgaagaagcgcaacagcaacaggcctcagtgtaatcgaatctctcctctgataaagaagcagaattctgttaattatttctttatttctccagcctggtttttagtgaatttgagggctggggcttttgcaccataatcagaattcgatgtgcttcgaaccagaacaaaaagaaaaaaaaaactctctctttccaagattaggcgatggtgaattcatgaagttttttttttaaaaaatgaggcgattcataaagccgaagtaacctaaactaatttatacgatgctgttatctttgtggtttaaatttgaaacaaggagtggttgttatgtatatgatgactgtattgtgttgactttgaagatcatccgtttactcagcaacagcttccagcttgcaagcctatacttgcgcctcagacggtcatccctgtactcctgtttgtgggcgtagtttttatcgtgattggccttggctgcattgcagcctcaaacagggtggttgaagtggtctatgagtatgagacttcatgcataccaagacacatgcttggcaacaaagtcgcctatatccaaaacccatctatagataagacatgcacatggattctcaaggttcctagggatatgaagcacccaatctacgtatattaccagcttgacaagttctaccagaaccacaggaggtacgtgaagagccgcagcgacaagcagctgagagatcccaaggaggccaacagcacgcagcagtactgcaagcccgaagctaccaccgagcacgggagcgccgtcgtcccctgcgggctcgtggcctggagcctgttcaacgacacctacagcttcgcccggggcaacaacagggcgctgagggtccacaagcgaggcatctcgtggaggagcgagagggaacacatcttcgggaagcaggtgttcccgaggaatttccagaaaggagctctgatcggaggaggcacgcttgatccaagaatacctctgagtgagcaagaagacctgatcgtgtggatgcggaccgcggctctgccgacgttccggaagctgtacggcaggatcgaggcggacctccgcgccggcgagctggtcacggtgacgacgcagaataactacaacacctacagcttcggcgggaagaaggcgctggtgctgtccacggccggcgtgctgggaggcaggaacggcttcctcggccgcgggtacgccgtcgtcggcctggcctgcctgctgctggcgctgctcctcaccatgctctgcctcgtcttcccactgaaagaggaacaccttgcgctgcagtaccctttgctccggcctgccacggtgaccatgcatgcctagctagatcagtagacggtgtacagattgaaacagtttcttctttttcatttttgatgtatactcagattgaaacagtttgttctttttcttcttggatgtatacttggggtctgatcggtgatttcttgcgcacaggaacagctataggtcgagctgcgacatgtaaatagacactcaaagatttgagttgtacttgtacatttctactagggtctaggggttacagagtttaaaattggaatatgacagtggatacgagggtaacccccaatgtaatcgccaagtgatttggtagtagagcaccgcagtgtgtctaaaaatgaggattgaagtttctctgtcgatactgagcaccgttaccagccagccactacgcagctctgtttggatatcagttatattatttaggtgtcactgaattgtagtttagaattgtacggtctattttcacataatacagaggagtgagctctctattgagagagagagtttctagttataattcac

SEQ ID NO: 208686 - DNA, 3081 bp, Zea Mays
gtacggcccgtaactcctttcccctatccaaggcaacgaatcagctgcacgaccgccgaatcgccttgccatgacaaccgcagcggcagtggagccggcgccgctcgtgcgggcccgcgcgtgcgcggcctccgcttccttcccgcccccgcgccgtcgaagagctgctggagctatcagggcatctcccgtaccaggccggacggaagccgccgccgagctccccgccccgctccagccaaacgcgcggcggcggggacgcgacccgctctggcacggcggcgggttcagcctcggcgtcgacctcggtgacgcccgcaccggcctcgccatcgggagggggatcaccttccctcgacccctcactgttctgaggctccgcgggcagaagctagagcttgcgctgctcgacgtggctcggcagcaggaggcggacgagctcatcatcgggcttcccgtgtccgctgatgggtcggagacaccgcagtccaacaaagtgcggagcgtcgtcgggaggctcgccgtccaagctgcccaaaggggcttgagggtttatctgcaggatgaatatggaacgtccacggacgccctagattacatgatctccaggggtgtcaagaagtctgctcgtgacaccaaatctgatgcatatgctgctgtgatgattttgaagagatatttcacgtcttcaggtcgaggggctaagattgttctccccaggcaaccagagttacaggacaagctaatggttcagtctagacaagatgctgaagtttagagaggcatgtcttctattttctccatagtagagaacatgtccagttgagggcacctcattttctataccatgtcatccgctgtgatgtagatgattgtttgagatattgtaattgtactgcatcaaaaacacaagctgtttttaaacctggtcctgtttgcaaattgagtatcatcccaaaacaaaactcagtaacatattcattgttgcatttcatgattttttcccctgggtatcctacctagattacttctttctgaactctagtgtaacttagctctgttaagcaaatctgtgacatattttaccttatatagcactttatcagatcatgtatttacatagtttacatcatggagagtgcaaaaaagaatttgctcaaaaatagtctggacagtccaagtgggcatgaaataaggcaatgtttatacattactatgagtacacaatggaatgcctgagcaaaaaccaccagcatcaatcgagaattaactgatccggatcatctgttcatatggtgatgaagcatcccaaatctgtgcgtaaaagaatcagtacagcttgctgaattcagtctcctgtgctggttcaccaatccgggggaagaatgaatccctctcaagcatcgtctgcagtgagtccatcatcctcaccatggatgcccacaagattggcgcagagcaaaatgcatatccaaagaccgccagagccctcacaacaccatcatggtaccatgggaatgccataacgatgagcatgcccacaattgcaagccacgttgtaagcacatcaagtggcgggagcagaaaaacattgataacgagcactgacaaggcaagcgcgccaaataggtagacggaccagcccatgatcgggtggactgtgcgtgggaccacaaagaatggaatggaatatgcagccaccatagccgcaattgcagccagcttgatcagccactgcaccagggcactttgcttctcaggccgtcggttatagcacagtttggtgatccctggccttgccaatctggtgactgctatgataactatgtacatcaaaagctccatcagaatcactggcatttcagcagcatacctgtgaaatgtaagcaggtaattgtttagtggatagaacataaaatgaattttctgtcggctcaggtacacatatttgcttctgtgctgttttattgactcacccaagatcgtcccagcgctgcttgtgccaggaaagacctaatggcaagaccggccaggaccaccagtaccaaggtttaaaccaaggtgcgctggggaatgtgatgacactgtttggcccacaggggacatgccaatgtagcttgagatctgcagtgttaaatcaaaagggtggttgaaattttcagaagcaatagctgcaggcaggtgcattggtattgaagctgtgtagctgcagcactcacagtagtatgacgcatccatttgatagccaagaggaaggcgataggtcccattgagctttgtgccattctcaggagggtgaaacattggtttgtcgagcaagtctgggtagcacccaaccaaaaagccttggtcagcaccatcagagttttcacggccagtctccaggtcatgaagcatgcttctgaatacatcaatagaaggctgcagattgaagaagagtccaatattagtctggttggccattacatgtctgagcacaacatatctcagtgtgtgagtttaacaagaatcaagttatggatggtgggaattttcttttcaatggatcattcatactggaagaagacgtatacttcagctttgggggtcacaagtggaacaacgaaagttcagtacatacctggagcacgaaaagaccggtgtggaagtagcacgggttgatgaaaacagcacagaactgtccacattggaatagctcgtctgtgttctggaggaagatgttatcggaatcaatcatgacgacacgctcgtagtccaccagggtccaggcataaagcttgttcagtgtcagcttgaacctcttgttggtccctcctaggttgctctcgtaaggattcctgaggttctccactatcaacaccctcatgccatcctcttctgtcctgcatacgtccccttgtattgtcaataggtgtctcgtttcatttcgcattttgcattcaaaattcctagttcgttgaaacaagtcttcgtacgaaagtaaaacaagtaagaaaaaaaatgtcccgttgacccttgtgaaacgatgaagccatgtcttgggggacattcaccgatcgctattaatcgtttgggactgac

SEQ ID NO: 208687 - DNA, 2451 bp, Zea Mays
gtttttcatcgcccaaaccctagcggcgacaatgaccgaggtggctggcgacagggacaaggaggtccccactagagcggacgagcaccatggtgtgtgacgccggctgcttgacggggtcgctagccctcctactcgccgcggcgggcaccgacatcctagcctctgtcgtcttggcgtccatggtgtcggaggcgcaacggtagttggtgctgacggtggcgtgaagccatcctccgtgcctcgatcctcctcctggtggcattgtcctttgtcgtggctgctgctccctctgcctccaataagcagtgcgacgatgaggatgcgagcaggcgcacgacagaattagctcctctcgccgtcgtcggttcgtctattcagtgcatgttgctggcctgctcctgcaccacgacgtcatgcagctccgcctccgagaagtaatgcgacaatgaggatatgagtacgcgatgggagctggacgctccctctcctggctaacctttctgtttttttatttgttgtgcataggaaaggttgtcttcccgaactcaaaatccaaatggattcgatttcacattcaacagaatgtttaccattgccattaagatgggtttgcagtttcctgttagacaaactgatattgatgggatacttggtctccgagagaacgaattgtaatgatctgttaatgggatatcacacaggagaaatcattgcatcccttttatttttcccatcatgatcatatatgttatctttgactcaaatttctaaatccgtgtactaacataatccagacatgctaggtagagatctacggcaatagaatccagacgtaccaactaaaatgttagggacataggttaaaatgattctaaatcagagctcaaataagagtacgaccaacacttcttgcacctgctcaagatgttttccacctcatagtgtcgttacgaaatgtgtgaacaggagattaataaaaatatcccctcttgcatgtgagcctgcaaccaataaaaaaggtgccctgttatatctctgttgttttatatctggtcaatatagatgattctgcctatttattctaataggattgcatctgcatgtcctagattgtttgttagaatacttaattgatactgaaatataaaaagtttctagatcagtacttttttactaatatctcctttctccttttctttgtgttcccttctattgattgtctttttttgttcttttgcttcccttttctttttatgctctattcctagctataggtcctcccttttttattgatgaatgcaaaaggacagattgcattttatgctttttgtcgcctcttcagaatgtacctaatatattatttgcttagctctaatgtgctcttttttatttcatattttggtgcatgatttatgtcagtgtctatttactggacatatgttcatgttcacgcggcgcttcataaaatctgcataggatacatcgcacttctatctgacctactcaggtctggtgttcagcggttgccacacctaggatatcaaatggattacatctccaaaacggaacctttctatgtctgcatgaactcaagttccttggctgatccatatagaacgatgctacctactaccacaacattaccatctaagcaaattgtgttatttgttcatctacgtcgaaaagcacatttgaccattttgggtgctcacacaagattctaaatgaaattcttggagatagagagcgtatccaatctctgtattctgagattcctgggagaaccacaagcaatgccagtacctccagaagaacttctaatttcagtgtggacgcaactggagatgaaagcctttctgttgaagcacacaattgtatactcgacaatactgcgtctattttatccatgaggagctgcgctgacaagctgtggaagagaagaaaaggttcaaaactttaaaatcagaagataaaccagaggaagcaatgcaggctttcaagtatggtaaagaacttgcaaatcaagctgcaacgctggaattacaactgaagagtagtagtagaatggctacacaagcgtctaatgtctcttctgttgttggtacttcgacgacggctggttctgatgaggctagaataaaaaggacttcaactgcgaaaaagaattaagaaagaaaagaatgatcttgcatgggcttagagatataggttggtcatatgcaggcactgttttgctattttatattggcacaaatgtgtaatttggaaaacacatgtcctatgttgtgcttccttgcgtcctctaaaacaatgttatagacttttatgtcttttctgtaatattttttatctaaatcttttttgtaatatttgtatatcacaacaaactgccacatgaattttgcccctcaaatggtcgtttgatctatataactatccaattcaaat

SEQ ID NO: 208688 - DNA, 1819 bp, Zea Mays
gtcatctcataatacggaggtaccgcgcccagctcacccccctcccgcatactccaacgcgcgggtgtttttcatcgcccaaaccctagcggcgacaatgaccgaggtggctggcgacagggacaaggaggtccccactagagcggacgagcaccatggtgtgtgacgccggctgcttgacggggtcgctagccctcctactcgccgcggcgggcaccgacatcctagcctctgtcgtcttggcgtccatggtgtcggaggcgcaacggtagttggtgctgacggtggcgtgaagccatcctccgtgcctcgatcctcctcctggtggcattgtcctttgtcgtggctgctgctccctctgcctccaataagcagtgcgacgatgaggatgcgagcaggcgcacgacagaattagctcctctcgccgtcgtcggttcgtctattcagtgcatgttgctggcctgctcctgcaccacgacgtcatgcagctccgcctccgagaagtaatgcgacaatgaggatatgagtacgcgatgggagctggacgctccctctcctggctaacctttctgtttttttatttgttgtgcataggaaaggttgtcttcccgaactcaaaatccaaatggattcgatttcacattcaacagaatgtttaccattgccattaagatgggtttgcagtttcctgttagacaaactgatattgatgggatacttggtctccgagagaacgaattgtaatgatctgttaatgggatatcacacaggagaaatcattgcatcccttttatttttcccatcatgatcatatatgttatctttgactcaaatttctaaatccgtgtactaacataatccagacatgctaggtagagatctacggcaatagaatccagacgtaccaactaaaatgttagggacataggttaaaatgattctaaatcagagctcaaataagagtacgaccaacacttcttgcacctgctcaagatgttttccacctcatagtgtcgttacgaaatgtgtgaacaggagattaataaaaatatcccctcttgcatgtgagcctgcaaccaataaaaaagattctaaatgaaattcttggagatagagagcgtatccaatctctgtattctgagattcctgggagaaccacaagcaatgccagtacctccagaagaacttctaatttcagtgtggacgcaactggagatgaaagcctttctgttgaagcacacaattgtatactcgacaatactgcgtctattttatccatgaggagctgcgctgacaagctgtggaagagaagaaaaggttcaaaactttaaaatcagaagataaaccagaggaagcaatgcaggctttcaagtatggtaaagaacttgcaaatcaagctgcaacgctggaattacaactgaagagtagtagtagaatggctacacaagcgtctaatgtctcttctgttgttggtacttcgacgacggctggttctgatgaggctagaataaaaaggacttcaactgcgaaaaagaattaagaaagaaaagaatgatcttgcatgggcttagagatataggttggtcatatgcaggcactgttttgctattttatattggcacaaatgtgtaatttggaaaacacatgtcctatgttgtgcttccttgcgtcctctaaaacaatgttatagacttttatgtcttttctgtaatattttttatctaaatcttttttgtaatatttgtatatcacaacaaactgccacatgaattttgcccctcaaatggtcgtttgatctatataactatccaattcaaat

SEQ ID NO: 208689 - DNA, 1261 bp, Zea Mays
tataaaggacacttttacctggcatgagagaaaggtgacttgtacatgtggggaaatgcaagagactgccagctaggcatccctggtctgccagaagttcagccactcccagtcaaggtgattttcctcagagacgatgatgaagggttgggcccttctcgtgtcatctccgttgcaataggagcctcccatgccatgtgcttggtctccacgcaacaaaccgagaagtagggcagtctgggtttctgctttgtgaaggcacttatgtttcggtattcatacgtctgagtcagttcgaagcggaccctgttctcttttgatttgatccagctgttcctgttggtggaaactggaatccctgctcggttaagctgaacacatctggaagaaagaataaaaaaactgccacacgctgatagaaagcaggaaaggccccctgtggctggctccgggtaggcatagctgtagtagattcgaatccttgaatttcatctgtggaagttcttatgagtgtagacattgttcttgctttttctgtagcactgtaatacgagggacgaaactgcgagaagcgcggatgtaagacatgcgcccttgtgcgttctcaccaaagatttgtagattctgtctgtagttgagatggctagaattttgtagcgctaattttattgtgactctgtcaggaggcctggcctgattttagttgctgttcaataaaggcaaccgttggtgttttattccttatcattcgtttgtagaatctcggaggcaaatatcttgagtagttgagccgcgatgtaaactcggcctgggggaaaaaagaagaagagaaaaccatagctgcaagtctgcaagcgtgcagccctgtcccagccaaccaatcgcagattcgatgcttgaatctcactgtacagcgtacactgtgcgtgtgaaaattcaccttcctcaggcagggtgctctcagctctgcccaggctgatttgggtcctcttcgtgcgaatcagatcgccactatgtgggctcgtcagatcgcacgcctgccctgcccaagtgggcaaattcaggggtcaagccttgcgtgcgcaccgccgccatcctccttccaccttcgctgtcagtcaagcgacctccccgagcccgattggatttagcgtcgtccttcagctcccaacacaaccgaattgtagtaggtcctcctattatggctggaagggagttagttggcaaggataagcaagtgcttagtagaggtttggccccc

SEQ ID NO: 208690 - DNA, 2608 bp, Zea Mays
gtaggaataatcttctgtgatacaacaaccatgtagccaccgatcctaatgagtcatgcataatagcagacacaggcaacagtgccccgtgagcacatgcaggatcagcagtacgacctccgactccgagctactgctcaccctctcgggctctcggcccgcccgtatgccagtctgtctctggtacactccttcatttcatcgcctagctagctactatatagtacgacctgcctgccttgctcttgccctgtgagcagcggcgtgcgatcgatcgaggcagtcgtagtaataagccaacaaacaaaccggccggaacgccatgctggaggagtacaaaccgtgtgcggccatggtggtgacgcagtgcatctacgccgctctagcgctcttgtccaaggcggcgttcaccggcggcatgagccccctggtgttcgtcgtctacaggcaggccgtcgccaccattgtactcgtccccgtcgtcatcgcggccaacaggtgcgcgcgcgcgtcgtacgtcgttcgtccgtccctatagctagctctagctgctgctaccttgacaacttcttcttcgatcgcgcgccacacagctgtgtgcctgtgtctcgtcaccctctggttcttagtcgttgtccgtcgaccgtcgtcatatgcatggctctccgtgatgatctgcgtgtgcaggaagaagatgaaggagatgacgacgggccttggactgacgggcttctcgctggtcttcgtcgcctcccttgtcggggcaacggtgaaccagtgcatgtactaccaaggggtgaatctgggctcgtcgtcgatggcaacggccatgaccaacttgatccccgccatcaccttcgtcatggcggcatcagtcgggtgagtgtctactactagtttgacagagaagagacggtcgacccgtttcatcagcgccgcgagcaaaatttagttgagcaccgtgcgttttctctgctgctccaccgtacgccgtctaatatgggcgagttggagatggggtgtcctggaccaacgctgccacctcacctcacctcacccacctgcgcgccttaattcacaagtatctggtgtagaccggaaatcaaacatttacttcagttaacgaagaccaaactcccatgaacaccgaacagattggctatcacatctcggttgctgcaaaatgcagttttaagcaatggcaaaaatggtcagtaggttcaatgcactaccttttcgtgccatgttaaattgttttgagacgtccactagctcccagaatattctcccggagtattctctgttcagattcctccctgaatatgtttctgagttcctcagattcctcctgcaaagaattaaagaaaaccccgtttcaattcgccgctaactgtcgtctgtctgatgcctcccactccgttccatctgacgattccatcaaccgacagcctagagagggtggaggccaggaggccgaggagcctggccaagatcttcggcacggccgtctgcgtgagcggcgccatggccatggctttcttcaagggcccgaagctgctcggcgacggcccgaacgctctccagctcctcctccacgcgggcggcggcggcaggtgggtggccggcgcgctcttcctcgtgggcagcagctcctgctggtcgctctggctcatcctgcaggtgcccatctgcaagtcgtacgtggagccgctggctctgtcggcgtggatgtgcgtcctgtccacgctccagtccgcgctgctcgtctccttcctcctgccggaccccagcgcctggaggatccactcgctcttcgagctctcctgctgcgtcttctcgggcgtgttcgggtccggcgtcacgttctacctgcagtcgtggtgcatctccgtgaggggcccgctctactccgccatgttcaacccgctctgcaccgtgatcaccaccgtgttcgccgccgccgtcctccgcgaagagctgcacgtcggcagcttgctgggcgcgatcgccgtcatcgcggggctgtacgtggtgctgtggggcaaagcgggcgacgccaacaagggcggggtggagccagagcaccactcggacgatctggagaagacgtcatcagcgcggtcggatcccaattcgacggccggcgtcggcagtggcatcgccgagcccctcctggcgggcggcgatccaacggagaagtagatgggattttgctgctcttcaagtgttctgtgcgtgcgcgcgcggtgttttcagggtcggtatgctagtgctactgtaacagtgccgtcccagttttgtcatgtacactagtggcagcttcaaatgactccgtgctgccgatgtgtattatccgcacaattttgttaagcaacgcggcgtccccgtccaaagtcgtcgtcgccaactccgggccgctccgctccgctcgccgtcgtctccaactctctcttgcttgtggggtggtcaggtcttggcctgctgcgactatatggcccatatgccgccgcatcgggtcaggtccaagcaggaagcactttgttccagtagaatcagatgacataaccagacccatgtattagacatttagacccaactcggaaaccag

SEQ ID NO: 208691 - DNA, 2256 bp, Zea Mays
ccatcagacagacgcagactctctcacccgactcgtcagacgtcagccagcagttcgaaaccaaggattgatccaggagcttccggaaggcgaggcgcgcgcgcagcgtcgaggtgctggtgccggtgccgcccatggatcgggctcgcggatccgcgttcctgctcggcgtcctgctcgcaggatccttgttcgcgttttcagttgccaaagaggagaccaagaagctcgggaccgtgatcggtatcgatctcggtaccacctactcctgtgtcggtgtgtacaagaacggtcatgtcgagatcatcgccaatgaccagggtaaccgtatcacaccctcatgggttgccttcaccgatagcgagaggctcatcggtgaggctgccaagaaccaggcagccgtcaaccctgagaggaccatctttgacgtcaagcgtctcatcggaagaaagttcgcggacaaggaagtccagagggacatgaaacttgttccctacaagattattaacaaggatggcaagccctacattcaggtcaagatcaaggatggggagaacaaggtcttcagccctgaggagatcagtgccatgattcttggcaagatgaaggatactgctgaggcataccttggcaagaagatcaatgatgctgtcgtcactgttcctgcgtacttcaatgatgcgcagaggcaggcaaccaaggatgctggtgtcattgccggcctcaatgttgctaggatcatcaatgagccaactgctgctgctattgcctatggtttggacaagaagggtggcgagaagaacatccttgtctttgaccttggtggtggtacttttgatgtcagtatcttgaccattgacaacggtgtgtttgaggtgctggccaccaatggtgacactcatcttggaggtgaggactttgaccagaggatcatggagtacttcatcaagttgatcaagaagaagtacagcaaggacatcagcaaggacaaccgtgctcttggaaagctgaggagggaagccgagcgcgccaagagagccctcagcaaccagcaccaggtccgtgttgagatcgagtccctctttgacgggaccgatttctcggagccgctgacccgtgccaggtttgaggagctgaacaacgacctcttccgcaagaccatgggccctgtcaagaaggccatggaggatgctggccttgagaagagccagatccatgagatcgtcctggttggtggaagcaccaggattcccaaggtccagcagctcctgcgggactacttcgacggcaaggagcccaacaagggtgtcaaccctgatgaggctgttgcctttggtgccgctgtgcagggaagcatcttgagcggcgagggtggtgacgagaccaaagatatcctcctccttgatgtggctcccctcaccctgggtatcgagaccgtcggtggagtcatgaccaagttgatcccgaggaacactgtcatcccgaccaagaagtcgcaggtgttcaccacctaccaggaccagcagaccactgtctccatccaggtctttgagggtgagcgcagtatgaccaaggactgccgtcttctcggcaagttcgacctcaacggcattgcgccagctccaaggggcacaccccagatcgaggtgaccttcgaggtggacgccaacggtatcctaaacgtgaaggcggaggagttcgcggaggaggacaagaaggtgaaggagcggatcgacgcccgcaaccagctggagacgtacgtgtacaacatgaagaacacggtgggcgacaaggacaagctcgcggacaagctggaggcggaggagaaggagaaggtggaggaggccctcaaggaggcgctggagtggctggacgacaaccagtcggccgagaaggaggactacgaggagaagctcaaggaggtggaggccgtgtgcaaccccatcgtgtcggccgtgtaccagcggtcgggcggcgcccctggcggtgacgctgacggcggtgttgacgacgaccacgacgagctgtagatggttgtagatggtggtggtgacgtggagtgccgggagccgagccaaattttgtaacggtgtttagcggcggacaatacttattactaatcttggtgctgctctgccaatagccgtgctgagcgtagtaactgtttgtttgtaattttttttcttctacttccttggttgttcaggattcgcattcgaattttatgtgaaaaaaagaaggcgcgcttttaaaatc

SEQ ID NO: 208692 - DNA, 2717 bp, Zea Mays
gcgccgggagatgggttacaacaaggcgacgccgcgccggaacgtgctatcggctctcaacaacgccgaggccaacggggggacgccgtccgtgccggcggatggcggcggcggcggcggcgcggcggaggcggcgcccgtgatcgagttcagtgggagggaggatgtggagcgcttgctcgccgagaaaatgaagggcaaaagcaagaacgatttcaaggggagagtcgatcagatgagcgactacatcaagaagctcagggcgtgcatccggtggtacatggagctggaggatggctatttggctgagcaggagaagctcctaggtgctatggattctgagaacacccgtcataccgagttggaggcccagctcagcactgctattgaagagctgaaagccactaacttggacttgacaaggcgttgtgagtctctagaggagagcttcaacaaggagaagtctgaaaaactgatcgctgtggagtcctacgagaaagaaaagcaggaaagggaatccgctgagagttcacgagatgtactaactgtggacctagaaagggtcactcatgatgctaagcggtttagcgagcagctaaaaatggtccaagacactaataaaaggcttcaagaatacaacaccagcctgcaacaatacaacagtaaccttcaggctgatgcctcgaagagtggtgagaccatctcaaaacttcagaaagagaagagtgccatgatggaaactatggctactctgagagagtgtaacagctcaatgggcaatcagcttgaatcttctagagtttctcaacaagaagctattagagtgaaggaagagctcaggaaagaagtggagtgccttagagttgagttgaagcaagttagagatgatcgtgatcattcagctattcaactgaacagtttgaacattgaacttggtaattacaaggaacagattggtaaaacttcaaaagaatgtgaaagattccgcaccaaagtatctgaacttgaggaaacatgcagtacacaacaagaacagattcggacatttcaaaagcagcttgcagttgcgactgagaagttgaagcttgctgatgtaactgcgatagaggcgatgactggttatgaagaacagaaggagaaaataaaataccttgaggagcgtttagcacaggcagagtctcaaattgttgaaggcgacgagttacggaaaaaactgcacaacactatattgagttcgaccacttcttcgatttgagggtgattccaatggtccggaaggtgcctctatctcttttccaacatctgtagagtctactggacgtagcattgatttgataaaccaagggcaaaagctctccttctcatatgacaaggtttttgaccatggtgcgtcacaggaagatgtgtttgtggaaatatcgcaactagtccaaagtgcccttgatgggtacaaggtatgcatatttgcatatggtcaaactggatctggtaaaacttatacaatgatgggtaaaccaggaaatgatcaaaaagggataatacctcgttctttggagcaaattttcaagaccagtcggtttctagaatctcaaggatggaattattccatgcaagcatcaatgttggaaatatacaatgagaccattcgtgatttgttagcacctggtcggtctaacagttttgagtctagtaaacaatgcactataaagcatgaccctcatgggaatattgtgtcggaccttacaattattgatgtctttggtattgctgatgtgactagtctactagagaaagcatcccagagtaggtctgtgggtaagactcagatgaatgaacagtcgtccagaagtcattttgtattcacattaaagatatctggatctaacgagaacacaggccaaaatgtccaaggagtccttaacttgattgatttagctgggagtgagcgtcttgctaaaagtggctccacaggtgatcgcttgaaggaaactcagtcaatcaataaaagcttgtcggctttgagcgatgtaatcttcgcgatcgcaaaaggagatgaccacgttccgttcagaaattcaaaacttacatacctattgcagccttgccttggaggtgactcgaaagctctcatgtttgtcaacatttcaccggaggcatcctccgttggtgagacgatatgctcgttgaggtttgcttcaagggtgaatgcttgtgagattggaataccaagacgtcacacataagcccgtcccttcgttctaggctgaattatgggtgaaggtagctgtagggatcatggtaatgtgatatataatgtgttggtttgtgccgcatttggccacaaaggtgatgcccaacagaattcttgtaacttgtacagtgtaggtgatggtgttttgctgagagcagcatatgtacgagtgctgacatcttgtcatgctttccttactttttggtgtagcagacttgggtcatgttaattgtgatcgtgggttcgaatgtgaaactaccttttctctctctctctctgccaactagaattcatctgctggtttatggcaacaatgcaccaaattagttttgtactttgcaggttgtaacttaaatgttagtatgtgtagccacggaagcttgcattgagttgtgcagcctctgaaatgtttgtatttcttcatctctactccttagcacttatttgggccatgactggctgttct

SEQ ID NO: 208693 - DNA, 2668 bp, Zea Mays
  misc_feature (1)..(1): n is a, c, g, or t
ngcgccgggagatgggttacaacaaggcgacgccgcgccggaacgtgctatcggctctcaacaacgccgaggccaacggggggacgccgtccgtgccggcggatggcggcggcggcggcggcgcggcggaggcggcgcccgtgatcgagttcagtgggagggaggatgtggagcgcttgctcgccgagaaaatgaagggcaaaagcaagaacgatttcaaggggagagtcgatcagatgagcgactacatcaagaagctcagggcgtgcatccggtggtacatggagctggaggatggctatttggctgagcaggagaagctcctaggtgctatggattctgagaacacccgtcataccgagttggaggcccagctcagcactgctattgaagagctgaaagccactaacttggacttgacaaggcgttgtgagtctctagaggagagcttcaacaaggagaagtctgaaaaactgatcgctgtggagtcctacgagaaagaaaagcaggaaagggaatccgctgagagttcacgagatgtactaactgtggacctagaaagggtcactcatgatgctaagcggtttagcgagcagctaaaaatggtccaagacactaataaaaggcttcaagaatacaacaccagcctgcaacaatacaacagtaaccttcaggctgatgcctcgaagagtggtgagaccatctcaaaacttcagaaagagaagagtgccatgatggaaactatggctactctgagagagtgtaacagctcaatgggcaatcagcttgaatcttctagagtttctcaacaagaagctattagagtgaaggaagagctcaggaaagaagtggagtgccttagagttgagttgaagcaagttagagatgatcgtgatcattcagctattcaactgaacagtttgaacattgaacttggtaattacaaggaacagattggtaaaacttcaaaagaatgtgaaagattccgcaccaaagtatctgaacttgaggaaacatgcagtacacaacaagaacagattcggacatttcaaaagcagcttgcagttgcgactgagaagttgaagcttgctgatgtaactgcgatagaggcgatgactggttatgaagaacagaaggagaaaataaaataccttgaggagcgtttagcacaggcagagtctcaaattgttgaaggcgacgagttacggaaaaaactgcacaacactatattggaactgaaaggaaacattagggttttttgtagagttcgaccacttcttcgatttgagggtgattccaatggtccggaaggtgcctctatctcttttccaacatctgtagagtctactggacgtagcattgatttgataaaccaagggcaaaagctctccttctcatatgacaaggtttttgaccatggtgcgtcacaggaagatgtgtttgtggaaatatcgcaactagtccaaagtgcccttgatgggtacaaggtatgcatatttgcatatggtcaaactggatctggtaaaacttatacaatgatgggtaaaccaggaaatgatcaaaaagggataatacctcgttctttggagcaaattttcaagaccagtcggtttctagaatctcaaggatggaattattccatgcaagcatcaatgttggaaatatacaatgagaccattcgtgatttgttagcacctggtcggtctaacagttttgagtctagtaaacaatgcactataaagcatgaccctcatgggaatattgtgtcggaccttacaattattgatgtctttggtattgctgatgtgactagtctactagagaaagcatcccagagtaggtctgtgggtaagactcagatgaatgaacagtcgtccagaagtcattttgtattcacattaaagatatctggatctaacgagaacacaggccaaaatgtccaaggagtccttaacttgattgatttagctgggagtgagcgtcttgctaaaagtggctccacaggtgatcgcttgaaggaaactcagtcaatcaataaaagcttgtcggctttgagcgatgtaatcttcgcgatcgcaaaaggagatgaccacgttccgttcagaaattcaaaacttacatacctattgcagccttgccttggaggtgactcgaaagctctcatgtttgtcaacatttcaccggaggcatcctccgttggtgagacgatatgctcgttgaggtttgcttcaagggtgaatgcttgtgagattggaataccaagacgtcacacataagcccgtcccttcgttctaggctgaattatgggtgaaggtagctgtagggatcatgtgtaggtgatggtgttttgctgagagcagcatatgtacgagtgctgacatcttgtcatgctttccttactttttggtgtagcagacttgggtcatgttaattgtgatcgtgggttcgaatgtgaaactaccttttctctctctctctctgccaactagaattcatctgctggtttatggcaacaatgcaccaaattagttttgtactttgcaggttgtaacttaaatgttagtatgtgtagccacggaagcttgcattgagttgtgcagcctctgaaatgtttgtatttcttcatctctactccttagcacttatttgggccatgactggctgttct

SEQ ID NO: 208694 - DNA, 2459 bp, Zea Mays
aactgttgtgtgtattccatagatcattacacttatatacaagtgaaggggtgtatcccaagaggtatgtcccttgagaaaaactgtcgcaccccttagattgatcatatatgtaatattttgtaacaagatttttaatagagcagtataataactaagtgtgatactagtagaaaatataaagccgcaagtatactagtgtcctgaataatatctgatcctgatgcagcgtcagcagccagcaaggcatccgatctgatcccatccccaccgaacagtatccgtctcgcgagggcaaagggtcagggagaaagtgaaagagacagtcacaggaacgggccttcgacccaggcccggaaaagcccaacagagagctaagagcagagtagcagtccggtcagcttcgcgattgtgaacgcacgcacacgctgcaagcatgtcggctggcctggcacgcacatgaccgtctcctgcggctgacttggcgcccaggtctcggtccacctgtaacccccgccgcatcttccgtcttccctgtgttgtccatctcgggtgggccccacgcccgaaaccggtgcgtgcacccgcccatccacgaacgaccatgagacctctgatccatcccccctggccctgccccccggacgccgcgctcaaaagcagcagcgcacgcaccaccaccaccaccgcaccaccatccgcctcgctcgcactgacagacaggcaggcagagagagagagagagcgcgagccggattgattgccgagggcagagcagcggcagagggagcagcaacagcaacagtccacgaccgatcgcccggcccgcgcgcaggcaggcagcagccatgaaccacctgacgccggcgctccacggggcgatgcggccgccctcggcgcaggggcaggggctggcccggtacggctccgcgccgggctcgctcctggccgccatcgccgactccgtcacccgcggcgaccccgcgccgccgccgccgcccgtgagccggttctactccgccgagtcctcggggctcacctcctgcgactccagctgccgcaccgactgcggacgcccgcccctcgagcgggcgtacggcggctccggcgagatccgcgtgccgccgccgctgcagcagcagcagcaccacctgctggctccccccgcggcctccccgctgttccgccacagcagctcccccgccgggctgctctcccgcctcatgaccgacccgcacggaatggcggcgagcggaggagcgatggggagctacacgcaggcgggcagcgacgccgcgctgggccccggccacggccacggccacgcgcagctcagctcgcagtggagcttctccaggcaggacctgccgcagatctcggagatggggatgataccggccgacatcggggagagcatcgtgggcgccggcgggtgcaacagctccagcgacgccgcgcagtcctcctcctacctctccaggaccttctccgtcggctcctgggacgacaccaactccatcatgttctcgtctgccccctgcaagaagcccaaggtggaccccgccgccggcgccgacgacatggtcaccaacttcagcaccattgacccgcagttcggcctgtccaactcgtccctggagctgcccggcatggacgactacctgcagctgcagcaggactccgtcgcctgcagagtgcgtgcgaggcgtggctgcgcgactcacccacggagcattgccgagagggaaagaaggacgaggatcagcaagaggctgaagaagctgcaagacctcgtgcccaacatggacaagcaaacgaatacgtcggacatgttggaccttgctgtggagtacatcaaagagctcaaggaccaagttgagaagctaaaacacgaccaagcaaactgctgttgcctaggcaacaagagctgctgctgatgctggagaagcagacggaggagggtttttacgccgtaacaatgtgactgttaaaccagagctgttgcttcaggagaccaggccgcgggcagaagtgcgtgacatgtggagcggcttccatgactcagcttcctcttttcttggttgttccacggactagcgaccggggtgccaacggcttgaagactaggagataacaagtaggacgatgttgtaatttagttaccgcgacgcggtggctctggctttcgtgtaaagaagtcctccctttcaacgcgactgggattgttgttgctggtaaaattgttgtaggaatatcatctgtgctccatttttcatcgagctcatctttttttttgtgtgtcactggattttgacaagaccgtaactcagaaaccgagcactgaccgagcgttcatgccaccccatacgaagtccaagagaattttagtatgacaacttgagcattattcagcttttttttttctatgcagcattcttgttgagcaaaaacgatcgaag

SEQ ID NO: 208695 - DNA, 1292 bp, Zea Mays
ccctaataccctaacgcgaccaccaggggtccagtcgtccagggcaccacgcacggaggcaccaggcgtctaggcaccaggccagccgccagcccgccagacggagtgacggaccatccagaattctagattccaggcgtccaaggctccaagccatcctccggtcctcccatccaccaccggtccaccgccactccgccagccgaccactaggtcaccaggccgcaccgctgcagctcgcaatcggcggtcggaggtatgctgtcgctgctgatgtcttcgtcggtatcggctacgtcgagcccacagtccatagagaacggtgaccatgacccaagctctaggccagcagcctcgtcccctcctctgcagattcaggcaggggacttatcatcctctccggagacgaccagctcagacaacgcaagataatctaatgggtaaaacagtggcctcgccattcaagaagagtcgtcgcgtcaccgccaatcgaagtcgcctcgctgttgaaggaccaccagctacgcccgctaaagattcttccaccatctccagcgtagagttgttgaaatcaacggggttcgatgcacgcaaacccctctttttttacttgaatgtgttctttatttatcaggattccatgtaatatttttttatcacatctcaatgtataattgtatgctagaatttaatccgttgctaattttagattcatttgatgttagtttcagattatgtttgttaatatggtagtagtacttccaattatattttgtagctatgcattcactaatttctacatctgtagctatccattccaattagcacagttgcctcagagtccgcttttagcacaagtggttgtgttcttagcgagcaccgcagccgacttactccagagatcttggaggcgcttatgtgctcacaagattggatgcgacgcaagtatctagatgcatctaatgctgaccaacctgaaacattttggacttgccttcaagagatgtaggaagggatgcagaagcttttactctgagcaacaagactggaattggaagagaagggtgcccttaagctccaacagcttagaagtcttatatattcaaatattaagtattgtgtattgaacaattagatttgaaggcatgattttgtccacagttttgtagaatcaatgctatgttttgtgtgatttgaaggcatgatattgccatttaatgttgaatattgttgaacatgtgataaaattatgttgggttcgatacatttgttatgttggtacttaattttgc

SEQ ID NO: 208696 - DNA, 981 bp, Zea Mays
ccctaataccctaacgcgaccaccaggggtccagtcgtccagggcaccacgcacggaggcaccaggcgtctaggcaccaggccagccgccagcccgccagacggagtgacggaccatccagaattctagattccaggcgtccaaggctccaagccatcctccggtcctcccatccaccaccggtccaccgccactccgccagccgaccactaggtcaccaggccgcaccgctgcagctcgcaatcggcggtcggaggtcggccagtcgccctcgcccaggtctccactctcccgcacccagtgacccaggtctcccgtctcccaggtatgctgtcgctgctgatgtcttcgtcggtatcggctacgtcgagcccacagtccatagagaacggtgaccatgacccaagctctaggccagcagcctcgtcccctcctctgcagattcaggcaggggacttatcatcctctccggagacgaccagctcagacaacgcaagctatccattccaattagcacagttgcctcagagtccgcttttagcacaagtggttgtgttcttagcgagcaccgcagccgacttactccagagatcttggaggcgcttatgtgctcacaagattggatgcgacgcaagtatctagatgcatctaatgctgaccaacctgaaacattttggacttgccttcaagagatgtaggaagggatgcagaagcttttactctgagcaacaagactggaattggaagagaagggtgcccttaagctccaacagcttagaagtcttatatattcaaatattaagtattgtgtattgaacaattagatttgaaggcatgattttgtccacagttttgtagaatcaatgctatgttttgtgtgatttgaaggcatgatattgccatttaatgttgaatattgttgaacatgtgataaaattatgttgggttcgatacatttgttatgttggtacttaattttgc

SEQ ID NO: 208697 - DNA, 1230 bp, Zea Mays
cgaccaccaggggtccagtcgtccagggcaccacgcacggaggcaccaggcgtctaggcaccaggccagccgccagcccgccagacggagtgacggaccatccagaattctagattccaggcgtccaaggctccaagccatcctccggtcctcccatccaccaccggtccaccgccactccgccagccgaccactaggtcaccaggccgcaccgctgcagctcgcaatcggcggtcggagcagcctcgtcccctcctctgcagattcaggcaggggacttatcatcctctccggagacgaccagctcagacaacgcaaggggcgccgctgctgctaccgttgtcacggccggcgccactactaaagataatctaatgggtaaaacagtggcctcgccattcaagaagagtcgtcgcgtcaccgccaatcgaagtcgcctcgctgttgaaggaccaccagctacgcccgctaaagattcttccaccatctccagcgtagagttgttgaaatcaacggggttcgatgcacgcaaacccctctttttttacttgaatgtgttctttatttatcaggattccatgtaatatttttttatcacatctcaatgtataattgtatgctagaatttaatccgttgctaattttagattcatttgatgttagtttcagattatgtttgttaatatggtagtagtacttccaattatattttgtagctatgcattcactaatttctacatctgtagctatccattccaattagcacagttgcctcagagtccgcttttagcacaagtggttgtgttcttagcgagcaccgcagccgacttactccagagatcttggaggcgcttatgtgctcacaagattggatgcgacgcaagtatctagatgcatctaatgctgaccaacctgaaacattttggacttgccttcaagagatgtaggaagggatgcagaagcttttactctgagcaacaagactggaattggaagagaagggtgcccttaagctccaacagcttagaagtcttatatattcaaatattaagtattgtgtattgaacaattagatttgaaggcatgattttgtccacagttttgtagaatcaatgctatgttttgtgtgatttgaaggcatgatattgccatttaatgttgaatattgttgaacatgtgataaaattatgttgggttcgatacatttgttatgttggtacttaattttgc

SEQ ID NO: 208698 - DNA, 1255 bp, Zea Mays
cgaccaccaggggtccagtcgtccagggcaccacgcacggaggcaccaggcgtctaggcaccaggccagccgccagcccgccagacggagtgacggaccatccagaattctagattccaggcgtccaaggctccaagccatcctccggtcctcccatccaccaccggtccaccgccactccgccagccgaccactaggtcaccaggccgcaccgctgcagctcgcaatcggcggtcggaggtatgctgtcgctgctgatgtcttcgtcggtatcggctacgtcgagcccacagtccatagagaacggtgaccatgacccaagctctaggccagcagcctcgtcccctcctctgcagattcaggcaggggacttatcatcctctccggagacgaccagctcagacaacgcaagtggcctcgccattcaagaagagtcgtcgcgtcaccgccaatcgaagtcgcctcgctgttgaaggaccaccagctacgcccgctaaagattcttccaccatctccagcgtagagttgttgaaatcaacggggttcgatgcacgcaaacccctctttttttacttgaatgtgttctttatttatcaggattccatgtaatatttttttatcacatctcaatgtataattgtatgctagaatttaatccgttgctaattttagattcatttgatgttagtttcagattatgtttgttaatatggtagtagtacttccaattatattttgtagctatgcattcactaatttctacatctgtagctatccattccaattagcacagttgcctcagagtccgcttttagcacaagtggttgtgttcttagcgagcaccgcagccgacttactccagagatcttggaggcgcttatgtgctcacaagattggatgcgacgcaagtatctagatgcatctaatgctgaccaacctgaaacattttggacttgccttcaagagatgtaggaagggatgcagaagcttttactctgagcaacaagactggaattggaagagaagggtgcccttaagctccaacagcttagaagtcttatatattcaaatattaagtattgtgtattgaacaattagatttgaaggcatgattttgtccacagttttgtagaatcaatgctatgttttgtgtgatttgaaggcatgatattgccatttaatgttgaatattgttgaacatgtgataaaattatgttgggttcgatacatttgttatgttggtacttaattttgc

SEQ ID NO: 208699 - DNA, 1323 bp, Zea Mays
cgaccaccaggggtccagtcgtccagggcaccacgcacggaggcaccaggcgtctaggcaccaggccagccgccagcccgccagacggagtgacggaccatccagaattctagattccaggcgtccaaggctccaagccatcctccggtcctcccatccaccaccggtccaccgccactccgccagccgaccactaggtcaccaggccgcaccgctgcagctcgcaatcggcggtcggaggtatgctgtcgctgctgatgtcttcgtcggtatcggctacgtcgagcccacagtccatagagaacggtgaccatgacccaagctctaggccagcagcctcgtcccctcctctgcagattcaggcaggggacttatcatcctctccggagacgaccagctcagacaacgcaaggggcgccgctgctgctaccgttgtcacggccggcgccactactaaagataatctaatgggtaaaacagtggcctcgccattcaagaagagtcgtcgcgtcaccgccaatcgaagtcgcctcgctgttgaaggaccaccagctacgcccgctaaagattcttccaccatctccagcgtagagttgttgaaatcaacggggttcgatgcacgcaaacccctctttttttacttgaatgtgttctttatttatcaggattccatgtaatatttttttatcacatctcaatgtataattgtatgctagaatttaatccgttgctaattttagattcatttgatgttagtttcagattatgtttgttaatatggtagtagtacttccaattatattttgtagctatgcattcactaatttctacatctgtagctatccattccaattagcacagttgcctcagagtccgcttttagcacaagtggttgtgttcttagcgagcaccgcagccgacttactccagagatcttggaggcgcttatgtgctcacaagattggatgcgacgcaagtatctagatgcatctaatgctgaccaacctgaaacattttggacttgccttcaagagatgtaggaagggatgcagaagcttttactctgagcaacaagactggaattggaagagaagggtgcccttaagctccaacagcttagaagtcttatatattcaaatattaagtattgtgtattgaacaattagatttgaaggcatgattttgtccacagttttgtagaatcaatgctatgttttgtgtgatttgaaggcatgatattgccatttaatgttgaatattgttgaacatgtgataaaattatgttgggttcgatacatttgttatgttggtacttaattttgc

SEQ ID NO: 208700 - DNA, 1475 bp, Zea Mays
aaggaagcctacgaccccagtaaccctgcaaactttgggatcatccagcaccagcaggttggttctcctgaggatgtcgtgctcaatgccggctttgataaggagaagcagatgatccaaggggcagaacttgaggatgtcgacgaggaattcaatgatgtgaaggagagggatgatattctcatagataaactcgatgctattgaaaagaagattgaggggaagctagaactgttggatcataccttcggtaagaaaggcagagctttggaggaggaaatcaaggatttggtggaggaacgcaattccctgtccgagaagagcaggagacctatgtacagaaaaggttttgatgtgaaagttatcgatgttaacaggacatgcaaagtcacaaagggaggccaaatagcaaaattcacagcgctattggccactggaaattacaatggtgttgttggcttcgctaaggctaaaggcccaacagccaagattgcaatacagagagcgtatgagaaatgcttccagaatctccactacatggagcgatacgaggatcacacaatcgctcatgctatccaggccaaatatgagaaaacaaaggactgttgagactgtgctgtacttggctggtttcagcaatgtcaagacaaaggtgtgattcttgagtcccagctatcactatcagtcctttttcaaaattgtgatttcctttctatttttttcttctgcagattatcggatcaaggaacccacttaatgtgattaaagctctcttcatagctttgaatgctattgaaaccccgaaggatgtccaacagaagtttgggcgtactgtcgtcgagtcatatttattgtgatcatcatgattgtttggaggacacagaggcgagcggagcctgtataggttttgccatgagaagaccaaagaggcaaatgccaggtccaaccaacgtgagccctctttgttttggacttttggtggtgatgttgaccagaccattgatgttgaagtggcaagaatgtcagtgtcaacagtaatcggataaatagatggtatttccctgaccctttgtttgtagaacttgaatgaacctggggacagaaacacatttgagggttcttgtataaatcaaggtcaagatcagaattgcctcgtcgtgcctttgttttgttaccatagcttcttctccctacatactgttgtttggatgataaatttaattgaatattaatttctcctgaactggttggacaggtgagaaagtagtaggacgggttattcatcccagaatgctacagctgtattgtcttgttaattgtggcatttacataccatccgtttggtttattggcaccacatctacatacaagtataagtagatacaaattagataaatgaacacgacgatttgtttatcgaggtttggttttaaagaacctagtcctcgttgaggagaccccaaaggtcaggtcta

SEQ ID NO: 208701 - DNA, 2636 bp, Zea Mays
attgaggtccttcgccccccattctcccgtggctttgccgctgcgatcaatctgaagctgaagatttgcaaggactcgtcggtgcgcaaggcgctagttcgtgaggccagcctgttgggggctgccaaggttgtcctcggcgtcgccaagaagaggcgtgcgatctcgtcctcgcattcagttgcaaagtactgcgcaaagaagctgcccgcaaagtgcgcggtcctcgccgtgagcaatggcaagatcgagttccggagggagtcgagtgcccattcaggcaaggtctcagcagaggttcttccgtgtgctgacgatgagatgtattgtgcagtgcggttccaagcccatgaacctaaggatggtggtgagggtggcaccacgcatgatgttggcaccaagggaagtgaattggaggacaccatcaaacacgaacagcttgtctcaagcgtggtcctccctgcggatttggcaacggatcaggtcaagatcgacgcagatctttctagcagcaaggctgtagaatcaactgtcaaacagagagatgagactgccgagcttccaggtaagggtgccagtgtgttgtactgcgtgcttcctgggagaagtagcgattctgctgcaagtacatctagtaggcaagaccaggattcagtggatgtgctgccatctgaaggcaccggggagctatattgcttattgccccccaggaatggccattcagtcaggagttctggagattctaagcgttcaaatgcgagccaaagagatgatagaccagccaatccatcgcctgaaggagatggcgatctggactgccggctgccgaggagtggacgacccagtaggagttcttctgccgtatccatggaagctgaggactcgccgaaagacgctgcacgaaatgctgaaacaccctctagttctccaatgtcactgagacggatgatagaaggaagatctgatcgcagccgccttcctagaagaatctttagacatcatagaagctcatctcttgaatgggcaaaaatctcgatggttcaatgggcgacgagacttccgagccggtacacttcagtgcacacagatagcagatcattgaaacaggatacaagcccaaggctgaactgtggttctgaacccactacaacagctgttgagccggaatcatcatcgatgttttctttcgctttctatggtgtagcatggcctcccagtgaattggaatcgcttcgagagaagtattcttcagtctgtaggctgttcagttatgaagaactgaaacttgcaactggcaactactcacctgatatgttgattgggaagggtggaaccagccaagttttcaaggcacgactcgacgatggaacgttttgtgccgtaaagattctgaaaccctcggtcgatgcagtacatgagtttgttacggagatcgagaccgtgagcagcctgcagcacgagaacatcgttgcgctgaggggattcagcttcgagaactacaaccttgtgctggcatacgattacatgccccaagggagcctggacagagctcttcacgggaagaatggtggcacggagtttcttgtttgggagagaagaattaggatagcgatcgacgtcgcaagagcagttgaattcctccatcttggcggtgtcacccagtctgtgatccatggagatgttaagtcttcgaatatcctcctttcagaggattttggggcacggctgtgtgatttcgggttagcgaagcgagtgtctgcatcgactccccacctaacgtgtaccgacatcaccgggactttcgggtacatggcgcccgagtacttttcacacgggacggtcaacgagaagatcgatgtctatgcgttcggagtcgttctgctggagatcatctcaggaaggagacccattacgccgggaagcacgaagggacaagagagcctggttggttgggccaagcctttgctgtgcggcggcggaattagagagctggttgatccgttgctggggaggaacgagtacgactgcgatgagatggagaggatgacgctcgccgcctcgctttgcacgaggacatcttctcgctctcggcctgagatgtcactggtcctgagactcctccagggcgacgacgaggcgatcggctgggcgagggcgcaggtcacggccagcttcgacgggtccgacgaggaggctgcggcggcggcccctgacctgaacatgcagtcgcatcttaacctcgcgctcctcggggtggaggtggaggacgacgacacgctgtcgcagtcgcagtcgcaatgcagcagcaccgtggacacctcggccgacggctactggagccggtcctccagtttcgactagcgctgcggtctgcggggtctcttttagtagtagtagtagtacgtttatgtacagttggtggcaattggtgagttgattgttcttgtgagtgttgctaatttattagcttggagttggttctgttgtgtggtagaagatcttaaaaaattagttcagattcagcagagtgttgatggcaatgcaatttgttcagattcgtgttattaccatctttgcgggccatgattccaaccaagttgcattgcatttctcttgtgggcctgaacgcagcgcag

SEQ ID NO: 208702 - DNA, 3182 bp, Zea Mays
acggggagagacgcgctcacagagtcacagtacagagactagagcgagagagcaacgacgagcaacggaacaagagggcgcgcgcggcgaggtggaggagcaggaggcgacggttgccaggcaggagcgccggtccaacggaataggacgcgggcgcaagtcggggggcagggcgaggggtcccatactcccatccactgcctggtcgcgcacgccgcagcatccgcccccgccctgtgagccgccgtgcagatgaaggtgtcttccaggaggaagcagccgccgccgccgccgcagcagcagcagcgggaagaggccgaggccatggacgccgatgctggcgtccaggaggtggaggaggaggaggcggcggggtgctcggggaaggcgcccgaggcggagggcaggacagtggtggtcggcgtgcgcgcggacgccgagagccgggcgctgctcacctgggtgctcgtcaatgtagccgcgcccttggaccgcgtcgtcgccgtccacgtcgcgctgccgtccgccgcggaggcgcccgacttcgacgccatgctcgccgtctaccagggcttctgcaacctcaagcagatcaatctgaagctgaagatttgcaaggactcgtcggtgcgcaaggcgctagttcgtgaggccagcctgttgggggctgccaaggttgtcctcggcgtcgccaagaagaggcgtgcgatctcgtcctcgcattcagttgcaaagtactgcgcaaagaagctgcccgcaaagtgcgcggtcctcgccgtgagcaatggcaagatcgagttccggagggagtcgagtgcccattcaggcaaggtctcagcagaggttcttccgtgtgctgacgatgagatgtattgtgcagtgcggttccaagcccatgaacctaaggatggtggtgagggtggcaccacgcatgatgttggcaccaagggaagtgaattggaggacaccatcaaacacgaacagcttgtctcaagcgtggtcctccctgcggatttggcaacggatcaggtcaagatcgacgcagatctttctagcagcaaggctgtagaatcaactgtcaaacagagagatgagactgccgagcttccaggtaagggtgccagtgtgttgtactgcgtgcttcctgggagaagtagcgattctgctgcaagtacatctagtaggcaagaccaggattcagtggatgtgctgccatctgaaggcaccggggagctatattgcttattgccccccaggaatggccattcagtcaggagttctggagattctaagcgttcaaatgcgagccaaagagatgatagaccagccaatccatcgcctgaaggagatggcgatctggactgccggctgccgaggagtggacgacccagtaggagttcttctgccgtatccatggaagctgaggactcgccgaaagacgctgcacgaaatgctgaaacaccctctagttctccaatgtcactgagacggatgatagaaggaagatctgatcgcagccgccttcctagaagaatctttagacatcatagaagctcatctcttgaatgggcaaaaatctcgatggttcaatgggcgacgagacttccgagccggtacacttcagtgcacacagatagcagatcattgaaacaggatacaagcccaaggctgaactgtggttctgaacccactacaacagctgttgagccggaatcatcatcgatgttttctttcgctttctatggtgtagcatggcctcccagtgaattggaatcgcttcgagagaagtattcttcagtctgtaggctgttcagttatgaagaactgaaacttgcaactggcaactactcacctgatatgttgattgggaagggtggaaccagccaagttttcaaggcacgactcgacgatggaacgttttgtgccgtaaagattctgaaaccctcggtcgatgcagtacatgagtttgttacggagatcgagaccgtgagcagcctgcagcacgagaacatcgttgcgctgaggggattcagcttcgagaactacaaccttgtgctggcatacgattacatgccccaagggagcctggacagagctcttcacgggaagaatggtggcacggagtttcttgtttgggagagaagaattaggatagcgatcgacgtcgcaagagcagttgaattcctccatcttggcggtgtcacccagtctgtgatccatggagatgttaagtcttcgaatatcctcctttcagaggattttggggcacggctgtgtgatttcgggttagcgaagcgagtgtctgcatcgactccccacctaacgtgtaccgacatcaccgggactttcgggtacatggcgcccgagtacttttcacacgggacggtcaacgagaagatcgatgtctatgcgttcggagtcgttctgctggagatcatctcaggaaggagacccattacgccgggaagcacgaagggacaagagagcctggttggttgggccaagcctttgctgtgcggcggcggaattagagagctggttgatccgttgctggggaggaacgagtacgactgcgatgagatggagaggatgacgctcgccgcctcgctttgcacgaggacatcttctcgctctcggcctgagatgtcactggtcctgagactcctccagggcgacgacgaggcgatcggctgggcgagggcgcaggtcacggccagcttcgacgggtccgacgaggaggctgcggcggcggcccctgacctgaacatgcagtcgcatcttaacctcgcgctcctcggggtggaggtggaggacgacgacacgctgtcgcagtcgcagtcgcaatgcagcagcaccgtggacacctcggccgacggctactggagccggtcctccagtttcgactagcgctgcggtctgcggggtctcttttagtagtagtagtagtacgtttatgtacagttggtggcaattggtgagttgattgttcttgtgagtgttgctaatttattagcttggagttggttctgttgtgtggtagaagatcttaaaaaattagttcagattcagcagagtgttgatggcaatgcaatttgttcagattcgtgttattaccatctttgcgggccatgattccaaccaagttgcattgcatttctcttgtgggcctgaacgcagcgcag

SEQ ID NO: 208703 - DNA, 2531 bp, Zea Mays
atggtcatcctatcaccaaagaaaggcaaccaaaacaataatttcgcaatcaaggccatcctttcaccaaagacaggcaaccaaacagtaacaattttgccaccaagcaattgccggttgcattacttaacactggcttgggctgacctcgtcagagatcgtctacttcgtgaagcaacgggagatttgacgcatctccgtccccaagcccacctcgctccttgcatgcatatgcagcagcagtcacaggtaagcagatcccctagagaagattagactaacgagaggtatcaatccctatctccatccccatctcccactacccatgcggccatgcatcagtaaatcaaaatcatagcaggtgaaaaaaaagagagcatgtgagccgagagagaaacaggaaaggagcaggaaaaaaaaagagagagagaagaagccgcaggggctggcctgacggtacggacagccgcctgcctccagcagtatccagccgcgaaagaattgagaagatccagaccgagctcgacgaggggaggcgcgacaaagaagtatcgccgccacggaaagatggaggatctgaagaagttttatccttctttctggaagcaatctagcagttcacgaagtagcctgcactcgatccgtgagcataagctgatggatttgggttcgaggcgcaatcaaacccaagaagtttccaccaatttcaataaacgcaaaccgttctccgaatctgtggaactgacttcagatgttaggacttcagtttggagaaaatccgatgcttatcacggagtgattgacttggagaagccatcgatttctggtgatgcgattgaagctattggttgttctggctttggcaaccctgccaaccaaaatggcaagtctcaggatggttcatgctgtatttcaccagagaacacctcacttgcagagtcgcttcagtcgtgtagagactggaacatatcgcgtgtaagcgttgttggatctagtgacactccggattgccagtcccctatcaaaacaagtaacaatgaagcaagacattcactgtttgacctgaatgttcctcaagaagaaagtctttttatgtcttctactctggttccttcttcttcaacgtattgtggaattttttcagacaaccgtagagaaacttctgagaaagagcatatcgctggtatcagatcaatgaaaggatcttccatcactgtggtcacccccaactcagttgcagacagttcaagggatgtggtaactgaatcgccagttcaaccgaagtttctttttgaccttaatgtgtcacttgaaaacaccgacatgccatcagaaatctgtgattatagagataaggatgtaaataatgatgtaagtaaaggaacagcaccccgtcgttctttctccaataaagatagtctgcatgcagaaacttccacaaaacatgcggttcttggacatgatcatatgttggcgcacgaggatgatagtaaggtgcttctcacatccccaacagctaatggtatcaataaggttcagttgacacagtctggaaccattaacaaggagtttttgatccctggatctcctcttgttgatacaagtttccctccaagacttgagatatccgacaatggagcatcgaatattcaagagttaagcatgcttcaagacaaggtcgatggtgatggcacaacagctgatactgcagctagaacccttctttccattttccagcatagttctgaacgcattgctcattgctttggaagcagcaaccagacagcagctcagaacgtgaacgatgagcctcagccttcattggactcgttcgagcaaaccgtgttgaacttagaggagatccaagatgacggtcaatcgatcaatgtggcaccaccctatatcgaaggaccagcatgtcggatcaagctaaagagagggaggggtatgagaaattttcagagggagatcattcctggcctccttctagggaggcaagagatatgcgaggacttggaagttataggctatgcgccaaagaaagctcggtccaggaaaccccgcaagggtccaggcgcatcctcagctcaaccgaggccgtgcaaacgtggagctgtcaagcgctgaccaggagcatctgcattccgtggcagggtgccataaggcaggcgattcagaacaggagagtccattctaaaccatgtgaatattcgtgtgtatcaagcctagcttcaaactctggtttgctggtgaccatttagttggggatattctttcctttcccctcttgttatatctttcctggagtgatcaggttgttagattcaagattttttttttttgcctttatatttgaaagtctagcggcgaagacagtcatagtgccacaatgatcagtctcgaaattccaggcttagatcagagtcgacgaagaaggcaagatggttgttcctgatgataacctagcactttctatcttgggttataccttggattaatgcgaaaacagtatacttgcttagattaaattt

SEQ ID NO: 208704 - DNA, 2632 bp, Zea Mays
atggtcatcctatcaccaaagaaaggcaaccaaaacaataatttcgcaatcaaggccatcctttcaccaaagacaggcaaccaaacagtaacaattttgccaccaagcaattgccggttgcattacttaacactggcttgggctgacctcgtcagagatcgtctacttcgtgaagcaacgggagatttgacgcatctccgtccccaagcccacctcgctccttgcatgcatatgcagcagcagtcacaggtaagcagatcccctagagaagattagactaacgagaggtatcaatccctatctccatccccatctcccactacccatgcggccatgcatcagtaaatcaaaatcatagcaggtgaaaaaaaagagagcatgtgagccgagagagaaacaggaaaggagcaggaaaaaaaaagagagagagaagaagccgcaggggctggcctgacggtacggacagccgcctgcctccagcagtatccagccgcgaaagaattgagaagatccagaccgagctcgacgaggggaggcgcgacaaagaagtatcgccgccacggaaagagcttttcccgttgcttcggtagctaaaggagtggttgttctccacggggacaacagaaaaatgatatggagatttggttgcttgtccaattaagatggaggatctgaagaagttttatccttctttctggaagcaatctagcagttcacgaagtagcctgcactcgatccgtgagcataagctgatggatttgggttcgaggcgcaatcaaacccaagaagtttccaccaatttcaataaacgcaaaccgttctccgaatctgtggaactgacttcagatgttaggacttcagtttggagaaaatccgatgcttatcacggagtgattgacttggagaagccatcgatttctggtgatgcgattgaagctattggttgttctggctttggcaaccctgccaaccaaaatggcaagtctcaggatggttcatgctgtatttcaccagagaacacctcacttgcagagtcgcttcagtcgtgtagagactggaacatatcgcgtgtaagcgttggttcagttggatctagtgacactccggattgccagtcccctatcaaaacaagtaacaatgaagcaagacattcactgtttgacctgaatgttcctcaagaagaaagtctttttatgtcttctactctggttccttcttcttcaacgtattgtggaattttttcagacaaccgtagagaaacttctgagaaagagcatatcgctggtatcagatcaatgaaaggatcttccatcactgtggtcacccccaactcagttgcagacagttcaagggatgtggtaactgaatcgccagttcaaccgaagtttctttttgaccttaatgtgtcacttgaaaacaccgacatgccatcagaaatctgtgattatagagataaggatgtaaataatgatgtaagtaaaggaacagcaccccgtcgttctttctccaataaagatagtctgcatgcagaaacttccacaaaacatgcggttcttggacatgatcatatgttggcgcacgaggatgatagtaaggtgcttctcacatccccaacagctaatggtatcaataaggttcagttgacacagtctggaaccattaacaaggagtttttgatccctggatctcctcttgttgatacaagtttccctccaagacttgagatatccgacaatggagcatcgaatattcaagagttaagcatgcttcaagacaaggtcgatggtgatggcacaacagctgatactgcagctagaacccttctttccattttccagcatagttctgaacgcattgctcattgctttggaagcagcaaccagacagcagctcagaacgtgaacgatgagcctcagccttcattggactcgttcgagcaaaccgtgttgaacttagaggagatccaagatgacggtcaatcgatcaatgtggcaccaccctatatcgaaggaccagcatgtcggatcaagctaaagagagggaggggtatgagaaattttcagagggagatcattcctggcctccttctagggaggcaagagatatgcgaggacttggaagttataggctatgcgccaaagaaagctcggtccaggaaaccccgcaagggtccaggcgcatcctcagctcaaccgaggccgtgcaaacgtggagctgtcaagcgctgaccaggagcatctgcattccgtggcagggtgccataaggcaggcgattcagaacaggagagtccattctaaaccatgtgaatattcgtgtgtatcaagcctagcttcaaactctggtttgctggtgaccatttagttggggatattctttcctttcccctcttgttatatctttcctggagtgatcaggttgttagattcaagattttttttttttgcctttatatttgaaagtctagcggcgaagacagtcatagtgccacaatgatcagtctcgaaattccaggcttagatcagagtcgacgaagaaggcaagatggttgttcctgatgataacctagcactttctatcttgggttataccttggattaatgcgaaaacagtatacttgcttagattaaattt

SEQ ID NO: 208705 - DNA, 1232 bp, Zea Mays
acaggccgaaacagagcccggcccacgagagcccagaatcactcgcctccctccatctctgacccagtcctccctgaccgcctgacgacgtcgtgttttcttccttccccggtctcattccacgcgcccgctcctcttcgccctcgtcttcctccatcccacggtcccacctgtccctctcaccgcctcgttattttttcgcccccatctttgaacgccgggactccaactccaccgttcctccctcttcgttccctccgatcccgcccctataaatccagtcgcctcagccgccacagcgggccgcaagcacgtaaccacacagctcactgctgctcccgtcttcccgtgtcctgtcgtgctcccgtcgccgggggcggaagggttcgcgaggccggcgggcggttagggatttctccggagtcccgcgatggcgaagctgtacgtgcaggcgttcccgcccgcggatctgaacaagaacaccgagtggttcatgtatccgggcgtctggacgacctacatcctcattgtcttcttctcctggctcctcgtcctctccgtcttcggctgcacccctggcaccgcgtggaccgtcgtcaacctcttccacttcgcgatcacataccactttttccattggaagaaaggaacaccttttgctgatgaccagggaatgtacaacgcattgacttggtgggagcaaatggataatggcaaacagcttactcgtaataggaagttcctcattgttgttcctgttgtcctgtttatatttgatgcggccccctctggagggcctctttggcgaccgtagaggtatctgatagctctgcacaccacagactaccaacaacctatgctcttcctcaatacccttgccgtcagtgtgcttgtggtcgcgaaactaccgaatatgcacaaggtccggattttcggaataaatgccgagaactgagcaacgtcatccttcgccagacatttaccctatatgcgcttttcagaacggttttgtgtgttcccccccccttctagtgcctttagttgggctcatcagagcaccagtgttgaaaaagttgttagcaggatgggccttggtcgctgtatagagagatgctcggaggcgtgctgtacatctgatgtgcacggattctgtacactcttaatgttgctatatatacggtttgttgcaagcatctgtcggttgctatatgtacagtgtggttcttgcagag

SEQ ID NO: 208706 - DNA, 4410 bp, Zea Mays
ctttttggaagtttggctctgttttctctcaccgcctgttctcccccgcgcgcgatggcggcggctccggcgagcgtcggctgcggcggcgcgtactcttgcgagacggcggagcgtacccgcgagtggatgcaggccctggccactttcctcggccgccaccgtccgctcctcgaggcccacgtcgtcaactttttcaaggacaggctgtgggagctagtggacgccgagtggatggagtgcctccggcgggagcccgtcgagagcttgctcaagctgccatctggatgcgtccaggagcactggcctgctacactgcgagagtttgtgcttactgctaggtcgcttgtgattccacgggagcagaaggctccgcaatcgcttgtatctgacattcatgtagccccagttggcactgttctcgctcagggcatgaactcaaagaagaagcacgaaattgaaaatctagctgctgtggttcatgcaattgcaaagaggtgtggagccaagacagtggttgatgtaggttctggccagggttatctcgcacaggccttatcttttgagtaccaactccgtgttgtagcaatagatgcttcatcacaccatgcatcagttacaattgctcgtgcagaaagaataaagaagcactatgctgctaaatgtgtggagaagcaactgctcatggtacctagggcagtcacctgtcatgttctttctagtgacacattggcagcagtcacattagatgcatgtaaggatgacaatggagaacatgtgagagatactaaaacatctactaagaaaatcactcaaatccaggaatcaactcagggcacccctccattaatcctggctggtcttcatgcatgtggtgatctttcagttaacatgctaagagtttttgtgtcctgtgaacaagtaaaagcattggtaagcattggctgctgttacaacttgctttctgaggatacttatgaggacacagatacctgccctggttttcctatgagcaaggctgccaaacattctgaattggtacttgggaaaagcatccgtgaccttgcatgtcagagagatggagaaatctcaccatggacattgcattgcaaaattttgatgtacatgccttccgagctgcatttcaaatggtacttgagaaatattttccagaagtgtcaaggttgagtccatcaattggaaggcaaggaaaagctcttcgacgtcagaggcttcgaaaagttgtggaatcacaaatgactacaaagaaaaatgatgatttctcctgttcaactttaaaggaacaaaacaagaacacaaacgatgttcatccagtcatacatgaagttgacacagggccagatgacatccatcagaacgcacatcaaaagttcatcctgttcaaagatttcacattatctggattaggtcgccttggctgtggctcagtggaagacacgagtcttcttgaaatatggaaggacgtgcaacccttctctgaatatataggtcccttttggtgccttcgagctgctttaggtccactggtggaaacatatattttacttgatcggttattgtatcttcaagagcgaagcaacctagttgaagcattgctgtttcctctgtttgatcctaccatttctccaaggaacatggccgtaattgcttggaagttatgtgcaaattcttcagaagcatgacatggtaaatcttctgatgataggatatgcagttgatgggatggtgtgttggtaccaaactataagccagactattgtcttatggcagaacttcttcgatttagatacagttattgtattgctgtcccttttagaagggcaggcctgatacagaggtgagagctgtctcactgaatcaccaggtcacggtttcgaagcagcctctccgcatttgcgtgggaggcttgcctcggtttatcccttatccaagcctctagcactgggtgtgctttattttaattgtattgctgtcctcccatataaaaaaaacctgaagatagtattgtctttgaaattgtgagggcaatgcatttccctttcaaatcacctggtacatgtcttgtcccccccccccacttcccccagagcctgtctatatgtacttgatccgctttttttgcatcctagcttctcccggagtgtattttgttgcttgtgtgatgttcagatctttgaagaatgtgacaggctatctagcctacttgagacgttcagtatttctacaggtaagaaaggaaaactcaagtagacaagatcttccaaatctagttgcaagatattgcccttgaatagtgtgcctttatccactaaatgctaggtcaacaatctatccatggtgcttgcttgtttcctgaagtgatcatgaaacaagttgctatggaacgatgatgtctctctctctctctatatatatatatcctgcaatgtgtataaatgttctatgcaagtatgcaactatgtgagaacttgtgtacatattatccctcattatttttactgcttccattggttcagttgagcaggggttggcagttgaaacaagttatgtctgatccaagaaccagtgatctggagtcaattgagcaggggttggcaggggtcaaggggaggagggacagatcatgcctaaaccaaatgaactatttacctgcaaacctactgtgacgtgtcataaaagaaataaaatctaaccacgttgactacttacatgcaaatctacaaaaaaaatcaaaccctgcaggatctctgatgtgatgccatgccatgccaccaatgtgggtaggctggctgaaagacggaccagcagaagaggttgacttggaatttattgagcatgtgccgccgcccacgtggtttcatttcatcagcatggtttgtggttccgggcttggcaccgtaaagaagaaaaaaaaaggagtttggtgaaatcactgccccaggaaaaccttccaggcgcaaaaatcctccatgttgaccgaccagccgtttatttgggcttattcaccactcgtggtcaagactcaataggaaggagggcatatgtgtcttcagaataattcctggaccaccggtagaccgataaaggccctgtactgaccgtgctctcaccatggtggtagctcatgagcaccaatctgtcatttgttctatcaactctgggcaatgattgattgatttttggccagccgctgtcacgagcacgacggcgcctgtacttgcgacgacgatgacgacgacggatcagcgtccagtggacagagccgtcgcagcccttccgtcctcgaacccttatccagatatgcgcacgcggaggtgcgcagcgaagccgccggtcaattccagctgcttttcaccgatgctgccagccagcagcgtcggagcggggggagaggtaacggacggacggcacacagctcttgacctggaagctccccgccctcgtgttgatggtagcgcaatatctcatggtgagacgagatctggagcgtcgtttttatcccactgtgcgcggaaaaggccttgcgcgtgcctggcgcgagctgattggctggtccaggttaaaagttactgcaaatggggggtgttaatgttattaggccgtgcagaaacggggacgagggtcgcgctgtcgctgtcaggcctccattcacttccgggtcgctctcagattggttgcataaattcccctcccgccgttgctgctgctgctgctgctgctgttcgttttcatcgcgaggccaggccttgcaggaacagttgggtgtctctacttagggcttgttcggttattcccaatacacatggattggatgggattggaaaaaattgtgaagaagtttgagttgagagctaaccgaacaagcccttacttgttggattggattggatagatccgcggaatggcatctctccatttgcgtgccgccatctactctattcttcttatcgccgccgccacccttttgggttctctctcggcaggaattatgtgccggaaaaggagttttaccgctttttttgttttgttttgttggtgggggagctcgcttgacttgtccaagatggacgtgagcctggaggagctttcggaggagaggagccacggccgcgctcactcgctgctgctgggtgctatgggttaggtcggtagtggcttttgataatgatcatgtgtgttgtacaccctacccgttggtgaggtgacttgactggcagaggaatctccgaatctggcagtggagactgcacacgggagacgggactactccctcccatgtgttggtcaattccagaagaccggccggtcctgtctggacacgggacctctgttttttttttgctttttacagtgtggtttacttgtttgtgcaatatatttttttaaaac

SEQ ID NO: 208707 - DNA, 1663 bp, Zea Mays
gtgcttctctctcatcttttgcttgccctttttttcaccttttaatttgcctttcaatctcactttgtatccatttgtttggttcttttgttgcactgcgctgcagttgcgccataagaatccaaagagacctccacgctcataacccccctctgctaagactgctatgggccgctagggctaggcaagcccatggaggagatgctcatggctggaaacgccgcgaatccaaacccaccgccagctgctgcgccctcggcacccggggcccagacccagaggggtggtggcgctcctcctcccgctgcgggtgcggcagcgcctagggctggcgcgaccggaggggcggcgccggcgggcacggagcggcggccgcggccgcagaaggagaaggcgctcaactgcccgcggtgcaactccaccaacaccaagttctgctattacaacaactacagcctgcagcagccgcgctacttctgcaagacctgccgccgctactggaccgagggcggctcgctccgcaacgtcccggtgggcggcggctccaggaagaacaagcgcagctcgtcctcggccgcctcctccacctccgcggcgatgtccggcacggtctccgtgaagaaccccaagctggtgcacgagggcgcgcaccacgacctcaacctggctttccctcaccacaacaacggccgcgctctgcagccaccggagttcccgtcgtcgttcccgagcctggagagcagcagcgtgtgctaccccggacccgccatgctgggcaacggcgccgccggcaggggcatgggcgcgctctcggctatggagctgctcaggagcaccggctgctacgtccccctgcagcacgttcagctagggatgcccgccgagtacgcagcacccgcgggattcacgcttggcgagttccgcattcccccgccgccgccgccgcagtctcagagtgtgctcgggttctcgctggacacgcacggcacggggggttacagcgccggcgggttgcaggagagcgcggtgggcaggatgctcttccccttcgaggacttgaagccggcggtgaccacagctggcggcggtgcaagcaacgacggagctgatcatcgtcaaaacgaccacaggaaagatcaagctgcaggcgacggcagcagcgtcaccggtggccacgagactccagggttctggagcaatagcttgatcggaaatggcagcagcaatggtggtggaggcccttggtaaggcggcgcggcatgcatggctcatgcacgcgcgcgccgttgtcagcatgcggagatagggatagagtcatagagacaaggatccaagttatcaagagggtacggtggaggaggtgattagtgttcacatatatggcgtttgatttttctctggttgtttaatttttctcggatcttcgtgttcttgtgtgtaaatcgacttgggggggctaacacagcaggatatacagattgttaaggtggtgaaccggtgatttacagctagcttctcttatccaatggatctcttgtttctgattgtgcaatatataagcggtcaatcccgtgtcaatttgttgtgcattgcatgcatgcatgtagagtatgcatcagcatcactacttgagcagctctgttgcagctctgttgcagtgttg

SEQ ID NO: 208708 - DNA, 3139 bp, Zea Mays
ctctcctcccccgcggccgcggccgccccacgctcttcctcctcctcctcgctcgtcgacggtgacccccgcggagccgcgtggatacctcgccggggagatctgcctgccgtctctacgggcaggtaccagagttggagcgtggttactggcaggctgtggctgcattcggcctcccgctcctcctacacgcgcgcgcccggcctccttcaaggttggctctgaagacaaagcccaagctccctgcgctgctgcgcaagcggccgaccttcctgccggcggtactccctgtgctggatcctctgtctagtgttgcagctgccagcgcttctcatcctcactctaccggagtggagatccgtccgggcgtgggttgattccttcttttcgggatgttggagcttaggtagtagccaacgatggaagcaatggaggccgaagaaggtccttttctggctaatgatgccaagttgcacgcaggaatttgtagagcatttcatccttctgtatctaagctttccgccattttcccctttatcgaagcatcaagacccagaagcaagcctggtatacaagcattgtgttcactacatgtagctcttgataaagccaaagggcttcttcaacattgtgcagactgcagcagactctacttggccatcacttcggaaactgtgcttttaaagtttgagaagtctagaagccagcttcaggagagtctaaggcgcactgaaagcatagtaactgaagatattggctgtaagattgtggagattgttggtgagctggaggaaattgtttttacattagatagatcagagaaggaagctggtgatgagctgatcaaattgctccagagaaataataaaacaaatggttccagtgacagtggggagcttgaggtattccatatgtctgctcttaaattgggaattacatcttctagggcagcactcaccgagagaagagcccttaagaagctaattgagaaggcccgttctgatgaagacaagcggaaggagcttgttgtgtcatacttgtacaatctcatgaggaagtactcaaagttcttcagaagtgagactggtgatgatacagattctcagggatcgtctccatgctcgccaacagtattaggcatggatgatatgtatgggccgtacaacaatggtcgggcatttagtagacagctttcgagcattcagtctttcaattcaaggtttggatctttcaattctaggcttggatcattcaattgcagacgtggtggtggtccaaggtctgagaatatgtcaatccctcctgaagaacttaggtgccctatttccttacaactcatgtatgatccagtcatcatttcatccgggcagacttatgagcgtatttgcattgagaaatggttcaacgatggtcacagcacatgtcctaaaactcagcagcaacttgcccacctgtcattgactccaaactactgtgttaaggccctcattgcgagctggtgtgagcagaacgattttccagttcctgatggtccaccagggacttttgatgtaaactggagacttgctttgtctgacactgaggccgcaggctgtgtgtcagttgaaagttttgattgtgctaatgcaaagagtgtcaaggttgtcccaatggagaacgttagaaaggaggagccagcaaacagtgaatcgggaactctggatgacggctcctgtaacgatttcgatttgaacgaaggctatgggaacttgctgctcctgctccatgaaagaagtaacatgaacaagcagtgcaggttggtggagcagataaggtatcttttgaaagacgacgaggaagcaaggatccagctgggctcaaatggctttgccgaggcactggttgagttcttgaggaatgctgtgaatgatggaaatgagaaggcacaagaagttggtgcaatggctcttttcaatcttgcagtcaacaacaacagaaacaaggggctcctgttatctgctggagtcaccgatctacttgagcagatgatatcgaatccacggctatctggtcctgccacagcactctacctgaatatttcctgccttcctgacgcgaaggccgtcatcggttcgagccaggccgtgccgttcctagtcgaccgtctgtacagccaagacggcagcgacacgagaggaagctcctgcaagcacgacgccctgtacacgctgtacaacctctcgagccaccaggccagcgtgccggcgcttctagccgcgggcatcgtggacgctctccactgcctcgtcacggagtctccagggtcggaggaggggcttggctggacagagaaggctctggcggtgctcatcagcctcgcggccacccaagctggccgaaaggagatcatgtccacccctggcttggtcagcacgctggcgatgctgctggacacgggcgagtcgacggagcaggagcaggcagtgtcgtgcctcctggtgatgtgcggcgccgacgacaagtgcatcgcgccggtgctccaggaaggggtggtcccgtccctcgtctccatctcggcggccgggactgggaggggcagggagaaggcccagaagctcctgaagctgttcagggagcagaggcagcgggacacgccgccgccacagcagcagcagcagcagctgctgcagagccagctggcggagggcgggaacggtggtggtggagctatcgtgtgccaccgggaatcgaagccgctgtgcaagtccaagtccaggaagctgggcaggacgctgagctcgctgtggaagaacaggggcttctcgctgtaccagtgctaggagatgcatgctagagtagtgttttgagttgatcagtgggtctgcgtctgtacatcatcttctgccttgtttttctcaactggtcctttcttccccccttcttctctgggggtgttgttttatttgaggtaaaaaaaacttgatgttcttccccccctcctcggttgggtgatgtagggcattttcttccatctcggccatgacaggtcatttgtacagttgctgctgcttcagtctatctgatactcagtctcccccttttcagatcaggcgcttcttcccattcaattcaaaacccaacacggcttgcagcttgcaag

SEQ ID NO: 208709 - DNA, 3015 bp, Zea Mays
cgcggccgccccacgctcttcctcctcctcctcgctcgtcgacggtgacccccgcggagccgcgtggatacctcgccggggagatctgcctgccgtctctacgggcaggtaccagagttggagcgtggttactggcaggctgtggctgcattcggcctcccgctcctcctacacgcgcgcgcccggcctccttcaaggttggctctgaagacaaagcccaagctccctgcgctgctgcgcaagcggccgaccttcctgccggcgtcagatgttggagcttaggtagtagccaacgatggaagcaatggaggccgaagaaggtccttttctggctaatgatgccaagttgcacgcaggaatttgtagagcatttcatccttctgtatctaagctttccgccattttcccctttatcgaagcatcaagacccagaagcaagcctggtatacaagcattgtgttcactacatgtagctcttgataaagccaaagggcttcttcaacattgtgcagactgcagcagactctacttggccatcacttcggaaactgtgcttttaaagtttgagaagtctagaagccagcttcaggagagtctaaggcgcactgaaagcatagtaactgaagatattggctgtaagattgtggagattgttggtgagctggaggaaattgtttttacattagatagatcagagaaggaagctggtgatgagctgatcaaattgctccagagaaataataaaacaaatggttccagtgacagtggggagcttgaggtattccatatgtctgctcttaaattgggaattacatcttctagggcagcactcaccgagagaagagcccttaagaagctaattgagaaggcccgttctgatgaagacaagcggaaggagcttgttgtgtcatacttgtacaatctcatgaggaagtactcaaagttcttcagaagtgagactggtgatgatacagattctcagggatcgtctccatgctcgccaacagtattaggcatggatgatatgtatgggccgtacaacaatggtcgggcatttagtagacagctttcgagcattcagtctttcaattcaaggtttggatctttcaattctaggcttggatcattcaattgcagacgtggtggtggtccaaggtctgagaatatgtcaatccctcctgaagaacttaggtgccctatttccttacaactcatgtatgatccagtcatcatttcatccgggcagacttatgagcgtatttgcattgagaaatggttcaacgatggtcacagcacatgtcctaaaactcagcagcaacttgcccacctgtcattgactccaaactactgtgttaaggccctcattgcgagctggtgtgagcagaacgattttccagttcctgatggtccaccagggacttttgatgtaaactggagacttgctttgtctgacactgaggccgcaggctgtgtgtcagttgaaagttttgattgtgctaatgcaaagagtgtcaaggttgtcccaatggagaacgttagaaaggaggagccagcaaacagtgaatcgggaactctggatgacggctcctgtaacgatttcgatttgaacgaaggctatgggaacttgctgctcctgctccatgaaagaagtaacatgaacaagcagtgcaggttggtggagcagataaggtatcttttgaaagacgacgaggaagcaaggatccagctgggctcaaatggctttgccgaggcactggttgagttcttgaggaatgctgtgaatgatggaaatgagaaggcacaagaagttggtgcaatggctcttttcaatcttgcagtcaacaacaacagaaacaaggggctcctgttatctgctggagtcaccgatctacttgagcagatgatatcgaatccacggctatctggtcctgccacagcactctacctgaatatttcctgccttcctgacgcgaaggccgtcatcggttcgagccaggccgtgccgttcctagtcgaccgtctgtacagccaagacggcagcgacacgagaggaagctcctgcaagcacgacgccctgtacacgctgtacaacctctcgagccaccaggccagcgtgccggcgcttctagccgcgggcatcgtggacgctctccactgcctcgtcacggagtctccagggtcggaggaggggcttggctggacagagaaggctctggcggtgctcatcagcctcgcggccacccaagctggccgaaaggagatcatgtccacccctggcttggtcagcacgctggcgatgctgctggacacgggcgagtcgacggagcaggagcaggcagtgtcgtgcctcctggtgatgtgcggcgccgacgacaagtgcatcgcgccggtgctccaggaaggggtggtcccgtccctcgtctccatctcggcggccgggactgggaggggcagggagaaggcccagaagctcctgaagctgttcagggagcagaggcagcgggacacgccgccgccacagcagcagcagcagcagctgctgcagagccagctggcggagggcgggaacggtggtggtggagctatcgtgtgccaccgggaatcgaagccgctgtgcaagtccaagtccaggaagctgggcaggacgctgagctcgctgtggaagaacaggggcttctcgctgtaccagtgctaggagatgcatgctagagtagtgttttgagttgatcagtgggtctgcgtctgtacatcatcttctgccttgtttttctcaactggtcctttcttccccccttcttctctgggggtgttgttttatttgaggtaaaaaaaacttgatgttcttccccccctcctcggttgggtgatgtagggcattttcttccatctcggccatgacaggtcatttgtacagttgctgctgcttcagtctatctgatactcagtctcccccttttcagatcaggcgcttcttcccattcaattcaaaacccaacacggcttgcagcttgcaag

SEQ ID NO: 208710 - DNA, 278 bp, Zea Mays
ttatacaaacaaaatgatgaatcatgcattcaatcgctttcttcctaatgatgtgggatggagaaatctgtttgaaatggttatagtctctgcaaggaagccagaatttttccagctttcacatccattgtatgaggttgtaacagatgatggactgatgtgtccctgttttaaagctgttgaactcatgcttgtcgatgcactcattgaggctaatgactacttggggatatcattgcatgcacacgacccagaagatttttggaagttttgcaacc

SEQ ID NO: 208711 - DNA, 1044 bp, Zea Mays
gagcctgcccggtggaagatagagcatttctcgctgcttctttctcttcaagaaaacgtcaaaaaaacgtcagcaccaggctcctccctctaataaatagcggcgggcctctgtcagctcacagctcagtcctcttcaaccccgtttcgccgcccctagcccaaatcccccacctactcgccgccggcgccgtctcagcctcatccttctccgctagccatggccgccgcgggtcccgggctctactccgagatcgggaagaaggccagagatctcctatataaggactaccacacggaccagaagttcacgctcaccacctacgccgccaacggagctgccattactgctgcaagcacgaggaaagatgaagctatctttaatgaaatccagagccagctgaagcacaacaatgtgactgtggatgtgaaagcaacttcagaatcaaatgtgataactacaatcacagttcatgagctgggcacaccaggcttgaaggcaattttatgtgttcctttcccgtaccagaaatctgcaaaggctgaactccagtatttgcaccaccatgctggtgttgctgcaagtgttggcctaaatgcaaaccctgttgttaacctttctggtgtattcggaactaaagctattgctgttggcgctgatgctgcatttgatacttcttctggggacttaaccaaatacaatgctggactgagctacacgacgcctgactttgttgctgcagcgactttgaacaacaaaggagacaacattgccgcttcctactaccactcggtgagtccaaccacagccgtcggaggagaactgagccacagcttctcgaccaacgggaacaccatcacctttgggacgcagcatgccctggaccctctgaccactgtgaaggcacgcttcaacaactacggcatggcaagtgcactgatccaacacgagtggaggcccaagtcactggtcaccatctccacggaggtggacaccaaggccatcgagaagagctctaaggaggctgagcgcggtggagtggag

SEQ ID NO: 208712 - DNA, 1205 bp, Zea Mays
tctttctcttcaagaaaacgtcaaaaaaacgtcagcaccaggctcctccctctaataaatagcggcgggcctctgtcagctcacagctcagtcctcttcaaccccgtttcgccgcccctagcccaaatcccccacctactcgccgccggcgccgtctcagcctcatccttctccgctagccatggccgccgcgggtcccgggctctactccgagatcgggaagaaggccagagatctcctatataaggactaccacacggaccagaagttcacgctcaccacctacgccgccaacggagctgccattactgctgcaagcacgaggaaagatgaagctatctttaatgaaatccagagccagctgaagcacaacaatgtgactgtggatgtgaaagcaacttcagaatcaaatgtgataactacaatcacagttcatgagctgggcacaccaggcttgaaggcaattttatgtgttcctttcccgtaccagaaatctgcaaaggctgaactccagtatttgcaccaccatgctggtgttgctgcaagtgttggcctaaatgcaaaccctgttgttaacctttctggtgtattcggaactaaagctattgctgttggcgctgatgctgcatttgatacttcttctggggacttaaccaaatacaatgctggactgagctacacgacgcctgactttgttgctgcagcgactttgaacaacaaaggagacaacattgccgcttcctactaccactcggtgagtccaaccacagccgtcggaggagaactgagccacagcttctcgaccaacgggaacaccatcacctttgggacgcagcatgccctggaccctctgaccactgtgaaggcacgcttcaacaactacggcatggcaagtgcactgatccaacacgagtggaggcccaagtcactggtcaccatctccacggaggtggacaccaaggccatcgagaagagctctaaggttgggctctccctggtcctcaagccctgaggtcaccagcttctgcttttgggatgttaggtttatttttatttttatcagcagctgaagtccagtaaacaagcttggactaaacttgtcaactttggtgcccatcccataaactcaattcgttgtctgttaccatatcctaaactacctgagaggtttatgttacaatttacgtcgtgcttctgattctaaa

SEQ ID NO: 208713 - DNA, 1996 bp, Zea Mays
gaacgataaaagtaggaatcacattattttgcggtcccagaaatctatatctatctagccttctcctttcccttgcccagtttacttactacccacgcttggcgcgtgcatcggatcggatcccggccccgcgtcatcccttcctttccacggcccggtcgtcgactgtctcgcgctccactttccacggcgaatccattcttaaatgatctacactgctgcataaacccctgcggccgggtagtctcgaagactccacctaaaacggccaggccagacttggtcgtgccggcgtgcggcgtgcccccgagctagctgtggacctgggagccacgacggcgatcatgggctcttcttccggggcgccgctgctcgtcgctcacccgagccgggggaaggaggacctgggagatcagcgccgcctccgctggtgctgcggcgtttcgtcggaagggcggtgggcggaggcgacggcggaggccgggcggctggcggcgctggcggcgcccatgatcgccgtggcgctgctgcagctcatgatgcaggtcatctccaccatcatggtgggccacctcggcgaggtgcccctcgccggcgccgctatcgccggctcgctcaccaacgtctccggatttagcgtcctcatgggactggcatgcggattggaaactatttgtggacaggccttcggggcagaacagtatcataagtcagcatctgtgactgggttgaagtcacggttcttggtctttatattaagttctcaccttcttgtgagaaaactcgtgctccattcacgtgggaagcttttcaagggattggcagtttcatgcggttggctgtaccttcggctcttatggtttgtcttgaatggtggtcatatgagctgcttgttctgctttctgggatgttaccaaatgcagcacttgaaacttctgtgctctctatatgtatctctacagtaatactggtgtacaatctcccatatggcatcggaacagctgcaagcgtgcgtgtgtcaaatgaactaggcgcggggaacccagatagtgcccgcttagtagtagttgtcgccttatccattataatcttcacggcagttctggtgagcgtaactcttctatcgttgcgccatttcatcggaattgctttcagcaatgaggaggaggttgtaaattatgtcaccagaatggtaccgttgctttcgatttcagttattactgacaacctccaaggagtcctttcaggagctgggttctggattggtatgatagctggtggagccacacaggtcactctcctaacaatcattactgcaatgacaaactggcggaagatggctgacaaagctagagatagagtatatgagggaagtctgcctatacaagcaaattgattattacgaacttgaagtcatatccgattatctccaaatttcgctgcatcctagttgtttgttgaaagagctatccatgccacggacaccctaccccccacccaaaaaaaagttggcaatgaaagtcgtaaaagatgggctatttttatacctactttgaactaggtgatgatgagaaccgtcttatcttataggtgatgatgctgtgtctagcttatagcttagactatctctaggctcaagcaatttatttatcttcatctcattttaaactctattttgtaaacatataggacctgtttggttcagtcccagtagacctgtctggcctaggcagcgtcccaggccattgattttggacgcttgagggctacaatggaatggctgcatgcatatctgcctggtaggctgcaatccagacgtgcccatagtctacggtgcaagcaaacagctatactatacgatctattgattatcaccttagggattaatgcacaagtaggatgaaatttgatatgacagtcatgttaatgagaagagaatgagtataacaacatatgaattggggcaaaggtccttgttatatgtccttatattttt

SEQ ID NO: 208714 - DNA, 1696 bp, Zea Mays
ctgtggacctgggagccacgacggcgatcatgggctcttcttccggggcgccgctgctcgtcgctcacccgagccgggggaaggaggacctgggagatcagcgccgcctccgctggtgctgcggcgtttcgtcggaagggcggtgggcggaggcgacggcggaggccgggcggctggcggcgctggcggcgcccatgatcgccgtggcgctgctgcagctcatgatgcaggtcatctccaccatcatggtgggccacctcggcgaggtgcccctcgccggcgccgctatcgccggctcgctcaccaacgtctccggatttagcgtcctcatgggactggcatgcggattggaaactatttgtggacaggccttcggggcagaacagtatcataagtcagcatctgtgactgggttgaagtcacggttcttggtctttatattaagttctcaccttcttgtgagaaaactcgtgctccattcacgtgggaagcttttcaagggattggcagtttcatgcggttggctgtaccttcggctcttatggtttgtcttgaatggtggtcatatgagctgcttgttctgctttctgggatgttaccaaatgcagcacttgaaacttctgtgctctctatatgtatctctacagtaatactggtgtacaatctcccatatggcatcggaacagctgcaagcgtgcgtgtgtcaaatgaactaggcgcggggaacccagatagtgcccgcttagtagtagttgtcgccttatccattataatcttcacggcagttctggtgagcgtaactcttctatcgttgcgccatttcatcggaattgctttcagcaatgaggaggaggttgtaaattatgtcaccagaatggtaccgttgctttcgatttcagttattactgacaacctccaaggagtcctttcaggtatttctagaggctgtggttggcagcatttaggcgcctatgttaacttgggcgcgttctatcttgttggcattcctgtggcgctcgttgccggttttgctttgcatctaggaggagctgggttctggattggtatgatagctggtggagccacacaggtcactctcctaacaatcattactgcaatgacaaactggcggaagatggctgacaaagctagagatagagtatatgagggaagtctgcctatacaagcaaattgattattacgaacttgaagtcatatccgattatctccaaatttcgctgcatcctagttgtttgttgaaagagctatccatgccacggacaccctaccccccacccaaaaaaaagttggcaatgaaagtcgtaaaagatgggctatttttatacctactttgaactaggtgatgatgagaaccgtcttatcttataggacctgtttggttcagtcccagtagacctgtctggcctaggcagcgtcccaggccattgattttggacgcttgagggctacaatggaatggctgcatgcatatctgcctggtaggctgcaatccagacgtgcccatagtctacggtgcaagcaaacagctatactatacgatctattgattatcaccttagggattaatgcacaagtaggatgaaatttgatatgacagtcatgttaatgagaagagaatgagtataacaacatatgaattggggcaaaggtccttgttatatgtccttatattttt

SEQ ID NO: 208715 - DNA, 1826 bp, Zea Mays
tgatcgccgtggcgctgctgcagctcatgatgcaggtcatctccaccatcatggtgggccacctcggcgaggtgcccctcgccggcgccgctatcgccggctcgctcaccaacgtctccggatttagcgtcctcatgggactggcatgcggattggaaactatttgtggacaggccttcggggcagaacagtatcataaggtagctttatatacctaccggtctatagtcgtactccttattgcgagtgtacccatggccattttatgggttttcctcccagacgtacttcctctcataggtcaggatccacaaatagcgattgaggccgggaggtatgccttgtggcttatccctggtttattcgccttcagtgtggctcaatgcctttcaaagttcctccaatctcagagcttgatttttcccctggttctgagctccttgactacactcgctgtcttcattcctttgtgctggttcatggtttacaaagttgggatgggtaatgctggagctgcttttgcagtcagcatctgtgactgggttgaagtcacggttcttggtctttatattaagttctcaccttcttgtgagaaaactcgtgctccattcacgtgggaagcttttcaagggattggcagtttcatgcggttggctgtaccttcggctcttatggtttgtcttgaatggtggtcatatgagctgcttgttctgctttctgggatgttaccaaatgcagcacttgaaacttctgtgctctctatatgtatctctacagtaatactggtgtacaatctcccatatggcatcggaacagctgcaagcgtgcgtgtgtcaaatgaactaggcgcggggaacccagatagtgcccgcttagtagtagttgtcgccttatccattataatcttcacggcagttctggtgagcgtaactcttctatcgttgcgccatttcatcggaattgctttcagcaatgaggaggaggttgtaaattatgtcaccagaatggtaccgttgctttcgatttcagttattactgacaacctccaaggagtcctttcaggtatttctagaggctgtggttggcagcatttaggcgcctatgttaacttgggcgcgttctatcttgttggcattcctgtggcgctcgttgccggttttgctttgcatctaggaggagctgggttctggattggtatgatagctggtggagccacacaggtcactctcctaacaatcattactgcaatgacaaactggcggaagatggctgacaaagctagagatagagtatatgagggaagtctgcctatacaagcaaattgattattacgaacttgaagtcatatccgattatctccaaatttcgctgcatcctagttgtttgttgaaagagctatccatgccacggacaccctaccccccacccaaaaaaaagttggcaatgaaagtcgtaaaagatgggctatttttatacctactttgaactaggtgatgatgagaaccgtcttatcttataggacctgtttggttcagtcccagtagacctgtctggcctaggcagcgtcccaggccattgattttggacgcttgagggctacaatggaatggctgcatgcatatctgcctggtaggctgcaatccagacgtgcccatagtctacggtgcaagcaaacagctatactatacgatctattgattatcaccttagggattaatgcacaagtaggatgaaatttgatatgacagtcatgttaatgagaagagaatgagtataacaacatatgaattggggcaaaggtccttgttatatgtccttatattttt

SEQ ID NO: 208716 - DNA, 1720 bp, Zea Mays
acctggcaacactatcccctttcgccggcgccgctcccgctccgtcccacccgcgctctccagtctccacggatcgatcgaagcttccgtcttccggcgcgatgttcccgtgccgccccttggctccgccgcacctgccgcgtgccccttccctcgcgcggcttccactgtcgtcgctgcggccgccgtcgtcgtcgctgcgcgtggtgcggtgcatggcgaaggagcggcgggtacggatggtggcgaagcagatccagcgggagctcgccgacatgctcacccgcgaccccgtgctgcagcgcgccgtgctccccgaagccgcgctcggcgctgaccgctacctgtcgtcgctcaccaccatcgccgacgtcgagctctccaacgacctccaggtgtgcaaagtgtacgtgtccgtgtttggggacgagagggggaagaaggtggccatcgaggggctcaaggccaagaccaagtacgtcaggagccagataggcaggaggatgaagcttcgcctcacgccggagataaggttcatcgaggatgagtctatggagcgtggaagcaggatccttgctatacttgacaaactaaaggaggaaagggagcaacaagaaggaaaagatggagaggaagatgatgattcatatatatcagaagaagatgatggtgactgggatgcagatgagccagatgaggaggacatcatttacgtaaaatagcccattgtcttctaggaacttggccatcattcatccagaacacagcagttctcttcagagtttaattctgtgaagttcactgctcgcctgcttgtcgaagcactccaaagtatatcagcacttgaagaggtctacactctacagagacatctcttttgccaattgaagcaggacatatcacacccttgctgccatttagaagctggtcatgtccttttttatggcttttcaatgcgggggatatttcaaagaggaatttggaagtctttttttttcctgtccactgaattatgatatctgaccattgacgcaagacagtttgggctgatgctcattcctctgttatgttaactagcacttgtttaatttgtacttgcctagttatcttgctgtatttcagtctccatttcttctatggttttggtacagtatttcctctttctataagccattatgtaatagagtagcatcagtatgattttaatgataatttatcactctctcatctgatctaacaaaaacgatctggacaaagttacataaggcaaatcagtccttgagttcctaaggcaaattgtgtgccctaattgatttgatctgctgtggttgtgctgctatggttattcaggtgaccatcaggagaagcatggcttgccatttttcagctcttaattttattcactccgacaattcttttaggtttcaacttttcccagggaacatttcaatgagctaggagagaattgtgaaagcttatgagcacttttgtgatccagactgctgcatgctcctacttgtttttgacagatgttacgaacactggacaaactatttgctatcgtgtgattttgcaatggttgtttaagggctcatctgtcttgagcaatcagtacacatctaaagaggatgaggttctcgttacaagcacagggcaggagaaaagcatggtttttaaggcgtcatctaggcgacgcctaggcgtccaggcgctcaaaaac

SEQ ID NO: 208717 - DNA, 412 bp, Zea Mays
ctccccaaccaaatagaccactagtactctcggtgttgcttcgcttctagaagatagaccgggactcccgccatcatgtgtggattctacgactaacttgaactcggcgcgataatcatcagagggagtgggattgctcgtcgtgatcgctgtggcaccatggagtcgccttcgacgtcgtcaggggccttcgcgtcatcaccgctaatcaggaacagatatcgctagaggaggattactatgatgagttcgacaagttctatgccattgtttcctagtcaaccacacttgtggagaagttatcttagctcggtttattttatttagttatttttgtaaagacatttgttacgaaataaagtatgtgacactagttactatatactaagttgtcatctgtgtgaaacttgat

SEQ ID NO: 208718 - DNA, 3926 bp, Zea Mays
ttaaaccctacctcgccagtaatggcgggaactccccagtttcagtccccgcacttcccgcctccctctccccctctcggtcccaccttcgtccctccggcgatgaactcaggcggacgcggcggcaagcggcggggtcccccgcccctcgctccctccggtgcggcggcgaagagggtcaatcccagccccggcacgccgcatgtgcctcctcccgcgtcggcggcggccgccgtggaggaggacatgatggacgaggacgtgttcctggatgagtccatcctggcggaggacgaggcggcgctgctgatgctccagcgcgacgaggcactcgcgtcccgcctcgcgcggtggaagcgccccgcaatacccaccgacctcgccgccggatgctcccgcactgtcgcttttcagcagttggaaatagattatgttattggtgagagccacaaagaattactccccagctcatctggttcagcagccatactcaggatttttggtgtcaccagagaaggccacagcttatgctgtcaggtgcatggatttgagccatatttctatattggctgtccttcagggatgggtcctgatgatatatcacgctttcatcaaacactagaggggaggatgaaggagtcaaatagaagcagcaatgttccaaggttcgtgaagagagttgagcttgtgcagaagcagacaattatgcattaccaaacacaacaatctcaacctttcctcaagatagtagtcgctctgcctaccatggttgctagctgtcgtggtatcctggaaaggggcataacaattgaaggccttggttcaaagagttttctgacatatgaaagcaacattctttttgcccttcgtttcatgattgattgcaatattgttggtggcaactggattgagcttcctgctgggaaatacaggaaagcagcctgtatcatgtcctattgtcagctagagctagattgcttatactcagatctggtaagccatgcggctgaaggagaatattctaagatggccccgtttcgcatattaagttttgatattgaatgtgctggtcgcaaaggtcatttcccagaaccaactcatgatcctgttattcagatagctaatttggttacacatcaaggagaagaccaaccttttgtacggaatgtcatgactcttaaatcctgctctcccattgtgggagtcgaggttatgtcatttgatgcagagagagatattctacttgcatggagggatttcatacgtgaagtggatcctgatatcataattggatacaacatttgcaaatttgacatgccctatcttattgagagggctgaggttctcaagatagcggagtttccaatacttggccgaatcagaaatagtcgtgttcgtgtccgtgatacgaccttttcctcgaggcaatatggtgtgcgtgaaagtaaggatgttactattgaaggaagagtgcaatttgatctcctgcaggctatgcaacgggattacaagttgagttcttattcattaaactctgtatcagcacactttcttggggagcaaaaagaagatgttcatcattcaattatatctgatcttcaaaatggaaacccagagacacgaaggcgacttgcagtttattgcttgaaggatgcttatcttcctcaaagactgttagataaattgatgtatatctataattatgtggaaatggcgagggtcactggtgttcccatttcgtttctactttcgaggggacaaagtattaaggtcctctcgcaactactcaggaaagcaaaacagaaaaaccttgttataccaaatataaagggtcaagggtctgggcaagatacctttgaaggtgcaactgttttggaggcaagggctggattttatgagaagcccatcgcaactttggactttgcttctttgtatccatccatcatgatggcatataacctttgctactgtactttggaggcccgtaaactcaacttacctccagaattcgtcaataaaaccccatctggtgaaatatttgtaaaaccagaactacagaagggtatacttcctgagatccttgaagaactattagcagctcggaaaagggcaaaagcagatttaaaggaagcgaaggacccactcgaaagggctgttcttgatggtcgtcaacttgcactgaaaataagtgcaaactcagtttatggtttcactggagcaactgttggtcagttaccttgcttagagatttcttcaagtgtgaccagctatggacgacagatgattgaacatacaaaaaagcttgttgaagataaattcacaacagtaggaggttatgagcatactgcagaggtaatttatggggacactgattctgtgatggtacagtttggtgtttctacagttgaagatgcaatgaagttaggaagagaagctgcagattatattagtggaacctttaccaagcccatcaaactggagtttgagaaggtctattttccttaccttctaatcagcaagaagagatatgctggtttgtactggacgaatcctgagaaatttgacaaaatggatgcaaaaggtattgaaactgtaagaagggacaactgtttactggtaaagaacctggtaaccgagtgccttcataaaatactggtagaccgtgatgttcctggtgcagtccaatatgtcaagaacaccatatctgatctattaatgaatcgtgtggacttgtctcttcttgttataacaaagggtttgacaaaaacgggagaagattatgcggtaaaagctgctcatgtggagcttgctgagaggatgcgaaagagagatccagctactgcacctactgttggtgaccgtgttccttatgtaataattaaagcagcaaaaggggcaaaggcatatgagaaatcagaagatccgatttatgttttggacaataatatacccattgatcctcaatactaccttgagaaccaaattagcaagccacttttgaggatctttgagccaattctgaagaatgccagcaaagagttgcttcatggaagccacaccagatctgtttcaatctcaactccttccaatagcgggataatgaaatttgcaaagaaacaattaacttgccttgggtgcaaagctgttatcagtggtgccagtcagacactttgctcacattgcaagggaagagaagcagagttgtactgcaaaacagtagcaaatgtttctgacctggagatgctctttgggaggctatggacacaatgccaggagtgccaaggatctctgcaccaggacgttctctgcacaagtcgggattgccccattttctatcggcgaaggaaggcacagaaggatatgaccgaagctaggctgcagcttgatcggtgggacttctgagcttggaaattctcacatggctgcctgcgtctgcttatattgctgtggaagacaggaagctaccgtcgaccgcatcataatgcatgtgaagatgagactggacttctgcgagcatccagtcacacttgcgtccgtgtcacgtagactgacttgccagtacgattcattagcatgttttctgcttaggttttgcgtaatagtttaggtgtgagttggtacttggtagatggtaggtgtcaccttcctgtggctagtgccgagaaaaatgcttggtcctgagatgaggtgctgattatgtacagggcagaagcaatctggagcagttattatgtaacagagtgagacgagacaatttgaatggcacatgagttctctatctgtctgaattctaatgctgtccgcagcgctcgccgcctctcctagtggataggtttactttggctatgtgttttacctttctagcttagttatagactagtggatagatttagaacctaggttgcatgactgttcacgatagagat

SEQ ID NO: 208719 - DNA, 3938 bp, Zea Mays
ttaaaccctacctcgccagtaatggcgggaactccccagtttcagtccccgcacttcccgcctccctctccccctctcggtcccaccttcgtccctccggcgatgaactcaggcggacgcggcggcaagcggcggggtcccccgcccctcgctccctccggtgcggcggcgaagagggtcaatcccagccccggcacgccgcatgtgcctcctcccgcgtcggcggcggccgccgtggaggaggacatgatggacgaggacgtgttcctggatgagtccatcctggcggaggacgaggcggcgctgctgatgctccagcgcgacgaggcactcgcgtcccgcctcgcgcggtggaagcgccccgcaatacccaccgacctcgccgccggatgctcccgcactgtcgcttttcagcagttggaaatagattatgttattggtgagagccacaaagaattactccccagctcatctggttcagcagccatactcaggatttttggtgtcaccagagaaggccacagcttatgctgtcaggtgcatggatttgagccatatttctatattggctgtccttcagggatgggtcctgatgatatatcacgctttcatcaaacactagaggggaggatgaaggagtcaaatagaagcagcaatgttccaaggttcgtgaagagagttgagcttgtgcagaagcagacaattatgcattaccaaacacaacaatctcaacctttcctcaagatagtagtcgctctgcctaccatggttgctagctgtcgtggtatcctggaaaggggcataacaattgaaggccttggttcaaagagttttctgacatatgaaagcaacattctttttgcccttcgtttcatgattgattgcaatattgttggtggcaactggattgagcttcctgctgggaaatacaggaaagcagcctgtatcatgtcctattgtcagctagagctagattgcttatactcagatctggtaagccatgcggctgaaggagaatattctaagatggccccgtttcgcatattaagttttgatattgaatgtgctggtcgcaaaggtcatttcccagaaccaactcatgatcctgttattcagatagctaatttggttacacatcaaggagaagaccaaccttttgtacggaatgtcatgactcttaaatcctgctctcccattgtgggagtcgaggttatgtcatttgatgcagagagagatattctacttgcatggagggatttcatacgtgaagtggatcctgatatcataattggatacaacatttgcaaatttgacatgccctatcttattgagagggctgaggttctcaagatagcggagtttccaatacttggccgaatcagaaatagtcgtgttcgtgtccgtgatacgaccttttcctcgaggcaatatggtgtgcgtgaaagtaaggatgttactattgaaggaagagtgcaatttgatctcctgcaggctatgcaacgggattacaagttgagttcttattcattaaactctgtatcagcacactttcttggggagcaaaaagaagatgttcatcattcaattatatctgatcttcaaaatggaaacccagagacacgaaggcgacttgcagtttattgcttgaaggatgcttatcttcctcaaagactgttagataaattgatgtatatctataattatgtggaaatggcgagggtcactggtgttcccatttcgtttctactttcgaggggacaaagtattaaggtcctctcgcaactactcaggaaagcaaaacagaaaaaccttgttataccaaatataaagggtcaagggtctgggcaagatacctttgaaggtgcaactgttttggaggcaagggctggattttatgagaagcccatcgcaactttggactttgcttctttgtatccatccatcatgatggcatataacctttgctactgtactttggtgccccctgaggaggcccgtaaactcaacttacctccagaattcgtcaataaaaccccatctggtgaaatatttgtaaaaccagaactacagaagggtatacttcctgagatccttgaagaactattagcagctcggaaaagggcaaaagcagatttaaaggaagcgaaggacccactcgaaagggctgttcttgatggtcgtcaacttgcactgaaaataagtgcaaactcagtttatggtttcactggagcaactgttggtcagttaccttgcttagagatttcttcaagtgtgaccagctatggacgacagatgattgaacatacaaaaaagcttgttgaagataaattcacaacagtaggaggttatgagcatactgcagaggtaatttatggggacactgattctgtgatggtacagtttggtgtttctacagttgaagatgcaatgaagttaggaagagaagctgcagattatattagtggaacctttaccaagcccatcaaactggagtttgagaaggtctattttccttaccttctaatcagcaagaagagatatgctggtttgtactggacgaatcctgagaaatttgacaaaatggatgcaaaaggtattgaaactgtaagaagggacaactgtttactggtaaagaacctggtaaccgagtgccttcataaaatactggtagaccgtgatgttcctggtgcagtccaatatgtcaagaacaccatatctgatctattaatgaatcgtgtggacttgtctcttcttgttataacaaagggtttgacaaaaacgggagaagattatgcggtaaaagctgctcatgtggagcttgctgagaggatgcgaaagagagatccagctactgcacctactgttggtgaccgtgttccttatgtaataattaaagcagcaaaaggggcaaaggcatatgagaaatcagaagatccgatttatgttttggacaataatatacccattgatcctcaatactaccttgagaaccaaattagcaagccacttttgaggatctttgagccaattctgaagaatgccagcaaagagttgcttcatggaagccacaccagatctgtttcaatctcaactccttccaatagcgggataatgaaatttgcaaagaaacaattaacttgccttgggtgcaaagctgttatcagtggtgccagtcagacactttgctcacattgcaagggaagagaagcagagttgtactgcaaaacagtagcaaatgtttctgacctggagatgctctttgggaggctatggacacaatgccaggagtgccaaggatctctgcaccaggacgttctctgcacaagtcgggattgccccattttctatcggcgaaggaaggcacagaaggatatgaccgaagctaggctgcagcttgatcggtgggacttctgagcttggaaattctcacatggctgcctgcgtctgcttatattgctgtggaagacaggaagctaccgtcgaccgcatcataatgcatgtgaagatgagactggacttctgcgagcatccagtcacacttgcgtccgtgtcacgtagactgacttgccagtacgattcattagcatgttttctgcttaggttttgcgtaatagtttaggtgtgagttggtacttggtagatggtaggtgtcaccttcctgtggctagtgccgagaaaaatgcttggtcctgagatgaggtgctgattatgtacagggcagaagcaatctggagcagttattatgtaacagagtgagacgagacaatttgaatggcacatgagttctctatctgtctgaattctaatgctgtccgcagcgctcgccgcctctcctagtggataggtttactttggctatgtgttttacctttctagcttagttatagactagtggatagatttagaacctaggttgcatgactgttcacgatagagat

SEQ ID NO: 208720 - DNA, 690 bp, Zea Mays
ttcaaagttcttatttggttagcaggcatgaaaatttcagatgctgcaggcaagaaggtttatcactcttatcgatgagttgtacaaccaccactgccgccttatatgcctagctgcctcatccattgatgatctttttcaaggaactgaggaaggacctctttttgatttagagagttttcagtttgaaaccgagtccgaagggacaaagctgaggagggatgttttggcggaaggcaatgctggctcaggaccatctactaccggccttgtggcgatattgtctggtcaagaagagatgtttgcgttccgcagggcgatatcacggcttatcgagatgcagaccccgctgtatctggagcgtgtgctggctgtacatccctcgttccgtcgtcctggtcttgcaagaaataacaggcctgcagttcctcagcctgctccggcggtttgaggtttgacagcctcgcgctgtaccattgctttatttcgagtttcgtgtgacaaggcaataaaaccaaccagagatggtaacagtgagacattgtaaatgattgtagaaaggttgtgattattaataagttaaaatttactattttaaacttcaacaggttacacatactatctgtcatttcatcttatattttaaactttactctacgaacggtacagtctaccatttaaaactatgtt

SEQ ID NO: 208721 - DNA, 2784 bp, Zea Mays
ctaaaattagttatcacttgtttttttatcatagcttattaatgtattgattgtcatttacatgatgaattattttttatgttgatgttagcgggtatgggaaacccattgggtacccaaaacccgcatgggctttggtttgggcaaacttttatactcgtcatgggtatgagttttttagggggcgtatttttttcgcgggtatgggtttgggcaagtaatacccagcgggtttttacccattaccatctctatgtccaacacctattgttgacagttagccatatgaaaaatctgcactgcaatggcacccaattttttctccaaggcgaataattaatatttccctcaaagtaagtttcatatgtcgattcactgctatagatctcatcttgagaaaacttccaacgatgctgatctggtaccccatgctgaaggacaatgccacatacttggtcccgaatgaggatattccgtcaggacctgtactataatgctcccctgatgtcatccacccatctcctatagacaagggcctcagccaccgtcctattttttgtagctctttttaggattgttttcagcgggctaggcttgcctcggtttatcccttcccaaggcctcactcatgtgagagcctccggcactgggtctgtcaccttcagcaggttaggcgtcatttcagcaatggtcttcccattcagccacctgtcagtccgaattccaaaattgagttgattcaccatttcctacagaggtgacaacagcctaatcaaacaatacccgggtgttttgaggtacttcaattgttaaaccggccggcccaaggccttgtaggatcagtttatgtgcccaaagccatctagtttgcagggcccatccgaaaatttccagatcatgaatggccagacactacattttagtgggcgctgcacctttgcccaggacactaggcacttgcccccattggcttgcttccgccccttccaaaggaagcctcggtgcaatttgtccaattccttgttggcccattttggtagattggcaatcctgagatgaattggagaggctgccaagactaggggtggtaatggatcgtgatccaaatgattcttcataaaatggtagagctctaaataattttttagttaaaaaatgaatagaaatatggcccgatcctaatccgatctgatccttaaatcttatagtgcaaaatttagagcccattgtcacccctagtcaagaccacctcaacgagaattagacgcccaactttattcattagagaagctttccagcctgaaagatgatctgccactttatcaatcatgaactcagcaccttctttataggctttcggaatccaagatattatgacacttggtgtacaaatctgttgctttctccccatagagataaaccttgtcgttatcctgctcctttagaaataagactacataagttcagatcctggtataaagttaaagttatcaagctaaacagtgtgatccttatatgatctattttatatttatatatcttgacataaactagttagatatatatgtcagggttgatctcatctgactcggtcaaggggatcgagctagactcttatctcgcgtcctgatcgcaggcgcaacaaccttatggttacgaccctttcacgtcgcatatataaatacagggagagagaatcggcacgataaccaacgtttgtcgtagcctcctcttcccaacataccatgagatccgatcttctcctaagcacagttagtgaagtaaaggccgctgccgctacctcaccgttttgagttgagagtcatcaacctaatgatgtcgtcctccgatcccaaaggttcactatttttggcctgccacttctgatgctcgcagcatgtatgaggctatgtggcatgacataactgaccaatcaggagaaaatattgtttctgtcaccattcctgtaatgtttgggaggtctattgagattcctcaaagctgtaatggtgtcgcaaggtttgacttcgagtatctatgtggtcgcccagtcggagcagcagattatatagcaatagctaggaactaccatacaattttcatatcagaaattccagcgatgagtatgaagatccgtgacaaggcaagaaggtttatcactcttatcgatgagttgtacaaccaccactgccgccttatatgcctagctgcctcatccattgatgatctttttcaaggaactgaggaaggacctctttttgatttagagagttttcagtttgaaaccgagtccgaagggacaaagctgaggagggatgttttggcggaaggcaatgctggctcaggaccatctactaccggccttgtggcgatattgtctggtcaagaagagatgtttgcgttccgcagggcgatatcacggcttatcgagatgcagaccccgctgtatctggagcgtgtgctggctgtacatccctcgttccgtcgtcctggtcttgcaagaaataacaggcctgcagttcctcagcctgctccggcggtttgaggtttgacagcctcgcgctgtaccattgctttatttcgagtttcgtgtgacaaggcaataaaaccaaccagagatggtaacagtgagacattgtaaatgattgtagaaaggttgtgattattaataagttaaaatttactattttaaacttcaacaggttacacatactatctgtcatttcatcttatattttaaactttactctacgaacggtacagtctaccatttaaaactatgtt

SEQ ID NO: 208722 - DNA, 1411 bp, Zea Mays
atgaattccatgatttgacccctggtggatgacaggatgacatagcatgttaacaaattgtataccaatgtaggggattttttcttgaactacacaggagagttgcatgtcatttcattaagtaagaagataaacgttcaacaaccctggaaagatctaggttgacgttaacacacacacacacaaacaaaaaaaaacagaaggaggtgaacgacctagcaaggagttcctggagcttgaatgctccagccatgcaccataagctgcactcatctgctactgtgtagagaagtgaagtgacttggggcagccttccctcaaaaacacaagaattacaatgtttccaaacttcccatgatactaggatgcaagaggatgtaatcctttcctcatttccttgggcacactcttgattgttttaccccaccaacccaggaagcgagaggaagtcgtagactcgtaggagcagcagcggtaatgttcagttgctggaaaattagaacctacacttgccaggttcactatttttggcctgccacttctgatgctcgcagcatgtatgaggctatgtggcatgacataactgaccaatcaggagaaaatattgtttctgtcaccattcctgtaatgtttgggaggtctattgagattcctcaaagctgtaatggtgtcgcaaggtcggagcagcagattatatagcaatagctaggaactaccatacaattttcatatcagaaattccagcgatgagtatgaagatccgtgacaaggcaagaaggtttatcactcttatcgatgagttgtacaaccaccactgccgccttatatgcctagctgcctcatccattgatgatctttttcaaggaactgaggaaggacctctttttgatttagagagttttcagtttgaaaccgagtccgaagggacaaagctgaggagggatgttttggcggaaggcaatgctggctcaggaccatctactaccggccttgtggcgatattgtctggtcaagaagagatgtttgcgttccgcagggcgatatcacggcttatcgagatgcagaccccgctgtatctggagcgtgtgctggctgtacatccctcgttccgtcgtcctggtcttgcaagaaataacaggcctgcagttcctcagcctgctccggcggtttgaggtttgacagcctcgcgctgtaccattgctttatttcgagtttcgtgtgacaaggcaataaaaccaaccagagatggtaacagtgagacattgtaaatgattgtagaaaggttgtgattattaataagttaaaatttactattttaaacttcaacaggttacacatactatctgtcatttcatcttatattttaaactttactctacgaacggtacagtctaccatttaaaactatgtt

SEQ ID NO: 208723 - DNA, 1491 bp, Zea Mays
ctcaactctatctgttagctgttgtcgtagcatattcggacacacacacatctgtctgaagtcatttgcacaggccatgcttgaaatacatgatcatatgcatgatgtatggaagagacgtgatgatgacaaatctattcactcaagtgctttcagttggatatcaagccttccttttgacacaaaaattaaggagtggttgattggcgaagagaagtacaaacaacagacacaggaaaagcacatccttttggcagttgctgacaagtttttggttgatagacaggcaaataaaactggagcaagcattctatgctttgatgagatacagaccattgatgtttttgctgtggtagcactttctggcattctaagcaggctgttaagcacggggacagtacttgtagcaaccagtaataaagcaccagaagatctgaatcaggatgggatgcaaagggacatcttccttgagttattatcaaaattggatgaaagctgcaatgagattcttgtgggtactgaaaaggattatcgccgcctaattccgacagaaggctcaactgaggttcactatttttggcctgccacttctgatgctcgcagcatgtatgaggctatgtggcatgacataactgaccaatcaggagaaaatattgtttctgtcaccattcctgtaatgtttgggaggtctattgagattcctcaaagctgtaatggtgtcgcaaggtttgacttcgagtatctatgtggtcgcccagtcggagcagcagattatatagcaatagctaggaactaccatacaattttcatatcagaaattccagcgatgagtatgaagatccgtgacaaggcaagaaggtttatcactcttatcgatgagttgtacaaccaccactgccgccttatatgcctagctgcctcatccattgatgatctttttcaaggaactgaggaaggacctctttttgatttagagagttttcagtttgaaaccgagtccgaagggacaaagctgaggagggatgttttggcggaaggcaatgctggctcaggaccatctactaccggccttgtggcgatattgtctggtcaagaagagatgtttgcgttccgcagggcgatatcacggcttatcgagatgcagaccccgctgtatctggagcgtgtgctggctgtacatccctcgttccgtcgtcctggtcttgcaagaaataacaggcctgcagttcctcagcctgctccggcggtttgaggtttgacagcctcgcgctgtaccattgctttatttcgagtttcgtgtgacaaggcaataaaaccaaccagagatggtaacagtgagacattgtaaatgattgtagaaaggttgtgattattaataagttaaaatttactattttaaacttcaacaggttacacatactatctgtcatttcatcttatattttaaactttactctacgaacggtacagtctaccatttaaaactatgtt

SEQ ID NO: 208724 - DNA, 1740 bp, Zea Mays
ttgccctacatttatgaaactaacggaagacaatgttgatggacatgttctatggggccactgaaggtgtcatcaaacacaggaggaggtttcactttcatgaggccatgcttgaaatacatgatcatatgcatgatgtatggaagagacgtgatgatgacaaatctattcactcaagtgctttcagttggatatcaagccttccttttgacacaaaaattaaggagtggttgattggcgaagagaagtacaaacaacagacacaggaaaagcacatccttttggcagttgctgacaagtttttggttgatagacaggcaaataaaactggagcaagcattctatgctttgatgagatacagaccattgatgtttttgctgtggtagcactttctggcattctaagcaggctgttaagcacggggacagtacttgtagcaaccagtaataaagcaccagaagatctgaatcaggatgggatgcaaagggacatcttccttgagttattatcaaaattggatgaaagctgcaatgagattcttgtgggtactgaaaaggattatcgccgcctaattccgacagaaggctcaactgaggttcactatttttggcctgccacttctgatgctcgcagcatgtatgaggctatgtggcatgacataactgaccaatcaggagaaaatattgtttctgtcaccattcctgtaatgtttgggaggtctattgagattcctcaaagctgtaatggtgtcgcaaggtttgacttcgagtatctatgtggtcgcccagtaatatctcaacctcatttcgtatctgtctgcagttcaagttagatggaaagaaaaatttattactgcagaatagcttatattattacttgcactatagctgatagtagtcaaatacataaacttaaatttcccaacagtagttccttttttattatatctgagagcatagtagctctttcgctaatacatcgatcacccctatactaatttctcaggtcggagcagcagattatatagcaatagctaggaactaccatacaattttcatatcagaaattccagcgatgagtatgaagatccgtgacaaggcaagaaggtttatcactcttatcgatgagttgtacaaccaccactgccgccttatatgcctagctgcctcatccattgatgatctttttcaaggaactgaggaaggacctctttttgatttagagagttttcagtttgaaaccgagtccgaagggacaaagctgaggagggatgttttggcggaaggcaatgctggctcaggaccatctactaccggccttgtggcgatattgtctggtcaagaagagatgtttgcgttccgcagggcgatatcacggcttatcgagatgcagaccccgctgtatctggagcgtgtgctggctgtacatccctcgttccgtcgtcctggtcttgcaagaaataacaggcctgcagttcctcagcctgctccggcggtttgaggtttgacagcctcgcgctgtaccattgctttatttcgagtttcgtgtgacaaggcaataaaaccaaccagagatggtaacagtgagacattgtaaatgattgtagaaaggttgtgattattaataagttaaaatttactattttaaacttcaacaggttacacatactatctgtcatttcatcttatattttaaactttactctacgaacggtacagtctaccatttaaaactatgtt

SEQ ID NO: 208725 - DNA, 1699 bp, Zea Mays
taacagctcaatatgcattacaatacatctgagcatgccaggagaagaagaggaagcatagaacctggagttggtaagtgggtctcgtacctgaaccgagagaagaaactagatacattggtaggccatagaccagtcgctcctgttgctcctaaaggattgtatctctatggaaatgttggaagtgggaagacaatgttgatggacatgttctatggggccactgaaggtgtcatcaaacacaggaggaggtttcactttcatgaggccatgcttgaaatacatgatcatatgcatgatgtatggaagagacgtgatgatgacaaatctattcactcaagtgctttcagttggatatcaagccttccttttgacacaaaaattaaggagtggttgattggcgaagagaagtacaaacaacagacacaggaaaagcacatccttttggcagttgctgacaagtttttggttgatagacaggcaaataaaactggagcaagcattctatgctttgatgagatacagaccattgatgtttttgctgtggtagcactttctggcattctaagcaggctgttaagcacggggacagtacttgtagcaaccagtaataaagcaccagaagatctgaatcaggatgggatgcaaagggacatcttccttgagttattatcaaaattggatgaaagctgcaatgagattcttgtgggtactgaaaaggattatcgccgcctaattccgacagaaggctcaactgaggttcactatttttggcctgccacttctgatgctcgcagcatgtatgaggctatgtggcatgacataactgaccaatcaggagaaaatattgtttctgtcaccattcctgtaatgtttgggagttgcatgttgacaggtctattgagattcctcaaagctgtaatggtgtcgcaaggtttgacttcgagtatctatgtggtcgcccagtcggagcagcagattatatagcaatagctaggaactaccatacaattttcatatcagaaattccagcgatgagtatgaagatccgtgacaaggcaagaaggtttatcactcttatcgatgagttgtacaaccaccactgccgccttatatgcctagctgcctcatccattgatgatctttttcaaggaactgaggaaggacctctttttgatttagagagttttcagtttgaaaccgagtccgaagggacaaagctgaggagggatgttttggcggaaggcaatgctggctcaggaccatctactaccggccttgtggcgatattgtctggtcaagaagagatgtttgcgttccgcagggcgatatcacggcttatcgagatgcagaccccgctgtatctggagcgtgtgctggctgtacatccctcgttccgtcgtcctggtcttgcaagaaataacaggcctgcagttcctcagcctgctccggcggtttgaggtttgacagcctcgcgctgtaccattgctttatttcgagtttcgtgtgacaaggcaataaaaccaaccagagatggtaacagtgagacattgtaaatgattgtagaaaggttgtgattattaataagttaaaatttactattttaaacttcaacaggttacacatactatctgtcatttcatcttatattttaaactttactctacgaacggtacagtctaccatttaaaactatgtt

SEQ ID NO: 208726 - DNA, 1738 bp, Zea Mays
aaaccatccatggatggagcgctgctgttactcctcagctcctgcaagaatattaacagctcaatatgcattacaatacatctgagcatgccaggagaagaagaggaagcatagaacctggagttggtaagtgggtctcgtacctgaaccgagagaagaaactagatacattggtaggccatagaccagtcgctcctgttgctcctaaaggattgtatctctatggaaatgttggaagtgggaagacaatgttgatggacatgttctatggggccactgaaggtgtcatcaaacacaggaggaggtttcactttcatgaggccatgcttgaaatacatgatcatatgcatgatgtatggaagagacgtgatgatgacaaatctattcactcaagtgctttcagttggatatcaagccttccttttgacacaaaaattaaggagtggttgattggcgaagagaagtacaaacaacagacacaggaaaagcacatccttttggcagttgctgacaagtttttggttgatagacaggcaaataaaactggagcaagcattctatgctttgatgagatacagaccattgatgtttttgctgtggtagcactttctggcattctaagcaggctgttaagcacggggacagtacttgtagcaaccagtaataaagcaccagaagatctgaatcaggatgggatgcaaagggacatcttccttgagttattatcaaaattggatgaaagctgcaatgagattcttgtgggtactgaaaaggattatcgccgcctaattccgacagaaggctcaactgaggttcactatttttggcctgccacttctgatgctcgcagcatgtatgaggctatgtggcatgacataactgaccaatcaggagaaaatattgtttctgtcaccattcctgtaatgtttgggaggtctattgagattcctcaaagctgtaatggtgtcgcaaggtttgacttcgagtatctatgtggtcgcccagtcggagcagcagattatatagcaatagctaggaactaccatacaattttcatatcagaaattccagcgatgagtatgaagatccgtgacaaggcaagaaggtttatcactcttatcgatgagttgtacaaccaccactgccgccttatatgcctagctgcctcatccattgatgatctttttcaaggaactgaggaaggacctctttttgatttagagagttttcagtttgaaaccgagtccgaagggacaaagctgaggagggatgttttggcggaaggcaatgctggctcaggaccatctactaccggccttgtggcgatattgtctggtcaagaagagatgtttgcgttccgcagggcgatatcacggcttatcgagatgcagaccccgctgtatctggagcgtgtgctggctgtacatccctcgttccgtcgtcctggtcttgcaagaaataacaggcctgcagttcctcagcctgctccggcggtttgaggtttgacagcctcgcgctgtaccattgctttatttcgagtttcgtgtgacaaggcaataaaaccaaccagagatggtaacagtgagacattgtaaatgattgtagaaaggttgtgattattaataagttaaaatttactattttaaacttcaacaggttacacatactatctgtcatttcatcttatattttaaactttactctacgaacggtacagtctaccatttaaaactatgtt

SEQ ID NO: 208727 - DNA, 3388 bp, Zea Mays
cgttttctctggtacctaataagcatatatcctttggggacatacctgaaacttgtatccagaaggagtgaatggggtagctttcttgccacctttagaaagtccatttgattattttctcttggacaggacaggcagtgagatgagctgcgtcaagcaagcactgccagtgccagcagcagatataagcagaaggcaggtgatgcgaatggccgtccgtccatggcgttgcccattgagcattcctcaaggccgaccctggggtttcccttggggacggccctcttgctcctcgtgatctttgccctgagtggcatgttctcgtgctgctaccactgggacaagctccgctccctcctccggtctcggcatccaggcatgttccaggagggcacctccgtcgcgtcctcgccgagcaagacgacctgtgatcacaagctggacagagcgtgtggtttgcccgttatcatgcctggggacaaggtccccaggttcttcgcgaggccctgccctcacgagacgtctttgtgtttgccccaagctgcagagaagacggctggagttccgtcggagaccagatcatgcatgagccgtccgtcagtatctgtataaacacctgcatgacgcagttagctgttacggtgaccgactgtgtgtgtatatcatatgcttttggtaatacaatacaaagtgtgcaaacattccacttgtgatatatactatatacaagatttagacagtgttaggacttattcgttttgttctcaatctatgtgtaatagatgagattgagtgagtttaaattctaaacaagtcaaaatctttcataatttttttaataccatcaactccatatgccaaacaaacctggtgcactgcatgctcgtgtggaaataatcgtgcttgttgatgggcaaccaaatgagcccacgggcccagctacttcctctcggcccacgcgttcgcggtcagcaaggacgccgcgtcaccttccctccctgacccgacaaaccaacgccgcgtactcctctctactctctgccccgccaccaagctcgaccgaccgatgatcctcagccgcctgcatgtccgtgtcacccgccgatcccccgcgtccgccgccctccgcgatgcggcaacgcgcgccttggcctccgcgggcctcttccgtggcctccacggcggcgcctcctccgagcacggccgcgaacccgcaggtcctcttacgctctacaggaagctagtgagccaagggaagctcacgcatgatagttaccaggaaaatgtagcttccgaattagacaacctacttagtaggcttcaacggtacgagatggaaatggaggattatcatgacaagctgtacttctgggagaatagcagggagaaagagcggcgcaggcttcttgtcgaagaagctgaagataagcagcgtggtggtgtatggattgatgagagaaggggatttcttgacaagttggttgcacggagaagaagaggaagcatagaacctggagttggtaagtgggtctcgtacctgaaccgagagaagaaactagatacattggtaggccatagaccagtcgctcctgttgctcctaaaggattgtatctctatggaaatgttggaagtgggaagacaatgttgatggacatgttctatggggccactgaaggtgtcatcaaacacaggaggaggtttcactttcatgaggccatgcttgaaatacatgatcatatgcatgatgtatggaagagacgtgatgatgacaaatctattcactcaagtgctttcagttggatatcaagccttccttttgacacaaaaattaaggagtggttgattggcgaagagaagtacaaacaacagacacaggaaaagcacatccttttggcagttgctgacaagtttttggttgatagacaggcaaataaaactggagcaagcattctatgctttgatgagatacagaccattgatgtttttgctgtggtagcactttctggcattctaagcaggctgttaagcacggggacagtacttgtagcaaccagtaataaagcaccagaagatctgaatcaggatgggatgcaaagggacatcttccttgagttattatcaaaattggatgaaagctgcaatgagattcttgtgggtactgaaaaggattatcgccgcctaattccgacagaaggctcaactgaggcgcaacaaccttatggttacgaccctttcacgtcgcatatataaatacagggagagagaatcggcacgataaccaacgtttgtcgtagcctcctcttcccaacataccatgagatccgatcttctcctaagcacagttagtgaagtaaaggccgctgccgctacctcaccgttttgagttgagagtcatcaacctaatgatgtcgtcctccgatcccaaaggtataatctattagtttctatgcatctagtggctagggttgtgggtacaaggtcctagtttctctaacaatatcctcttctaagcacctgcagatttactcactatccgttgtatttattattccctgtattatctgtcatattatgttttttttgaaacgaaccagacaggagagctgccgattatattaataaaggagaaggatccggatcggacagagcaacaaaacaacatgcggttggattgggacaccaacacgccaaactcaccggttggattgggacatcaacccggcacaacactcaccgcttacagaatgcacaaacatccccgataacgggagcccctcacacacaacccatccagagttatcgttgccgagctcgacccaagggacaagcagctccgactccgcaaaacgggccgcacatggccaaagaaaacacgacaacacctacaaccaaacacaccagcatagaaggagaaagatcacagtgcgtcgtcgttgccaagcctcaacacaccccacgtgagacaactccgattcttcaccaatgagcttgaacctccgtcctacccccagtagatgcacgacccttcgaaacaatccagtccacgaagaagggggcttgtcagctgtcatcgttgtcgagccacaacccctgatgcagcagcttcgacttcaccttgcaaagccccatcttcacccgcataccagacgccgagaatcaaaagcaaccatcgaaggcgaagctgaggccgacaaacttcaatgcgacgccttcaggaagggagtgacatcggggacgtcaccatcgcgagtacgagatggaccaggctttcgcccaaggaagaaaatgttggggaatacgacgcccccaacaggggaagcggcgtgtcgccgtcgccgaggctctcgcccaagaagcccctagcaccaacgtcaggccaagagctac

SEQ ID NO: 208728 - DNA, 743 bp, Zea Mays
ggccattttgccctacatttatgaaactaacggaagacaatgttgatggacatgttctatggggccactgaaggtgtcatcaaacacaggaggaggtttcactttcatgaggccatgcttgaaatacatgatcatatgcatgatgtatggaagagacgtgatgatgacaaatctattcactcaagtgctttcagttggatatcaagccttccttttgacacaaaaattaaggagtggttgattggcgaagagaagtacaaacaacagacacaggaaaagcacatccttttggcagttgctgacaagtttttggttgatagacaggcaaataaaactggagcaagcattctatgctttgatgagatacagaccattgatgtttttgctgtggtagcactttctggcattctaagcaggctgttaagcacggggacagtacttgtagcaaccagtaataaagcaccagaagatctgaatcaggatgggatgcaaagggacatcttccttgagttattatcaaaattggatgaaagctgcaatgagattcttgtgggtactgaaaaggattatcgccgcctaattccgacagaaggctcaactgaggaagcgagaggaagtcgtagactcgtaggagcagcagcggtaatgttcagttgctggaaaattagaacctacacttgccaggtgaaaacacaagtggtcagaaggtgttgtattgttttttattgttgttaggcgatcag

SEQ ID NO: 208729 - DNA, 2050 bp, Zea Mays
tacatctgcactcaccgaaagtggcaacttgttttcagtgtgcgtgttgggggtggggggagcagccttggagggagctttacagcaacaacataagtgggacaataccccctgaactggggaacctgactaacctggtcagtttggatctgtatatgaacaacttctctggcaatatccctgacagcctggggaatctagtgaagctgcgtttcctgatagacgtcttaacaacaatagcttggttggtccgattcccgtatccttgaccaatatctccactctccaagtactggatctctcgaacaacaacctctcaggacaagtcccatcgactggctccttttcactcttcacccctataagttttgccaacaatccaaatctttgtggccctggtacttcgaagccctgccctggggctcctcccttttccccacctcctccattcaatcctccatctcccccaactcaatctactggtgcttctagcactggagcaatagctggaggtgttgctgctggtgcagcattggtgtttgctgttcctgcaattgcatttgcaatgtggcgccgtcgtaaacctgaagagcatttcttcgatgttcctgccgaggaggatccagaagtccatcttggtcagctcaaaaagttttcattgcgggagcttcaagttgcaactgataatttcagtaacaagaacattttaggaagaggcggttttggaaaagtgtacaaaggaaggcttgctgatggctcattggtagcagtgaaaagactaaaagaggagcgtacacctggtggtgagcttcagttccaaacagaggttgagatgattagcatggcggtgcacaagaaccttctccgacttcgtggtttctgcatgacacctactgaaaggttgttagtctacccatacatggctaacgggagtgtggcatcacgtttacgagagcggcagccatctgagccacctcttagctgggaaccaagaagacggattgcactgggatctgcaagaggactttcttacttgcatgatcactgcgatcccaaaatcatccatcgggatgtcaaagctgcaaatattcttttggatgaggacttcgaggcagttgtgggtgatttcgggcttgccaagcttatggactacaaggatacccatgtcacaacagctgttcgtggaacaattgggcacattgctcccgagtacctatctaccggcaagtcttctgagaagactgatgtttttggctatgggatcatgcttctggagcttattactggccagagggcatttgatctagctcgtcttgcaaatgatgacgatgttatgcttcttgactgggtgaaaggactgttgaaggagaagaaggtggagatgctggtggacccagatctgcagaaagcctacgaggaggtcgaggtggagagccttattcaggtggcactcctctgcacgcagggctcccccctggaccgtccaaagatgtcggaggtggtgaggatgctcgaaggtgacgggctggcagagcgttgggacgaatggcagaaagtagaggtggtgaggcaggaggctgagtcggcaccgctccgcaatgactggatcgtcgattccacgtacaaccttcgtgccgtggagctgtccggcccaaggtagccactccacgactccgatgaaagaaaacactgaattggccaagattcagtctaattgctgcttgtgtatatgaaaggtagcttttggaattgttagcgacaatttgaaaggatcgatcttttttttttggattcctcgctagctcagatgttggttacgctgaggttgtgttaaggtgaaaattcgtatatctaagggtgaatttctaaagcattcttgcaatagtccagcagcgaatgtagcagctattgtactacgtggtatgcagaaccgtgttacgttttgccatagcttagttctggttcagctttctaagccacggtcaaaagtttggaatcttacttagggctagcttagaaactcaaatctcctttccttctcaaccatctc

SEQ ID NO: 208730 - DNA, 2241 bp, Zea Mays
ccatggtgtaccatgaatagaagaacgtcggacactgttgtactaacaatggatggggccaacagtgatgccctgtacagcctgcgtcagagcttgaaagatgctaacaatgtcttgcagagttgggatcccactcttgttaatccatgtacatggttccatgttacgtgtaacaacgataacagtgttatcagagttgaccttggaaatgcacaattatctggcgttctagtgccacaacttggccagctgaaaaatctccaatatttggagctttacagcaacaacataagtgggacaataccccctgaactggggaacctgactaacctggtcagtttggatctgtatatgaacaacttctctggcaatatccctgacagcctggggaatctagtgaagctgcgtttcctacgtcttaacaacaatagcttggttggtccgattcccgtatccttgaccaatatctccactctccaagtactggatctctcgaacaacaacctctcaggacaagtcccatcgactggctccttttcactcttcacccctataagttttgccaacaatccaaatctttgtggccctggtacttcgaagccctgccctggggctcctcccttttccccacctcctccattcaatcctccatctcccccaactcaatctactggtgcttctagcactggagcaatagctggaggtgttgctgctggtgcagcattggtgtttgctgttcctgcaattgcatttgcaatgtggcgccgtcgtaaacctgaagagcatttcttcgatgttcctgccgaggaggatccagaagtccatcttggtcagctcaaaaagttttcattgcgggagcttcaagttgcaactgataatttcagtaacaagaacattttaggaagaggcggttttggaaaagtgtacaaaggaaggcttgctgatggctcattggtagcagtgaaaagactaaaagaggagcgtacacctggtggtgagcttcagttccaaacagaggttgagatgattagcatggcggtgcacaagaaccttctccgacttcgtggtttctgcatgacacctactgaaaggttgttagtctacccatacatggctaacgggagtgtggcatcacgtttacgagagcggcagccatctgagccacctcttagctgggaaccaagaagacggattgcactgggatctgcaagaggactttcttacttgcatgatcactgcgatcccaaaatcatccatcgggatgtcaaagctgcaaatattcttttggatgaggacttcgaggcagttgtgggtgatttcgggcttgccaagcttatggactacaaggatacccatgtcacaacagctgttcgtggaacaattgggcacattgctcccgagtacctatctaccggcaagtcttctgagaagactgatgtttttggctatgggatcatgcttctggagcttattactggccagagggcatttgatctagctcgtcttgcaaatgatgacgatgttatgcttcttgactgggtgaaaggactgttgaaggagaagaaggtggagatgctggtggacccagatctgcagaaagcctacgaggaggtcgaggtggagagccttattcaggtggcactcctctgcacgcagggctcccccctggaccgtccaaagatgtcggaggtggtgaggatgctcgaaggtgacgggctggcagagcgttgggacgaatggcagaaagtagaggtggtgaggcaggaggctgagtcggcaccgctccgcaatgactggatcgtcgattccacgtacaaccttcgtgccgtggagctgtccggcccaaggtagccactccacgactccgatgaaagaaaacactgaattggccaagattcagtctaattgctgcttgtgtatatgaaaggtagcttttggaattgttagcgacaatttgaaaggatcgatcttttttttttggattcctcgctagctcagatgttggttacgctgaggttgtgttaaggtgaaaattcgtatatctaagggtgaatttctaaagcattcttgcaatagtccagcagcgaatgtagcagctattgtactacgtggtatgcagaaccgtgttacgttttgccatagcttagttctggttcagctttctaagccacggtcaaaagtttggaatcttacttagggctagcttagaaactcaaatctcctttccttctcaaccatctc

SEQ ID NO: 208731 - DNA, 2891 bp, Zea Mays
ccgaggaccgcgtccacgagatccccagcggccagcgcccgcacgccgccatgtcagcagatgcccgccgcggcggggccagcacgtcccccctgctcccctccctcctcctccccactacactacttccatcaagtcacccaccccactccccccgagaccgagagcacgccgcctgcgcccgcaaccgggtagcactctcacttccacgtgggccggagagatcactggtcccgcacgtcggtgacgtcctgcggtggggcgccccttcttccgcgagcgtagggcgacggtcccaccgcggagtagaagaacaatttaggtcgcgacatacacacatatacacacgcgcacaggcacagccggactcggtttcgactttcgagctacagagaattcgtcccggaaaagaaaaaaaaatcacccttccatccgccagagagagagagagaggagtgggaggaccggaggaggagttcaggagggagaggtcggcggcggcgcggcagatcgggtagcaccgtgcagctcgggccttaggcgcaccagcggtggggggatccgcgcgcccatgcgccggtgaggtggtggggcccgcttggcgctcgagttggaatggcggcgtcggcgtcggctgggaggtggtgggcggtggtccttgcggtcgcggtgctgctcgggccgggacgggtcgtcgccaacaccgagggtgatgccctgtacagcctgcgtcagagcttgaaagatgctaacaatgtcttgcagagttgggatcccactcttgttaatccatgtacatggttccatgttacgtgtaacaacgataacagtgttatcagagttgaccttggaaatgcacaattatctggcgttctagtgccacaacttggccagctgaaaaatctccaatatttggagctttacagcaacaacataagtgggacaataccccctgaactggggaacctgactaacctggtcagtttggatctgtatatgaacaacttctctggcaatatccctgacagcctggggaatctagtgaagctgcgtttcctgatagacgtcttaacaacaatagcttggttggtccgattcccgtatccttgaccaatatctccactctccaagtactggatctctcgaacaacaacctctcaggacaagtcccatcgactggctccttttcactcttcacccctataagttttgccaacaatccaaatctttgtggccctggtacttcgaagccctgccctggggctcctcccttttccccacctcctccattcaatcctccatctcccccaactcaatctactggtgcttctagcactggagcaatagctggaggtgttgctgctggtgcagcattggtgtttgctgttcctgcaattgcatttgcaatgtggcgccgtcgtaaacctgaagagcatttcttcgatgttcctgccgaggaggatccagaagtccatcttggtcagctcaaaaagttttcattgcgggagcttcaagttgcaactgataatttcagtaacaagaacattttaggaagaggcggttttggaaaagtgtacaaaggaaggcttgctgatggctcattggtagcagtgaaaagactaaaagaggagcgtacacctggtggtgagcttcagttccaaacagaggttgagatgattagcatggcggtgcacaagaaccttctccgacttcgtggtttctgcatgacacctactgaaaggttgttagtctacccatacatggctaacgggagtgtggcatcacgtttacgagagcggcagccatctgagccacctcttagctgggaaccaagaagacggattgcactgggatctgcaagaggactttcttacttgcatgatcactgcgatcccaaaatcatccatcgggatgtcaaagctgcaaatattcttttggatgaggacttcgaggcagttgtgggtgatttcgggcttgccaagcttatggactacaaggatacccatgtcacaacagctgttcgtggaacaattgggcacattgctcccgagtacctatctaccggcaagtcttctgagaagactgatgtttttggctatgggatcatgcttctggagcttattactggccagagggcatttgatctagctcgtcttgcaaatgatgacgatgttatgcttcttgactgggtgaaaggactgttgaaggagaagaaggtggagatgctggtggacccagatctgcagaaagcctacgaggaggtcgaggtggagagccttattcaggtggcactcctctgcacgcagggctcccccctggaccgtccaaagatgtcggaggtggtgaggatgctcgaaggtgacgggctggcagagcgttgggacgaatggcagaaagtagaggtggtgaggcaggaggctgagtcggcaccgctccgcaatgactggatcgtcgattccacgtacaaccttcgtgccgtggagctgtccggcccaaggtagccactccacgactccgatgaaagaaaacactgaattggccaagattcagtctaattgctgcttgtgtatatgaaaggtagcttttggaattgttagcgacaatttgaaaggatcgatcttttttttttggattcctcgctagctcagatgttggttacgctgaggttgtgttaaggtgaaaattcgtatatctaagggtgaatttctaaagcattcttgcaatagtccagcagcgaatgtagcagctattgtactacgtggtatgcagaaccgtgttacgttttgccatagcttagttctggttcagctttctaagccacggtcaaaagtttggaatcttacttagggctagcttagaaactcaaatctcctttccttctcaaccatctc

SEQ ID NO: 208732 - DNA, 998 bp, Zea Mays
aaaccctaaccgaccacctgcaatctccaggcggtggtggcggctagccatggcgcgcgcgggcgcggtggcgaggcaccaacggtcccgacggcgcgggtgccagccaaggcacggcggcctcgggcgcggcggcggcggcccggccgcatcctcggcgcgcgggctcgggtgcggccccggccccagcctcggcgcgcgggcgcaagcgcggcggcactgctacacgcggctgcccgacgcgggcgcgtcccctggcggtcttggctcaggcgcgtcgccccgggtgcggccatgacgtggcggcactggccccggcggcggtccggccacagcgcacggcgcgacgctgtcacctggccatggcgcgggcggcagggcacctggtgtcccagcccctgccaggcgctcgacctcggcgtggctccggccacccggcgcgggcggtccggctacggcggctcagcggcccctgcacgggcgcagtccctcggcggcgtgcggctccctggtcgtgcgcgggcccggcaagacgggcggccaccgacggcgcactgctgtcccggcggtgcaggcgagccccccggtgcgcgcgggcgcgggcgcgaggcacgcgggggcgcaaggcgcgacggctcagcgcggtctcgactgcccgtctacggcgcagccaccccgtggcgggcggctcccgacctcaacggctcgggcgcgggtccggctgctcggccatggcggcacaagtgcgcggccccctgagcgggcgagcgcgcagtcccgcggctctggcagtgcgggcgctaaccaggcgcagccagtgtgggttcgtcccggcgggcgcatggtaccggccatggtgccccgttgaggcgcgtgcgcgcacatggtattctcacggaggcaaccagacggtcgaacggatcatcatggtacagaacactccatgcataggagtgggcagaaagtgcagtcctgtacaggtatagttgtgctcctgc

SEQ ID NO: 208733 - DNA, 1364 bp, Zea Mays
ggcccaatcagaggaaatagcccacagtgtctagccagactgaaaacagcccatttggcccacctaagcgagcacataagaactgtcggttagggttaggaaaccctaaccgaccacctgcaatctccaggcggtggtggcggctagccatggcgcgcgcgggcgcggtggcgaggcaccaacggtcccgacggcgcgggtgccagccaaggcacggcggcctcgggcgcggcggcggcggcccggccgcatcctcggcgcgcgggctcgggtgcggccccggccccagcctcggcgcgcgggcgcaagcgcggcggcactgctacacgcggctgcccgacgcgggcgcgtcccctggcggtcttggctcaggcgcgtcgccccgggtgcggccatgacgtggcggcactggccccggcggcggtccggccacagcgcacggcgcgacgctgtcacctggccatggcgcgggcggcagggcacctggtgtcccagcccctgccaggcgctcgacctcggcgtggctccggccacccggcgcgggcggtccggctacggcggctcagcggcccctgcacgggcgcagtccctcggcggcgtgcggctccctggtcgtgcgcgggcccggcaagacgggcggccaccgacggcgcactgctgtcccggcggtgcaggcgagccccccggtgcgcgcgggcgcgggcgcgaggcacgcgggggcgcaaggcgcgacggctcagcgcggtctcgactgcccgtctacggcgcagccaccccgtggcgggcggctcccgacctcaacggctcgggcgcgggtccggctgctcggccatggcggcacaagtgcgcggccccctgagcgggcgagcgcgcagtcccgcggctctggcagtgcgggcgctaaccaggcgcagccagtgtgggttcgtcccggcgggcgcatggtaccggccatggtgccccgttgaggcgcgtgcgcgcacatggtattctcacggaggcaaccagacggtcgaacggatcatcatggtacagaacactccatgcataggagtgggcagaaagactgccagactccagcgagatcatctccttccagtggtgtcgggttgttgtccagcgtccagccattagacatacgccggatgcacggatgcatggacattgctgtcgacggtaaccgctcggtggagagcaaagtgctgataacgtgttgaatctcagtggagagagacagataatgacaaatgactgaactcattattgcagggaacatcctgatatatatacaggtgaagggttgcgttctcaagggggtgtcccttggaaataatctgtcgcaccccttggattgatcacaaata

SEQ ID NO: 208734 - DNA, 3731 bp, Zea Mays
acggatacctagctagtgatattgatgaaccctgtggcctgacccagtgccagctcgttgacatgaaggcttaccgtccgatacgagcactccaaggcgatccaacggccgcgatctggaggaacggtctcctaacctccgatatttcctttctcccttatcgccttcgcctccgcggctccgcctcgctctccaaggttctgccgaggtttctcgcctccccgctcccccctctccgagtctccgtccttgccactcctctctcccctcttccacctcaatccaatccgaccctcaccattgtagccggaactcgcagcgggacactaggcgcgcatgccgctcctcctctaccccttctccgcgtgcgtgccgccgccgcgggcgctgctccgccgcctgtcgccgccgccgcccatggcggtcgtcgctccgctgccttccgccgtccgtataatcccctcggtgggaacgctcgaccttccggcgctcccgcccccgcccacggacgacttccactggctcgacctattcgcgttcctcaactcccctgccgacacctaccaccagatccccgcgcagggcgaagaggagctggaggcggggctggaactggaactggagctggagctggagaagcacgccgaggtggagaggcagcgggggcgggcgcgaagagcgcaactccggcggctgcggcagcggcaggtcaaggcggagacggaggcctgggcgcgggccgccgaggagtaccgcgagatcgagcgggagatgctcgaccgcaggctcgcgcccgcgctgccctacgtaaaggcgctcttcgtcggctggttcgagccgctgcgggacgccatcgccagggaccaggacgtgcagcgaaggaagcgggtcaagcacgtctacgctaagtacctgcttctgctcccagccgacaaggtggccgtaatcgtcatgcacaagatgatgggcctgctcatgtccagcaaggacggcactggcagtgtccgcgttgtccaggccgcgcactgcattggtgaggctgttgagcgcgagttcaaagtccagtcattctttcagaaaagtaggaagaagaaaatccaaggtgaaaatgatccagcattggagaaggagcaagctaaatgccgtaagcgtgttaagagtttagttaagaggcggaagatgagtgaagcacagaggctagttcaacaggagttggaattggaggaatggggcacagaagcccaagtgaagttgggaagtcgcctgattgaattattactagattcagcatttgtgcagccaccagctgatcaaacaccagatagttctccagatattcgacctgcatttaagcatgtgctacgtcagcctataatagaaaatgggaggctaaagaagaagcattgggtgatagagtgtgaccatcttgtgcatgaggggtttgaaagcactgctcggcatgttgatataccctacctccctatgctggtacctccgaagaaatggaaaggttatgataaaggtggtcacctttttctgccctcatacattatgaggacacatggtgtgaaggaccaaaaggatgcaattaatagtgttcctagaaaacagctgcgaaaagtatttgaggcattagatatccttgggagtactaaatggagggtgaatagaagagttcatgatgttgttgagactatctggagtcaaggtggaggcattgcagggctggtggacaaggcaaatattcctttgcctgaacgaccagaatcagaggatcctgatgaaatgcagaaatggaagtggagtttaaagaaggcaaagaaaactaaccgtgaactgcatgctgagagatgtgacactgagctcaaactctcggttgctcgtaaaatgagagaggaggatggattttattaccctcacaatttagatttccgtgggcgtgcataccctatgcatcctcatttgagtcacctaggttcagatctttgtcggggtgttctagagtatgctgaagggcggccactaggaaagtcagggttgtgctggttgaagatacacttggctaacaaatatggtggtggcattgaaaagctttctcacgagggcaagctagcttttgtggagaaccaactgtttgatatatttgattcagcagcaaatcctgttgatgggaactgctggtggacgaatgctgaggatccctttcagtgtttagctgcatgcatggacctttctgatgccttaagaagtccatcaccttaccatgctgtctctcacctgcctattcatcaggatggttcatgcaatggtttacaacattatgccgctcttggaagggactatatgggcgcggttgctgtcaaccttgttcccggagagaaacctgcagatatctactcagaaatagcttctagggtactgaatgttgtatgtgaagactcgatgaaggatcctgctactaacccaactgcttcattagcaagagttttagttgatcaggtggataggaagcttgtcaagcagacagtcatgacatcagtctatggtgttacatacattggtgctcgtcagcagattacaaagagactgcaagagaaagggcttatcacagatgataaattgctgtatgatgtatcctgttacgctactcgggtaactttggatgcactgggacaaatgttccaatctgcccgtggtataatggcctggcttggtgactgtgcgaagatgattgcttcaaaaaatcaaccagtcaagtggacaagtcctgttggtctcccagttgttcagccctacaagaaatataagaattatatggagttcatgactcattttgggtgcatgcgtgtgatgttgatcaaatgaaccagatattgagacaacaatttgtggagctttacagcatgccgattcttgaaaatctgctggaggagttccaaacgtcattccccacactagaatttccaccctgcccaccgcaaggtaactttgacgtgagggaagttctgacttcaacatacttcttcaactaagcttaacaggggaagttctgcacatgaaacatggtgagaagttgtgtccttggatgtttggagtaaccagatcgtgaaatcattctatgcttgagccatatataggagttgatactgaactaattctcgcatggcttttagcataagcaagaaacaggagtcaatcaattatctgcactccagaccaagccaagtggttccaaggaatttgaaatgaacaaacctaaagtagttcctgctgagtttttaggttgatgcagaatctgcttggatgttcaggtcactcattggttgccatgacaactcatggtatactccaccctggagtgcaaaggtaaattatgagatgccagagcagaatactgactgacagttgatcgtgctgacctcattgatcatagacgacagcggaacacaaagttcgctgaatatacgtgtacgttgtaccatcaatttttttgctgtcttaggacttgtagatcgcataatgccgtggcatcaccctgtaataaatgtgtaagatatgatagccaaatagatgtatacgagactagttgctgttgacagcaagttttgaaaagagagacatgaatcaggcagacttcaccggttcactgatgttctgatctcttcctgaaataatcgtagtaccttcattttggtcttgctaattgttaaaataatcgttctggattatcc

SEQ ID NO: 208735 - DNA, 1468 bp, Zea Mays
tatcctttaagaattcttgaaagcaatgggcgcggttgctgtcaaccttgttcccggagagaaacctgcagatatctactcagaaatagcttctagggtactgaatgttgtatgtgaagactcgatgaaggatcctgctactaacccaactgcttcattagcaagagttttagttgatcaggtggataggaagcttgtcaagcagacagtcatgacatcagtctatggtgttacatacattggtgctcgtcagcagattacaaagagactgcaagagaaagggcttatcacagatgataaattgctgtatgatgtatcctgttacgctactcgggtaactttggatgcactgggacaaatgttccaatctgcccgtggtataatggcctggcttggtgactgtgcgaagatgattgcttcaaaaaatcaaccagtcaagtggacaagtcctgttggtctcccagttgttcagccctacaagaaatataagaattatatgatacgaacttctttgcaatgtctggctttacggcgggagggtgatgcaattgcaatccaaaggcaaaaggcagcttttccaccaaattttgtgcactcactggatagttcacatatgatgatgacagcgattgcttgcaaggagtctggccttcattttgcaggagttcatgactcattttgggtgcatgcgtgtgatgttgatcaaatgaaccagatattgagacaacaatttgtggagctttacagcatgccgattcttgaaaatctgctggaggagttccaaacgtcattccccacactagaatttccaccctgcccaccgcaaggtaactttgacgtgagggaagttctgacttcaacatacttcttcaactaagcttaacaggggaagttctgcacatgaaacatgcataagcaagaaacaggagtcaatcaattatctgcactccagaccaagccaagtggttccaaggaatttgaaatgaacaaacctaaagtagttcctgctgagtttttaggttgatgcagaatctgcttggatgttcaggtcactcattggttgccatgacaactcatggtatactccaccctggagtgcaaaggtaaattatgagatgccagagcagaatactgactgacagttgatcgtgctgacctcattgatcatagacgacagcggaacacaaagttcgctgaatatacgtgtacgttgtaccatcaatttttttgctgtcttaggacttgtagatcgcataatgccgtggcatcaccctgtaataaatgtgtaagatatgatagccaaatagatgtatacgagactagttgctgttgacagcaagttttgaaaagagagacatgaatcaggcagacttcaccggttcactgatgttctgatctcttcctgaaataatcgtagtaccttcattttggtcttgctaattgttaaaataatcgttctggattatcc

SEQ ID NO: 208736 - DNA, 1383 bp, Zea Mays
atcttgcatccagattccagagaacaggagaaagaaaagttgcgaaaaaagaacaacaaaaaaggaaacgaaaacgagcgggggagctcgcggaccccaaaaccctaaccccgcggacccacctggcggcggcggcggcggcgatggcggacggcggaggagaaggaggacctcctgcggcgtcggcggcgctcaaggaccaggggaatgagcagttcaaggcggggagctacctcaaggctgccgcgctctacacgcaggccatcaagctcgaccccgacaacgccaccctctacagcaaccgagctgcagcattcctgcagttggttaagcttagcaaagcgcttgctgatgcagagacaacagtcaggctgaagccacaatgggagaagggtcatttcaggaaaggttgtgttttggaggcaatggagcgctatgaagaggctacaaagtatggagatgcagaaacagggcagagtgtcttttctttcattgttaatgtggtagaatcagcagtaaaggtttggcatgatacaggaaaagtagatccaagggtccattttcttctcgatgatcagaagaccgatactgaaaaatatgccccagtagttaacattgacaaggcatttgagtcccccaacactcatgctgagtgcttcacatatctgcggcaatacgcggagaattgttctgcgaaggctgcttgtatggtggcacctaagagcatcatctcctacccacaggtctggaaagggcaagggtcgaggaagtggaagcttgaccagagcgacgggttcttcgtgcaattcgaggcaccggcgctgaggaagatatggtttgtgccaagcacaaaagagaagggacggacattgtgcaggagccctgaggccttggacatcggcatccatgaagtgctcccccgtatattcaaggaggcagcttaagcccaataatggaggactgtccatggattcctgatcctgcacagcgcttgctggatgttctccctgggacctgggaggaggaaagagctcgcccgacatacatttgtgtaaccagtggaatcggctacgctggcagacgcagactcggaagatttgatgctgtcactgtgctatgcaatgagcgtgttgtgtttcgagtggcaccgtctcgtggttagtgcgggtgttttgtttccattttcttttgattatctacctatttaccgaatgatccctgtcaagagctatgctcctttttttttcttcttcaccggaaggacaagatcgctgttggtgcccctgtgggagtggcaagcacacgggaggaagggtgggtgtgatgtaaagcgggatgaacagctatatacctaggtggattgggtgagacagaacagcaacc

SEQ ID NO: 208737 - DNA, 2132 bp, Zea Mays
atcgcttgctcgctcgttgcttttggcaggtatagcaagcacacccccttcagccatcgagcctcagttagcatctctagctagctgctatagctcttctccacgtttagctttcaataatccatcgtctctgcaggtagccagcagacaccacttcacaagcaggatggcaatgaactctggttgttgttttgccagggtcccagccctatgaaagcgcgttacgtttacgcagtgctctttctactggccaacttgtgtgcgtggctcatgcgagagaaccgtatatcatattacttagcgcagcggggcaacgcccgctgtcacggtgaccagggctgtctcgcggctcagagcgtgctgacaattagccagactttctgtatgtttttcgtgggcatgctaatatccactgtgaccacgaccaagttgaatgaccgcagaaattcatggcactgcgggtggtggccggtgaaggttgccctgattataggttgtttcttcttctctcaggttgttccatccggttggatcgaaacctacgggaaagttgcgcaggttggagcaggggtatttcttgtacttcagcttatgtctaccataagatttatcacacagctgaactacaaattatgcgagaccaattttgaagaaaggtacatccgtgtcatcgcaatctctggtactgccatcctcacatttttgggattgatagtattcttgagcctaaagtttgtacagtgttggcacaatatggagctcattgtcatcacaatggtgctatttttcatcatgtgtggagtctcactaatgtccaaggctaacaaatttttcatggagcctgcattaattggtgggtacgctactttcatatgcctgttagcgattacaaggtaaaatattcacactgcgttaagcgactatttgattagcctggttcaggccacacaatatatatacaaacataaattattttttattgtttttgccatatattttgctccatcagtgaacctgagtcaggatgcgacataaaatgcaaagcaggttcagttgctgttttttgtttctggactcctcggcactgtttattctgcttttactatgggcaccggctacaaatgtgtatgttgattgttcactcgatccaactcaacaatttaatcatatctattaacgaaactgaggattgtatgctttataaattcaaaatgtctcaaataattatggcagacacgaaacacgttggagtcggaagacaatgtaccatatgggtacggtttttttcatttcatcttcatgtcgggctgcatgtactttggaatgatgtttgttgcctgggacacacatcataccatggaagaatggaacgtagatattgggtggatcagcacatggatccatatcgctagcgaggctctggtggtagtatcctacttaacgatactgctggccagaattttgggagtagactggctccaacacttcctcgcaaagatctttggaacagatgaccagctccacggcgatgaatcccatacgacgatcgtgcatggtgatgaatccgagacgacgaccgtgcatggtgatgaattcaagacgacgaccgtgcatggtgatgaatccgagacgaggaccgtgcatggtgatgaatccgagacgacgaccgtgcatggtgatgaatccgagacgacgaacacgcatgtcacatcgtcgtcctctttgtatcacacagcgtcgccctcttcgctctactactcccccgagcaatcaccgcccaataacactgaccatcaacctcctccgccaccgccttcatcgtcctcccctcacaccatagaactgcaaatgttcgagataccaaacatcggtacctctggcatgaatgaagaggaggacgatgatgaccatattagagaatgggagagtgaataattggtcgctccgtaattaacaacttgtatttcgacatccactagtagaaaagagctctaaggtggcggcatgtagaaatttatactgacggtttcagttacagcatgctagtgaaaataaacaggtggccctgccttaaggaaccaccagtctaaaaatatacactagcggttcacttaactgaaccgtaagtggaa

SEQ ID NO: 208738 - DNA, 1243 bp, Zea Mays
cgaccattcatggcatcttttgatgcatgggtgtttttggtagcaactttcatcttacaagtcctggcatccaggtttacgcatgcagactccttattttagccaacgcaagagcacgaacaaacagaggaatttcaccttggcccttcctcgtcgatcaacgcgaatccgtctccgtccgtacagaagagttgcctgtgaatctgtgattgaggacgaaccatgcgtcgtccatcgatcatgaggcggcgtctccaacggagctaaggagatcggtcggtgagcggtggattgaagaatcgggagctagcgaggagggaggaggatggaggaggtggagcagcagctgaccaagaaacagatcgaggagttccgggaggcgttcagcctcttcgacaaagatggcgacgggacgatcacgaccaaggagctgggcacggtgatgcggtcgctggggcagagcccgacggaggaggagctgcaggagatggtggacgaggtggacgcggacggcagcggcgccatcgacctgcaggagttcctgaccctgctggcgcgccagatgcgggaggcgagcggcgccgacgaggacgagctccgggaggccttccacgtcttcgaccaggaccagaacggcttcatctcccgcgacgagctccgccacgtcctccagaacctcggcgagcgcctctccgaggaggagctcgccgagatgctccgcgaggccgacgcggacggcgacggccagatcaactactccgagttcgccaaggtcatgcttgccaaacgaaggaaccaggagctggaagagcatgggagtgaatcgtctcactccaagggactctgcccctcctgtataatcctctgaaactcgactcgttctgccaccctagtttctactttctagctgccaggaggaagaaatgtactgtaactaacagcaagcaaagcagaagaatctgcatggctcacggtgtaattttttttaaaaaaactactgaaatgaatggcagatttagccattctgttcagtaaaggaaatcaacatgaataataatgttagacagaagaagaagtttacaaaacagaaggttgcagttaactgaacagaatggctaaaatctgcctcatgcttctgaatcttgcaaacattctctctctctctcttgatctcctgcgggtacagtgactagaacctagagtagagactacagaatagtaaggtttgcaaaatcaccatgat

SEQ ID NO: 208739 - DNA, 1429 bp, Zea Mays
ccatctaagaggaacaatgtggcattgtaattgtaaacatgaagaaagagccacccaaattcgtgttgaagaggactttaatctgttcctatgctatttttatgggcaactactactccctcaattccaaattgtcaaggcacgaggaaatggtgatggctgacatgcaaataaggcctggagaaggctgggaatactgtcctagaaataccttgaggaaagtcacaaaagttctgttagatgagttcaatgtgacaatgaaggcaggttttgaaaatgaatttttccttcgcagaaaattagtaagtaatggagttgagatgtggattccatatgataataccaattactgctcaacttcagcatttgatggtgcatcatccatattacaagaagtatattcttccctcaaagattcaggcattgttgttgaacagttgcatgctgaagctggaaaagggcagtttgagatagccttgaagtatatcttgtgcactgttgcggctgacaaactcatatatgctcgtgagactattaagtcgattgctcgaaagcatggactggtagcaacatttcttccaaagcctgatttggatgattttggatctggttctcacgtgcatctgagcttgtgggagaacgatcagaatgtttttatggggtcaagtaaagataactttcatggaatgtcaaaaactggagaacagttccttgctggagtgtatcatcaccttccgtcaatattggcatttaccgctcctcacccaaacagctacgaccggattcagccagatacttggagtggagcttatctatgctgggggaaagagaacagggaggctccattaagaaccgcatgcccacctggtgtgcctcttgatttagtcagcaacttcgagatcaaatccttcgatggttgcgcaaatccgcacttgggtcttgctgctatcgtagctgctggcatcgatgggctaagaagacaccttaagttacctgagccaattgaatcaaacccttctgatcactcttcaaaactgaaaaggctaccgcagaacctgcaggaatctgtagaatcgctttctgcagataaggttttgcatgagttaattggtgataaacttgtcacaactgctatagctatacggaaggctgagatcaatcactttgcgaagaatccgggtgcacttaaggatctcatcgaccgttactagggcaaaagaacggaatgagaagctacatcttcttggacgtggcaaggggtttcactgtatgaccaaccgagagactggaagaataaattttgttccaatggttaacttcggattctcatatcctgtgactgaacttttgtgactgaacttttgatacccagtgtttctcttatcaaataataaaggttatttaaatttttaaaatgagaaatgctagg

SEQ ID NO: 208740 - DNA, 2076 bp, Zea Mays
gccccgccatttatttatataaaaactcggcacggcacggcgacacggcgtgcaccgtgcagcagttcgtcgttcggctccgcctatcccgcagacggagccaccgcttcggtcaaacgtggccgactcactcgtagatccttaggcagcgagcgcgcgagcggcggcggagaccgcgaggggagggtcccggagggtgatggaggcgaggtacgaggtgctgcggcgcgcgacggaggaggtggccgcggtggacgcgcacgcgcacaacctggtggagcacggctccgcgttcccctttctccgctgcttctccgaggccgagggggacgcgctcgcgctcgcgccccactccctctccttcaagagaagcctgagggacattgctgcattgtacaactgcgaggcctcacttgagaaggtggagaagtttagaagtgctgaaggattgaaatcgattggctcaaaatgcttccaagctgccaacatatctgttatacttatagatgatggcatagcattcgacaaaatgctagacctggagtctcacaaggcatttgctcctgtagttggcagagttctgagaatagaaaggctagcagaaacaatcatcaatgctcatagctgcatatagaagcggtttagagatcaatcccaatgttagcaagactgatgcagaggatggtcttcgtaaggagctaacaggtcctaggccatttcggattacaaacaagaacctgattgactacctatttacctgcagtcttggaattgctgtttcacttagcctgccagtgcaaattcacacaggttttggagataaggacctagacttgcgaaagtgcaacccactacatttgcgcgctgttcttgaggacgaaagatttgctaagtgccaaattgttcttttacatgcttcttatccattttctaaggaagcatcctatcttgcatctgtttactcccaggtttaccttgattttggcttggcgattccaaaacttagtgttcatggaatgacatcgtccctgaaagagcttctggagctagctcccataaagaaggtcatgttcagtacagatgggtatgcttttccagagacatattacctaggtgcaaaaagggcacgggatgttgtttaccgtgtcctatctgctgcatgtgaagatggtgaccttagcattcaggaagctatcgaagctattgaggacatctttagaagaaatgcattgaatttgtacaagttaaatgttgtcaatggatcaataaatcatgaaactgccatagttggtaaaagggtgtcattgtcttctgttgaggaagatgtgctctttgttcgaataatctggtgcgatgcttctggtcaacatagatgccgcgtcgtgccagctggacgattttatgagattacgaggaataagggtgttggtctgacttttgcagcaatgggaatgacctcattttgtgatggcccagcggatgggtcgaaccttactggtgtaggcgagatcagacttgtaccagatatgccaacactcgttaggctaccatgttcctatgctatttttatgggcaactactactccctcaattccaaattgtcaaggcacgaggaaatggtgatggctgacatgcaaataaggcctggagaaggctgggaatactgtcctagaaataccttgaggaaagtcacaaaagttctgttagatgagttcaatgtgacaatgaaggcaggttttgaaaatgaatttttccttcgcagaaaattagtaagtaatggagttgagatgtggattccatatgataataccaattactgctcaacttcagcatttgatggtgcatcatccatattacaagaagtatattcttccctcaaagattcaggcattgttgttgaacagttgcatgctgaagctggaaaagggcagtttgagatagccttgaagtatatcttgtgcactgttgcggctgacaaactcatatatgctcgtgagactattaagtcgattgctcgaaagcatggactggtagcaacatttcttccaaagtgaaaaacagtaaagtgaaattaag

SEQ ID NO: 208741 - DNA, 2549 bp, Zea Mays
cccccgtttaccaggcgttcgctcgctttccctctccatcccccctatctcgtggcgacgctggacaccgcgccgccgccctacgccgtggcgactactggacgtcgccggcgccctacgccaggtcttcgccattccattctctggagacaagcacccaacagataccgatcaggcattcaagaagtaaattcttcttctattgtgctgaatatatctgattctacatggctatggtgccaagtgattcatcacatcatggagctgtggacaatagccctaatggattcacccagggtcggcgtgaggaagctaggaaacttgggccatcatggtatttcagtagaaaggaaatagaagaacattctccatccaggagggatgacattgatttgaagaaagagtgtagccttcgaaagtcgtattgcagttttctacaagatttgggcatgaagcttaaagtgccccaagtgacgattgctacagctacggtattctgtcaccgttttttccttcgtcaatcccatgcaaagaatgatagacgaataattgccacagtttgtatgttcttggctgggaaagttgaagaaacacctagacctttgaaggatgttatcctggtatcttacgagcttattcataagaaggattctacagctggccagagaatcaagcagcagaaggaaatatatgataaacaaaaagaacttattttactcggggagcgaattgtacttgtaacacttgggtttgacctgaatattgaccatgcttacaagcccttggttgaagcaataaggagattcaatgttggtagtaaaagttcgcttcctcaggttgcctggaattttgtaaatgatgggtatgctagtgctacccttactgtcgtttgaaattgcagttcacagtgctatctttttggctgctaaatttctcaaagtgaagcttccatctgatggtgataaggtttggtggcaggattttgatgtcacaccacggcagcttgaagaagttagcagtcaaatgatggagctgtatgttcagaaccgtacaccacaggcacaacaatcacagggaagcgaagctgaggggagctctgctggtgtgcgtaatcaacattcatctgtaaaatctgaaggaaactccaaggaaccatctgctcatggatatcatccggcattcaaaccgtcgaatttgcatcattcatccttggcaggtgctccaggtgaccatgacagtgggcattcaaattcagacaagcatgtttctggccacaaaatgcttcaaaatgataatggtaaccatgtcggtagcaaagaaaagaacaagagtggaggtaaatcggatgctggtatggatagattttgtcatgagaaatccccacctggacatcattattccaaggtcagccatgagtctcataatccagtggaagaacaaaaaccacatcaatcacatgataaccccaatgaaagaatagatggcattcttggtggcaacgaagttcctggtgtgtcgacctccaggatcgatgcaatgaataaaattgacaagggtaaggtaaaagcagctttggagaagcgaagaaaaacaaaaggtgatattaccacaaaggtagacgtgatggatgatgatgatctacttgagagagagcttgaacatggtgttgaattggctattgaggatgagaagattaagcaggataagatgcagaacttgtcccatattaaggacaagaagattacgcaggataatatgcagaacttgtcccatattaaggacgagcaggataacatgcagaacttgtccgacattaaggatgagaagattaagcaggatgagaggcagaacatgtcccatgctccagtggatcttcaaaccactgaccaagtaatggagaatggtcaccatgtcgagcctagtgtaccaacaactgtggaagacacggggtttccattggacaacaaagaacatcctccatttgataagcaaaatgatgttcctgagcacgagtcccagcagcttgaacacacattgaagcacgacctccctcagctggtaggggggcctgagcaggatgatggaacagactgtaaaaggcctaagctcgaagagtaggttctggatgatgctcactttattttggacagttttcctggagactggtgaactgcatacaacttggcacggagttggtgagcatggctttgccggtgccttgctgtgctgtgaaatatgccctacggctgattgcagtttacaattcgagggaggtcgtgctagcaaatatttttacgttcaaacgaacattggaatatatggaccaaaacatgctcacgcttctgataacggttgcattcgttccttaaatatgtgttccatgaaagtgaagcaaatgattttcatcccatcagggttgcatgcacctcatctcaatagaaaattaaaaaaacagtatttttataacttttcaacaatattatactacaacttttgtacaaaaaagctgtcgaggaaaacctttgtagaaaagttatttggaaaaaact

SEQ ID NO: 208742 - DNA, 2556 bp, Zea Mays
cccccgtttaccaggcgttcgctcgctttccctctccatcccccctatctcgtggcgacgctggacaccgcgccgccgccctacgccgtggcgactactggacgtcgccggcgccctacgccaggtcttcgccattccattctctggagacaagcacccaacagataccgatcaggcattcaagaagtaaattcttcttctattgtgctgaatatatctgattctacatggctatggtgccaagtgattcatcacatcatggagctgtggacaatagccctaatggattcacccagggtcggcgtgaggaagctaggaaacttgggccatcatggtatttcagtagaaaggaaatagaagaacattctccatccaggagggatgacattgatttgaagaaagagtgtagccttcgaaagtcgtattgcagttttctacaagatttgggcatgaagcttaaagtataattgccacagtttgtatgttcttggctgggaaagttgaagaaacacctagacctttgaaggatgttatcctggtatcttacgagcttattcataagaaggattctacagctggccagagaatcaagcagcagaaggaaatatatgataaacaaaaagaacttattttactcggggagcgaattgtacttgtaacacttgggtttgacctgaatattgaccatgcttacaagcccttggttgaagcaataaggagattcaatgttggtagtaaaagttcgcttcctcaggttgcctggaattttgtaaatgatgggtatgctagtgctacccttactgtcgtttgaaattgcagttcacagttgtgtatctactacacttaatattgtgcactgtacagactgcgtacttcgctttgcctgcaattcgagcctcatcatattgcagcaggtgctatctttttggctgctaaatttctcaaagtgaagcttccatctgatggtgataaggtttggtggcaggattttgatgtcacaccacggcagcttgaagaagttagcagtcaaatgatggagctgtatgttcagaaccgtacaccacaggcacaacaatcacagggaagcgaagctgaggggagctctgctggtgtgcgtaatcaacattcatctgtaaaatctgaaggaaactccaaggaaccatctgctcatggatatcatccggcattcaaaccgtcgaatttgcatcattcatccttggcaggtgctccaggtgaccatgacagtgggcattcaaattcagacaagcatgtttctggccacaaaatgcttcaaaatgataatggtaaccatgtcggtagcaaagaaaagaacaagagtggaggtaaatcggatgctggtatggatagattttgtcatgagaaatccccacctggacatcattattccaaggtcagccatgagtctcataatccagtggaagaacaaaaaccacatcaatcacatgataaccccaatgaaagaatagatggcattcttggtggcaacgaagttcctggtgtgtcgacctccaggatcgatgcaatgaataaaattgacaagggtaaggtaaaagcagctttggagaagcgaagaaaaacaaaaggtgatattaccacaaaggtagacgtgatggatgatgatgatctacttgagagagagcttgaacatggtgttgaattggctattgaggatgagaagattaagcaggataagatgcagaacttgtcccatattaaggacaagaagattacgcaggataatatgcagaacttgtcccatattaaggacgagcaggataacatgcagaacttgtccgacattaaggatgagaagattaagcaggatgagaggcagaacatgtcccatgctccagtggatcttcaaaccactgaccaagtaatggagaatggtcaccatgtcgagcctagtgtaccaacaactgtggaagacacggggtttccattggacaacaaagaacatcctccatttgataagcaaaatgatgttcctgagcacgagtcccagcagcttgaacacacattgaagcacgacctccctcagctggtaggggggcctgagcaggatgatggaacagactgtaaaaggcctaagctcgaagagtaggttctggatgatgctcactttattttggacagttttcctggagactggtgaactgcatacaacttggcacggagttggtgagcatggctttgccggtgccttgctgtgctgtgaaatatgccctacggctgattgcagtttacaattcgagggaggtcgtgctagcaaatatttttacgttcaaacgaacattggaatatatggaccaaaacatgctcacgcttctgataacggttgcattcgttccttaaatatgtgttccatgaaagtgaagcaaatgattttcatcccatcagggttgcatgcacctcatctcaatagaaaattaaaaaaacagtatttttataacttttcaacaatattatactacaacttttgtacaaaaaagctgtcgaggaaaacctttgtagaaaagttatttggaaaaaact

SEQ ID NO: 208743 - DNA, 2407 bp, Zea Mays
cccccgtttaccaggcgttcgctcgctttccctctccatcccccctatctcgtggcgacgctggacaccgcgccgccgccctacgccgtggcgactactggacgtcgccggcgccctacgccaggtcttcgccattccattctctggagacaagcacccaacagataccgatcaggcattcaagaagtaaattcttcttctattgtgctgaatatatctgattctacatggctatggtgccaagtgattcatcacatcatggagctgtggacaatagccctaatggattcacccagggtcggcgtgaggaagctaggaaacttgggccatcatggtatttcagtagaaaggaaatagaagaacattctccatccaggagggatgacattgatttgaagaaagagtgtagccttcgaaagtcgtattgcagttttctacaagatttgggcatgaagcttaaagtgccccaagtgacgattgctacagctacggtattctgtcaccgttttttccttcgtcaatcccatgcaaagaatgatagacgaataattgccacagtttgtatgttcttggctgggaaagttgaagaaacacctagacctttgaaggatgttatcctggtatcttacgagcttattcataagaaggattctacagctggccagagaatcaagcagcagaaggaaatatatgataaacaaaaagaacttattttactcggggagcgaattgtacttgtaacacttgggtttgacctgaatattgaccatgcttacaagcccttggttgaagcaataaggagattcaatgttggtagtaaaagttcgcttcctcaggattttgatgtcacaccacggcagcttgaagaagttagcagtcaaatgatggagctgtatgttcagaaccgtacaccacaggcacaacaatcacagggaagcgaagctgaggggagctctgctggtgtgcgtaatcaacattcatctgtaaaatctgaaggaaactccaaggaaccatctgctcatggatatcatccggcattcaaaccgtcgaatttgcatcattcatccttggcaggtgctccaggtgaccatgacagtgggcattcaaattcagacaagcatgtttctggccacaaaatgcttcaaaatgataatggtaaccatgtcggtagcaaagaaaagaacaagagtggaggtaaatcggatgctggtatggatagattttgtcatgagaaatccccacctggacatcattattccaaggtcagccatgagtctcataatccagtggaagaacaaaaaccacatcaatcacatgataaccccaatgaaagaatagatggcattcttggtggcaacgaagttcctggtgtgtcgacctccaggatcgatgcaatgaataaaattgacaagggtaaggtaaaagcagctttggagaagcgaagaaaaacaaaaggtgatattaccacaaaggtagacgtgatggatgatgatgatctacttgagagagagcttgaacatggtgttgaattggctattgaggatgagaagattaagcaggataagatgcagaacttgtcccatattaaggacaagaagattacgcaggataatatgcagaacttgtcccatattaaggacgagcaggataacatgcagaacttgtccgacattaaggatgagaagattaagcaggatgagaggcagaacatgtcccatgctccagtggatcttcaaaccactgaccaagtaatggagaatggtcaccatgtcgagcctagtgtaccaacaactgtggaagacacggggtttccattggacaacaaagaacatcctccatttgataagcaaaatgatgttcctgagcacgagtcccagcagcttgaacacacattgaagcacgacctccctcagctggtaggggggcctgagcaggatgatggaacagactgtaaaaggcctaagctcgaagagtaggttctggatgatgctcactttattttggacagttttcctggagactggtgaactgcatacaacttggcacggagttggtgagcatggctttgccggtgccttgctgtgctgtgaaatatgccctacggctgattgcagtttacaattcgagggaggtcgtgctagcaaatatttttacgttcaaacgaacattggaatatatggaccaaaacatgctcacgcttctgataacggttgcattcgttccttaaatatgtgttccatgaaagtgaagcaaatgattttcatcccatcagggttgcatgcacctcatctcaatagaaaattaaaaaaacagtatttttataacttttcaacaatattatactacaacttttgtacaaaaaagctgtcgaggaaaacctttgtagaaaagttatttggaaaaaact

SEQ ID NO: 208744 - DNA, 2528 bp, Zea Mays
cccccgtttaccaggcgttcgctcgctttccctctccatcccccctatctcgtggcgacgctggacaccgcgccgccgccctacgccgtggcgactactggacgtcgccggcgccctacgccaggtcttcgccattccattctctggagacaagcacccaacagataccgatcaggcattcaagaagtaaattcttcttctattgtgctgaatatatctgattctacatggctatggtgccaagtgattcatcacatcatggagctgtggacaatagccctaatggattcacccagggtcggcgtgaggaagctaggaaacttgggccatcatggtatttcagtagaaaggaaatagaagaacattctccatccaggagggatgacattgatttgaagaaagagtgtagccttcgaaagtcgtattgcagttttctacaagatttgggcatgaagcttaaagtgccccaagtgacgattgctacagctacggtattctgtcaccgttttttccttcgtcaatcccatgcaaagaatgatagacgaataattgccacagtttgtatgttcttggctgggaaagttgaagaaacacctagacctttgaaggatgttatcctggtatcttacgagcttattcataagaaggattctacagctggccagagaatcaagcagcagaaggaaatatatgataaacaaaaagaacttattttactcggggagcgaattgtacttgtaacacttgggtttgacctgaatattgaccatgcttacaagcccttggttgaagcaataaggagattcaatgttggtagtaaaagttcgcttcctcagactgcgtacttcgctttgcctgcaattcgagcctcatcatattgcagcaggtgctatctttttggctgctaaatttctcaaagtgaagcttccatctgatggtgataaggtttggtggcaggattttgatgtcacaccacggcagcttgaagaagttagcagtcaaatgatggagctgtatgttcagaaccgtacaccacaggcacaacaatcacagggaagcgaagctgaggggagctctgctggtgtgcgtaatcaacattcatctgtaaaatctgaaggaaactccaaggaaccatctgctcatggatatcatccggcattcaaaccgtcgaatttgcatcattcatccttggcaggtgctccaggtgaccatgacagtgggcattcaaattcagacaagcatgtttctggccacaaaatgcttcaaaatgataatggtaaccatgtcggtagcaaagaaaagaacaagagtggaggtaaatcggatgctggtatggatagattttgtcatgagaaatccccacctggacatcattattccaaggtcagccatgagtctcataatccagtggaagaacaaaaaccacatcaatcacatgataaccccaatgaaagaatagatggcattcttggtggcaacgaagttcctggtgtgtcgacctccaggatcgatgcaatgaataaaattgacaagggtaaggtaaaagcagctttggagaagcgaagaaaaacaaaaggtgatattaccacaaaggtagacgtgatggatgatgatgatctacttgagagagagcttgaacatggtgttgaattggctattgaggatgagaagattaagcaggataagatgcagaacttgtcccatattaaggacaagaagattacgcaggataatatgcagaacttgtcccatattaaggacgagcaggataacatgcagaacttgtccgacattaaggatgagaagattaagcaggatgagaggcagaacatgtcccatgctccagtggatcttcaaaccactgaccaagtaatggagaatggtcaccatgtcgagcctagtgtaccaacaactgtggaagacacggggtttccattggacaacaaagaacatcctccatttgataagcaaaatgatgttcctgagcacgagtcccagcagcttgaacacacattgaagcacgacctccctcagctggtaggggggcctgagcaggatgatggaacagactgtaaaaggcctaagctcgaagagtaggttctggatgatgctcactttattttggacagttttcctggagactggtgaactgcatacaacttggcacggagttggtgagcatggctttgccggtgccttgctgtgctgtgaaatatgccctacggctgattgcagtttacaattcgagggaggtcgtgctagcaaatatttttacgttcaaacgaacattggaatatatggaccaaaacatgctcacgcttctgataacggttgcattcgttccttaaatatgtgttccatgaaagtgaagcaaatgattttcatcccatcagggttgcatgcacctcatctcaatagaaaattaaaaaaacagtatttttataacttttcaacaatattatactacaacttttgtacaaaaaagctgtcgaggaaaacctttgtagaaaagttatttggaaaaaact

SEQ ID NO: 208745 - DNA, 2642 bp, Zea Mays
cccccgtttaccaggcgttcgctcgctttccctctccatcccccctatctcgtggcgacgctggacaccgcgccgccgccctacgccgtggcgactactggacgtcgccggcgccctacgccaggtcttcgccattccattctctggagacaagcacccaacagataccgatcaggcattcaagaagtaaattcttcttctattgtgctgaatatatctgattctacatggctatggtgccaagtgattcatcacatcatggagctgtggacaatagccctaatggattcacccagggtcggcgtgaggaagctaggaaacttgggccatcatggtatttcagtagaaaggaaatagaagaacattctccatccaggagggatgacattgatttgaagaaagagtgtagccttcgaaagtcgtattgcagttttctacaagatttgggcatgaagcttaaagtgccccaagtgacgattgctacagctacggtattctgtcaccgttttttccttcgtcaatcccatgcaaagaatgatagacgagtaaataattgccacagtttgtatgttcttggctgggaaagttgaagaaacacctagacctttgaaggatgttatcctggtatcttacgagcttattcataagaaggattctacagctggccagagaatcaagcagcagaaggaaatatatgataaacaaaaagaacttattttactcggggagcgaattgtacttgtaacacttgggtttgacctgaatattgaccatgcttacaagcccttggttgaagcaataaggagattcaatgttggtagtaaaagttcgcttcctcaggttgcctggaattttgtaaatgatgggtatgctagtgctacccttactgtcgtttgaaattgcagttcacagttgtgtatctactacacttaatattgtgcactgtacagactgcgtacttcgctttgcctgcaattcgagcctcatcatattgcagcaggtgctatctttttggctgctaaatttctcaaagtgaagcttccatctgatggtgataaggtttggtggcaggattttgatgtcacaccacggcagcttgaagaagttagcagtcaaatgatggagctgtatgttcagaaccgtacaccacaggcacaacaatcacagggaagcgaagctgaggggagctctgctggtgtgcgtaatcaacattcatctgtaaaatctgaaggaaactccaaggaaccatctgctcatggatatcatccggcattcaaaccgtcgaatttgcatcattcatccttggcaggtgctccaggtgaccatgacagtgggcattcaaattcagacaagcatgtttctggccacaaaatgcttcaaaatgataatggtaaccatgtcggtagcaaagaaaagaacaagagtggaggtaaatcggatgctggtatggatagattttgtcatgagaaatccccacctggacatcattattccaaggtcagccatgagtctcataatccagtggaagaacaaaaaccacatcaatcacatgataaccccaatgaaagaatagatggcattcttggtggcaacgaagttcctggtgtgtcgacctccaggatcgatgcaatgaataaaattgacaagggtaaggtaaaagcagctttggagaagcgaagaaaaacaaaaggtgatattaccacaaaggtagacgtgatggatgatgatgatctacttgagagagagcttgaacatggtgttgaattggctattgaggatgagaagattaagcaggataagatgcagaacttgtcccatattaaggacaagaagattacgcaggataatatgcagaacttgtcccatattaaggacgagcaggataacatgcagaacttgtccgacattaaggatgagaagattaagcaggatgagaggcagaacatgtcccatgctccagtggatcttcaaaccactgaccaagtaatggagaatggtcaccatgtcgagcctagtgtaccaacaactgtggaagacacggggtttccattggacaacaaagaacatcctccatttgataagcaaaatgatgttcctgagcacgagtcccagcagcttgaacacacattgaagcacgacctccctcagctggtaggggggcctgagcaggatgatggaacagactgtaaaaggcctaagctcgaagagtaggttctggatgatgctcactttattttggacagttttcctggagactggtgaactgcatacaacttggcacggagttggtgagcatggctttgccggtgccttgctgtgctgtgaaatatgccctacggctgattgcagtttacaattcgagggaggtcgtgctagcaaatatttttacgttcaaacgaacattggaatatatggaccaaaacatgctcacgcttctgataacggttgcattcgttccttaaatatgtgttccatgaaagtgaagcaaatgattttcatcccatcagggttgcatgcacctcatctcaatagaaaattaaaaaaacagtatttttataacttttcaacaatattatactacaacttttgtacaaaaaagctgtcgaggaaaacctttgtagaaaagttatttggaaaaaact

SEQ ID NO: 208746 - DNA, 2503 bp, Zea Mays
caaatttcagcctgtatttccccccgtttaccaggcgttcgctcgctttccctctccatcccccctatctcgtggcgacgctggacaccgcgccgccgccctacgccgtggcgactactggacgtcgccggcgccctacgccaggtcttcgccattccattctctggagacaagcacccaacagataccgatcaggcattcaagaagtaaattcttcttctattgtgctgaatatatctgattctacatggctatggtgccaagtgattcatcacatcatggagctgtggacaatagccctaatggattcacccagggtcggcgtgaggaagctaggaaacttgggccatcatggtatttcagtagaaaggaaatagaagaacattctccatccaggagggatgacattgatttgaagaaagagtgtagccttcgaaagtcgtattgcagttttctacaagatttgggcatgaagcttaaagtgccccaagtgacgattgctacagctacggtattctgtcaccgttttttccttcgtcaatcccatgcaaagaatgatagacgaataattgccacagtttgtatgttcttggctgggaaagttgaagaaacacctagacctttgaaggatgttatcctggtatcttacgagcttattcataagaaggattctacagctggccagagaatcaagcagcagaaggaaatatatgataaacaaaaagaacttattttactcggggagcgaattgtacttgtaacacttgggtttgacctgaatattgaccatgcttacaagcccttggttgaagcaataaggagattcaatgttggtagtaaaagttcgcttcctcaggttgcctggaattttgtaaatgatggactgcgtacttcgctttgcctgcaattcgagcctcatcatattgcagcaggattttgatgtcacaccacggcagcttgaagaagttagcagtcaaatgatggagctgtatgttcagaaccgtacaccacaggcacaacaatcacagggaagcgaagctgaggggagctctgctggtgtgcgtaatcaacattcatctgtaaaatctgaaggaaactccaaggaaccatctgctcatggatatcatccggcattcaaaccgtcgaatttgcatcattcatccttggcaggtgctccaggtgaccatgacagtgggcattcaaattcagacaagcatgtttctggccacaaaatgcttcaaaatgataatggtaaccatgtcggtagcaaagaaaagaacaagagtggaggtaaatcggatgctggtatggatagattttgtcatgagaaatccccacctggacatcattattccaaggtcagccatgagtctcataatccagtggaagaacaaaaaccacatcaatcacatgataaccccaatgaaagaatagatggcattcttggtggcaacgaagttcctggtgtgtcgacctccaggatcgatgcaatgaataaaattgacaagggtaaggtaaaagcagctttggagaagcgaagaaaaacaaaaggtgatattaccacaaaggtagacgtgatggatgatgatgatctacttgagagagagcttgaacatggtgttgaattggctattgaggatgagaagattaagcaggataagatgcagaacttgtcccatattaaggacaagaagattacgcaggataatatgcagaacttgtcccatattaaggacgagcaggataacatgcagaacttgtccgacattaaggatgagaagattaagcaggatgagaggcagaacatgtcccatgctccagtggatcttcaaaccactgaccaagtaatggagaatggtcaccatgtcgagcctagtgtaccaacaactgtggaagacacggggtttccattggacaacaaagaacatcctccatttgataagcaaaatgatgttcctgagcacgagtcccagcagcttgaacacacattgaagcacgacctccctcagctggtaggggggcctgagcaggatgatggaacagactgtaaaaggcctaagctcgaagagtaggttctggatgatgctcactttattttggacagttttcctggagactggtgaactgcatacaacttggcacggagttggtgagcatggctttgccggtgccttgctgtgctgtgaaatatgccctacggctgattgcagtttacaattcgagggaggtcgtgctagcaaatatttttacgttcaaacgaacattggaatatatggaccaaaacatgctcacgcttctgataacggttgcattcgttccttaaatatgtgttccatgaaagtgaagcaaatgattttcatcccatcagggttgcatgcacctcatctcaatagaaaattaaaaaaacagtatttttataacttttcaacaatattatactacaacttttgtacaaaaaagctgtcgaggaaaacctttgtagaaaagttatttggaaaaaact

SEQ ID NO: 208747 - DNA, 2501 bp, Zea Mays
caaatttcagcctgtatttccccccgtttaccaggcgttcgctcgctttccctctccatcccccctatctcgtggcgacgctggacaccgcgccgccgccctacgccgtggcgactactggacgtcgccggcgccctacgccaggtcttcgccattccattctctggagacaagcacccaacagataccgatcaggcattcaagaagtaaattcttcttctattgtgctgaatatatctgattctacatggctatggtgccaagtgattcatcacatcatggagctgtggacaatagccctaatggattcacccagggtcggcgtgaggaagctaggaaacttgggccatcatggtatttcagtagaaaggaaatagaagaacattctccatccaggagggatgacattgatttgaagaaagagtgtagccttcgaaagtcgtattgcagttttctacaagatttgggcatgaagcttaaagtgccccaagtgacgattgctacagctacggtattctgtcaccgttttttccttcgtcaatcccatgcaaagaatgatagacgaataattgccacagtttgtatgttcttggctgggaaagttgaagaaacacctagacctttgaaggatgttatcctggtatcttacgagcttattcataagaaggattctacagctggccagagaatcaagcagcagaaggaaatatatgataaacaaaaagaacttattttactcggggagcgaattgtacttgtaacacttgggtttgacctgaatattgaccatgcttacaagcccttggttgaagcaataaggagattcaatgttggtagtaaaagttcgcttcctcagcaggtgctatctttttggctgctaaatttctcaaagtgaagcttccatctgatggtgataaggtttggtggcaggattttgatgtcacaccacggcagcttgaagaagttagcagtcaaatgatggagctgtatgttcagaaccgtacaccacaggcacaacaatcacagggaagcgaagctgaggggagctctgctggtgtgcgtaatcaacattcatctgtaaaatctgaaggaaactccaaggaaccatctgctcatggatatcatccggcattcaaaccgtcgaatttgcatcattcatccttggcaggtgctccaggtgaccatgacagtgggcattcaaattcagacaagcatgtttctggccacaaaatgcttcaaaatgataatggtaaccatgtcggtagcaaagaaaagaacaagagtggaggtaaatcggatgctggtatggatagattttgtcatgagaaatccccacctggacatcattattccaaggtcagccatgagtctcataatccagtggaagaacaaaaaccacatcaatcacatgataaccccaatgaaagaatagatggcattcttggtggcaacgaagttcctggtgtgtcgacctccaggatcgatgcaatgaataaaattgacaagggtaaggtaaaagcagctttggagaagcgaagaaaaacaaaaggtgatattaccacaaaggtagacgtgatggatgatgatgatctacttgagagagagcttgaacatggtgttgaattggctattgaggatgagaagattaagcaggataagatgcagaacttgtcccatattaaggacaagaagattacgcaggataatatgcagaacttgtcccatattaaggacgagcaggataacatgcagaacttgtccgacattaaggatgagaagattaagcaggatgagaggcagaacatgtcccatgctccagtggatcttcaaaccactgaccaagtaatggagaatggtcaccatgtcgagcctagtgtaccaacaactgtggaagacacggggtttccattggacaacaaagaacatcctccatttgataagcaaaatgatgttcctgagcacgagtcccagcagcttgaacacacattgaagcacgacctccctcagctggtaggggggcctgagcaggatgatggaacagactgtaaaaggcctaagctcgaagagtaggttctggatgatgctcactttattttggacagttttcctggagactggtgaactgcatacaacttggcacggagttggtgagcatggctttgccggtgccttgctgtgctgtgaaatatgccctacggctgattgcagtttacaattcgagggaggtcgtgctagcaaatatttttacgttcaaacgaacattggaatatatggaccaaaacatgctcacgcttctgataacggttgcattcgttccttaaatatgtgttccatgaaagtgaagcaaatgattttcatcccatcagggttgcatgcacctcatctcaatagaaaattaaaaaaacagtatttttataacttttcaacaatattatactacaacttttgtacaaaaaagctgtcgaggaaaacctttgtagaaaagttatttggaaaaaact

SEQ ID NO: 208748 - DNA, 2201 bp, Zea Mays
atcgtgtatagtgtaaaataatattttaggtgatacatgtaagcgctggtggacacgattcacggacgccacccggaccctattaaacccgcctctcagccgaccgtttcgagtccgtcgtcgtctagctcccatccgacctcctgcattccccactagtcccaactcccaaccaccgccagccgtccgctctccgcaagcgcgaccttccggccagatccgccccgttgcgccgacgagcggtccttctgcctagtttctccgcgcagcgagcggcgggttcctcggagattcccgctggccgcggggatccatttgtgactgctcgcgttgcgcgtggatctggtttgggacggaggagtgaaacgcgacggtgatcgtgcgaggtggggacgccatcagtgctctgtctggggttcggtctgttcttcgactgcagatctggaagggtttcgtgggatccgtcgctacgatctgtcccagtcagagcacctgcatcatctcgggtcgggccatggagactctgctcatctcggaggagcgcaaccaccagctccaccacttctcgggtcgccggaagaaggcgttagcagcgtcgcctcagtccacgcgcagctaccatgctggcaactgccgggcgttccactccggcatcaccgtcggcatcctgccatccccgcccgcgcagagggttgcactgacccgctcctctcctgagcccaagacaccgaaacatcagcttcaccatgggaaaaagcgcagccgagcaatctctataaacctttcgacgtcccctccctctcgccctgagctctgggctggcccggggttctgcaattcgccgcctcccagctccctcccgatccccaagttctcactccaccagaagcgcagtgtctcacttgaatttccacctgctgaccggtcagacgacgaagaggtgcccgtgcatgccaagtcggcaccttcatcgccgactgcaggctcaggtgttaccttcttcagtggtactgatgctaccattgccaccgagaatctgaggaggatccttaacctcaaaattgaggataactgaatggcggttgggtagttctgtgtacatagtttaactacaactgacctttgtagtatgtatagggtaaccggggataaccactgtgtacctggcggtggttccttctgcagcagtactgtaggcggttagcaagcacagcgaggagtttaggaagtttggaaatgcagtgagaaggatgttgtggtaatggagatttggtggatttgcatatcactgcagtttcagagtcacctttgttccttgtaccttgtagttgcctattagtagtccaatactccatttagatgttatagtatttgcatcttccctgcccatcattaaccagtagccacagccttcatatcataatccttgtcatgtagttcatctcaggcagggcattgtaggctagctagtactgttcaagttctgtcatatatgtagtcttctgtaggattgctgcatcccttgaaacttgcattctgtatcacattgcatcctgctgactcacctcccttcataacatctccctgtgttatgcaaagcgcacaaggatctcccctctggcacttctgttttttggaatgaagatgctcagaggagttgttatgaagtcccgatccaatgttctttgtcctccatgtctgtactgactttagctattcatctcctttgtcaccccagtcccattgcatgtgccatccaatccgtttcgaaccattcatctcaaaattgcatttagtggtggttttcccttcgtcttattatcttttgtgcctcatgatcctggagcatgcccaggattctagtctcctccatgtattctcataaaggacttcacgtatcagagatctgcgaatgctcaaccctgaatatggtttgcttgtccgatgccacttcgcctcatccatacctggagttcagaattggcgaagcacctatcacttagctatctgtttcatagtcagtattgtgtcagactgttgtttttgtgcaatatttgattggctactagtctgtttgtgttactgttcaagtttatggtagtgatcatatatggcggccggagtgttccacgccgatgctgtggcattctgttgctttcaagtaaaactagtcaatgttatgtaccttcatgttaaaaaat

SEQ ID NO: 208749 - DNA, 2910 bp, Zea Mays
atcagcgcctggaggcgtgcaagggctaaacccagaatccccaatcatcatggatacaatattcgtccaccttctcctcctctcgtttatgatacttcgtcccatagccatcgccgccgacgtacctgagtccgacacgctcggcaagggccgcaacatcaccgacggcgagacgctcgtctcagccgacgggacgttcaccttgggattcttctctcccggggcgtcgaccaagagatacctcggcatctggttctcggcgtccagtgtcgccgtctgctgggtggcgaacggtggccgccctgtgaatggcaactccggcgtgctggtcgtcagagacacgggaagccttctgcttctagacggctctggccagaccatatggtcgtcgaactccaccagctcatcgtcatcagcggaggcgcagctcctcaactccggcaacctcgtcgtccgcgacggaggcagcagcagcagcagcgacgccatcctgtggcaatcgttcgatcacccgtcgaacaccctgctgtccggcatgaagctgggcaagaacaagtggaccggcgccgagtggtacctcacgtcgtggcgctcggccgacgacccgtcgccgggggcctaccgccgcgcgctggacaccagcgggctgcccgagcttgtggtgtgggagggcaacgtcaggacctaccgcaccggcccgtggaacggccggtggttcagcggcgtcccggaggtgtcggcgtacaggaacttgatctggtaccaggtgacgacaagcccagcggaggtatcctacggctacacctccaaccccggtgccgcattgacccgtgtcgtgctgaccgacgccggcgtggccaagcgcctggtgtgggacgcgggcgcccggacgtggcagaccttcttccagggccccagggacgtctgcgacgcctacggcaagtgcggggcgttcgggctgtgcgacgccggcgcggcgtcgacgtggttctgcacctgcctcacggggttcagcccggcgtcgccgcccgcgtggtccttgagggacacctcaggcggatgcaagcggaacgtgaagctggactgtgccaataacgggagtgggacgacgacgacgacagacggtttcctgttggtccgcggagtgaagctaccggacacacacaacgcgacggtggacatgagcatcacggtggaggactgcgcggcgaggtgcctcgccaactgctcgtgcttggcctacgccgccgcagatatccgcggcggcgacgtccgtagcggctgcgtgatgtggacggatgacatcgtcgacctccgatacgtggacaaagggcaagatctctacctgaggctggccaggtccgagctgccggcggcggcggggccctcgccgcaacggccgtttcgtaccgcaccagttgttggtgcttccgcagctgccgtcgccgtggttcttattgttctgtcggtcgtgcttgtgattaggcggcgccggcgaccaataatcccagctgctcagagtgcctctccgagtgtcccttctactgaactgcgcagacctccgtcagtcccttctgttgacctgtctagtttgaggagggctacaaatgatttctctgcagacaatgtcattgggcgtggaggattcagcaccgtatttgagggcaatttagctgatggtaccaaggttgccgtgaagaggctcacacaatcttaccttaccgatggaggtggtgagactttcatgagagaagtggaagtgatgtcagagctcaagcacgagaacctcgctcgtctccttgcttactgcaaggacggaaatgagcggatactggtctacgagtacatggagaacaggagcttgaacctatgcatattcgcaagagacgccaaccaacgcgctgtgttgaactgggagcggaggctggagatcatcgtaggagtcgccagaggcgttgcttatctgcacggactaagcaaggtggtgatacacagggatctgaaaccgtccaacgtgctcttggacggaaactggagagcaaaaattgcagattttggcaccgccaaagtgttcgtcgatggccagacgaatccgacactggtacagacagaggctccagagtacacggcgcgagggccgagcctgacgctgaagtgcgacgtgtatagctttggagtcgtcctgatcgagatcgtcagtggccaaaggaacagcagcaaccagacgctcgtttccgatgcacgggagtcttggagccagaataagatcaaggagaaccttctggatccagccgtgggccagccggggccagagatcctccttcggctggagaggtgcgtgcaggtcggccttctctgcgtgcagcagtcgccagctgacaggccatccatggctgaagtagtcgcgatgctgacggtgaacggcaccagcagctcgcagatccgttcgcaccgcagtgccgctgccgctgccgccgccactcctctcgcgacgcaggacgcgtcgtctggagcacacggcgactccatctatctcacgtagacggcgaagcaaaagcccacgacgactccatctatcattctcacgtagacgacgacgaagcacgcggcgactccattcatctcgatttctgatcttggagttggatctgtcacggcggtattggttagtggtacacgattacacgagcattgcagttgcaggaagcagcagcaaaagtatatatactagcgaattcatgtatgttgctggaatattaccaaaaacttcatgttcatgggaacttttacaaaagagtagtgttgttgttgtatagcagatcaggcatcagcagttctttccctgtttatttttctctgttagttagttaatcctgtgcattatttgcattcacattcatctaatttggt

SEQ ID NO: 208750 - DNA, 1722 bp, Zea Mays
taatttctacgggtgtcgtatatcagaggtaaacaatattagatgtttatttatttgtttggaggtatcagttttctatgaatgtacaactgtttgctttgtgctttatttagacttctaatttatatcgatatttatgacatgtgtttacctgttttgtaagtcaatcaaaaagtttgactagcaactaatggtgcctatacatgtatttatggagcttcttctggtcatatgtgtagtggatctctcctcctggtaactagctagatcatctattgtttttattttaaatttgaaaatttacttctgatttgcaaaacaaatggatatagttgttcccttcaatcatgtccaaggtcaagaaccattcaggtcataaacccctacgacaggggccacgagggctcatcttcgccactgcccctactcccaccttctgcatgtcctgctcggtgctgttccattccctagtgatgttctccggctaaagacgcttggagtttgtggtgtggtgacacttaatgaatcatacgagaggcttgttcccacatccctatacgaggataaaagaagtaggcgcaatgaggagtcatgttcattcacaagctctaacagagaaagttggggcagatgttcatctttaggtgcagccagtgatgaattattctcaggcgataataatgataagcagatatgagcccttgggcctccagttcgggcaacaagcatatggcaaagagagtgagggggcatgatattgttttccaattccaagatctaaggagcaaagactattaattatcataaacaagatttctaattggtgaaagctttttatatatagcagactgtgatgatgtgtagaggcaaaggatccttcagagttcatcactcatcgagccaaagattttgtgtcaagcatgaaggacattgaaacccggtttatgtgtatagttgaagcaggaaataaggtttctagaatgcttgaaaccaagaagatcttgcttgacatatgtgctaaaataccaggattctaggttctccagttaagctacctactgcccgattgtgtcagcacttcaagtgtgctgcaattgtgatgttattctcaaccatggtaaccagggatgaggaagttgttggactttgatgaacctagaactcttgcaccaacttgtctttttgttggaggtacaaaatacatggtgatccaaggtgaacctagagtggtcatccgaggaaagaagaatattttgccagtgatgacgtgtgtttagaggatgggatccttgcaattgtcaaacaaggagatgagagaccccttgaattgcttgctaaagcatatgctatcaaatcttttgacatagatccccagaacccctctgatgttgttttcacgttagaatgggaatcaatcggtgtcctaccttgtggcgagatggcgagaagaaagataatttttactaccaagggatcttaatcagaattctaggctcattcatacattcactacaatgccttcgaactcatgaacatttatctctggctctattgtggtgggttacatgaatagagtttttgcatgttcttcgttttatatggtgacatacttgttactatgtgacattgtttgatgaaacccttgcggcattgtattatttattttgttctatatagtcttaacattttatcaaataaaaatttatgtgacgtcacaacata

SEQ ID NO: 208751 - DNA, 1035 bp, Zea Mays
cacgtgctgccagtctgcctgtgctaccagatttcaacctcgacatcgacgcacatcaccaatttgctgcgcctgttgttgtattatgggtactccgtagatagaaaagacagataatttgatagtgattgcaagtttgcgttttgtcgatggagaagacattgatgatgacctatatgcattggcatgcgaacctgatttgcgagttcgaattttttctgcatgtcttgttgatggtgtccggtaccacaccattgaccgtgagagaaatagaagaacccaaaatagtggagtcatggttgaaggcactcataataatgaatgcattgatttttatggctgcttaaagaaatatcgagttgcagtataactcagatttgatggagcatcggacaattgttcttttccggtgtgattggtttgacactcatagcaagaaacagcacaagcaactaaggtattttatttgcaagacatcaagaattctggaaactggaagattgttcaaaaatttacacataggcacttgtggagtgtggctgaaaatgacattgatgaaagacctagttcctcaggactatcataccaagatgatacatgtgttggttctgaagtgcaagttaatgaaggagatatggagatacctggacatcaggatgctgacgaatctgttaatgtcaatgcaagtgtggttgatgaatttcgggtgcaacgagaagaggaagtggaagagtatgagacaagcgacaatgaagatgaaactggatggcaatatgctagtgacaacgaagaatcaataactattgtcaatgacgatgatgatttcagtgataacgagtagcatgttttttgtttgatctgagagaagtgaactctatgctgtattttgtttgatttttaagaagtgaactagctactgttatttgagaaaagtgaactgtatgctgtaatttgtttgatttttaagaagtgaactcgctacggttatttgagaggagtgaactttatgcaataatttgttcgagctttgagaag

SEQ ID NO: 208752 - DNA, 5382 bp, Zea Mays
cggttctgtctgcctttatttattcgcgttccctgcctgtttcgagcctccagccttaataacccggcattctctccgccgctcgcccgctccgcgtccggcggcccgcgtcgcctccactcccaattagcctatcgtgttcgacgcgagcgaactcgctcagatcagagtgttccctgatccggtcccaatcttttattggattttgtgttttggtaggggatctagggtttgtcgtcgaattccgcctcgaattttagggtttgcttcggatcgattccgttccgtgggattcttgcttgcagcactccatggctgcggcgcggcacgggggttataggagcttcgacgtggccaggaggcgggagttcgacctggagcgttctaggaggagcaaggagtaccgccactcgagccgccaccgcgactcggatcgccaccgtgatggcagcaggggccgtgaagtgcccaacgggtacatccgccaccgctcgccgtatgcgccaccgaagagccgaccttcaaaaaggaaggacgataaggagcctggtgaggtctcaagcgatagcggctcggagtctggtgggcgcccaccagtgctgagggaggatgggggtcttggggtctgcagggatggaggtgcgttgccagcaagcaagaagaggaagcactcacctggattccacgatacgaatgtttcaaagctgcgggcaagagatgaggtgtggagcaggagaggacctgatgccatagctgcggagctccctcttccttcgccgccccctatgtctgcggttggtgggtgctcaccaatggatccagaagttttggtagttccaaatgatgctgaaaggatggacgcgattactgagggggaagaggattgtgcaacgagaaacatttttacttcaaggtgggcggatgctgctgaagaggaggaagtggtgattgtgcctaagaagaagaaaagtgtgccacctgctcatttgcctgaacagaaatccacaaagaaaatcatgggctcagagctgggagaagcgatgggcagtaaaacatcaagaagttcctcaagttcgtctaactcaatgggtagtgaaaactggaatatcgaggtagacgagggtgatggcattgattcttctgttggttgttcgctggatactcattccaggagcaatatgcgtaggtctggatcacctgaggttgtgcgaacaccacgtaggtgctttaacatgcttcagggctgtaggagtattgatgactttgagaggatcaacacaatcaatgagggtacatatggagtcgtatttagggtgagagacaagaaaactggtgagatagttgctttgaagaaggtcaaggtagataaggaaaatggacgggaagggtttccattgacttctctcagagaaatcaatatccttctatcctttgaccatccttcaattgtggatgtcaaggaagtagttgttggtggtcatgacgatgatacttttatggtgatggaatacatggagcatgaccttaagggtgtcatggaggcgatgaagcaaccatatagccaaagtgaggtcaaatgtttgatgcttcagctgctagagggcgtgaagtatcttcatgacaattgggtacttcacagggatctcaagacatcaaatctcctcttgaataaccgcggtgagttgaaaatatgtgactttggactctctcgtcaatatggcagcctgctaaagccttacacccaaccagttgtgactttgtggtacagggctccggaactactattaggagcaaaggagtattcgactgctatcgatatgtggtcattaggttgcataatggcagaactcttgtcaaaagagccactcttcactgggaagtctgagatagatcaacttgataagatatttagaatactcggcacacccaatgaggagcggtggcatggttgttccaaattgcctggcttcaaaggcaacttcgtaaagcgaccgtacaatagattaagggacaaatttccagctgtatccttcacgggaggcttgaccttgtcagaagctgggtttgacctgctaaataggttgctggcatatgaccctgagaagcgcatatctgctgctgatgccttgaaccatgagtggttccgtgaagttcctctgcccaagatgaaggaattcatgccaacttttcctgctctgaatgaacaggacaggaggatcaagagatacatgaagagccctgaccccctggtggagcaacagatgaaagaacaagggagcataggagatcatggcctttttgactgatctgaaagcagacaagtcttgctgcaaatgacagtttttgagtgagtaaacatgttgcaaggctaagagatcaaaggggaacataaattttacttaagttccatgcagctagtgttcaaatggcagggttagctctctacgagaactgtcatattctaacctatcatcattataagttgcagatgtaatgcagttcgtctaaaagttgaatgaagtgaaggaaccggtgcatttttattttcgcaaggaaatcgatactctcttaatgggaattgtaagcttaaagctgtggctgtatcaagagatgaagggttcacggatgccagattacatacctaactgactttttttgtggtcggtcctccaaaggtctcatctgtaattgtgaatccaagtgagttgagctcagctcttttgaatactttggtaatccctgccctcttcatcttcccactccagttctgtttcatcagctcatcatgatttatttatcattcctgtgattcattgcacgatcattatcaatttgtttctttatttgcatggacattaactgttacaaaatgccgccttcgccctcctgtgcccaccatagttgccacgtgttctgggatctatgcttattatttcttggatagttattgaggcaggtaaaagaataaggttaagaatatgttaaattactccttgtgctttggttagatgatattaccaaaaatatatgttgaggtgtaagacaattctgggtttaagtgtttattctcaaacggttgatcaatcatggttttccacttccaagcttgatcctaaccaatccttatgtgatttaattgtcatattttgccactccttcctatcataaaaacatgccgtttaggacaagatttgatcaaaccttaaaacttaaaagctacaaacatttataacttctaatttatttagtttatgattgctgtgtcttgctttgtcagctaccatttttttcatgccataaaatggtggaattgcctgtagagttacataaatgctttctactaacctaagttgagatgtgtgccaatgtatcactgtatcaggtcccaattccacttgttataccatcttttttcttcactggggattgtttttgaataatctgctgataataccgctccgttcttttgagcttttataatctgccagaggtaactagttgactataaaatctgggaggatgctaccatgtgaattatgtctttctttttacctagttgggtaaaatgcgctaatggtttgctatgcctaaatatgaattcgagttgactatgttcctcattgcaatgtttgtggcacacaggtatagcacttctaattactcctgtgagatggctaatatttccgtgttttttattgggttgatgtgttcatatgattttgttaagaacaacagtaaaatacaatgaatcctggaaagcaagttgtgctaagttatataattttagtaaaacgtattcatgtctttgatactgatgtaattctgaatttctgatgtgagattccaacttaagtacctaactgctttcccagttgcctgaacttgtagggtatttaccattcttatgtcacttctctgaacttgcatgatattcaccattcgtatgtcattataatagcatcttactgtcccttgcatttgtagttgcttggaattatgacgtctttagcacgatctgaagtagggagtatatgtaccacagaacgtctaggaattttgttgtagcagttcatctgagtatatccacttactcttaccatgtgcgattaaagtgcacttgagtttgtttacagcttgaaatgtccgcactggtagcagacatggcagattgttagggcacctatggagacgacgtcaaacacatttgaagttaggtgaacttgaatatcgacggagggcagctgataatttatgttggtcagtgaattgaataactatcttgacttatacctccgaactaggaaagcgcaattctagttctcctgagtgaaaccatctaaaggtagatcaaattcatggaaaaaatatcaatatttatgacatgtaacaggtatattatgagagtattttttaattaagaatctaatatttttattttgtattgtcaatgttgatactttatataaatttggtcaaacttaatagctttgactctatacttatgggtggtattggactctagattttacactatataaaataaaataaaatgtaaggaccaaattggattaagattgggctttattcacattcatttttaaactaaaattaattgatagcctaacttattgtgagaaacatttgatttattaccacccctaactatactataattgcattttttttctgatttgatggagtataatctcattcatttgattgtttggaaaggttctttatcttcagaatccagacatcaatcatcccttggtccggcgttctttggggtagggaatcttaaaagaatgtataaacagcctctcgaggtagtgcttgggacaggaaattgcgagttacctccatgacctcttcaatgcaccattgactgcattattgagaaggcagaagacatcattgatcggttggcacgtgcgaacttgcaatcgctttgacctaaaacaatatgccatcattattgagaattcgctatgcgccattcaaaaacaatatgtatatcattatatgccatcaaaatgtttgctgcggcttctatactggtttttctctctcctggtaccacacccgtcaaatggttaactcttatcagaaaagtattaggcgaagaaaattttgaaagctggtatagaaggtagtggcaccactggcatagatgcagaataaatacatccacaatgttttcatatgtgtcagatgacaaaatttatatgttacctatagagattgacatggcctaaaacgtttacttggttacttttcatttatttaagaactttagggcatgtataatactattaattaagaagtctcttgaggggtctataaaggtaggtgagaaaaaaagttattcttcgtgaagacacc

SEQ ID NO: 208753 - DNA, 5135 bp, Zea Mays
cggttctgtctgcctttatttattcgcgttccctgcctgtttcgagcctccagccttaataacccggcattctctccgccgctcgcccgctccgcgtccggcggcccgcgtcgcctccactcccaattagcctatcgtgttcgacgcgagcgaactcgctcagatcagagtgttccctgatccggtcccaatcttttattggattttgtgttttggtaggggatctagggtttgtcgtcgaattccgcctcgaattttagggtttgcttcggatcgattccgttccgtgggattcttgcttgcagcactccatggctgcggcgcggcacgggggttataggagcttcgacgtggccaggaggcgggagttcgacctggagcgttctaggaggagcaaggagtaccgccactcgagccgccaccgcgactcggatcgccaccgtgatggcagcaggggccgtgaagtgcccaacgggtacatccgccaccgctcgccgtatgcgccaccgaagagccgaccttcaaaaaggaaggacgataaggagcctggtgaggtctcaagcgatagcggctcggagtctggtgggcgcccaccagtgctgagggaggatgggggtcttggggtctgcagggatggaggtgcgttgccagcaagcaagaagaggaagcactcacctggattccacgatacgaatgtttcaaagctgcgggcaagagatgaggtgtggagcaggagaggacctgatgccatagctgcggagctccctcttccttcgccgccccctatgtctgcggttggtgggtgctcaccaatggatccagaagttttggtagttccaaatgatgctgaaaggatggacgcgattactgagggggaagaggattgtgcaacgagaaacatttttacttcaaggtgggcggatgctgctgaagaggaggaagtggtgattgtgcctaagaagaagaaaagtgtgccacctgctcatttgcctgaacagaaatccacaaagaaaatcatgggctcagagctgggagaagcgatgggcagtaaaacatcaagaagttcctcaagttcgtctaactcaatgggtagtgaaaactggaatatcgaggtagacgagggtgatggcattgattcttctgttggttgttcgctggatactcattccaggagcaatatgcgtaggtctggatcacctgaggttgtgcgaacaccacgtaggtgctttaacatgcttcagggctgtaggagtattgatgactttgagaggatcaacacaatcaatgagggtacatatggagtcgtatttagggtgagagacaagaaaactggtgagatagttgctttgaagaaggtcaaggtagataaggaaaatggacgggaagggtttccattgacttctctcagagaaatcaatatccttctatcctttgaccatccttcaattgtggatgtcaaggaagtagttgttggtggtcatgacgatgatacttttatggtgatggaatacatggagcatgaccttaagggtgtcatggaggcgatgaagcaaccatatagccaaagtgaggtcaaatgtttgatgcttcagctgctagagggcgtgaagtatcttcatgacaattgggtacttcacagggatctcaagacatcaaatctcctcttgaataaccgcggtgagttgaaaatatgtgactttggactctctcgtcaatatggcagcctgctaaagccttacacccaaccagttgtgactttgtggtacagggctccggaactactattaggagcaaaggagtattcgactgctatcgatatgtggtcattaggttgcataatggcagaactcttgtcaaaagagccactcttcactgggaagtctgagatagatcaacttgataagatatttagaatactcggcacacccaatgaggagcggtggcatggttgttccaaattgcctggcttcaaaggcaacttcgtaaagcgaccattaagggacaaatttccagctgtatccttcacgggaggcttgaccttgtcagaagctgggtttgacctgctaaataggttgctggcatatgaccctgagaagcgcatatctgctgctgatgccttgaaccatgagtggttccgtgaagttcctctgcccaagatgaaggaattcatgccaacttttcctgctctgaatgaacaggacaggaggatcaagagatacatgaagagccctgaccccctggtggagcaacagatgaaagaacaagggagcataggagatcatggcctttttgactgatctgaaagcagacaagtcttgctgcaaatgacagtttttgagtgagtaaacatgttgcaaggtgaggtgtacaactggacagagaagtatcccgtctacttggtgtgcggtgacagcttattgtgttctataacaggctaagagatcaaaggggaacataaattttacttaagttccatgcagctagtgttcaaatggcagggttagctctctacgagaactgtcatattctaacctatcatcattataagttgcagatgtaatgcagttcgtctaaaaggtttggccttgcgtacaccaagtttcacctctgatacttgtaaagtattataaactgttgacttgtaatcagtaatcaatgagatattagtgacatcgtattttattttctcttttcaagtagtgcatcttcttttgatcttttgattgtctttgcaagagttgaatgaagtgaaggaaccggtgcatttttattttcgcaaggaaatcgatactctcttaatgggaattgtaagcttaaagctgtggctgtatcaagagatgaagggttcacggatgccagattacatacctaactgactttttttgtggtcggtcctccaaaggtctcatctgtaattgtgaatccaagtgagttgagctcagctcttttgaatactttggtaatccctgccctcttcatcttcccactccagttctgtttcatcagctcatcatgatttatttatcattcctgtgattcattgcacgatcattatcaatttgtttctttatttgcatggacattaactgttacaaaatgccgccttcgccctcctgtgcccaccatagttgccacgtgttctgggatctatgcttattatttcttggatagttattgaggcaggtaaaagaataaggttaagaatatgttaaattactccttgtgctttggttagatgatattaccaaaaatatatgttgaggtgtaagacaattctgggtttaagtgtttattctcaaacggttgatcaatcatggttttccacttccaagcttgatcctaaccaatccttatgtgatttaattgtcatattttgccactccttcctatcataaaaacatgccgtttaggacaagatttgatcaaaccttaaaacttaaaagctacaaacatttataacttctaatttatttagtttatgattgctgtgtcttgctttgtcagctaccatttttttcatgccataaaatggtggaattgcctgtagagttacataaatgctttctactaacctaagttgagatgtgtgccaatgtatcactgtatcaggtcccaattccacttgttataccatcttttttcttcactggggattgtttttgaataatctgctgataataccgctccgttcttttgagcttttataatctgccagaggtaactagttgactataaaatctgggaggatgctaccatgtgaattatgtctttctttttacctagttgggtaaaatgcgctaatggtttgctatgcctaaatatgaattcgagttgactatgttcctcattgcaatgtttgtggcacacaggtatagcacttctaattactcctgtgagatggctaatatttccgtgttttttattgggttgatgtgttcatatgattttgttaagaacaacagtaaaatacaatgaatcctggaaagcaagttgtgctaagttatataattttagtaaaacgtattcatgtctttgatactgatgtaattctgaatttctgatgtgagattccaacttaagtacctaactgctttcccagttgcctgaacttgtagggtatttaccattcttatgtcacttctctgaacttgcatgatattcaccattcgtatgtcattataatagcatcttactgtcccttgcatttgtagttgcttggaattatgacgtctttagcacgatctgaagtagggagtatatgtaccacagaacgtctaggaattttgttgtagcagttcatctgagtatatccacttactcttaccatgtgcgattaaagtgcacttgagtttgtttacagcttgaaatgtccgcactggtagcagacatggcagattgttagggcacctatggagacgacgtcaaacacatttgaagttaggtgaacttgaatatcgacggagggcagctgataatttatgttggttctttatcttcagaatccagacatcaatcatcccttggtccggcgttctttggggtagggaatcttaaaagaatgtataaacagcctctcgaggtagtgcttgggacaggaaattgcgagttacctccatgacctcttcaatgcaccattgactgcattattgagaaggcagaagacatcattgatcggttggcacgtgcgaacttgcaatcgctttgacctaaaacaatatgccatcattattgagaattcgctatgcgccattcaaaaacaatatgtatatcattatatgccatcaaaatgtttgctgcggcttctatactggtttttctctctcctggtaccacacccgtcaaatggttaactcttatcagaaaagtattaggcgaagaaaattttgaaagctggtatagaaggtagtggcaccactggcatagatgcagaataaatacatccacaatgttttcatatgtgtcagatgacaaaatttatatgttacctatagagattgacatggcctaaaacgtttacttggttacttttcatttatttaagaactttagggcatgtataatactattaattaagaagtctcttgaggggtctataaaggtaggtgagaaaaaaagttattcttcgtgaagacacc

SEQ ID NO: 208754 - DNA, 4340 bp, Zea Mays
cggttctgtctgcctttatttattcgcgttccctgcctgtttcgagcctccagccttaataacccggcattctctccgccgctcgcccgctccgcgtccggcggcccgcgtcgcctccactcccaattagcctatcgtgttcgacgcgagcgaactcgctcagatcagagtgttccctgatccggtcccaatcttttattggattttgtgttttggtaggggatctagggtttgtcgtcgaattccgcctcgaattttagggtttgcttcggatcgattccgttccgtgggattcttgcttgcagcactccatggctgcggcgcggcacgggggttataggagcttcgacgtggccaggaggcgggagttcgacctggagcgttctaggaggagcaaggagtaccgccactcgagccgccaccgcgactcggatcgccaccgtgatggcagcaggggccgtgaagtgcccaacgggtacatccgccaccgctcgccgtatgcgccaccgaagagccgaccttcaaaaaggaaggacgataaggagcctggtgaggtctcaagcgatagcggctcggagtctggtgggcgcccaccagtgctgagggaggatgggggtcttggggtctgcagggatggaggtgcgttgccagcaagcaagaagaggaagcactcacctggattccacgatacgaatgtttcaaagctgcgggcaagagatgaggtgtggagcaggagaggacctgatgccatagctgcggagctccctcttccttcgccgccccctatgtctgcggttggtgggtgctcaccaatggatccagaagttttggtagttccaaatgatgctgaaaggatggacgcgattactgagggggaagaggattgtgcaacgagaaacatttttacttcaaggtgggcggatgctgctgaagaggaggaagtggtgattgtgcctaagaagaagaaaagtgtgccacctgctcatttgcctgaacagaaatccacaaagaaaatcatgggctcagagctgggagaagcgatgggcagtaaaacatcaagaagttcctcaagttcgtctaactcaatgggtagtgaaaactggaatatcgaggtagacgagggtgatggcattgattcttctgttggttgttcgctggatactcattccaggagcaatatgcgtaggtctggatcacctgaggttgtgcgaacaccacgtaggtgctttaacatgcttcagggctgtaggagtattgatgactttgagaggatcaacacaatcaatgagggtacatatggagtcgtatttagggtgagagacaagaaaactggtgagatagttgctttgaagaaggtcaaggtagataaggaaaatggacgggaagggtttccattgacttctctcagagaaatcaatatccttctatcctttgaccatccttcaattgtggatgtcaaggaagtagttgttggtggtcatgacgatgatacttttatggtgatggaatacatggagcatgaccttaagggtgtcatggaggcgatgaagcaaccatatagccaaagtgaggtcaaatgtttgatgcttcagctgctagagggcgtgaagtatcttcatgacaattgggtacttcacagggatctcaagacatcaaatctcctcttgaataaccgcggtgagttgaaaatatgtgactttggactctctcgtcaatatggcagcctgctaaagccttacacccaaccagttgtgactttgtggtacagggctccggaactactattaggagcaaaggagtattcgactgctatcgatatgtggtcattaggttgcataatggcagaactcttgtcaaaagagccactcttcactgggaagtctgagatagatcaacttgataagatatttagaatactcggcacacccaatgaggagcggtggcatggttgttccaaattgcctggcttcaaaggcaacttcgtaaagcgaccgtacaatagattaagggacaaatttccagctgtatccttcacgggaggcttgaccttgtcagaagctgggtttgacctgctaaataggttgctggcatatgaccctgagaagcgcatatctgctgctgatgccttgaaccatgagtggttccgtgaagttcctctgcccaagatgaaggaattcatgccaacttttcctgctctgaatgaacaggacaggaggatcaagagatacatgaagagccctgaccccctggtggagcaacagatgaaagaacaagggagcataggagatcatggcctttttgactgatctgaaagcagacaagtcttgctgcaaatgacagtttttgagtgagtaaacatgttgcaaggtgaggtgtacaactggacagagaagtatcccgtctacttggtgtgcggtgacagcttattgtgttctataacaggctaagagatcaaaggggaacataaattttacttaagttccatgcagctagtgttcaaatggcagggttagctctctacgagaactgtcatattctaacctatcatcattataagttgcagatgtaatgcagttcgtctaaaagttgaatgaagtgaaggaaccggtgcatttttattttcgcaaggaaatcgatactctcttaatgggaattgtaagcttaaagctgtggctgtatcaagagatgaagggttcacggatgccagattacatacctaactgactttttttgtggtcggtcctccaaaggtctcatctgtaattgtgaatccaagtgagttgagctcagctcttttgaatactttggtaatccctgccctcttcatcttcccactccagttctgtttcatcagctcatcatgatttatttatcattcctgtgattcattgcacgatcattatcaatttgtttctttatttgcatggacattaactgttacaaaatgccgccttcgccctcctgtgcccaccatagttgccacgtgttctgggatctatgcttattatttcttggatagttattgaggcaggtaaaagaataaggttaagaatatgttaaattactccttgtgctttggttagatgatattaccaaaaatatatgttgaggtgtaagacaattctgggtttaagtgtttattctcaaacggttgatcaatcatggttttccacttccaagcttgatcctaaccaatccttatgtgatttaattgtcatattttgccactccttcctatcataaaaacatgccgtttaggacaagatttgatcaaaccttaaaacttaaaagctacaaacatttataacttctaatttatttagtttatgattgctgtgtcttgctttgtcagctaccatttttttcatgccataaaatggtggaattgcctgtagagttacataaatgctttctactaacctaagttgagatgtgtgccaatgtatcactgtatcaggtcccaattccacttgttataccatcttttttcttcactggggattgtttttgaataatctgctgataataccgctccgttcttttgagcttttataatctgccagagcttgaaatgtccgcactggtagcagacatggcagattgttagggcacctatggagacgacgtcaaacacatttgaagttaggtgaacttgaatatcgacggagggcagctgataatttatgttggttctttatcttcagaatccagacatcaatcatcccttggtccggcgttctttggggtagggaatcttaaaagaatgtataaacagcctctcgaggtagtgcttgggacaggaaattgcgagttacctccatgacctcttcaatgcaccattgactgcattattgagaaggcagaagacatcattgatcggttggcacgtgcgaacttgcaatcgctttgacctaaaacaatatgccatcattattgagaattcgctatgcgccattcaaaaacaatatgtatatcattatatgccatcaaaatgtttgctgcggcttctatactggtttttctctctcctggtaccacacccgtcaaatggttaactcttatcagaaaagtattaggcgaagaaaattttgaaagctggtatagaaggtagtggcaccactggcatagatgcagaataaatacatccacaatgttttcatatgtgtcagatgacaaaatttatatgttacctatagagattgacatggcctaaaacgtttacttggttacttttcatttatttaagaactttagggcatgtataatactattaattaagaagtctcttgaggggtctataaaggtaggtgagaaaaaaagttattcttcgtgaagacacc

SEQ ID NO: 208755 - DNA, 1176 bp, Zea Mays
cagaaagagctacacatttttttcttctgaaccactgaaatgacgctctaaagcagaaatctctacttccttcatttgaatctgcagaaatgcgcaacttagctgagacattgttaagggatataattcgtggaagtccagatgttaaatgggaaagcataaaaggtctggagaatgcaaagcgtcttctcaaagaagcagttgtaatgccaattaaatatcccaaatacttcacaggtctattatcaccttggaaaggcatattactgtttggtccacctggaacaggaaagacaatgctagctaaagctgtggctactgagtgcaaaacaacttttttcaatatttctgcctcgtcgattgtaagcaagtggcgcggtgactcggagaaactagtgaaagtgttattcgaacttgcaaggcatcatgcaccatctactattttccttgatgagattgatgctatcattagtcaacgtggtgaagctcgtagtgaacatgaagctagccggcgattgaaaactgagctattaatacagatggatgggttgactaagacagatgagcttgtttttgttctagcagcaacaaatttaccatgggaattggatgcagcaatgctgcgtcggctggagaagcgtattcttgttccattgccagagccggatgctagacatgctatgtttgaagagctcctgccatatacacctggcacaatggagattccctatgatgttcttgtggagaaaactgaagggtattctggctctgatattcgcctggtatgcaaggaagcagcaatgcagcccctaagacgggtaatggcagttcttgaaggcaggaaagaagaggtccctgagggtgagttgcctgaagttggcccagtaactacagaagatattgaacttgctttgaggaatacaagaccgtctgcacatcttcatgcacatagatacgaaaagttcaaccaagattatggcagtcatgtacatggctaaaggggagaagcttgttgtagggtttaatttgtatgctcatgcgtgggccaataggtgactactgaattcatcgacatgctgagtgatgcacgcagatgaagaccctcgatctgacaggaggatacgacggacgggtgtatgagcaggtggccatctaggacgccgccatgccggggct

SEQ ID NO: 208756 - DNA, 1700 bp, Zea Mays
gcggggtcacggagaaaccgagccccgtaccatggaagcgccctcccgttccgtgcgtctgggctcgggaaagaccataccagcgcggcagcgcagattccatcgacgccccgctgtcccgggctcccggccgcttgtttgttgtttacttctattttttttgcccgtcagccccaccgcaaccgacgcctccagtcctactcctccacccagctcgccgcttcaggaatccggagagctcgcgtcgcgcgtgcgtgggcgtgggtgcgtgcggcggcgaagcaccagcaccaccctctcgcgtcgcgcgcgcgcgcgcgtctcgatggccgacggcgagccttccctcacgcgctggaccttcgaggatttcgtggtccactacgaggcgcgcttcggcctccggcgcgaggccgacggcgacgacgcacccccgccgcgcggatccgatcatggggccagccgccccgccactgcccgcgccaacggcggcgcggacctcgccgtcttcgagcagttcgagcggatggagaggaaggtggagataagcaatggagcaatagaggatggtccactgcagaaatctctacttccttcatttgaatctgcagaaatgcgcaacttagctgagacattgttaagggatataattcgtggaagtccagatgttaaatgggaaagcataaaaggtctggagaatgcaaagcgtcttctcaaagaagcagttgtaatgccaattaaatatcccaaatacttcacaggtctattatcaccttggaaaggcatattactgtttggtccacctggaacaggaaagacaatgctagctaaagctgtggctactgagtgcaaaacaacttttttcaatatttctgcctcgtcgattgtaagcaagtggcgcggtgactcggagaaactagtgaaagtgttattcgaacttgcaaggcatcatgcaccatctactattttccttgatgagattgatgctatcattagtcaacgtggtgaagctcgtagtgaacatgaagctagccggcgattgaaaactgagctattaatacagatggatgggttgactaagacagatgagcttgtttttgttctagcagcaacaaatttaccatgggaattggatgcagcaatgctgcgtcggctggagaagcgtattcttgttccattgccagagccggatgctagacatgctatgtttgaagagctcctgccatatacacctggcacaatggagattccctatgatgttcttgtggagaaaactgaagggtattctggctctgatattcgcctggtatgcaaggaagcagcaatgcagcccctaagacgggtaatggcagttcttgaaggcaggaaagaagaggtccctgagggtgagttgcctgaagttggcccagtaactacagaagatattgaacttgctttgaggaatacaagaccgtctgcacatcttcatgcacatagatacgaaaagttcaaccaagattatggcagtcatgtacatggctaaaggggagaagcttgttgtagggtttaatttgtatgctcatgcgtgggccaataggtgactactgaattcatcgacatgctgagtgatgcacgcagatgaagaccctcgatctgacaggaggatacgacggacgggtgtatgagcaggtggccatctaggacgccgccatgccggggct

SEQ ID NO: 208757 - DNA, 1374 bp, Zea Mays
ggtgggctccgccgttcccctttacctgcgtcatgcactcacggcaacgctggccagaggcccagagcttcgtcaaagacacgccgaaaagagggggaggcgactcggccgaggtccggttccgaactccggtcctccgatttgcgcgtccggatctaccagccatggcatcatcttcggacccgtggatgaaggagtacaatgaagcatccagacttgctgatgacatcagttccatgattgctgatagagggtcccttccacaatcaggcccagaaattatgcggcatacttcagccatccggagaaaaataactattcttgggactagactggatagcttggagtcgttgcttggcagaattcctccaaagtcaatcactgacaaggagatgcataagcgccaagacatgttttccagtttgaagtctaaagcaaagcagatggcgacaagtttcaacatgtcaaactttgctaacagggaggatctgcttggtcagagtaaaaaggcagatgacatgagcagagttgctgggttagataaccaagggattgttgtccttcagaggcaaattatgaaaggtattgtttttttgtggtttgttcagtagtgttttcttgatgaaccttactaaaagggtgctgtttgcatgagatcatgtagcactgtttcttcacaccatttgcatttcatatttggttggtacagatctaggtttcttggaaatggcagttgtgggagcaagaaccatttcatggcgctttatttatttgagttgtgtatcaatattttgcagagcaagatgagggtcttgagaaactggaagagacagtgctgagcacaaagcatattgcattagcagtcaatgaagaacttaccctgcacacaagattgatagatgaccttgaagatcatgttgatgttacaaattcacgtcttcagcgcgtgcaaaagaggcttgcaattctgagcaagcgcaccaaaggtggctgctcatgtatgtgcctgcttctatctgttgtcgccatcgtgattcttgcagtcatagtttggcttctcgtcaagtatctgtaaaggaaagaaagaagcagccggcctaccctgcagacctcactcgaaatgacccttatgtgtgtgcagccttcgcttaaaaagtcccttctgtgttactaccattgaaatgtgcatccctttgaaaataatatatatacggtggtttcatcttccctttcgtgagtggaatggttatggagtaatgtacattacatcgaatttgacacatacatgatcatcatctgcatcttgtgtatggtgtttgtcagtttgccgtgacaagtgttggatttattctgtgccgtaagcactttatctct

SEQ ID NO: 208758 - DNA, 1470 bp, Zea Mays
gtgaaacaagccgactgaccgaaccgttgaattgcaatttccgctagaaagccgacgagacaatttcttccgttcgtttcagatcgggcggtggtcctgaccaaggcgctgccggccactggcctctcgcaaccggcgaccgcatctcgaagtagagggtgctggccgccgctctcggaagcgctctggaaggacacggccatggcgatgcgggccgctgcgcgtcaagccatactctctccaccgcttgggccccgcagtcctcgccccttcctctgtggttgttccttgtctatcgctcctcggttggagccgtgccgagcggcgagctccaccaccgcgccggccgccggaaagcatctccctccattgttcagcgtcgcgccgatgatggactggacggacaaccactatcggacgctcgcgcggcttatctcgcggcatgcctggctttatactgagatggtcgtcgccgagaccatcgtgcatcagaaggataacctggataggtttctagcatttccggaggaacaacatcctattgtgctgcagattggtggaagtaaccttgaaaatttagcaaaagcaacagaactggcaaatgattattcatatgatgagatcaacctaaactgtggctgtccaagcggcaaagttgctggtcatggttgctttggtgctcgcttaatgtttgatccagagtttgtaggagatgccatgtcaactatcgcagctaattgtgatgtcccagttagtgttaaatgcagaattggtgttgacgatcgtgattcttatgaagaactatgtgaatttgtagataaagttatctcaaaatctccaaccaggcatttcattattcatgctcggaaggcattgcttagtggtctcagtcccgcagagaatcggaagattcctccattgaaatatgagtactattttgctttgttgcgggacttcccagaaataaaatttactctaaatggtggcataaccaatgttagtcaagttagtgcatccatgagacaaggtgcacacggagttatggttggccgggctgcttataacaatccatggaacatgctaggacatgtggatggggaaatctatggcaagcaaacaagatacatttctcgtcgccagatacttgagaactaccaagcttatggtgattcaataattgaccagtatggccccagcaggccaaatgtgagacaacttgtcaagccactgttaaacttattccactcagaacctggcaacagcctatggaaacgcaaagctgactctgcattgcgtcattgcaaggagtgctacacatcctttctgtaagaaaaaaaactcggccggggagggaaagaccaccatctcggtattatattaagaaaagaccgaaacaatggtcccggccgagaaaatccccgaaccctgacccatcactaacgggccggcatcaactgtccactctacaac

SEQ ID NO: 208759 - DNA, 1447 bp, Zea Mays
gaccgaaccgttgaattgcaatttccgctagaaagccgacgagacaatttcttccgttcgtttcagatcgggcggtggtcctgaccaaggcgctgccggccactggcctctcgcaaccggcgaccgcatctcgaagtagagggtgctggccgccgctctcggaagcgctctggaaggacacggccatggcgatgcgggccgctgcgcgtcaagccatactctctccaccgcttgggccccgcagtcctcgccccttcctctgtggttgttccttgtctatcgctcctcggttggagccgtgccgagcggcgagctccaccaccgcgccggccgccggaaagcatctccctccattgttcagcgtcgcgccgatgatggactggacggacaaccactatcggacgctcgcgcggcttatctcgcggcatgcctggctttatactgagatggtcgtcgccgagaccatcgtgcatcagaaggataacctggataggtttctagcatttccggaggaacaacatcctattgtgctgcagattggtggaagtaaccttgaaaatttagcaaaagcaacagaactggcaaatgattattcatatgatgagatcaacctaaactgtggctgtccaagcggcaaagttgctggtcatggttgctttggtgctcgcttaatgtttgatccagaggagatgccatgtcaactatcgcagctaattgtgatgtcccagttagtgttaaatgcagaattggtgttgacgatcgtgattcttatgaagaactatgtgaatttgtagataaagttatctcaaaatctccaaccaggcatttcattattcatgctcggaaggcattgcttagtggtctcagtcccgcagagaatcggaagattcctccattgaaatatgagtactattttgctttgttgcgggacttcccagaaataaaatttactctaaatggtggcataaccaatgttagtcaagttagtgcatccatgagacaaggtgcacacggagttatggttggccgggctgcttataacaatccatggaacatgctaggacatgtggatggggaaatctatggcaagcaaacaagatacatttctcgtcgccagatacttgagaactaccaagcttatggtgattcaataattgaccagtatggccccagcaggccaaatgtgagacaacttgtcaagccactgttaaacttattccactcagaacctggcaacagcctatggaaacgcaaagctgactctgcattgcgtcattgcaaggagtgctacacatcctttctgtaagaaaaaaaactcggccggggagggaaagaccaccatctcggtattatattaagaaaagaccgaaacaatggtcccggccgagaaaatccccgaaccctgacccatcactaacgggccggcatcaactgtccactctacaac

SEQ ID NO: 208760 - DNA, 7848 bp, Zea Mays
cccctccaccgcccgccggcgttcccacttcaattcgcccagcgcccctttctcctcccgaaaggcagggcaaccctacaaaacgctgtctcggcttcgccgtccagcggaacagtgtacgggagcagttcgtcgcgtgtgtcgcgtcgcgttgcgttgcgccacccactaattcgaacggacgggactgggattcgaaatttcgaacacgcgccgcctgagagagagagagagagtgagagaaagagagagagagagcaggagagatggtcaggcctttgtgatctcccgcggggctggaggtgtgcggggatggatctcgcggggatgaagcggcgggagctccaggcgctctgcaagcggcacggcctccccgccgggggcaccaacgccgacctcgtcggacgtctcgacgccgtgctttcggggcccgctgttgtggaggaggaggttgccggagtgccggcgaggaaggggtgtctgaagcaaacgggcggaggtgccaccgaggccaagaaggttacttttggggcggaggtagggaaggccaggagactgaggtctcgggtcatatggtcgccggtcgttgccaagacaagggggaagtctgctcgagccggtactgattctgctgctgaagacggtatttctgcagatgtgggcgctgatgtcccagtgaggcggtccaggaggaattcgttcaatcctgccgaggctgaggaagcaggagaggctgttgctgttgacaggaagcccaagcgcaagaatcaggagaatgacgagggcgttgctgttatcgctcaggctagagttacgagaaggtcaaatttggagtggtctgctactgtattgcctcctgctgttgagaagaagagagggaggcagaatgcagctgagtctgatgtgcagaagtccgctctggtggaagtaacagctaggactacaaggtctcgctcaatcgtacctgttgtggtgccacccactgtggttgagaacaagaggaggaagactggagatccacaaacaactgtagagttgactatgctttcagatgtgcccagaagtgattttcctgccaccaggtctttaaggaacaaaattgtccacgttaacaacagcgtcgtggacgaaactcacactaccaggcagttggaaaacaagatgcgtccgtctactcgtaggcatcaacaggttgcatcttctccggaggataaaggtcaaaaaattcctgctaccagtaagtcccctctactgaggtggtcacggagaaactattctgaggccaatagtgcaaattcagtaaacatcaaattggccaaagactcgagcacagctcagccattggcacaccataattctcattctgaagatttggagaaacaaccagcagttaaagaaccaattaaacggtcaacacgtaaatctattgctttggctgcacttgagaaagagaaggatgtaattgaaggaaagaaccctgaagcacatgttaggcgatcaacgaggaaatcagttgtgcaggttaaagataccaaaagtattgttgaagagactcaatatgctaacagtgaagatgtggcgaagcaaccagcaactaaaggacctgctagggggctgagacgtaaatctgttatcacagaattgcatgagaaagagaagagtctcattgccgaaaagaacatggaaacagatgaagcgatattaacgcggaagcctgtaatcccagttaaaaatattaaagctgttggtgaaggaattcaaattggtaagggcaaagatgtggataaacaatttgttgtgaagcaacctactaggcgatcatcgcgcaaatctgtgctgcctgatatgcttgagaataatagtggacttctagcacccaaaatgaatgctgagatgaatgttaggagatcaacacggaagtctgttcttcctgacatgcataatgagaagcaagatcaccataaaatggctagaaatgagaacttgcaaagtggtaaatatcaagatggtgagaagcaacagaaagtaaaagattctattaggcaatcaaggagatctatcgctacagtgctacttgagggacaaaataatgatgaaggaaaaaagttcaaaaatcctacgaggaggacaacacacaaatctcatgcccttaatgcagttgaagaggtcagcatggatcacattgaagttggtgaagaaggcttgaaattgaggaagcgcagtaggtttttgctggaaatatcatcttcagctaatgtttcctggaagcatcagaatgcacagatctctaatgaaaaagataacacagaaggatcgcagcaggcatcaaattgcacaacttcaaagagaaggtcttcaaagaagagacgaacaactgctccagaagaagtgatgcctttcaaggtggcaaatgatgacatagttatcatggaagaaacaaaggacacacttgaatataataatgagtctagtagtaaagttcaagaaatttgtcaggttaatgctgcaagagaagagttctcttcaggtccattgcttgtaacagtagctcctagtgacgaaatttgcacagtgcagagtgtagctgtggtgatacctgggtcagaatctggtgacgatgcaaatcaaagttctgataagagtaagcaacctcaggaacattctgtcactcaaactgttgatgaccatttatctgaaacaagaagtgggaaattagatcaatcaacatgcatcacaggattagtctctgacaattgtgttgtctcagaggacaaaacattgatgagtgaagaccgtgaagagcaaagccctgtgtccggagaacagagagttagcttggaagcaaatgccaatgagcctgaggaaaagaacctagctaacgtcacatcaactgatctccacaccaaaagtctgcagcatgatattgacagaatagctaaagagactgataaagaagttttagctcaggagaattgtaatgaccagcctgttcctgcccagactgaccaagaaattaagttaaacgatgaacttgctgatccggatgttttagctcaggagaattgtaatgaccagcccgttcctgcccagactgacctagaaattaagttacacgatgaacttgctgatccggaccatgaagagcaaagccctgtatccggagaacggagagttagcttggaagcaaatgccaacgagcctgaggaaaagaacctagctaacgtcatatcaattgatctccacaccaaaagtctgcagcatgataatggcagaatagctgaagagactgataaagatgttttgtcttttgttttccctattgaagagcatgaagaaaaatatgcagttagccctatagccgttgaaaagagcttccgtcaggaagcaagtgcaattgaatctgcaggaaaacccctaactgtcatcttttctaacgatctccacaccaaacatctgcaacatgattgtgatgtgctaattaaggagactggtgaagaagttttagctcaggagaattgtaatgaccagcctgttcctgcccagaccgacctagaaattaagttaaatgatgaacttgctgatccggatgttttagctcaggagaattgtaatgaccagcctgttcctgccaacgagcctgaggaaaagaacctagctaacgtcatatcaactgatctccacaccaaaactctgcagcatgataatgacagaatagctgaagagactgataaagaccatgaagagcaaagcaatgtgttcggagaacggagagttagcttggaagcaaatgccaacgagcctgaggaaaagaacctagctaacgtcatatcaactgatctccacaccaaaactctgcagcatgataatgacagaatagctgaagagactgataaagaccatgaagagcaaagcaatgtgtccggagaacggagagttagcttggaagcaaatgccaacgagcctgaggaaaagaacctagctaacgtcatatcaactgatctccacaccaaaactctgcagcatgataatgacagaatagctgaagagactgataaagatgtttcgtctttggttttccctattgaagagcatgaagaaaaatatgcagtgagccctatagctgttgaaaagagcgtcagtcgggaagccagtgcatgtgaatctgcaggaaaacccctaactgtcatcttttctaacgatctccacaccaaacatctgcaacatgattgtgatgtgctaattaaggagactggtgaagatgttttagctcaggagaattgtaatgaccagcctgttccggcccagactgacctagaaatgaagttaaacgatgaacttgctgatccggaagttttagctcaggagaattgtaatgaccagcctgttcttgctcagactgacctagaaactaagttaaacgatgaacttgctgatctggctatggaatcaggttgtagcattactgaaaggaatgaagggcttgttgctcataatcttgatcaagaaggtttccttgaagcaacaccagagtgcaaacaggaatgtggtttgcctgaggagacagtaatttcctcaaaagaaacaggatctctgctgtgtgcagatcaatcaccaattggtctggaatctttattttcgcaagaaagcatagttgaatcagtggggcattgtgcacttgcttcagcaacaactcataccgaaaatggctttgatgattcaaaagattgccataacaagtctgcacttgaaaatgttcatgtgccagaaccttgttcacacaatgatactaaaggaggcatttttaaaaatgttgattgtatgcatacatcccagcgagatgatagaatggaaggagtaccagaggctaacactgatgaagaacatgttctgtcagcctttttgctggatgcaaatcacctaaacgtagtcattaattctgaagaagtggtttgtgagggtgaagatagtaaggagcttctccattcggaagactgtaaagcttcatccgagaaaacagatgtgaatgatggcaatgtatatggtattagtgatgctgtagtgagatgtgcactgcatgctccagccgatgataattatgagatttttttgggtcccaatactgatgtaccacgtcaggtttataatgacggatgcagtgatgtcaaagaagatcgatttgcttccaaaccctggacaattgatattattgaggatgcctctgtcaaagaaagatcaaatttaaaagattggcaacttgattccaagttggagggcacagaaatagtggaatctggcctttacttcaataaggatattggtaacattttacatagtggatctattggtgaaataactccatctggttctggtttatcaaaagattcatctgtggactatagaggggaggttttagatggcttctcaatggaagcatctcttgaaaggtcttctacacgtggggaacaaaatggttgtagactagatgctattgagaatccttcaattactttagcaacttctggttataagcatgaaggtgctttatctgaggaagcagtgtacacaaagaagaattacgctggaacatgcttgtcaaatcccagggaattaatcatggagctgcaatcccatttctcaaaggaaaacataaatgaatctgatcctcatgacagccttgtattcccaactgctgaaaattcagcagatgaacagctggttaaagtacaccatggttctaatctgtctcagttaggattaactgatctgttggatggaccaattgggtgttccaataccgacgtgttgtgccagtgtgacaatcataaaaatcaatccaatgaggacaaggtagaggaagttgaggcggtgtctgctgctaaatacatagaaagtgaagttgtgctgctcccatctcaagagagatcaaatttgaataatgagcagcttaacaccaagttggaaagcccaaacattatgggatcttgccttaactgtgataacgatgtttgtaatacttcggacaatggatctgtttttgtcattggtaaaagaactccatctgcttctggcttaccagaagattatcctaaggatagtgacttgcaacaaccggttttagatagcttctcagtggtttcatcttttcaagacaatatatctgggaagaaaactgtttctggtgtagcaggcagtgagattctttctttaagtttagcaactcctgattataaacatgaagatggtttctctgaggaagcagtatgcagaacaaagaattatactggaacttcctcggtagatccgaggcatttagacatggaggggcactctatttactctgagggaggtactgaaaaatctaatctgcaagataatcttgcatttctaagcgctgagagtggaaaagatgaacctattatttgccatgttgagaaactggttgacgcacatgcttcttcagatacataccaaggtccttgtcaagatctaggcagacatgaagaacaagagagctgcatgtctattcctatgcaagccaaagaaagtggaggggttttgaggtctagccacacgaaagggtcagttacagcagcccaaattgatttggcaggtgatgcccatcttattgtgagtgataatgctgctgccaagcaagtgtttagtgaggagaaagaggaaacaaaatctatctcttcttcagatattgatatccttcatgaaaaatcatactccagtggacacgatgaccatgctgcttgtgctgccgaaactcagttctaccatccacagaaagcatctatatctgatggactacatttgggtcctagttctttgcaagtagaatcactggatgctttggatagcgatatactgtatgttaacacaggagttctcgagcagcatcataaagagggttactatgaacccagtgtctaccaaatcacttcaggcatttgcacaatgtctgaagctgaaccattcgaagttttagaaactggaaaagatgtaaaaacgccatctaagctagatgagcaacttaatcctgggttggacggagatgaagctgagaaacacagcttagactgtggtacagacaccagtcctgtgatgagcaagagaaccctttcttcaccaggatcaggaccatgccagcagtatgtaaatgaaagcaccaccagtacacagtcgactgataatcacccaaacgacctacccgctccgagatctcctgaacaatccgcgtgttttcagaatgacaacgattcgggttcagtaggcatttgtcaaagcagcaggcgaagaggtatagatgaactttgcggtaagctgcagagtttcaaagtttccagcgccgtaaaaggaagctacgtagctatgggtgcacctcgtccgaagcctggggacagcacgagccgatctgcagccgcgctgctcaggaacatagagaacacaactgctgttaaagctggccgtcctcctgtcaagccaaacgccgatggtaaggactcgtctaggcgagccctgcagcccataagcggaaggcctgacagtaggtagttcggcggttccttaataagtgtgtcgtgtttgtgttcaaccctttgttgaaagccaggtccgtgtatttgtgcagcttgttgtcatgaagctgctgtgtgcgtgtcatttaacataagcgtgcgtgaagttgtgttatggaagtggctaaatatgtgttcgttaggaggtcaattggcttgaactgaccctgctgttccgtgatttctgtctaaatatacttgtgtggctgtgtcactttgattggccttatcgatcacatgcaatgggatcacatctagcgtgctctag

SEQ ID NO: 208761 - DNA, 7900 bp, Zea Mays
ccaccgcccgccggcgttcccacttcaattcgcccagcgcccctttctcctcccgaaaggcagggcaaccctacaaaacgctgtctcggcttcgccgtccagcggaacagtgtacgggagcagttcgtcgcgtgtgtcgcgtcgcgttgcgttgcgccacccactaattcgaacggacgggactgggattcgaaatttcgaacacgcgccgcctgagagagagagagagagtgagagaaagagagagagagagcaggagagatggtcaggcctttgtgatctcccgcggggctggaggtgtgcggggatggatctcgcggggatgaagcggcgggagctccaggcgctctgcaagcggcacggcctccccgccgggggcaccaacgccgacctcgtcggacgtctcgacgccgtgctttcggggcccgctgttgtggaggaggaggttgccggagtgccggcgaggaaggggtgtctgaagcaaacgggcggaggtgccaccgaggccaagaaggttacttttggggcggaggtagggaaggccaggagactgaggtctcgggtcatatggtcgccggtcgttgccaagacaagggggaagtctgctcgagccggtactgattctgctgctgaagacggtatttctgcagatgtgggcgctgatgtcccagtgaggcggtccaggaggaattcgttcaatcctgccgaggctgaggaagcaggagaggctgttgctgttgacaggaagcccaagcgcaagaatcaggagaatgacgagggcgttgctgttatcgctcaggctagagttacgagaaggtcaaatttggagtggtctgctactgtattgcctcctgctgttgagaagaagagagggaggcagaatgcagctgagtctgatgtgcagaagtccgctctggtggaagtaacagctaggactacaaggtctcgctcaatcgtacctgttgtggtgccacccactgtggttgagaacaagaggaggaagactggagatccacaaacaactgtagagttgactatgctttcagatgtgcccagaagtgattttcctgccaccaggtctttaaggaacaaaattgtccacgttaacaacagcgtcgtggacgaaactcacactaccaggcagttggaaaacaagatgcgtccgtctactcgtaggcatcaacaggttgcatcttctccggaggataaaggtcaaaaaattcctgctaccagtaagtcccctctactgaggtggtcacggagaaactattctgaggccaatagtgcaaattcagtaaacatcaaattggccaaagactcgagcacagctcagccattggcacaccataattctcattctgaagatttggagaaacaaccagcagttaaagaaccaattaaacggtcaacacgtaaatctattgctttggctgcacttgagaaagagaaggatgtaattgaaggaaagaaccctgaagcacatgttaggcgatcaacgaggaaatcagttgtgcaggttaaagataccaaaagtattgttgaagagactcaatatgctaacagtgaagatgtggcgaagcaaccagcaactaaaggacctgctagggggctgagacgtaaatctgttatcacagaattgcatgagaaagagaagagtctcattgccgaaaagaacatggaaacagatgaagcgatattaacgcggaagcctgtaatcccagttaaaaatattaaagctgttggtgaaggaattcaaattggtaagggcaaagatgtggataaacaatttgttgtgaagcaacctactaggcgatcatcgcgcaaatctgtgctgcctgatatgcttgagaataatagtggacttctagcacccaaaatgaatgctgagatgaatgttaggagatcaacacggaagtctgttcttcctgacatgcataatgagaagcaagatcaccataaaatggctagaaatgagaacttgcaaagtggtaaatatcaagatggtgagaagcaacagaaagtaaaagattctattaggcaatcaaggagatctatcgctacagtgctacttgagggacaaaataatgatgaaggaaaaaagttcaaaaatcctacgaggaggacaacacacaaatctcatgcccttaatgcagttgaagaggtcagcatggatcacattgaagttggtgaagaaggcttgaaattgaggaagcgcagtaggtttttgctggaaatatcatcttcagctaatgtttcctggaagcatcagaatgcacagatctctaatgaaaaagataacacagaaggatcgcagcaggcatcaaattgcacaacttcaaagagaaggtcttcaaagaagagacgaacaactgctccagaagaagtgatgcctttcaaggtggcaaatgatgacatagttatcatggaagaaacaaaggacacacttgaatataataatgagtctagtagtaaagttcaagaaatttgtcaggttaatgctgcaagagaagagttctcttcaggtccattgcttgtaacagtagctcctagtgacgaaatttgcacagtgcagagtgtagctgtggtgatacctgggtcagaatctggtgacgatgcaaatcaaagttctgataagagtaagcaacctcaggaacattctgtcactcaaactgttgatgaccatttatctgaaacaagaagtgggaaattagatcaatcaacatgcatcacaggattagtctctgacaattgtgttgtctcagaggacaaaacattgatgagtgaagaccgtgaagagcaaagccctgtgtccggagaacagagagttagcttggaagcaaatgccaatgagcctgaggaaaagaacctagctaacgtcacatcaactgatctccacaccaaaagtctgcagcatgatattgacagaatagctaaagagactgataaagatgttttgtctttggttttccctattgaagagcatgaagaaaaatatggagtgagccctatagctgttgaaaagtgcgtctgtcgtgaagcaagtgcatgtgaatctgcacgaaaacccctaaccgttatcttttctaacaatctccacaccaaacatctgcaacatgattgtgatgtgctaattaaggagactggtgaagaagttttagctcaggagaattgtaatgaccagcctgttcctgcccagactgaccaagaaattaagttaaacgatgaacttgctgatccggatgttttagctcaggagaattgtaatgaccagcccgttcctgcccagactgacctagaaattaagttacacgatgaacttgctgatccggaccatgaagagcaaagccctgtatccggagaacggagagttagcttggaagcaaatgccaacgagcctgaggaaaagaacctagctaacgtcatatcaattgatctccacaccaaaagtctgcagcatgataatggcagaatagctgaagagactgataaagagcatgaagaaaaatatgcagttagccctatagccgttgaaaagagcttccgtcaggaagcaagtgcaattgaatctgcaggaaaacccctaactgtcatcttttctaacgatctccacaccaaacatctgcaacatgattgtgatgtgctaattaaggagactggtgaagaagttttagctcaggagaattgtaatgaccagcctgttcctgcccagaccgacctagaaattaagttaaatgatgaacttgctgatccggatgttttagctcaggagaattgtaatgaccagcctgttcctgccaacgagcctgaggaaaagaacctagctaacgtcatatcaactgatctccacaccaaaactctgcagcatgataatgacagaatagctgaagagactgataaagaccatgaagagcaaagcaatgtgttcggagaacggagagttagcttggaagcaaatgccaacgagcctgaggaaaagaacctagctaacgtcatatcaactgatctccacaccaaaactctgcagcatgataatgacagaatagctgaagagactgataaagaccatgaagagcaaagcaatgtgtccggagaacggagagttagcttggaagcaaatgccaacgagcctgaggaaaagaacctagctaacgtcatatcaactgatctccacaccaaaactctgcagcatgataatgacagaatagctgaagagactgataaagatgtttcgtctttggttttccctattgaagagcatgaagaaaaatatgcagtgagccctatagctgttgaaaagagcgtcagtcgggaagccagtgcatgtgaatctgcaggaaaacccctaactgtcatcttttctaacgatctccacaccaaacatctgcaacatgattgtgatgtgctaattaaggagactggtgaagatgttttagctcaggagaattgtaatgaccagcctgttccggcccagactgacctagaaatgaagttaaacgatgaacttgctgatccggaagttttagctcaggagaattgtaatgaccagcctgttcttgctcagactgacctagaaactaagttaaacgatgaacttgctgatctggctatggaatcaggttgtagcattactgaaaggaatgaagggcttgttgctcataatcttgatcaagaaggtttccttgaagcaacaccagagtgcaaacaggaatgtggtttgcctgaggagacagtaatttcctcaaaagaaacaggatctctgctgtgtgcagatcaatcaccaattggtctggaatctttattttcgcaagaaagcatagttgaatcagtggggcattgtgcacttgcttcagcaacaactcataccgaaaatggctttgatgattcaaaagattgccataacaagtctgcacttgaaaatgttcatgtgccagaaccttgttcacacaatgatactaaaggaggcatttttaaaaatgttgattgtatgcatacatcccagcgagatgatagaatggaaggagtaccagaggctaacactgatgaagaacatgttctgtcagcctttttgctggatgcaaatcacctaaacgtagtcattaattctgaagaagtggtttgtgagggtgaagatagtaaggagcttctccattcggaagactgtaaagcttcatccgagaaaacagatgtgaatgatggcaatgtatatggtattagtgatgctgtagtgagatgtgcactgcatgctccagccgatgataattatgagatttttttgggtcccaatactgatgtaccacgtcaggtttataatgacggatgcagtgatgtcaaagaagatcgatttgcttccaaaccctggacaattgatattattgaggatgcctctgtcaaagaaagatcaaatttaaaagattggcaacttgattccaagttggagggcacagaaatagtggaatctggcctttacttcaataaggatattggtaacattttacatagtggatctattggtgaaataactccatctggttctggtttatcaaaagattcatctgtggactatagaggggaggttttagatggcttctcaatggaagcatctcttgaaaggtcttctacacgtggggaacaaaatggttgtagactagatgctattgagaatccttcaattactttagcaacttctggttataagcatgaaggtgctttatctgaggaagcagtgtacacaaagaagaattacgctggaacatgcttgtcaaatcccagggaattaatcatggagctgcaatcccatttctcaaaggaaaacataaatgaatctgatcctcatgacagccttgtattcccaactgctgaaaattcagcagatgaacagctggttaaagtacaccatggttctaatctgtctcagttaggattaactgatctgttggatggaccaattgggtgttccaataccgacgtgttgtgccagtgtgacaatcataaaaatcaatccaatgaggacaaggtagaggaagttgaggcggtgtctgctgctaaatacatagaaagtgaagttgtgctgctcccatctcaagagagatcaaatttgaataatgagcagcttaacaccaagttggaaagcccaaacattatgggatcttgccttaactgtgataacgatgtttgtaatacttcggacaatggatctgtttttgtcattggtaaaagaactccatctgcttctggcttaccagaagattatcctaaggatagtgacttgcaacaaccggttttagatagcttctcagtggtttcatcttttcaagacaatatatctgggaagaaaactgtttctggtgtagcaggcagtgagattctttctttaagtttagcaactcctgattataaacatgaagatggtttctctgaggaagcagtatgcagaacaaagaattatactggaacttcctcggtagatccgaggcatttagacatggaggggcactctatttactctgagggagatacataccaaggtccttgtcaagatctaggcagacatgaagaacaagagagctgcatgtctattcctatgcaagccaaagaaagtggaggggttttgaggtctagccacacgaaagggtcagttacagcagcccaaattgatttggcaggtgatgcccatcttattgtgagtgataatgctgctgccaagcaagtgtttagtgaggagaaagaggaaacaaaatctatctcttcttcagatattgatatccttcatgaaaaatcatactccagtggacacgatgaccatgctgcttgtgctgccgaaactcagttctaccatccacagaaagcatctatatctgatggactacatttgggtcctagttctttgcaagtagaatcactggatgctttggatagcgatatactgtatgttaacacaggagttctcgagcagcatcataaagagggttactatgaacccagtgtctaccaaatcacttcaggcatttgcacaatgtctgaagctgaaccattcgaagttttagaaactggaaaagatgtaaaaacgccatctaagctagatgagcaacttaatcctgggttggacggagatgaagctgagaaacacagcttagactgtggtacagacaccagtcctgtgatgagcaagagaaccctttcttcaccaggatcaggaccatgccagcagtatgtaaatgaaagcaccaccagtacacagtcgactgataatcacccaaacgacctacccgctccgagatctcctgaacaatccgcgtgttttcagaatgacaacgattcgggttcagtaggcatttgtcaaagcagcaggcgaagaggtatagatgaactttgcggtaagctgcagagtttcaaagtttccagcgccgtaaaaggaagctacgtagctatgggtgcacctcgtccgaagcctggggacagcacgagccgatctgcagccgcgctgctcaggaacatagagaacacaactgctgttaaagctggccgtcctcctgtcaagccaaacgccgatggtaaggactcgtctaggcgagccctgcagcccataagcggaaggcctgacagtaggtagttcggcggttccttaataagtgtgtcgtgtttgtgttcaaccctttgttgaaagccaggtccgtgtatttgtgcagcttgttgtcatgaagctgctgtgtgcgtgtcatttaacataagcgtgcgtgaagttgtgttatggaagtggctaaatatgtgttcgttaggaggtcaattggcttgaactgaccctgctgttccgtgatttctgtctaaatatacttgtgtggctgtgtcactttgattggccttatcgatcacatgcaatgggatcacatctagcgtgctctag

SEQ ID NO: 208762 - DNA, 7707 bp, Zea Mays
cccacttcaattcgcccagcgcccctttctcctcccgaaaggcagggcaaccctacaaaacgctgtctcggcttcgccgtccagcggaacagtgtacgggagcagttcgtcgcgtgtgtcgcgtcgcgttgcgttgcgccacccactaattcgaacggacgggactgggattcgaaatttcgaacacgcgccgcctgagagagagagagagagtgagagaaagagagagagagagcaggagagatggtcaggcctttgtgatctcccgcggggctggaggtgtgcggggatggatctcgcggggatgaagcggcgggagctccaggcgctctgcaagcggcacggcctccccgccgggggcaccaacgccgacctcgtcggacgtctcgacgccgtgctttcggggcccgctgttgtggaggaggaggttgccggagtgccggcgaggaaggggtgtctgaagcaaacgggcggaggtgccaccgaggccaagaaggttacttttggggcggaggtagggaaggccaggagactgaggtctcgggtcatatggtcgccggtcgttgccaagacaagggggaagtctgctcgagccggtactgattctgctgctgaagacggtatttctgcagatgtgggcgctgatgtcccagtgaggcggtccaggaggaattcgttcaatcctgccgaggctgaggaagcaggagaggctgttgctgttgacaggaagcccaagcgcaagaatcaggagaatgacgagggcgttgctgttatcgctcaggctagagttacgagaaggtcaaatttggagtggtctgctactgtattgcctcctgctgttgagaagaagagagggaggcagaatgcagctgagtctgatgtgcagaagtccgctctggtggaagtaacagctaggactacaaggtctcgctcaatcgtacctgttgtggtgccacccactgtggttgagaacaagaggaggaagactggagatccacaaacaactgtagagttgactatgctttcagatgtgcccagaagtgattttcctgccaccaggtctttaaggaacaaaattgtccacgttaacaacagcgtcgtggacgaaactcacactaccaggcagttggaaaacaagatgcgtccgtctactcgtaggcatcaacaggttgcatcttctccggaggataaaggtcaaaaaattcctgctaccagtaagtcccctctactgaggtggtcacggagaaactattctgaggccaatagtgcaaattcagtaaacatcaaattggccaaagactcgagcacagctcagccattggcacaccataattctcattctgaagatttggagaaacaaccagcagttaaagaaccaattaaacggtcaacacgtaaatctattgctttggctgcacttgagaaagagaaggatgtaattgaaggaaagaaccctgaagcacatgttaggcgatcaacgaggaaatcagttgtgcaggttaaagataccaaaagtattgttgaagagactcaatatgctaacagtgaagatgtggcgaagcaaccagcaactaaaggacctgctagggggctgagacgtaaatctgttatcacagaattgcatgagaaagagaagagtctcattgccgaaaagaacatggaaacagatgaagcgatattaacgcggaagcctgtaatcccagttaaaaatattaaagctgttggtgaaggaattcaaattggtaagggcaaagatgtggataaacaatttgttgtgaagcaacctactaggcgatcatcgcgcaaatctgtgctgcctgatatgcttgagaataatagtggacttctagcacccaaaatgaatgctgagatgaatgttaggagatcaacacggaagtctgttcttcctgacatgcataatgagaagcaagatcaccataaaatggctagaaatgagaacttgcaaagtggtaaatatcaagatggtgagaagcaacagaaagtaaaagattctattaggcaatcaaggagatctatcgctacagtgctacttgagggacaaaataatgatgaaggaaaaaagttcaaaaatcctacgaggaggacaacacacaaatctcatgcccttaatgcagttgaagaggtcagcatggatcacattgaagttggtgaagaaggcttgaaattgaggaagcgcagtaggtttttgctggaaatatcatcttcagctaatgtttcctggaagcatcagaatgcacagatctctaatgaaaaagataacacagaaggatcgcagcaggcatcaaattgcacaacttcaaagagaaggtcttcaaagaagagacgaacaactgctccagaagaagtgatgcctttcaaggtggcaaatgatgacatagttatcatggaagaaacaaaggacacacttgaatataataatgagtctagtagtaaagttcaagaaatttgtcaggttaatgctgcaagagaagagttctcttcaggtccattgcttgtaacagtagctcctagtgacgaaatttgcacagtgcagagtgtagctgtggtgatacctgggtcagaatctggtgacgatgcaaatcaaagttctgataagagtaagcaacctcaggaacattctgtcactcaaactgttgatgaccatttatctgaaacaagaagtgggaaattagatcaatcaacatgcatcacaggattagtctctgacaattgtgttgtctcagaggacaaaacattgatgagtgaagaccgtgaagagcaaagccctgtgtccggagaacagagagttagcttggaagcaaatgccaatgagcctgaggaaaagaacctagctaacgtcacatcaactgatctccacaccaaaagtctgcagcatgatattgacagaatagctaaagagactgataaagaagttttagctcaggagaattgtaatgaccagcctgttcctgcccagactgaccaagaaattaagttaaacgatgaacttgctgatccggatgttttagctcaggagaattgtaatgaccagcccgttcctgcccagactgacctagaaattaagttacacgatgaacttgctgatccggaccatgaagagcaaagccctgtatccggagaacggagagttagcttggaagcaaatgccaacgagcctgaggaaaagaacctagctaacgtcatatcaattgatctccacaccaaaagtctgcagcatgataatggcagaatagctgaagagactgataaagatgttttgtcttttgttttccctattgaagagcatgaagaaaaatatgcagttagccctatagccgttgaaaagagcttccgtcaggaagcaagtgcaattgaatctgcaggaaaacccctaactgtcatcttttctaacgatctccacaccaaacatctgcaacatgattgtgatgtgctaattaaggagactggtgaagaagttttagctcaggagaattgtaatgaccagcctgttcctgcccagaccgacctagaaattaagttaaatgatgaacttgctgatccggatgttttagctcaggagaattgtaatgaccagcctgttcctgccaacgagcctgaggaaaagaacctagctaacgtcatatcaactgatctccacaccaaaactctgcagcatgataatgacagaatagctgaagagactgataaagaccatgaagagcaaagcaatgtgttcggagaacggagagttagcttggaagcaaatgccaacgagcctgaggaaaagaacctagctaacgtcatatcaactgatctccacaccaaaactctgcagcatgataatgacagaatagctgaagagactgataaagaccatgaagagcaaagcaatgtgtccggagaacggagagttagcttggaagcaaatgccaacgagcctgaggaaaagaacctagctaacgtcatatcaactgatctccacaccaaaactctgcagcatgataatgacagaatagctgaagagactgataaagatgtttcgtctttggttttccctattgaagagcatgaagaaaaatatgcagtgagccctatagctgttgaaaagagcgtcagtcgggaagccagtgcatgtgaatctgcaggaaaacccctaactgtcatcttttctaacgatctccacaccaaacatctgcaacatgattgtgatgtgctaattaaggagactggtgaagatgttttagctcaggagaattgtaatgaccagcctgttccggcccagactgacctagaaatgaagttaaacgatgaacttgctgatccggaagttttagctcaggagaattgtaatgaccagcctgttcttgctcagactgacctagaaactaagttaaacgatgaacttgctgatctggctatggaatcaggttgtagcattactgaaaggaatgaagggcttgttgctcataatcttgatcaagaaggtttccttgaagcaacaccagagtgcaaacaggaatgtggtttgcctgaggagacagtaatttcctcaaaagaaacaggatctctgctgtgtgcagatcaatcaccaattggtctggaatctttattttcgcaagaaagcatagttgaatcagtggggcattgtgcacttgcttcagcaacaactcataccgaaaatggctttgatgattcaaaagattgccataacaagtctgcacttgaaaatgttcatgtgccagaaccttgttcacacaatgatactaaaggaggcatttttaaaaatgttgattgtatgcatacatcccagcgagatgatagaatggaaggagtaccagaggctaacactgatgaagaacatgttctgtcagcctttttgctggatgcaaatcacctaaacgtagtcattaattctgaagaagtggtttgtgagggtgaagatagtaaggagcttctccattcggaagactgtaaagcttcatccgagaaaacagatgtgaatgatggcaatgtatatggtattagtgatgctgtagtgagatgtgcactgcatgctccagccgatgataattatgagatttttttgggtcccaatactgatgtaccacgtcaggtttataatgacggatgcagtgatgtcaaagaagatcgatttgcttccaaaccctggacaattgatattattgaggatgcctctgtcaaagaaagatcaaatttaaaagattggcaacttgattccaagttggagggcacagaaatagtggaatctggcctttacttcaataaggatattggtaacattttacatagtggatctattggtgaaataactccatctggttctggtttatcaaaagattcatctgtggactatagaggggaggttttagatggcttctcaatggaagcatctcttgaaaggtcttctacacgtggggaacaaaatggttgtagactagatgctattgagaatccttcaattactttagcaacttctggttataagcatgaaggtgctttatctgaggaagcagtgtacacaaagaagaattacgctggaacatgcttgtcaaatcccagggaattaatcatggagctgcaatcccatttctcaaaggaaaacataaatgaatctgatcctcatgacagccttgtattcccaactgctgaaaattcagcagatgaacagctggttaaagtacaccatggttctaatctgtctcagttaggattaactgatctgttggatggaccaattgggtgttccaataccgacgtgttgtgccagtgtgacaatcataaaaatcaatccaatgaggacaaggtagaggaagttgaggcggtgtctgctgctaaatacatagaaagtgaagttgtgctgctcccatctcaagagagatcaaatttgaataatgagcagcttaacaccaagttggaaagcccaaacattatgggatcttgccttaactgtgataacgatgtttgtaatacttcggacaatggatctgtttttgtcattggtaaaagaactccatctgcttctggcttaccagaagattatcctaaggatagtgacttgcaacaaccggttttagatagcttctcagtggtttcatcttttcaagacaatatatctgggaagaaaactgtttctggtgtagcaggcagtgagattctttctttaagtttagcaactcctgattataaacatgaagatggtttctctgaggaagcagtatgcagaacaaagaattatactggaacttcctcggtagatccgaggcatttagacatggaggggcactctatttactctgagggagatacataccaaggtccttgtcaagatctaggcagacatgaagaacaagagagctgcatgtctattcctatgcaagccaaagaaagtggaggggttttgaggtctagccacacgaaagggtcagttacagcagcccaaattgatttggcaggtgatgcccatcttattgtgagtgataatgctgctgccaagcaagtgtttagtgaggagaaagaggaaacaaaatctatctcttcttcagatattgatatccttcatgaaaaatcatactccagtggacacgatgaccatgctgcttgtgctgccgaaactcagttctaccatccacagaaagcatctatatctgatggactacatttgggtcctagttctttgcaagtagaatcactggatgctttggatagcgatatactgtatgttaacacaggagttctcgagcagcatcataaagagggttactatgaacccagtgtctaccaaatcacttcaggcatttgcacaatgtctgaagctgaaccattcgaagttttagaaactggaaaagatgtaaaaacgccatctaagctagatgagcaacttaatcctgggttggacggagatgaagctgagaaacacagcttagactgtggtacagacaccagtcctgtgatgagcaagagaaccctttcttcaccaggatcaggaccatgccagcagtatgtaaatgaaagcaccaccagtacacagtcgactgataatcacccaaacgacctacccgctccgagatctcctgaacaatccgcgtgttttcagaatgacaacgattcgggttcagcatttgtcaaagcagcaggcgaagaggtatagatgaactttgcggtaagctgcagagtttcaaagtttccagcgccgtaaaaggaagctacgtagctatgggtgcacctcgtccgaagcctggggacagcacgagccgatctgcagccgcgctgctcaggaacatagagaacacaactgctgttaaagctggccgtcctcctgtcaagccaaacgccgatggtaaggactcgtctaggcgagccctgcagcccataagcggaaggcctgacagtaggtagttcggcggttccttaataagtgtgtcgtgtttgtgttcaaccctttgttgaaagccaggtccgtgtatttgtgcagcttgttgtcatgaagctgctgtgtgcgtgtcatttaacataagcgtgcgtgaagttgtgttatggaagtggctaaatatgtgttcgttaggaggtcaattggcttgaactgaccctgctgttccgtgatttctgtctaaatatacttgtgtggctgtgtcactttgattggccttatcgatcacatgcaatgggatcacatctagcgtgctctag

SEQ ID NO: 208763 - DNA, 7859 bp, Zea Mays
gcccagcgcccctttctcctcccgaaaggcagggcaaccctacaaaacgctgtctcggcttcgccgtccagcggaacagtgtacgggagcagttcgtcgcgtgtgtcgcgtcgcgttgcgttgcgccacccactaattcgaacggacgggactgggattcgaaatttcgaacacgcgccgcctgagagagagagagagagtgagagaaagagagagagagagcaggagagatggtcaggcctttgtgatctcccgcggggctggaggtgtgcggggatggatctcgcggggatgaagcggcgggagctccaggcgctctgcaagcggcacggcctccccgccgggggcaccaacgccgacctcgtcggacgtctcgacgccgtgctttcggggcccgctgttgtggaggaggaggttgccggagtgccggcgaggaaggggtgtctgaagcaaacgggcggaggtgccaccgaggccaagaaggttacttttggggcggaggtagggaaggccaggagactgaggtctcgggtcatatggtcgccggtcgttgccaagacaagggggaagtctgctcgagccgatgtgggcgctgatgtcccagtgaggcggtccaggaggaattcgttcaatcctgccgaggctgaggaagcaggagaggctgttgctgttgacaggaagcccaagcgcaagaatcaggagaatgacgagggcgttgctgttatcgctcaggctagagttacgagaaggtcaaatttggagtggtctgctactgtattgcctcctgctgttgagaagaagagagggaggcagaatgcagctgagtctgatgtgcagaagtccgctctggtggaagtaacagctaggactacaaggtctcgctcaatcgtacctgttgtggtgccacccactgtggttgagaacaagaggaggaagactggagatccacaaacaactgtagagttgactatgctttcagatgtgcccagaagtgattttcctgccaccaggtctttaaggaacaaaattgtccacgttaacaacagcgtcgtggacgaaactcacactaccaggcagttggaaaacaagatgcgtccgtctactcgtaggcatcaacaggttgcatcttctccggaggataaaggtcaaaaaattcctgctaccagtaagtcccctctactgaggtggtcacggagaaactattctgaggccaatagtgcaaattcagtaaacatcaaattggccaaagactcgagcacagctcagccattggcacaccataattctcattctgaagatttggagaaacaaccagcagttaaagaaccaattaaacggtcaacacgtaaatctattgctttggctgcacttgagaaagagaaggatgtaattgaaggaaagaaccctgaagcacatgttaggcgatcaacgaggaaatcagttgtgcaggttaaagataccaaaagtattgttgaagagactcaatatgctaacagtgaagatgtggcgaagcaaccagcaactaaaggacctgctagggggctgagacgtaaatctgttatcacagaattgcatgagaaagagaagagtctcattgccgaaaagaacatggaaacagatgaagcgatattaacgcggaagcctgtaatcccagttaaaaatattaaagctgttggtgaaggaattcaaattggtaagggcaaagatgtggataaacaatttgttgtgaagcaacctactaggcgatcatcgcgcaaatctgtgctgcctgatatgcttgagaataatagtggacttctagcacccaaaatgaatgctgagatgaatgttaggagatcaacacggaagtctgttcttcctgacatgcataatgagaagcaagatcaccataaaatggctagaaatgagaacttgcaaagtggtaaatatcaagatggtgagaagcaacagaaagtaaaagattctattaggcaatcaaggagatctatcgctacagtgctacttgagggacaaaataatgatgaaggaaaaaagttcaaaaatcctacgaggaggacaacacacaaatctcatgcccttaatgcagttgaagaggtcagcatggatcacattgaagttggtgaagaaggcttgaaattgaggaagcgcagtaggtttttgctggaaatatcatcttcagctaatgtttcctggaagcatcagaatgcacagatctctaatgaaaaagataacacagaaggatcgcagcaggcatcaaattgcacaacttcaaagagaaggtcttcaaagaagagacgaacaactgctccagaagaagtgatgcctttcaaggtggcaaatgatgacatagttatcatggaagaaacaaaggacacacttgaatataataatgagtctagtagtaaagttcaagaaatttgtcaggttaatgctgcaagagaagagttctcttcaggtccattgcttgtaacagtagctcctagtgacgaaatttgcacagtgcagagtgtagctgtggtgatacctgggtcagaatctggtgacgatgcaaatcaaagttctgataagagtaagcaacctcaggaacattctgtcactcaaactgttgatgaccatttatctgaaacaagaagtgggaaattagatcaatcaacatgcatcacaggattagtctctgacaattgtgttgtctcagaggacaaaacattgatgagtgaagaccgtgaagagcaaagccctgtgtccggagaacagagagttagcttggaagcaaatgccaatgagcctgaggaaaagaacctagctaacgtcacatcaactgatctccacaccaaaagtctgcagcatgatattgacagaatagctaaagagactgataaagatgttttgtctttggttttccctattgaagagcatgaagaaaaatatggagtgagccctatagctgttgaaaagtgcgtctgtcgtgaagcaagtgcatgtgaatctgcacgaaaacccctaaccgttatcttttctaacaatctccacaccaaacatctgcaacatgattgtgatgtgctaattaaggagactggtgaagaagttttagctcaggagaattgtaatgaccagcctgttcctgcccagactgaccaagaaattaagttaaacgatgaacttgctgatccggatgttttagctcaggagaattgtaatgaccagcccgttcctgcccagactgacctagaaattaagttacacgatgaacttgctgatccggaccatgaagagcaaagccctgtatccggagaacggagagttagcttggaagcaaatgccaacgagcctgaggaaaagaacctagctaacgtcatatcaattgatctccacaccaaaagtctgcagcatgataatggcagaatagctgaagagactgataaagatgttttgtcttttgttttccctattgaagagcatgaagaaaaatatgcagttagccctatagccgttgaaaagagcttccgtcaggaagcaagtgcaattgaatctgcaggaaaacccctaactgtcatcttttctaacgatctccacaccaaacatctgcaacatgattgtgatgtgctaattaaggagactggtgaagaagttttagctcaggagaattgtaatgaccagcctgttcctgcccagaccgacctagaaattaagttaaatgatgaacttgctgatccggatgttttagctcaggagaattgtaatgaccagcctgttcctgccaacgagcctgaggaaaagaacctagctaacgtcatatcaactgatctccacaccaaaactctgcagcatgataatgacagaatagctgaagagactgataaagaccatgaagagcaaagcaatgtgttcggagaacggagagttagcttggaagcaaatgccaacgagcctgaggaaaagaacctagctaacgtcatatcaactgatctccacaccaaaactctgcagcatgataatgacagaatagctgaagagactgataaagaccatgaagagcaaagcaatgtgtccggagaacggagagttagcttggaagcaaatgccaacgagcctgaggaaaagaacctagctaacgtcatatcaactgatctccacaccaaaactctgcagcatgataatgacagaatagctgaagagactgataaagatgtttcgtctttggttttccctattgaagagcatgaagaaaaatatgcagtgagccctatagctgttgaaaagagcgtcagtcgggaagccagtgcatgtgaatctgcaggaaaacccctaactgtcatcttttctaacgatctccacaccaaacatctgcaacatgattgtgatgtgctaattaaggagactggtgaagatgttttagctcaggagaattgtaatgaccagcctgttccggcccagactgacctagaaatgaagttaaacgatgaacttgctgatccggaagttttagctcaggagaattgtaatgaccagcctgttcttgctcagactgacctagaaactaagttaaacgatgaacttgctgatctggctatggaatcaggttgtagcattactgaaaggaatgaagggcttgttgctcataatcttgatcaagaaggtttccttgaagcaacaccagagtgcaaacaggaatgtggtttgcctgaggagacagtaatttcctcaaaagaaacaggatctctgctgtgtgcagatcaatcaccaattggtctggaatctttattttcgcaagaaagcatagttgaatcagtggggcattgtgcacttgcttcagcaacaactcataccgaaaatggctttgatgattcaaaagattgccataacaagtctgcacttgaaaatgttcatgtgccagaaccttgttcacacaatgatactaaaggaggcatttttaaaaatgttgattgtatgcatacatcccagcgagatgatagaatggaaggagtaccagaggctaacactgatgaagaacatgttctgtcagcctttttgctggatgcaaatcacctaaacgtagtcattaattctgaagaagtggtttgtgagggtgaagatagtaaggagcttctccattcggaagactgtaaagcttcatccgagaaaacagatgtgaatgatggcaatgtatatggtattagtgatgctgtagtgagatgtgcactgcatgctccagccgatgataattatgagatttttttgggtcccaatactgatgtaccacgtcaggtttataatgacggatgcagtgatgtcaaagaagatcgatttgcttccaaaccctggacaattgatattattgaggatgcctctgtcaaagaaagatcaaatttaaaagattggcaacttgattccaagttggagggcacagaaatagtggaatctggcctttacttcaataaggatattggtaacattttacatagtggatctattggtgaaataactccatctggttctggtttatcaaaagattcatctgtggactatagaggggaggttttagatggcttctcaatggaagcatctcttgaaaggtcttctacacgtggggaacaaaatggttgtagactagatgctattgagaatccttcaattactttagcaacttctggttataagcatgaaggtgctttatctgaggaagcagtgtacacaaagaagaattacgctggaacatgcttgtcaaatcccagggaattaatcatggagctgcaatcccatttctcaaaggaaaacataaatgaatctgatcctcatgacagccttgtattcccaactgctgaaaattcagcagatgaacagctggttaaagtacaccatggttctaatctgtctcagttaggattaactgatctgttggatggaccaattgggtgttccaataccgacgtgttgtgccagtgtgacaatcataaaaatcaatccaatgaggacaaggtagaggaagttgaggcggtgtctgctgctaaatacatagaaagtgaagttgtgctgctcccatctcaagagagatcaaatttgaataatgagcagcttaacaccaagttggaaagcccaaacattatgggatcttgccttaactgtgataacgatgtttgtaatacttcggacaatggatctgtttttgtcattggtaaaagaactccatctgcttctggcttaccagaagattatcctaaggatagtgacttgcaacaaccggttttagatagcttctcagtggtttcatcttttcaagacaatatatctgggaagaaaactgtttctggtgtagcaggcagtgagattctttctttaagtttagcaactcctgattataaacatgaagatggtttctctgaggaagcagtatgcagaacaaagaattatactggaacttcctcggtagatccgaggcatttagacatggaggggcactctatttactctgagggagatacataccaaggtccttgtcaagatctaggcagacatgaagaacaagagagctgcatgtctattcctatgcaagccaaagaaagtggaggggttttgaggtctagccacacgaaagggtcagttacagcagcccaaattgatttggcaggtgatgcccatcttattgtgagtgataatgctgctgccaagcaagtgtttagtgaggagaaagaggaaacaaaatctatctcttcttcagatattgatatccttcatgaaaaatcatactccagtggacacgatgaccatgctgcttgtgctgccgaaactcagttctaccatccacagaaagcatctatatctgatggactacatttgggtcctagttctttgcaagtagaatcactggatgctttggatagcgatatactgtatgttaacacaggagttctcgagcagcatcataaagagggttactatgaacccagtgtctaccaaatcacttcaggcatttgcacaatgtctgaagctgaaccattcgaagttttagaaactggaaaagatgtaaaaacgccatctaagctagatgagcaacttaatcctgggttggacggagatgaagctgagaaacacagcttagactgtggtacagacaccagtcctgtgatgagcaagagaaccctttcttcaccaggatcaggaccatgccagcagtatgtaaatgaaagcaccaccagtacacagtcgactgataatcacccaaacgacctacccgctccgagatctcctgaacaatccgcgtgttttcagaatgacaacgattcgggttcagcatttgtcaaagcagcaggcgaagaggtatagatgaactttgcggtaagctgcagagtttcaaagtttccagcgccgtaaaaggaagctacgtagctatgggtgcacctcgtccgaagcctggggacagcacgagccgatctgcagccgcgctgctcaggaacatagagaacacaactgctgttaaagctggccgtcctcctgtcaagccaaacgccgatggtaaggactcgtctaggcgagccctgcagcccataagcggaaggcctgacagtaggtagttcggcggttccttaataagtgtgtcgtgtttgtgttcaaccctttgttgaaagccaggtccgtgtatttgtgcagcttgttgtcatgaagctgctgtgtgcgtgtcatttaacataagcgtgcgtgaagttgtgttatggaagtggctaaatatgtgttcgttaggaggtcaattggcttgaactgaccctgctgttccgtgatttctgtctaaatatacttgtgtggctgtgtcactttgattggccttatcgatcacatgcaatgggatcacatctagcgtgctctag

SEQ ID NO: 208764 - DNA, 8274 bp, Zea Mays
ctttctcctcccgaaaggcagggcaaccctacaaaacgctgtctcggcttcgccgtccagcggaacagtgtacgggagcagttcgtcgcgtgtgtcgcgtcgcgttgcgttgcgccacccactaattcgaacggacgggactgggattcgaaatttcgaacacgcgccgcctgagagagagagagagagtgagagaaagagagagagagagcaggagagatggtcaggcctttgtgatctcccgcggggctggaggtgtgcggggatggatctcgcggggatgaagcggcgggagctccaggcgctctgcaagcggcacggcctccccgccgggggcaccaacgccgacctcgtcggacgtctcgacgccgtgctttcggggcccgctgttgtggaggaggaggttgccggagtgccggcgaggaaggggtgtctgaagcaaacgggcggaggtgccaccgaggccaagaaggttacttttggggcggaggtagggaaggccaggagactgaggtctcgggtcatatggtcgccggtcgttgccaagacaagggggaagtctgctcgagccggtactgattctgctgctgaagacggtatttctgcagatgtgggcgctgatgtcccagtgaggcggtccaggaggaattcgttcaatcctgccgaggctgaggaagcaggagaggctgttgctgttgacaggaagcccaagcgcaagaatcaggagaatgacgagggcgttgctgttatcgctcaggctagagttacgagaaggtcaaatttggagtggtctgctactgtattgcctcctgctgttgagaagaagagagggaggcagaatgcagctgagtctgatgtgcagaagtccgctctggtggaagtaacagctaggactacaaggtctcgctcaatcgtacctgttgtggtgccacccactgtggttgagaacaagaggaggaagactggagatccacaaacaactgtagagttgactatgctttcagatgtgcccagaagtgattttcctgccaccaggtctttaaggaacaaaattgtccacgttaacaacagcgtcgtggacgaaactcacactaccaggcagttggaaaacaagatgcgtccgtctactcgtaggcatcaacaggttgcatcttctccggaggataaaggtcaaaaaattcctgctaccagtaagtcccctctactgaggtggtcacggagaaactattctgaggccaatagtgcaaattcagtaaacatcaaattggccaaagactcgagcacagctcagccattggcacaccataattctcattctgaagatttggagaaacaaccagcagttaaagaaccaattaaacggtcaacacgtaaatctattgctttggctgcacttgagaaagagaaggatgtaattgaaggaaagaaccctgaagcacatgttaggcgatcaacgaggaaatcagttgtgcaggttaaagataccaaaagtattgttgaagagactcaatatgctaacagtgaagatgtggcgaagcaaccagcaactaaaggacctgctagggggctgagacgtaaatctgttatcacagaattgcatgagaaagagaagagtctcattgccgaaaagaacatggaaacagatgaagcgatattaacgcggaagcctgtaatcccagttaaaaatattaaagctgttggtgaaggaattcaaattggtaagggcaaagatgtggataaacaatttgttgtgaagcaacctactaggcgatcatcgcgcaaatctgtgctgcctgatatgcttgagaataatagtggacttctagcacccaaaatgaatgctgagatgaatgttaggagatcaacacggaagtctgttcttcctgacatgcataatgagaagcaagatcaccataaaatggctagaaatgagaacttgcaaagtggtaaatatcaagatggtgagaagcaacagaaagtaaaagattctattaggcaatcaaggagatctatcgctacagtgctacttgagggacaaaataatgatgaaggaaaaaagttcaaaaatcctacgaggaggacaacacacaaatctcatgcccttaatgcagttgaagaggtcagcatggatcacattgaagttggtgaagaaggcttgaaattgaggaagcgcagtaggtttttgctggaaatatcatcttcagctaatgtttcctggaagcatcagaatgcacagatctctaatgaaaaagataacacagaaggatcgcagcaggcatcaaattgcacaacttcaaagagaaggtcttcaaagaagagacgaacaactgctccagaagaagtgatgcctttcaaggtggcaaatgatgacatagttatcatggaagaaacaaaggacacacttgaatataataatgagtctagtagtaaagttcaagaaatttgtcaggttaatgctgcaagagaagagttctcttcaggtccattgcttgtaacagtagctcctagtgacgaaatttgcacagtgcagagtgtagctgtggtgatacctgggtcagaatctggtgacgatgcaaatcaaagttctgataagagtaagcaacctcaggaacattctgtcactcaaactgttgatgaccatttatctgaaacaagaagtgggaaattagatcaatcaacatgcatcacaggattagtctctgacaattgtgttgtctcagaggacaaaacattgatgagtgaaggtgagggagactttgttggtccaaaatcaccaaatggtttatcaattagtttcattgtcgcagaccgtgaagagcaaagccctgtgtccggagaacagagagttagcttggaagcaaatgccaatgagcctgaggaaaagaacctagctaacgtcacatcaactgatctccacaccaaaagtctgcagcatgatattgacagaatagctaaagagactgataaagatgttttgtctttggttttccctattgaagagcatgaagaaaaatatggagtgagccctatagctgttgaaaagtgcgtctgtcgtgaagcaagtgcatgtgaatctgcacgaaaacccctaaccgttatcttttctaacaatctccacaccaaacatctgcaacatgattgtgatgtgctaattaaggagactggtgaagaagttttagctcaggagaattgtaatgaccagcctgttcctgcccagactgaccaagaaattaagttaaacgatgaacttgctgatccggatgttttagctcaggagaattgtaatgaccagcccgttcctgcccagactgacctagaaattaagttacacgatgaacttgctgatccggaccatgaagagcaaagccctgtatccggagaacggagagttagcttggaagcaaatgccaacgagcctgaggaaaagaacctagctaacgtcatatcaattgatctccacaccaaaagtctgcagcatgataatggcagaatagctgaagagactgataaaggtacaactgaattaatcctgtatccccaataaaagctctgcaacattgatgagtgaagataatatgtatgctgaacatctaaatccacctgtgccagctctcattcactgtttttttctaaagatcttgcttcaagattttcaattcactaaattaaacttgctaaatctccagatgttttgtcttttgttttccctattgaagagcatgaagaaaaatatgcagttagccctatagccgttgaaaagagcttccgtcaggaagcaagtgcaattgaatctgcaggaaaacccctaactgtcatcttttctaacgatctccacaccaaacatctgcaacatgattgtgatgtgctaattaaggagactggtgaagaagttttagctcaggagaattgtaatgaccagcctgttcctgcccagaccgacctagaaattaagttaaatgatgaacttgctgatccggatgttttagctcaggagaattgtaatgaccagcctgttcctgccaacgagcctgaggaaaagaacctagctaacgtcatatcaactgatctccacaccaaaactctgcagcatgataatgacagaatagctgaagagactgataaagaccatgaagagcaaagcaatgtgttcggagaacggagagttagcttggaagcaaatgccaacgagcctgaggaaaagaacctagctaacgtcatatcaactgatctccacaccaaaactctgcagcatgataatgacagaatagctgaagagactgataaagaccatgaagagcaaagcaatgtgtccggagaacggagagttagcttggaagcaaatgccaacgagcctgaggaaaagaacctagctaacgtcatatcaactgatctccacaccaaaactctgcagcatgataatgacagaatagctgaagagactgataaagatgtttcgtctttggttttccctattgaagagcatgaagaaaaatatgcagtgagccctatagctgttgaaaagagcgtcagtcgggaagccagtgcatgtgaatctgcaggaaaacccctaactgtcatcttttctaacgatctccacaccaaacatctgcaacatgattgtgatgtgctaattaaggagactggtgaagatgttttagctcaggagaattgtaatgaccagcctgttccggcccagactgacctagaaatgaagttaaacgatgaacttgctgatccggaagttttagctcaggagaattgtaatgaccagcctgttcttgctcagactgacctagaaactaagttaaacgatgaacttgctgatctggctatggaatcaggttgtagcattactgaaaggaatgaagggcttgttgctcataatcttgatcaagaaggtttccttgaagcaacaccagagtgcaaacaggaatgtggtttgcctgaggagacagtaatttcctcaaaagaaacaggatctctgctgtgtgcagatcaatcaccaattggtctggaatctttattttcgcaagaaagcatagttgaatcagtggggcattgtgcacttgcttcagcaacaactcataccgaaaatggctttgatgattcaaaagattgccataacaagtctgcacttgaaaatgttcatgtgccagaaccttgttcacacaatgatactaaaggaggcatttttaaaaatgttgattgtatgcatacatcccagcgagatgatagaatggaaggagtaccagaggctaacactgatgaagaacatgttctgtcagcctttttgctggatgcaaatcacctaaacgtagtcattaattctgaagaagtggtttgtgagggtgaagatagtaaggagcttctccattcggaagactgtaaagcttcatccgagaaaacagatgtgaatgatggcaatgtatatggtattagtgatgctgtagtgagatgtgcactgcatgctccagccgatgataattatgagatttttttgggtcccaatactgatgtaccacgtcaggtttataatgacggatgcagtgatgtcaaagaagatcgatttgcttccaaaccctggacaattgatattattgaggatgcctctgtcaaagaaagatcaaatttaaaagattggcaacttgattccaagttggagggcacagaaatagtggaatctggcctttacttcaataaggatattggtaacattttacatagtggatctattggtgaaataactccatctggttctggtttatcaaaagattcatctgtggactatagaggggaggttttagatggcttctcaatggaagcatctcttgaaaggtcttctacacgtggggaacaaaatggttgtagactagatgctattgagaatccttcaattactttagcaacttctggttataagcatgaaggtgctttatctgaggaagcagtgtacacaaagaagaattacgctggaacatgcttgtcaaatcccagggaattaatcatggagctgcaatcccatttctcaaaggaaaacataaatgaatctgatcctcatgacagccttgtattcccaactgctgaaaattcagcagatgaacagctggttaaagtacaccatggttctaatctgtctcagttaggattaactgatctgttggatggaccaattgggtgttccaataccgacgtgttgtgccagtgtgacaatcataaaaatcaatccaatgaggacaaggtagaggaagttgaggcggtgtctgctgctaaatacatagaaagtgaagttgtgctgctcccatctcaagagagatcaaatttgaataatgagcagcttaacaccaagttggaaagcccaaacattatgggatcttgccttaactgtgataacgatgtttgtaatacttcggacaatggatctgtttttgtcattggtaaaagaactccatctgcttctggcttaccagaagattatcctaaggatagtgacttgcaacaaccggttttagatagcttctcagtggtttcatcttttcaagacaatatatctgggaagaaaactgtttctggtgtagcaggcagtgagattctttctttaagtttagcaactcctgattataaacatgaagatggtttctctgaggaagcagtatgcagaacaaagaattatactggaacttcctcggtagatccgaggcatttagacatggaggggcactctatttactctgagggaggtactgaaaaatctaatctgcaagataatcttgcatttctaagcgctgagagtggaaaagatgaacctattatttgccatgttgagaaactggttgacgcacatgcttcttcagatacataccaaggtccttgtcaagatctaggcagacatgaagaacaagagagctgcatgtctattcctatgcaagccaaagaaagtggaggggttttgaggtctagccacacgaaagggtcagttacagcagcccaaattgatttggcaggtgatgcccatcttattgtgagtccttttgatcatgtaatccgacaatcattataccacagtgataatgctgctgccaagcaagtgtttagtgaggagaaagaggaaacaaaatctatctcttcttcagatattgatatccttcatgaaaaatcatactccagtggacacgatgaccatgctgcttgtgctgccgaaactcagttctaccatccacagaaagcatctatatctgatggactacatttgggtcctagttctttgcaagtagaatcactggatgctttggatagcgatatactgtatgttaacacaggagttctcgagcagcatcataaagagggttactatgaacccagtgtctaccaaatcacttcaggcatttgcacaatgtctgaagctgaaccattcgaagttttagaaactggaaaagatgtaaaaacgccatctaagctagatgagcaacttaatcctgggttggacggagatgaagctgagaaacacagcttagactgtggtacagacaccagtcctgtgatgagcaagagaaccctttcttcaccaggatcaggaccatgccagcagtatgtaaatgaaagcaccaccagtacacagtcgactgataatcacccaaacgacctacccgctccgagatctcctgaacaatccgcgtgttttcagaatgacaacgattcgggttcagcatttgtcaaagcagcaggcgaagaggtatagatgaactttgcggtaagctgcagagtttcaaagtttccagcgccgtaaaaggaagctacgtagctatgggtgcacctcgtccgaagcctggggacagcacgagccgatctgcagccgcgctgctcaggaacatagagaacacaactgctgttaaagctggccgtcctcctgtcaagccaaacgccgatggtaaggactcgtctaggcgagccctgcagcccataagcggaaggcctgacagtaggtagttcggcggttccttaataagtgtgtcgtgtttgtgttcaaccctttgttgaaagccaggtccgtgtatttgtgcagcttgttgtcatgaagctgctgtgtgcgtgtcatttaacataagcgtgcgtgaagttgtgttatggaagtggctaaatatgtgttcgttaggaggtcaattggcttgaactgaccctgctgttccgtgatttctgtctaaatatacttgtgtggctgtgtcactttgattggccttatcgatcacatgcaatgggatcacatctagcgtgctctag

SEQ ID NO: 208765 - DNA, 6486 bp, Zea Mays
ccgaaaggcagggcaaccctacaaaacgctgtctcggcttcgccgtccagcggaacagtgtacgggagcagttcgtcgcgtgtgtcgcgtcgcgttgcgttgcgccacccactaattcgaacggacgggactgggattcgaaatttcgaacacgcgccgcctgagagagagagagagagtgagagaaagagagagagagagcaggagagatggtcaggcctttgtgatctcccgcggggctggaggtgtgcggggatggatctcgcggggatgaagcggcgggagctccaggcgctctgcaagcggcacggcctccccgccgggggcaccaacgccgacctcgtcggacgtctcgacgccgtgctttcggggcccgctgttgtggaggaggaggttgccggagtgccggcgaggaaggggtgtctgaagcaaacgggcggaggtgccaccgaggccaagaaggttacttttggggcggaggtagggaaggccaggagactgaggtctcgggtcatatggtcgccggtcgttgccaagacaagggggaagtctgctcgagccggtactgattctgctgctgaagacggtatttctgcagatgtgggcgctgatgtcccagtgaggcggtccaggaggaattcgttcaatcctgccgaggctgaggaagcaggagaggctgttgctgttgacaggaagcccaagcgcaagaatcaggagaatgacgagggcgttgctgttatcgctcaggctagagttacgagaaggtcaaatttggagtggtctgctactgtattgcctcctgctgttgagaagaagagagggaggcagaatgcagctgagtctgatgtgcagaagtccgctctggtggaagtaacagctaggactacaaggtctcgctcaatcgtacctgttgtggtgccacccactgtggttgagaacaagaggaggaagactggagatccacaaacaactgtagagttgactatgctttcagatgtgcccagaagtgattttcctgccaccaggtctttaaggaacaaaattgtccacgttaacaacagcgtcgtggacgaaactcacactaccaggcagttggaaaacaagatgcgtccgtctactcgtaggcatcaacaggttgcatcttctccggaggataaaggtcaaaaaattcctgctaccagtaagtcccctctactgaggtggtcacggagaaactattctgaggccaatagtgcaaattcagtaaacatcaaattggccaaagactcgagcacagctcagccattggcacaccataattctcattctgaagatttggagaaacaaccagcagttaaagaaccaattaaacggtcaacacgtaaatctattgctttggctgcacttgagaaagagaaggatgtaattgaaggaaagaaccctgaagcacatgttaggcgatcaacgaggaaatcagttgtgcaggttaaagataccaaaagtattgttgaagagactcaatatgctaacagtgaagatgtggcgaagcaaccagcaactaaaggacctgctagggggctgagacgtaaatctgttatcacagaattgcatgagaaagagaagagtctcattgccgaaaagaacatggaaacagatgaagcgatattaacgcggaagcctgtaatcccagttaaaaatattaaagctgttggtgaaggaattcaaattggtaagggcaaagatgtggataaacaatttgttgtgaagcaacctactaggcgatcatcgcgcaaatctgtgctgcctgatatgcttgagaataatagtggacttctagcacccaaaatgaatgctgagatgaatgttaggagatcaacacggaagtctgttcttcctgacatgcataatgagaagcaagatcaccataaaatggctagaaatgagaacttgcaaagtggtaaatatcaagatggtgagaagcaacagaaagtaaaagattctattaggcaatcaaggagatctatcgctacagtgctacttgagggacaaaataatgatgaaggaaaaaagttcaaaaatcctacgaggaggacaacacacaaatctcatgcccttaatgcagttgaagaggtcagcatggatcacattgaagttggtgaagaaggcttgaaattgaggaagcgcagtaggtttttgctggaaatatcatcttcagctaatgtttcctggaagcatcagaatgcacagatctctaatgaaaaagataacacagaaggatcgcagcaggcatcaaattgcacaacttcaaagagaaggtcttcaaagaagagacgaacaactgctccagaagaagtgatgcctttcaaggtggcaaatgatgacatagttatcatggaagaaacaaaggacacacttgaatataataatgagtctagtagtaaagttcaagaaatttgtcaggttaatgctgcaagagaagagttctcttcaggtccattgcttgtaacagtagctcctagtgacgaaatttgcacagtgcagagtgtagctgtggtgatacctgggtcagaatctggtgacgatgcaaatcaaagttctgataagagtaagcaacctcaggaacattctgtcactcaaactgttgatgaccatttatctgaaacaagaagtgggaaattagatcaatcaacatgcatcacaggattagtctctgacaattgtgttgtctcagaggacaaaacattgatgagtgaagaccgtgaagagcaaagccctgtgtccggagaacagagagttagcttggaagcaaatgccaatgagcctgaggaaaagaacctagctaacgtcacatcaactgatctccacaccaaaagtctgcagcatgatattgacagaatagctaaagagactgataaagatgttttagctcaggagaattgtaatgaccagcctgttccggcccagactgacctagaaatgaagttaaacgatgaacttgctgatccggaagttttagctcaggagaattgtaatgaccagcctgttcttgctcagactgacctagaaactaagttaaacgatgaacttgctgatctggctatggaatcaggttgtagcattactgaaaggaatgaagggcttgttgctcataatcttgatcaagaaggtttccttgaagcaacaccagagtgcaaacaggaatgtggtttgcctgaggagacagtaatttcctcaaaagaaacaggatctctgctgtgtgcagatcaatcaccaattggtctggaatctttattttcgcaagaaagcatagttgaatcagtggggcattgtgcacttgcttcagcaacaactcataccgaaaatggctttgatgattcaaaagattgccataacaagtctgcacttgaaaatgttcatgtgccagaaccttgttcacacaatgatactaaaggaggcatttttaaaaatgttgattgtatgcatacatcccagcgagatgatagaatggaaggagtaccagaggctaacactgatgaagaacatgttctgtcagcctttttgctggatgcaaatcacctaaacgtagtcattaattctgaagaagtggtttgtgagggtgaagatagtaaggagcttctccattcggaagactgtaaagcttcatccgagaaaacagatgtgaatgatggcaatgtatatggtattagtgatgctgtagtgagatgtgcactgcatgctccagccgatgataattatgagatttttttgggtcccaatactgatgtaccacgtcaggtttataatgacggatgcagtgatgtcaaagaagatcgatttgcttccaaaccctggacaattgatattattgaggatgcctctgtcaaagaaagatcaaatttaaaagattggcaacttgattccaagttggagggcacagaaatagtggaatctggcctttacttcaataaggatattggtaacattttacatagtggatctattggtgaaataactccatctggttctggtttatcaaaagattcatctgtggactatagaggggaggttttagatggcttctcaatggaagcatctcttgaaaggtcttctacacgtggggaacaaaatggttgtagactagatgctattgagaatccttcaattactttagcaacttctggttataagcatgaaggtgctttatctgaggaagcagtgtacacaaagaagaattacgctggaacatgcttgtcaaatcccagggaattaatcatggagctgcaatcccatttctcaaaggaaaacataaatgaatctgatcctcatgacagccttgtattcccaactgctgaaaattcagcagatgaacagctggttaaagtacaccatggttctaatctgtctcagttaggattaactgatctgttggatggaccaattgggtgttccaataccgacgtgttgtgccagtgtgacaatcataaaaatcaatccaatgaggacaaggtagaggaagttgaggcggtgtctgctgctaaatacatagaaagtgaagttgtgctgctcccatctcaagagagatcaaatttgaataatgagcagcttaacaccaagttggaaagcccaaacattatgggatcttgccttaactgtgataacgatgtttgtaatacttcggacaatggatctgtttttgtcattggtaaaagaactccatctgcttctggcttaccagaagattatcctaaggatagtgacttgcaacaaccggttttagatagcttctcagtggtttcatcttttcaagacaatatatctgggaagaaaactgtttctggtgtagcaggcagtgagattctttctttaagtttagcaactcctgattataaacatgaagatggtttctctgaggaagcagtatgcagaacaaagaattatactggaacttcctcggtagatccgaggcatttagacatggaggggcactctatttactctgagggaggtactgaaaaatctaatctgcaagataatcttgcatttctaagcgctgagagtggaaaagatgaacctattatttgccatgttgagaaactggttgacgcacatgcttcttcagatacataccaaggtccttgtcaagatctaggcagacatgaagaacaagagagctgcatgtctattcctatgcaagccaaagaaagtggaggggttttgaggtctagccacacgaaagggtcagttacagcagcccaaattgatttggcaggtgatgcccatcttattgtgagtgataatgctgctgccaagcaagtgtttagtgaggagaaagaggaaacaaaatctatctcttcttcagatattgatatccttcatgaaaaatcatactccagtggacacgatgaccatgctgcttgtgctgccgaaactcagttctaccatccacagaaagcatctatatctgatggactacatttgggtcctagttctttgcaagtagaatcactggatgctttggatagcgatatactgtatgttaacacaggagttctcgagcagcatcataaagagggttactatgaacccagtgtctaccaaatcacttcaggcatttgcacaatgtctgaagctgaaccattcgaagttttagaaactggaaaagatgtaaaaacgccatctaagctagatgagcaacttaatcctgggttggacggagatgaagctgagaaacacagcttagactgtggtacagacaccagtcctgtgatgagcaagagaaccctttcttcaccaggatcaggaccatgccagcagtatgtaaatgaaagcaccaccagtacacagtcgactgataatcacccaaacgacctacccgctccgagatctcctgaacaatccgcgtgttttcagaatgacaacgattcgggttcagtaggcatttgtcaaagcagcaggcgaagaggtatagatgaactttgcggtaagctgcagagtttcaaagtttccagcgccgtaaaaggaagctacgtagctatgggtgcacctcgtccgaagcctggggacagcacgagccgatctgcagccgcgctgctcaggaacatagagaacacaactgctgttaaagctggccgtcctcctgtcaagccaaacgccgatggtaaggactcgtctaggcgagccctgcagcccataagcggaaggcctgacagtaggtagttcggcggttccttaataagtgtgtcgtgtttgtgttcaaccctttgttgaaagccaggtccgtgtatttgtgcagcttgttgtcatgaagctgctgtgtgcgtgtcatttaacataagcgtgcgtgaagttgtgttatggaagtggctaaatatgtgttcgttaggaggtcaattggcttgaactgaccctgctgttccgtgatttctgtctaaatatacttgtgtggctgtgtcactttgattggccttatcgatcacatgcaatgggatcacatctagcgtgctctag

SEQ ID NO: 208766 - DNA, 7483 bp, Zea Mays
agagaaagagagagagagagcaggagagatggtcaggcctttgtgatctcccgcggggctggaggtgtgcggggatggatctcgcggggatgaagcggcgggagctccaggcgctctgcaagcggcacggcctccccgccgggggcaccaacgccgacctcgtcggacgtctcgacgccgtgctttcggggcccgctgttgtggaggaggaggttgccggagtgccggcgaggaaggggtgtctgaagcaaacgggcggaggtgccaccgaggccaagaaggttacttttggggcggaggtagggaaggccaggagactgaggtctcgggtcatatggtcgccggtcgttgccaagacaagggggaagtctgctcgagccggtactgattctgctgctgaagacggtatttctgcagatgtgggcgctgatgtcccagtgaggcggtccaggaggaattcgttcaatcctgccgaggctgaggaagcaggagaggctgttgctgttgacaggaagcccaagcgcaagaatcaggagaatgacgagggcgttgctgttatcgctcaggctagagttacgagaaggtcaaatttggagtggtctgctactgtattgcctcctgctgttgagaagaagagagggaggcagaatgcagctgagtctgatgtgcagaagtccgctctggtggaagtaacagctaggactacaaggtctcgctcaatcgtacctgttgtggtgccacccactgtggttgagaacaagaggaggaagactggagatccacaaacaactgtagagttgactatgctttcagatgtgcccagaagtgattttcctgccaccaggtctttaaggaacaaaattgtccacgttaacaacagcgtcgtggacgaaactcacactaccaggcagttggaaaacaagatgcgtccgtctactcgtaggcatcaacaggttgcatcttctccggaggataaaggtcaaaaaattcctgctaccagtaagtcccctctactgaggtggtcacggagaaactattctgaggccaatagtgcaaattcagtaaacatcaaattggccaaagactcgagcacagctcagccattggcacaccataattctcattctgaagatttggagaaacaaccagcagttaaagaaccaattaaacggtcaacacgtaaatctattgctttggctgcacttgagaaagagaaggatgtaattgaaggaaagaaccctgaagcacatgttaggcgatcaacgaggaaatcagttgtgcaggttaaagataccaaaagtattgttgaagagactcaatatgctaacagtgaagatgtggcgaagcaaccagcaactaaaggacctgctagggggctgagacgtaaatctgttatcacagaattgcatgagaaagagaagagtctcattgccgaaaagaacatggaaacagatgaagcgatattaacgcggaagcctgtaatcccagttaaaaatattaaagctgttggtgaaggaattcaaattggtaagggcaaagatgtggataaacaatttgttgtgaagcaacctactaggcgatcatcgcgcaaatctgtgctgcctgatatgcttgagaataatagtggacttctagcacccaaaatgaatgctgagatgaatgttaggagatcaacacggaagtctgttcttcctgacatgcataatgagaagcaagatcaccataaaatggctagaaatgagaacttgcaaagtggtaaatatcaagatggtgagaagcaacagaaagtaaaagattctattaggcaatcaaggagatctatcgctacagtgctacttgagggacaaaataatgatgaaggaaaaaagttcaaaaatcctacgaggaggacaacacacaaatctcatgcccttaatgcagttgaagaggtcagcatggatcacattgaagttggtgaagaaggcttgaaattgaggaagcgcagtaggtttttgctggaaatatcatcttcagctaatgtttcctggaagcatcagaatgcacagatctctaatgaaaaagataacacagaaggatcgcagcaggcatcaaattgcacaacttcaaagagaaggtcttcaaagaagagacgaacaactgctccagaagaagtgatgcctttcaaggtggcaaatgatgacatagttatcatggaagaaacaaaggacacacttgaatataataatgagtctagtagtaaagttcaagaaatttgtcaggttaatgctgcaagagaagagttctcttcaggtccattgcttgtaacagtagctcctagtgacgaaatttgcacagtgcagagtgtagctgtggtgatacctgggtcagaatctggtgacgatgcaaatcaaagttctgataagagtaagcaacctcaggaacattctgtcactcaaactgttgatgaccatttatctgaaacaagaagtgggaaattagatcaatcaacatgcatcacaggattagtctctgacaattgtgttgtctcagaggacaaaacattgatgagtgaagaccgtgaagagcaaagccctgtgtccggagaacagagagttagcttggaagcaaatgccaatgagcctgaggaaaagaacctagctaacgtcacatcaactgatctccacaccaaaagtctgcagcatgatattgacagaatagctaaagagactgataaagatgttttgtctttggttttccctattgaagagcatgaagaaaaatatggagtgagccctatagctgttgaaaagtgcgtctgtcgtgaagcaagtgcatgtgaatctgcacgaaaacccctaaccgttatcttttctaacaatctccacaccaaacatctgcaacatgattgtgatgtgctaattaaggagactggtgaagaagttttagctcaggagaattgtaatgaccagcctgttcctgcccagactgaccaagaaattaagttaaacgatgaacttgctgatccggatgttttagctcaggagaattgtaatgaccagcccgttcctgcccagactgacctagaaattaagttacacgatgaacttgctgatccggaccatgaagagcaaagccctgtatccggagaacggagagttagcttggaagcaaatgccaacgagcctgaggaaaagaacctagctaacgtcatatcaattgatctccacaccaaaagtctgcagcatgataatggcagaatagctgaagagactgataaagatgttttgtcttttgttttccctattgaagagcatgaagaaaaatatgcagttagccctatagccgttgaaaagagcttccgtcaggaagcaagtgcaattgaatctgcaggaaaacccctaactgtcatcttttctaacgatctccacaccaaacatctgcaacatgattgtgatgtgctaattaaggagactggtgaagaagttttagctcaggagaattgtaatgaccagcctgttcctgcccagaccgacctagaaattaagttaaatgatgaacttgctgatccggatgttttagctcaggagaattgtaatgaccagcctgttcctgccaacgagcctgaggaaaagaacctagctaacgtcatatcaactgatctccacaccaaaactctgcagcatgataatgacagaatagctgaagagactgataaagatgtttcgtctttggttttccctattgaagagcatgaagaaaaatatgcagtgagccctatagctgttgaaaagagcgtcagtcgggaagccagtgcatgtgaatctgcaggaaaacccctaactgtcatcttttctaacgatctccacaccaaacatctgcaacatgattgtgatgtgctaattaaggagactggtgaagatgttttagctcaggagaattgtaatgaccagcctgttccggcccagactgacctagaaatgaagttaaacgatgaacttgctgatccggaagttttagctcaggagaattgtaatgaccagcctgttcttgctcagactgacctagaaactaagttaaacgatgaacttgctgatctggctatggaatcaggttgtagcattactgaaaggaatgaagggcttgttgctcataatcttgatcaagaaggtttccttgaagcaacaccagagtgcaaacaggaatgtggtttgcctgaggagacagtaatttcctcaaaagaaacaggatctctgctgtgtgcagatcaatcaccaattggtctggaatctttattttcgcaagaaagcatagttgaatcagtggggcattgtgcacttgcttcagcaacaactcataccgaaaatggctttgatgattcaaaagattgccataacaagtctgcacttgaaaatgttcatgtgccagaaccttgttcacacaatgatactaaaggaggcatttttaaaaatgttgattgtatgcatacatcccagcgagatgatagaatggaaggagtaccagaggctaacactgatgaagaacatgttctgtcagcctttttgctggatgcaaatcacctaaacgtagtcattaattctgaagaagtggtttgtgagggtgaagatagtaaggagcttctccattcggaagactgtaaagcttcatccgagaaaacagatgtgaatgatggcaatgtatatggtattagtgatgctgtagtgagatgtgcactgcatgctccagccgatgataattatgagatttttttgggtcccaatactgatgtaccacgtcaggtttataatgacggatgcagtgatgtcaaagaagatcgatttgcttccaaaccctggacaattgatattattgaggatgcctctgtcaaagaaagatcaaatttaaaagattggcaacttgattccaagttggagggcacagaaatagtggaatctggcctttacttcaataaggatattggtaacattttacatagtggatctattggtgaaataactccatctggttctggtttatcaaaagattcatctgtggactatagaggggaggttttagatggcttctcaatggaagcatctcttgaaaggtcttctacacgtggggaacaaaatggttgtagactagatgctattgagaatccttcaattactttagcaacttctggttataagcatgaaggtgctttatctgaggaagcagtgtacacaaagaagaattacgctggaacatgcttgtcaaatcccagggaattaatcatggagctgcaatcccatttctcaaaggaaaacataaatgaatctgatcctcatgacagccttgtattcccaactgctgaaaattcagcagatgaacagctggttaaagtacaccatggttctaatctgtctcagttaggattaactgatctgttggatggaccaattgggtgttccaataccgacgtgttgtgccagtgtgacaatcataaaaatcaatccaatgaggacaaggtagaggaagttgaggcggtgtctgctgctaaatacatagaaagtgaagttgtgctgctcccatctcaagagagatcaaatttgaataatgagcagcttaacaccaagttggaaagcccaaacattatgggatcttgccttaactgtgataacgatgtttgtaatacttcggacaatggatctgtttttgtcattggtaaaagaactccatctgcttctggcttaccagaagattatcctaaggatagtgacttgcaacaaccggttttagatagcttctcagtggtttcatcttttcaagacaatatatctgggaagaaaactgtttctggtgtagcaggcagtgagattctttctttaagtttagcaactcctgattataaacatgaagatggtttctctgaggaagcagtatgcagaacaaagaattatactggaacttcctcggtagatccgaggcatttagacatggaggggcactctatttactctgagggaggtactgaaaaatctaatctgcaagataatcttgcatttctaagcgctgagagtggaaaagatgaacctattatttgccatgttgagaaactggttgacgcacatgcttcttcagatacataccaaggtccttgtcaagatctaggcagacatgaagaacaagagagctgcatgtctattcctatgcaagccaaagaaagtggaggggttttgaggtctagccacacgaaagggtcagttacagcagcccaaattgatttggcaggtgatgcccatcttattgtgagtgataatgctgctgccaagcaagtgtttagtgaggagaaagaggaaacaaaatctatctcttcttcagatattgatatccttcatgaaaaatcatactccagtggacacgatgaccatgctgcttgtgctgccgaaactcagttctaccatccacagaaagcatctatatctgatggactacatttgggtcctagttctttgcaagtagaatcactggatgctttggatagcgatatactgtatgttaacacaggagttctcgagcagcatcataaagagggttactatgaacccagtgtctaccaaatcacttcaggcatttgcacaatgtctgaagctgaaccattcgaagttttagaaactggaaaagatgtaaaaacgccatctaagctagatgagcaacttaatcctgggttggacggagatgaagctgagaaacacagcttagactgtggtacagacaccagtcctgtgatgagcaagagaaccctttcttcaccaggatcaggaccatgccagcagtatgtaaatgaaagcaccaccagtacacagtcgactgataatcacccaaacgacctacccgctccgagatctcctgaacaatccgcgtgttttcagaatgacaacgattcgggttcagcatttgtcaaagcagcaggcgaagaggtatagatgaactttgcggtaagctgcagagtttcaaagtttccagcgccgtaaaaggaagctacgtagctatgggtgcacctcgtccgaagcctggggacagcacgagccgatctgcagccgcgctgctcaggaacatagagaacacaactgctgttaaagctggccgtcctcctgtcaagccaaacgccgatggtaaggactcgtctaggcgagccctgcagcccataagcggaaggcctgacagtaggtagttcggcggttccttaataagtgtgtcgtgtttgtgttcaaccctttgttgaaagccaggtccgtgtatttgtgcagcttgttgtcatgaagctgctgtgtgcgtgtcatttaacataagcgtgcgtgaagttgtgttatggaagtggctaaatatgtgttcgttaggaggtcaattggcttgaactgaccctgctgttccgtgatttctgtctaaatatacttgtgtggctgtgtcactttgattggccttatcgatcacatgcaatgggatcacatctagcgtgctctag

SEQ ID NO: 208767 - DNA, 6968 bp, Zea Mays
atggatctcgcggggatgaagcggcgggagctccaggcgctctgcaagcggcacggcctccccgccgggggcaccaacgccgacctcgtcggacgtctcgacgccgtgctttcggggcccgctgttgtggaggaggaggttgccggagtgccggcgaggaaggggtgtctgaagcaaacgggcggaggtgccaccgaggccaagaaggttacttttggggcggaggtagggaaggccaggagactgaggtctcgggtcatatggtcgccggtcgttgccaagacaagggggaagtctgctcgagccgatgtgggcgctgatgtcccagtgaggcggtccaggaggaattcgttcaatcctgccgaggctgaggaagcaggagaggctgttgctgttgacaggaagcccaagcgcaagaatcaggagaatgacgagggcgttgctgttatcgctcaggctagagttacgagaaggtcaaatttggagtggtctgctactgtattgcctcctgctgttgagaagaagagagggaggcagaatgcagctgagtctgatgtgcagaagtccgctctggtggaagtaacagctaggactacaaggtctcgctcaatcgtacctgttgtggtgccacccactgtggttgagaacaagaggaggaagactggagatccacaaacaactgtagagttgactatgctttcagatgtgcccagaagtgattttcctgccaccaggtctttaaggaacaaaattgtccacgttaacaacagcgtcgtggacgaaactcacactaccaggcagttggaaaacaagatgcgtccgtctactcgtaggcatcaacaggttgcatcttctccggaggataaaggtcaaaaaattcctgctaccagtaagtcccctctactgaggtggtcacggagaaactattctgaggccaatagtgcaaattcagtaaacatcaaattggccaaagactcgagcacagctcagccattggcacaccataattctcattctgaagatttggagaaacaaccagcagttaaagaaccaattaaacggtcaacacgtaaatctattgctttggctgcacttgagaaagagaaggatgtaattgaaggaaagaaccctgaagcacatgttaggcgatcaacgaggaaatcagttgtgcaggttaaagataccaaaagtattgttgaagagactcaatatgctaacagtgaagatgtggcgaagcaaccagcaactaaaggacctgctagggggctgagacgtaaatctgttatcacagaattgcatgagaaagagaagagtctcattgccgaaaagaacatggaaacagatgaagcgatattaacgcggaagcctgtaatcccagttaaaaatattaaagctgttggtgaaggaattcaaattggtaagggcaaagatgtggataaacaatttgttgtgaagcaacctactaggcgatcatcgcgcaaatctgtgctgcctgatatgcttgagaataatagtggacttctagcacccaaaatgaatgctgagatgaatgttaggagatcaacacggaagtctgttcttcctgacatgcataatgagaagcaagatcaccataaaatggctagaaatgagaacttgcaaagtggtaaatatcaagatggtgagaagcaacagaaagtaaaagattctattaggcaatcaaggagatctatcgctacagtgctacttgagggacaaaataatgatgaaggaaaaaagttcaaaaatcctacgaggaggacaacacacaaatctcatgcccttaatgcagttgaagaggtcagcatggatcacattgaagttggtgaagaaggcttgaaattgaggaagcgcagtaggtttttgctggaaatatcatcttcagctaatgtttcctggaagcatcagaatgcacagatctctaatgaaaaagataacacagaaggatcgcagcaggcatcaaattgcacaacttcaaagagaaggtcttcaaagaagagacgaacaactgctccagaagaagtgatgcctttcaaggtggcaaatgatgacatagttatcatggaagaaacaaaggacacacttgaatataataatgagtctagtagtaaagttcaagaaatttgtcaggttaatgctgcaagagaagagttctcttcaggtccattgcttgtaacagtagctcctagtgacgaaatttgcacagtgcagagtgtagctgtggtgatacctgggtcagaatctggtgacgatgcaaatcaaagttctgataagagtaagcaacctcaggaacattctgtcactcaaactgttgatgaccatttatctgaaacaagaagtgggaaattagatcaatcaacatgcatcacaggattagtctctgacaattgtgttgtctcagaggacaaaacattgatgagtgaagaccgtgaagagcaaagccctgtgtccggagaacagagagttagcttggaagcaaatgccaatgagcctgaggaaaagaacctagctaacgtcacatcaactgatctccacaccaaaagtctgcagcatgatattgacagaatagctaaagagactgataaagatgttttgtctttggttttccctattgaagagcatgaagaaaaatatggagtgagccctatagctgttgaaaagtgcgtctgtcgtgaagcaagtgcatgtgaatctgcacgaaaacccctaaccgttatcttttctaacaatctccacaccaaacatctgcaacatgattgtgatgtgctaattaaggagactggtgaagaagttttagctcaggagaattgtaatgaccagcctgttcctgcccagactgaccaagaaattaagttaaacgatgaacttgctgatccggatgttttagctcaggagaattgtaatgaccagcccgttcctgcccagactgacctagaaattaagttacacgatgaacttgctgatccggaccatgaagagcaaagccctgtatccggagaacggagagttagcttggaagcaaatgccaacgagcctgaggaaaagaacctagctaacgtcatatcaattgatctccacaccaaaagtctgcagcatgataatggcagaatagctgaagagactgataaagatgttttagctcaggagaattgtaatgaccagcctgttcctgccaacgagcctgaggaaaagaacctagctaacgtcatatcaactgatctccacaccaaaactctgcagcatgataatgacagaatagctgaagagactgataaagatgtttcgtctttggttttccctattgaagagcatgaagaaaaatatgcagtgagccctatagctgttgaaaagagcgtcagtcgggaagccagtgcatgtgaatctgcaggaaaacccctaactgtcatcttttctaacgatctccacaccaaacatctgcaacatgattgtgatgtgctaattaaggagactggtgaagatgttttagctcaggagaattgtaatgaccagcctgttccggcccagactgacctagaaatgaagttaaacgatgaacttgctgatccggaagttttagctcaggagaattgtaatgaccagcctgttcttgctcagactgacctagaaactaagttaaacgatgaacttgctgatctggctatggaatcaggttgtagcattactgaaaggaatgaagggcttgttgctcataatcttgatcaagaaggtttccttgaagcaacaccagagtgcaaacaggaatgtggtttgcctgaggagacagtaatttcctcaaaagaaacaggatctctgctgtgtgcagatcaatcaccaattggtctggaatctttattttcgcaagaaagcatagttgaatcagtggggcattgtgcacttgcttcagcaacaactcataccgaaaatggctttgatgattcaaaagattgccataacaagtctgcacttgaaaatgttcatgtgccagaaccttgttcacacaatgatactaaaggaggcatttttaaaaatgttgattgtatgcatacatcccagcgagatgatagaatggaaggagtaccagaggctaacactgatgaagaacatgttctgtcagcctttttgctggatgcaaatcacctaaacgtagtcattaattctgaagaagtggtttgtgagggtgaagatagtaaggagcttctccattcggaagactgtaaagcttcatccgagaaaacagatgtgaatgatggcaatgtatatggtattagtgatgctgtagtgagatgtgcactgcatgctccagccgatgataattatgagatttttttgggtcccaatactgatgtaccacgtcaggtttataatgacggatgcagtgatgtcaaagaagatcgatttgcttccaaaccctggacaattgatattattgaggatgcctctgtcaaagaaagatcaaatttaaaagattggcaacttgattccaagttggagggcacagaaatagtggaatctggcctttacttcaataaggatattggtaacattttacatagtggatctattggtgaaataactccatctggttctggtttatcaaaagattcatctgtggactatagaggggaggttttagatggcttctcaatggaagcatctcttgaaaggtcttctacacgtggggaacaaaatggttgtagactagatgctattgagaatccttcaattactttagcaacttctggttataagcatgaaggtgctttatctgaggaagcagtgtacacaaagaagaattacgctggaacatgcttgtcaaatcccagggaattaatcatggagctgcaatcccatttctcaaaggaaaacataaatgaatctgatcctcatgacagccttgtattcccaactgctgaaaattcagcagatgaacagctggttaaagtacaccatggttctaatctgtctcagttaggattaactgatctgttggatggaccaattgggtgttccaataccgacgtgttgtgccagtgtgacaatcataaaaatcaatccaatgaggacaaggtagaggaagttgaggcggtgtctgctgctaaatacatagaaagtgaagttgtgctgctcccatctcaagagagatcaaatttgaataatgagcagcttaacaccaagttggaaagcccaaacattatgggatcttgccttaactgtgataacgatgtttgtaatacttcggacaatggatctgtttttgtcattggtaaaagaactccatctgcttctggcttaccagaagattatcctaaggatagtgacttgcaacaaccggttttagatagcttctcagtggtttcatcttttcaagacaatatatctgggaagaaaactgtttctggtgtagcaggcagtgagattctttctttaagtttagcaactcctgattataaacatgaagatggtttctctgaggaagcagtatgcagaacaaagaattatactggaacttcctcggtagatccgaggcatttagacatggaggggcactctatttactctgagggagatacataccaaggtccttgtcaagatctaggcagacatgaagaacaagagagctgcatgtctattcctatgcaagccaaagaaagtggaggggttttgaggtctagccacacgaaagggtcagttacagcagcccaaattgatttggcaggtgatgcccatcttattgtgagtgataatgctgctgccaagcaagtgtttagtgaggagaaagaggaaacaaaatctatctcttcttcagatattgatatccttcatgaaaaatcatactccagtggacacgatgaccatgctgcttgtgctgccgaaactcagttctaccatccacagaaagcatctatatctgatggactacatttgggtcctagttctttgcaagtagaatcactggatgctttggatagcgatatactgtatgttaacacaggagttctcgagcagcatcataaagagggttactatgaacccagtgtctaccaaatcacttcaggcatttgcacaatgtctgaagctgaaccattcgaagttttagaaactggaaaagatgtaaaaacgccatctaagctagatgagcaacttaatcctgggttggacggagatgaagctgagaaacacagcttagactgtggtacagacaccagtcctgtgatgagcaagagaaccctttcttcaccaggatcaggaccatgccagcagtatgtaaatgaaagcaccaccagtacacagtcgactgataatcacccaaacgacctacccgctccgagatctcctgaacaatccgcgtgttttcagaatgacaacgattcgggttcagcatttgtcaaagcagcaggcgaagaggtatagatgaactttgcggtaagctgcagagtttcaaagtttccagcgccgtaaaaggaagctacgtagctatgggtgcacctcgtccgaagcctggggacagcacgagccgatctgcagccgcgctgctcaggaacatagagaacacaactgctgttaaagctggccgtcctcctgtcaagccaaacgccgatggtaaggactcgtctaggcgagccctgcagcccataagcggaaggcctgacagtaggtagttcggcggttccttaataagtgtgtcgtgtttgtgttcaaccctttgttgaaagccaggtccgtgtatttgtgcagcttgttgtcatgaagctgctgtgtgcgtgtcatttaacataagcgtgcgtgaagttgtgttatggaagtggctaaatatgtgttcgttaggaggtcaattggcttgaactgaccctgctgttccgtgatttctgtctaaatatacttgtgtggctgtgtcactttgattggccttatcgatcacatgcaatgggatcacatctagcgtgctctag

SEQ ID NO: 208768 - DNA, 7502 bp, Zea Mays
atggatctcgcggggatgaagcggcgggagctccaggcgctctgcaagcggcacggcctccccgccgggggcaccaacgccgacctcgtcggacgtctcgacgccgtgctttcggggcccgctgttgtggaggaggaggttgccggagtgccggcgaggaaggggtgtctgaagcaaacgggcggaggtgccaccgaggccaagaaggttacttttggggcggaggtagggaaggccaggagactgaggtctcgggtcatatggtcgccggtcgttgccaagacaagggggaagtctgctcgagccggtactgattctgctgctgaagacggtatttctgcagatgtgggcgctgatgtcccagtgaggcggtccaggaggaattcgttcaatcctgccgaggctgaggaagcaggagaggctgttgctgttgacaggaagcccaagcgcaagaatcaggagaatgacgagggcgttgctgttatcgctcaggctagagttacgagaaggtcaaatttggagtggtctgctactgtattgcctcctgctgttgagaagaagagagggaggcagaatgcagctgagtctgatgtgcagaagtccgctctggtggaagtaacagctaggactacaaggtctcgctcaatcgtacctgttgtggtgccacccactgtggttgagaacaagaggaggaagactggagatccacaaacaactgtagagttgactatgctttcagatgtgcccagaagtgattttcctgccaccaggtctttaaggaacaaaattgtccacgttaacaacagcgtcgtggacgaaactcacactaccaggcagttggaaaacaagatgcgtccgtctactcgtaggcatcaacaggttgcatcttctccggaggataaaggtcaaaaaattcctgctaccagtaagtcccctctactgaggtggtcacggagaaactattctgaggccaatagtgcaaattcagtaaacatcaaattggccaaagactcgagcacagctcagccattggcacaccataattctcattctgaagatttggagaaacaaccagcagttaaagaaccaattaaacggtcaacacgtaaatctattgctttggctgcacttgagaaagagaaggatgtaattgaaggaaagaaccctgaagcacatgttaggcgatcaacgaggaaatcagttgtgcaggttaaagataccaaaagtattgttgaagagactcaatatgctaacagtgaagatgtggcgaagcaaccagcaactaaaggacctgctagggggctgagacgtaaatctgttatcacagaattgcatgagaaagagaagagtctcattgccgaaaagaacatggaaacagatgaagcgatattaacgcggaagcctgtaatcccagttaaaaatattaaagctgttggtgaaggaattcaaattggtaagggcaaagatgtggataaacaatttgttgtgaagcaacctactaggcgatcatcgcgcaaatctgtgctgcctgatatgcttgagaataatagtggacttctagcacccaaaatgaatgctgagatgaatgttaggagatcaacacggaagtctgttcttcctgacatgcataatgagaagcaagatcaccataaaatggctagaaatgagaacttgcaaagtggtaaatatcaagatggtgagaagcaacagaaagtaaaagattctattaggcaatcaaggagatctatcgctacagtgctacttgagggacaaaataatgatgaaggaaaaaagttcaaaaatcctacgaggaggacaacacacaaatctcatgcccttaatgcagttgaagaggtcagcatggatcacattgaagttggtgaagaaggcttgaaattgaggaagcgcagtaggtttttgctggaaatatcatcttcagctaatgtttcctggaagcatcagaatgcacagatctctaatgaaaaagataacacagaaggatcgcagcaggcatcaaattgcacaacttcaaagagaaggtcttcaaagaagagacgaacaactgctccagaagaagtgatgcctttcaaggtggcaaatgatgacatagttatcatggaagaaacaaaggacacacttgaatataataatgagtctagtagtaaagttcaagaaatttgtcaggttaatgctgcaagagaagagttctcttcaggtccattgcttgtaacagtagctcctagtgacgaaatttgcacagtgcagagtgtagctgtggtgatacctgggtcagaatctggtgacgatgcaaatcaaagttctgataagagtaagcaacctcaggaacattctgtcactcaaactgttgatgaccatttatctgaaacaagaagtgggaaattagatcaatcaacatgcatcacaggattagtctctgacaattgtgttgtctcagaggacaaaacattgatgagtgaagaccgtgaagagcaaagccctgtgtccggagaacagagagttagcttggaagcaaatgccaatgagcctgaggaaaagaacctagctaacgtcacatcaactgatctccacaccaaaagtctgcagcatgatattgacagaatagctaaagagactgataaagaagttttagctcaggagaattgtaatgaccagcctgttcctgcccagactgaccaagaaattaagttaaacgatgaacttgctgatccggatgttttagctcaggagaattgtaatgaccagcccgttcctgcccagactgacctagaaattaagttacacgatgaacttgctgatccggaccatgaagagcaaagccctgtatccggagaacggagagttagcttggaagcaaatgccaacgagcctgaggaaaagaacctagctaacgtcatatcaattgatctccacaccaaaagtctgcagcatgataatggcagaatagctgaagagactgataaagagcatgaagaaaaatatgcagttagccctatagccgttgaaaagagcttccgtcaggaagcaagtgcaattgaatctgcaggaaaacccctaactgtcatcttttctaacgatctccacaccaaacatctgcaacatgattgtgatgtgctaattaaggagactggtgaagaagttttagctcaggagaattgtaatgaccagcctgttcctgcccagaccgacctagaaattaagttaaatgatgaacttgctgatccggatgttttagctcaggagaattgtaatgaccagcctgttcctgccaacgagcctgaggaaaagaacctagctaacgtcatatcaactgatctccacaccaaaactctgcagcatgataatgacagaatagctgaagagactgataaagaccatgaagagcaaagcaatgtgttcggagaacggagagttagcttggaagcaaatgccaacgagcctgaggaaaagaacctagctaacgtcatatcaactgatctccacaccaaaactctgcagcatgataatgacagaatagctgaagagactgataaagaccatgaagagcaaagcaatgtgtccggagaacggagagttagcttggaagcaaatgccaacgagcctgaggaaaagaacctagctaacgtcatatcaactgatctccacaccaaaactctgcagcatgataatgacagaatagctgaagagactgataaagatgtttcgtctttggttttccctattgaagagcatgaagaaaaatatgcagtgagccctatagctgttgaaaagagcgtcagtcgggaagccagtgcatgtgaatctgcaggaaaacccctaactgtcatcttttctaacgatctccacaccaaacatctgcaacatgattgtgatgtgctaattaaggagactggtgaagatgttttagctcaggagaattgtaatgaccagcctgttccggcccagactgacctagaaatgaagttaaacgatgaacttgctgatccggaagttttagctcaggagaattgtaatgaccagcctgttcttgctcagactgacctagaaactaagttaaacgatgaacttgctgatctggctatggaatcaggttgtagcattactgaaaggaatgaagggcttgttgctcataatcttgatcaagaaggtttccttgaagcaacaccagagtgcaaacaggaatgtggtttgcctgaggagacagtaatttcctcaaaagaaacaggatctctgctgtgtgcagatcaatcaccaattggtctggaatctttattttcgcaagaaagcatagttgaatcagtggggcattgtgcacttgcttcagcaacaactcataccgaaaatggctttgatgattcaaaagattgccataacaagtctgcacttgaaaatgttcatgtgccagaaccttgttcacacaatgatactaaaggaggcatttttaaaaatgttgattgtatgcatacatcccagcgagatgatagaatggaaggagtaccagaggctaacactgatgaagaacatgttctgtcagcctttttgctggatgcaaatcacctaaacgtagtcattaattctgaagaagtggtttgtgagggtgaagatagtaaggagcttctccattcggaagactgtaaagcttcatccgagaaaacagatgtgaatgatggcaatgtatatggtattagtgatgctgtagtgagatgtgcactgcatgctccagccgatgataattatgagatttttttgggtcccaatactgatgtaccacgtcaggtttataatgacggatgcagtgatgtcaaagaagatcgatttgcttccaaaccctggacaattgatattattgaggatgcctctgtcaaagaaagatcaaatttaaaagattggcaacttgattccaagttggagggcacagaaatagtggaatctggcctttacttcaataaggatattggtaacattttacatagtggatctattggtgaaataactccatctggttctggtttatcaaaagattcatctgtggactatagaggggaggttttagatggcttctcaatggaagcatctcttgaaaggtcttctacacgtggggaacaaaatggttgtagactagatgctattgagaatccttcaattactttagcaacttctggttataagcatgaaggtgctttatctgaggaagcagtgtacacaaagaagaattacgctggaacatgcttgtcaaatcccagggaattaatcatggagctgcaatcccatttctcaaaggaaaacataaatgaatctgatcctcatgacagccttgtattcccaactgctgaaaattcagcagatgaacagctggttaaagtacaccatggttctaatctgtctcagttaggattaactgatctgttggatggaccaattgggtgttccaataccgacgtgttgtgccagtgtgacaatcataaaaatcaatccaatgaggacaaggtagaggaagttgaggcggtgtctgctgctaaatacatagaaagtgaagttgtgctgctcccatctcaagagagatcaaatttgaataatgagcagcttaacaccaagttggaaagcccaaacattatgggatcttgccttaactgtgataacgatgtttgtaatacttcggacaatggatctgtttttgtcattggtaaaagaactccatctgcttctggcttaccagaagattatcctaaggatagtgacttgcaacaaccggttttagatagcttctcagtggtttcatcttttcaagacaatatatctgggaagaaaactgtttctggtgtagcaggcagtgagattctttctttaagtttagcaactcctgattataaacatgaagatggtttctctgaggaagcagtatgcagaacaaagaattatactggaacttcctcggtagatccgaggcatttagacatggaggggcactctatttactctgagggaggtactgaaaaatctaatctgcaagataatcttgcatttctaagcgctgagagtggaaaagatgaacctattatttgccatgttgagaaactggttgacgcacatgcttcttcagatacataccaaggtccttgtcaagatctaggcagacatgaagaacaagagagctgcatgtctattcctatgcaagccaaagaaagtggaggggttttgaggtctagccacacgaaagggtcagttacagcagcccaaattgatttggcaggtgatgcccatcttattgtgagtgataatgctgctgccaagcaagtgtttagtgaggagaaagaggaaacaaaatctatctcttcttcagatattgatatccttcatgaaaaatcatactccagtggacacgatgaccatgctgcttgtgctgccgaaactcagttctaccatccacagaaagcatctatatctgatggactacatttgggtcctagttctttgcaagtagaatcactggatgctttggatagcgatatactgtatgttaacacaggagttctcgagcagcatcataaagagggttactatgaacccagtgtctaccaaatcacttcaggcatttgcacaatgtctgaagctgaaccattcgaagttttagaaactggaaaagatgtaaaaacgccatctaagctagatgagcaacttaatcctgggttggacggagatgaagctgagaaacacagcttagactgtggtacagacaccagtcctgtgatgagcaagagaaccctttcttcaccaggatcaggaccatgccagcagtatgtaaatgaaagcaccaccagtacacagtcgactgataatcacccaaacgacctacccgctccgagatctcctgaacaatccgcgtgttttcagaatgacaacgattcgggttcagcatttgtcaaagcagcaggcgaagaggtatagatgaactttgcggtaagctgcagagtttcaaagtttccagcgccgtaaaaggaagctacgtagctatgggtgcacctcgtccgaagcctggggacagcacgagccgatctgcagccgcgctgctcaggaacatagagaacacaactgctgttaaagctggccgtcctcctgtcaagccaaacgccgatggtaaggactcgtctaggcgagccctgcagcccataagcggaaggcctgacagtaggtagttcggcggttccttaataagtgtgtcgtgtttgtgttcaaccctttgttgaaagccaggtccgtgtatttgtgcagcttgttgtcatgaagctgctgtgtgcgtgtcatttaacataagcgtgcgtgaagttgtgttatggaagtggctaaatatgtgttcgttaggaggtcaattggcttgaactgaccctgctgttccgtgatttctgtctaaatatacttgtgtggctgtgtcactttgattggccttatcgatcacatgcaatgggatcacatctagcgtgctctag

SEQ ID NO: 208769 - DNA, 7746 bp, Zea Mays
atggatctcgcggggatgaagcggcgggagctccaggcgctctgcaagcggcacggcctccccgccgggggcaccaacgccgacctcgtcggacgtctcgacgccgtgctttcggggcccgctgttgtggaggaggaggttgccggagtgccggcgaggaaggggtgtctgaagcaaacgggcggaggtgccaccgaggccaagaaggttacttttggggcggaggtagggaaggccaggagactgaggtctcgggtcatatggtcgccggtcgttgccaagacaagggggaagtctgctcgagccggtactgattctgctgctgaagacggtatttctgcagatgtgggcgctgatgtcccagtgaggcggtccaggaggaattcgttcaatcctgccgaggctgaggaagcaggagaggctgttgctgttgacaggaagcccaagcgcaagaatcaggagaatgacgagggcgttgctgttatcgctcaggctagagttacgagaaggtcaaatttggagtggtctgctactgtattgcctcctgctgttgagaagaagagagggaggcagaatgcagctgagtctgatgtgcagaagtccgctctggtggaagtaacagctaggactacaaggtctcgctcaatcgtacctgttgtggtgccacccactgtggttgagaacaagaggaggaagactggagatccacaaacaactgtagagttgactatgctttcagatgtgcccagaagtgattttcctgccaccaggtctttaaggaacaaaattgtccacgttaacaacagcgtcgtggacgaaactcacactaccaggcagttggaaaacaagatgcgtccgtctactcgtaggcatcaacaggttgcatcttctccggaggataaaggtcaaaaaattcctgctaccagtaagtcccctctactgaggtggtcacggagaaactattctgaggccaatagtgcaaattcagtaaacatcaaattggccaaagactcgagcacagctcagccattggcacaccataattctcattctgaagatttggagaaacaaccagcagttaaagaaccaattaaacggtcaacacgtaaatctattgctttggctgcacttgagaaagagaaggatgtaattgaaggaaagaaccctgaagcacatgttaggcgatcaacgaggaaatcagttgtgcaggttaaagataccaaaagtattgttgaagagactcaatatgctaacagtgaagatgtggcgaagcaaccagcaactaaaggacctgctagggggctgagacgtaaatctgttatcacagaattgcatgagaaagagaagagtctcattgccgaaaagaacatggaaacagatgaagcgatattaacgcggaagcctgtaatcccagttaaaaatattaaagctgttggtgaaggaattcaaattggtaagggcaaagatgtggataaacaatttgttgtgaagcaacctactaggcgatcatcgcgcaaatctgtgctgcctgatatgcttgagaataatagtggacttctagcacccaaaatgaatgctgagatgaatgttaggagatcaacacggaagtctgttcttcctgacatgcataatgagaagcaagatcaccataaaatggctagaaatgagaacttgcaaagtggtaaatatcaagatggtgagaagcaacagaaagtaaaagattctattaggcaatcaaggagatctatcgctacagtgctacttgagggacaaaataatgatgaaggaaaaaagttcaaaaatcctacgaggaggacaacacacaaatctcatgcccttaatgcagttgaagaggtcagcatggatcacattgaagttggtgaagaaggcttgaaattgaggaagcgcagtaggtttttgctggaaatatcatcttcagctaatgtttcctggaagcatcagaatgcacagatctctaatgaaaaagataacacagaaggatcgcagcaggcatcaaattgcacaacttcaaagagaaggtcttcaaagaagagacgaacaactgctccagaagaagtgatgcctttcaaggtggcaaatgatgacatagttatcatggaagaaacaaaggacacacttgaatataataatgagtctagtagtaaagttcaagaaatttgtcaggttaatgctgcaagagaagagttctcttcaggtccattgcttgtaacagtagctcctagtgacgaaatttgcacagtgcagagtgtagctgtggtgatacctgggtcagaatctggtgacgatgcaaatcaaagttctgataagagtaagcaacctcaggaacattctgtcactcaaactgttgatgaccatttatctgaaacaagaagtgggaaattagatcaatcaacatgcatcacaggattagtctctgacaattgtgttgtctcagaggacaaaacattgatgagtgaagaccgtgaagagcaaagccctgtgtccggagaacagagagttagcttggaagcaaatgccaatgagcctgaggaaaagaacctagctaacgtcacatcaactgatctccacaccaaaagtctgcagcatgatattgacagaatagctaaagagactgataaagatgttttgtctttggttttccctattgaagagcatgaagaaaaatatggagtgagccctatagctgttgaaaagtgcgtctgtcgtgaagcaagtgcatgtgaatctgcacgaaaacccctaaccgttatcttttctaacaatctccacaccaaacatctgcaacatgattgtgatgtgctaattaaggagactggtgaagaagttttagctcaggagaattgtaatgaccagcctgttcctgcccagactgaccaagaaattaagttaaacgatgaacttgctgatccggatgttttagctcaggagaattgtaatgaccagcccgttcctgcccagactgacctagaaattaagttacacgatgaacttgctgatccggaccatgaagagcaaagccctgtatccggagaacggagagttagcttggaagcaaatgccaacgagcctgaggaaaagaacctagctaacgtcatatcaattgatctccacaccaaaagtctgcagcatgataatggcagaatagctgaagagactgataaagagcatgaagaaaaatatgcagttagccctatagccgttgaaaagagcttccgtcaggaagcaagtgcaattgaatctgcaggaaaacccctaactgtcatcttttctaacgatctccacaccaaacatctgcaacatgattgtgatgtgctaattaaggagactggtgaagaagttttagctcaggagaattgtaatgaccagcctgttcctgcccagaccgacctagaaattaagttaaatgatgaacttgctgatccggatgttttagctcaggagaattgtaatgaccagcctgttcctgccaacgagcctgaggaaaagaacctagctaacgtcatatcaactgatctccacaccaaaactctgcagcatgataatgacagaatagctgaagagactgataaagaccatgaagagcaaagcaatgtgttcggagaacggagagttagcttggaagcaaatgccaacgagcctgaggaaaagaacctagctaacgtcatatcaactgatctccacaccaaaactctgcagcatgataatgacagaatagctgaagagactgataaagaccatgaagagcaaagcaatgtgtccggagaacggagagttagcttggaagcaaatgccaacgagcctgaggaaaagaacctagctaacgtcatatcaactgatctccacaccaaaactctgcagcatgataatgacagaatagctgaagagactgataaagatgtttcgtctttggttttccctattgaagagcatgaagaaaaatatgcagtgagccctatagctgttgaaaagagcgtcagtcgggaagccagtgcatgtgaatctgcaggaaaacccctaactgtcatcttttctaacgatctccacaccaaacatctgcaacatgattgtgatgtgctaattaaggagactggtgaagatgttttagctcaggagaattgtaatgaccagcctgttccggcccagactgacctagaaatgaagttaaacgatgaacttgctgatccggaagttttagctcaggagaattgtaatgaccagcctgttcttgctcagactgacctagaaactaagttaaacgatgaacttgctgatctggctatggaatcaggttgtagcattactgaaaggaatgaagggcttgttgctcataatcttgatcaagaaggtttccttgaagcaacaccagagtgcaaacaggaatgtggtttgcctgaggagacagtaatttcctcaaaagaaacaggatctctgctgtgtgcagatcaatcaccaattggtctggaatctttattttcgcaagaaagcatagttgaatcagtggggcattgtgcacttgcttcagcaacaactcataccgaaaatggctttgatgattcaaaagattgccataacaagtctgcacttgaaaatgttcatgtgccagaaccttgttcacacaatgatactaaaggaggcatttttaaaaatgttgattgtatgcatacatcccagcgagatgatagaatggaaggagtaccagaggctaacactgatgaagaacatgttctgtcagcctttttgctggatgcaaatcacctaaacgtagtcattaattctgaagaagtggtttgtgagggtgaagatagtaaggagcttctccattcggaagactgtaaagcttcatccgagaaaacagatgtgaatgatggcaatgtatatggtattagtgatgctgtagtgagatgtgcactgcatgctccagccgatgataattatgagatttttttgggtcccaatactgatgtaccacgtcaggtttataatgacggatgcagtgatgtcaaagaagatcgatttgcttccaaaccctggacaattgatattattgaggatgcctctgtcaaagaaagatcaaatttaaaagattggcaacttgattccaagttggagggcacagaaatagtggaatctggcctttacttcaataaggatattggtaacattttacatagtggatctattggtgaaataactccatctggttctggtttatcaaaagattcatctgtggactatagaggggaggttttagatggcttctcaatggaagcatctcttgaaaggtcttctacacgtggggaacaaaatggttgtagactagatgctattgagaatccttcaattactttagcaacttctggttataagcatgaaggtgctttatctgaggaagcagtgtacacaaagaagaattacgctggaacatgcttgtcaaatcccagggaattaatcatggagctgcaatcccatttctcaaaggaaaacataaatgaatctgatcctcatgacagccttgtattcccaactgctgaaaattcagcagatgaacagctggttaaagtacaccatggttctaatctgtctcagttaggattaactgatctgttggatggaccaattgggtgttccaataccgacgtgttgtgccagtgtgacaatcataaaaatcaatccaatgaggacaaggtagaggaagttgaggcggtgtctgctgctaaatacatagaaagtgaagttgtgctgctcccatctcaagagagatcaaatttgaataatgagcagcttaacaccaagttggaaagcccaaacattatgggatcttgccttaactgtgataacgatgtttgtaatacttcggacaatggatctgtttttgtcattggtaaaagaactccatctgcttctggcttaccagaagattatcctaaggatagtgacttgcaacaaccggttttagatagcttctcagtggtttcatcttttcaagacaatatatctgggaagaaaactgtttctggtgtagcaggcagtgagattctttctttaagtttagcaactcctgattataaacatgaagatggtttctctgaggaagcagtatgcagaacaaagaattatactggaacttcctcggtagatccgaggcatttagacatggaggggcactctatttactctgagggaggtactgaaaaatctaatctgcaagataatcttgcatttctaagcgctgagagtggaaaagatgaacctattatttgccatgttgagaaactggttgacgcacatgcttcttcagatacataccaaggtccttgtcaagatctaggcagacatgaagaacaagagagctgcatgtctattcctatgcaagccaaagaaagtggaggggttttgaggtctagccacacgaaagggtcagttacagcagcccaaattgatttggcaggtgatgcccatcttattgtgagtccttttgatcatgtaatccgacaatcattataccacagtgataatgctgctgccaagcaagtgtttagtgaggagaaagaggaaacaaaatctatctcttcttcagatattgatatccttcatgaaaaatcatactccagtggacacgatgaccatgctgcttgtgctgccgaaactcagttctaccatccacagaaagcatctatatctgatggactacatttgggtcctagttctttgcaagtagaatcactggatgctttggatagcgatatactgtatgttaacacaggagttctcgagcagcatcataaagagggttactatgaacccagtgtctaccaaatcacttcaggcatttgcacaatgtctgaagctgaaccattcgaagttttagaaactggaaaagatgtaaaaacgccatctaagctagatgagcaacttaatcctgggttggacggagatgaagctgagaaacacagcttagactgtggtacagacaccagtcctgtgatgagcaagagaaccctttcttcaccaggatcaggaccatgccagcagtatgtaaatgaaagcaccaccagtacacagtcgactgataatcacccaaacgacctacccgctccgagatctcctgaacaatccgcgtgttttcagaatgacaacgattcgggttcagtaggcatttgtcaaagcagcaggcgaagaggtatagatgaactttgcggtaagctgcagagtttcaaagtttccagcgccgtaaaaggaagctacgtagctatgggtgcacctcgtccgaagcctggggacagcacgagccgatctgcagccgcgctgctcaggaacatagagaacacaactgctgttaaagctggccgtcctcctgtcaagccaaacgccgatggtaaggactcgtctaggcgagccctgcagcccataagcggaaggcctgacagtaggtagttcggcggttccttaataagtgtgtcgtgtttgtgttcaaccctttgttgaaagccaggtccgtgtatttgtgcagcttgttgtcatgaagctgctgtgtgcgtgtcatttaacataagcgtgcgtgaagttgtgttatggaagtggctaaatatgtgttcgttaggaggtcaattggcttgaactgaccctgctgttccgtgatttctgtctaaatatacttgtgtggctgtgtcactttgattggccttatcgatcacatgcaatgggatcacatctagcgtgctctag

SEQ ID NO: 208770 - DNA, 7279 bp, Zea Mays
tctgaagcaaacgggcggaggtgccaccgaggccaagaaggttacttttggggcggaggtagggaaggccaggagactgaggtctcgggtcatatggtcgccggtcgttgccaagacaagggggaagtctgctcgagccggtactgattctgctgctgaagacggtatttctgcagatgtgggcgctgatgtcccagtgaggcggtccaggaggaattcgttcaatcctgccgaggctgaggaagcaggagaggctgttgctgttgacaggaagcccaagcgcaagaatcaggagaatgacgagggcgttgctgttatcgctcaggctagagttacgagaaggtcaaatttggagtggtctgctactgtattgcctcctgctgttgagaagaagagagggaggcagaatgcagctgagtctgatgtgcagaagtccgctctggtggaagtaacagctaggactacaaggtctcgctcaatcgtacctgttgtggtgccacccactgtggttgagaacaagaggaggaagactggagatccacaaacaactgtagagttgactatgctttcagatgtgcccagaagtgattttcctgccaccaggtctttaaggaacaaaattgtccacgttaacaacagcgtcgtggacgaaactcacactaccaggcagttggaaaacaagatgcgtccgtctactcgtaggcatcaacaggttgcatcttctccggaggataaaggtcaaaaaattcctgctaccagtaagtcccctctactgaggtggtcacggagaaactattctgaggccaatagtgcaaattcagtaaacatcaaattggccaaagactcgagcacagctcagccattggcacaccataattctcattctgaagatttggagaaacaaccagcagttaaagaaccaattaaacggtcaacacgtaaatctattgctttggctgcacttgagaaagagaaggatgtaattgaaggaaagaaccctgaagcacatgttaggcgatcaacgaggaaatcagttgtgcaggttaaagataccaaaagtattgttgaagagactcaatatgctaacagtgaagatgtggcgaagcaaccagcaactaaaggacctgctagggggctgagacgtaaatctgttatcacagaattgcatgagaaagagaagagtctcattgccgaaaagaacatggaaacagatgaagcgatattaacgcggaagcctgtaatcccagttaaaaatattaaagctgttggtgaaggaattcaaattggtaagggcaaagatgtggataaacaatttgttgtgaagcaacctactaggcgatcatcgcgcaaatctgtgctgcctgatatgcttgagaataatagtggacttctagcacccaaaatgaatgctgagatgaatgttaggagatcaacacggaagtctgttcttcctgacatgcataatgagaagcaagatcaccataaaatggctagaaatgagaacttgcaaagtggtaaatatcaagatggtgagaagcaacagaaagtaaaagattctattaggcaatcaaggagatctatcgctacagtgctacttgagggacaaaataatgatgaaggaaaaaagttcaaaaatcctacgaggaggacaacacacaaatctcatgcccttaatgcagttgaagaggtcagcatggatcacattgaagttggtgaagaaggcttgaaattgaggaagcgcagtaggtttttgctggaaatatcatcttcagctaatgtttcctggaagcatcagaatgcacagatctctaatgaaaaagataacacagaaggatcgcagcaggcatcaaattgcacaacttcaaagagaaggtcttcaaagaagagacgaacaactgctccagaagaagtgatgcctttcaaggtggcaaatgatgacatagttatcatggaagaaacaaaggacacacttgaatataataatgagtctagtagtaaagttcaagaaatttgtcaggttaatgctgcaagagaagagttctcttcaggtccattgcttgtaacagtagctcctagtgacgaaatttgcacagtgcagagtgtagctgtggtgatacctgggtcagaatctggtgacgatgcaaatcaaagttctgataagagtaagcaacctcaggaacattctgtcactcaaactgttgatgaccatttatctgaaacaagaagtgggaaattagatcaatcaacatgcatcacaggattagtctctgacaattgtgttgtctcagaggacaaaacattgatgagtgaagaccgtgaagagcaaagccctgtgtccggagaacagagagttagcttggaagcaaatgccaatgagcctgaggaaaagaacctagctaacgtcacatcaactgatctccacaccaaaagtctgcagcatgatattgacagaatagctaaagagactgataaagatgttttgtctttggttttccctattgaagagcatgaagaaaaatatggagtgagccctatagctgttgaaaagtgcgtctgtcgtgaagcaagtgcatgtgaatctgcacgaaaacccctaaccgttatcttttctaacaatctccacaccaaacatctgcaacatgattgtgatgtgctaattaaggagactggtgaagaagttttagctcaggagaattgtaatgaccagcctgttcctgcccagactgaccaagaaattaagttaaacgatgaacttgctgatccggatgttttagctcaggagaattgtaatgaccagcccgttcctgcccagactgacctagaaattaagttacacgatgaacttgctgatccggaccatgaagagcaaagccctgtatccggagaacggagagttagcttggaagcaaatgccaacgagcctgaggaaaagaacctagctaacgtcatatcaattgatctccacaccaaaagtctgcagcatgataatggcagaatagctgaagagactgataaagatgttttagctcaggagaattgtaatgaccagcctgttcctgccaacgagcctgaggaaaagaacctagctaacgtcatatcaactgatctccacaccaaaactctgcagcatgataatgacagaatagctgaagagactgataaagaccatgaagagcaaagcaatgtgttcggagaacggagagttagcttggaagcaaatgccaacgagcctgaggaaaagaacctagctaacgtcatatcaactgatctccacaccaaaactctgcagcatgataatgacagaatagctgaagagactgataaagaccatgaagagcaaagcaatgtgtccggagaacggagagttagcttggaagcaaatgccaacgagcctgaggaaaagaacctagctaacgtcatatcaactgatctccacaccaaaactctgcagcatgataatgacagaatagctgaagagactgataaagatgtttcgtctttggttttccctattgaagagcatgaagaaaaatatgcagtgagccctatagctgttgaaaagagcgtcagtcgggaagccagtgcatgtgaatctgcaggaaaacccctaactgtcatcttttctaacgatctccacaccaaacatctgcaacatgattgtgatgtgctaattaaggagactggtgaagatgttttagctcaggagaattgtaatgaccagcctgttccggcccagactgacctagaaatgaagttaaacgatgaacttgctgatccggaagttttagctcaggagaattgtaatgaccagcctgttcttgctcagactgacctagaaactaagttaaacgatgaacttgctgatctggctatggaatcaggttgtagcattactgaaaggaatgaagggcttgttgctcataatcttgatcaagaaggtttccttgaagcaacaccagagtgcaaacaggaatgtggtttgcctgaggagacagtaatttcctcaaaagaaacaggatctctgctgtgtgcagatcaatcaccaattggtctggaatctttattttcgcaagaaagcatagttgaatcagtggggcattgtgcacttgcttcagcaacaactcataccgaaaatggctttgatgattcaaaagattgccataacaagtctgcacttgaaaatgttcatgtgccagaaccttgttcacacaatgatactaaaggaggcatttttaaaaatgttgattgtatgcatacatcccagcgagatgatagaatggaaggagtaccagaggctaacactgatgaagaacatgttctgtcagcctttttgctggatgcaaatcacctaaacgtagtcattaattctgaagaagtggtttgtgagggtgaagatagtaaggagcttctccattcggaagactgtaaagcttcatccgagaaaacagatgtgaatgatggcaatgtatatggtattagtgatgctgtagtgagatgtgcactgcatgctccagccgatgataattatgagatttttttgggtcccaatactgatgtaccacgtcaggtttataatgacggatgcagtgatgtcaaagaagatcgatttgcttccaaaccctggacaattgatattattgaggatgcctctgtcaaagaaagatcaaatttaaaagattggcaacttgattccaagttggagggcacagaaatagtggaatctggcctttacttcaataaggatattggtaacattttacatagtggatctattggtgaaataactccatctggttctggtttatcaaaagattcatctgtggactatagaggggaggttttagatggcttctcaatggaagcatctcttgaaaggtcttctacacgtggggaacaaaatggttgtagactagatgctattgagaatccttcaattactttagcaacttctggttataagcatgaaggtgctttatctgaggaagcagtgtacacaaagaagaattacgctggaacatgcttgtcaaatcccagggaattaatcatggagctgcaatcccatttctcaaaggaaaacataaatgaatctgatcctcatgacagccttgtattcccaactgctgaaaattcagcagatgaacagctggttaaagtacaccatggttctaatctgtctcagttaggattaactgatctgttggatggaccaattgggtgttccaataccgacgtgttgtgccagtgtgacaatcataaaaatcaatccaatgaggacaaggtagaggaagttgaggcggtgtctgctgctaaatacatagaaagtgaagttgtgctgctcccatctcaagagagatcaaatttgaataatgagcagcttaacaccaagttggaaagcccaaacattatgggatcttgccttaactgtgataacgatgtttgtaatacttcggacaatggatctgtttttgtcattggtaaaagaactccatctgcttctggcttaccagaagattatcctaaggatagtgacttgcaacaaccggttttagatagcttctcagtggtttcatcttttcaagacaatatatctgggaagaaaactgtttctggtgtagcaggcagtgagattctttctttaagtttagcaactcctgattataaacatgaagatggtttctctgaggaagcagtatgcagaacaaagaattatactggaacttcctcggtagatccgaggcatttagacatggaggggcactctatttactctgagggaggtactgaaaaatctaatctgcaagataatcttgcatttctaagcgctgagagtggaaaagatgaacctattatttgccatgttgagaaactggttgacgcacatgcttcttcagatacataccaaggtccttgtcaagatctaggcagacatgaagaacaagagagctgcatgtctattcctatgcaagccaaagaaagtggaggggttttgaggtctagccacacgaaagggtcagttacagcagcccaaattgatttggcaggtgatgcccatcttattgtgagtgataatgctgctgccaagcaagtgtttagtgaggagaaagaggaaacaaaatctatctcttcttcagatattgatatccttcatgaaaaatcatactccagtggacacgatgaccatgctgcttgtgctgccgaaactcagttctaccatccacagaaagcatctatatctgatggactacatttgggtcctagttctttgcaagtagaatcactggatgctttggatagcgatatactgtatgttaacacaggagttctcgagcagcatcataaagagggttactatgaacccagtgtctaccaaatcacttcaggcatttgcacaatgtctgaagctgaaccattcgaagttttagaaactggaaaagatgtaaaaacgccatctaagctagatgagcaacttaatcctgggttggacggagatgaagctgagaaacacagcttagactgtggtacagacaccagtcctgtgatgagcaagagaaccctttcttcaccaggatcaggaccatgccagcagtatgtaaatgaaagcaccaccagtacacagtcgactgataatcacccaaacgacctacccgctccgagatctcctgaacaatccgcgtgttttcagaatgacaacgattcgggttcagtaggcatttgtcaaagcagcaggcgaagaggtatagatgaactttgcggtaagctgcagagtttcaaagtttccagcgccgtaaaaggaagctacgtagctatgggtgcacctcgtccgaagcctggggacagcacgagccgatctgcagccgcgctgctcaggaacatagagaacacaactgctgttaaagctggccgtcctcctgtcaagccaaacgccgatggtaaggactcgtctaggcgagccctgcagcccataagcggaaggcctgacagtaggtagttcggcggttccttaataagtgtgtcgtgtttgtgttcaaccctttgttgaaagccaggtccgtgtatttgtgcagcttgttgtcatgaagctgctgtgtgcgtgtcatttaacataagcgtgcgtgaagttgtgttatggaagtggctaaatatgtgttcgttaggaggtcaattggcttgaactgaccctgctgttccgtgatttctgtctaaatatacttgtgtggctgtgtcactttgattggccttatcgatcacatgcaatgggatcacatctagcgtgctctag

SEQ ID NO: 208771 - DNA, 4664 bp, Zea Mays
gaaaacttgtgctgtttgcactgtgtttaatttaccaattttaaacatactgagttctaagtcaagttgttggctacttgtaattctaattatttttaataggctttatgtttgttctatctggaacagctaggcatatgtttcattgtcatttgttgtcttttaagtatcttacatttttttgaatgtattctttccctttctcagaagttttagctcaggagaattgtaatgaccagcctgttcctgcccagactgaccaagaaattaagttaaacgatgaacttgctgatccggatgttttagctcaggagaattgtaatgaccagcccgttcctgcccagactgacctagaaattaagttacacgatgaacttgctgatccggaccatgaagagcaaagccctgtatccggagaacggagagttagcttggaagcaaatgccaacgagcctgaggaaaagaacctagctaacgtcatatcaattgatctccacaccaaaagtctgcagcatgataatggcagaatagctgaagagactgataaagatgttttgtcttttgttttccctattgaagagcatgaagaaaaatatgcagttagccctatagccgttgaaaagagcttccgtcaggaagcaagtgcaattgaatctgcaggaaaacccctaactgtcatcttttctaacgatctccacaccaaacatctgcaacatgattgtgatgtgctaattaaggagactggtgaagaagttttagctcaggagaattgtaatgaccagcctgttcctgcccagaccgacctagaaattaagttaaatgatgaacttgctgatccggatgttttagctcaggagaattgtaatgaccagcctgttcctgccaacgagcctgaggaaaagaacctagctaacgtcatatcaactgatctccacaccaaaactctgcagcatgataatgacagaatagctgaagagactgataaagatgtttcgtctttggttttccctattgaagagcatgaagaaaaatatgcagtgagccctatagctgttgaaaagagcgtcagtcgggaagccagtgcatgtgaatctgcaggaaaacccctaactgtcatcttttctaacgatctccacaccaaacatctgcaacatgattgtgatgtgctaattaaggagactggtgaagatgttttagctcaggagaattgtaatgaccagcctgttccggcccagactgacctagaaatgaagttaaacgatgaacttgctgatccggaagttttagctcaggagaattgtaatgaccagcctgttcttgctcagactgacctagaaactaagttaaacgatgaacttgctgatctggctatggaatcaggttgtagcattactgaaaggaatgaagggcttgttgctcataatcttgatcaagaaggtttccttgaagcaacaccagagtgcaaacaggaatgtggtttgcctgaggagacagtaatttcctcaaaagaaacaggatctctgctgtgtgcagatcaatcaccaattggtctggaatctttattttcgcaagaaagcatagttgaatcagtggggcattgtgcacttgcttcagcaacaactcataccgaaaatggctttgatgattcaaaagattgccataacaagtctgcacttgaaaatgttcatgtgccagaaccttgttcacacaatgatactaaaggaggcatttttaaaaatgttgattgtatgcatacatcccagcgagatgatagaatggaaggagtaccagaggctaacactgatgaagaacatgttctgtcagcctttttgctggatgcaaatcacctaaacgtagtcattaattctgaagaagtggtttgtgagggtgaagatagtaaggagcttctccattcggaagactgtaaagcttcatccgagaaaacagatgtgaatgatggcaatgtatatggtattagtgatgctgtagtgagatgtgcactgcatgctccagccgatgataattatgagatttttttgggtcccaatactgatgtaccacgtcaggtttataatgacggatgcagtgatgtcaaagaagatcgatttgcttccaaaccctggacaattgatattattgaggatgcctctgtcaaagaaagatcaaatttaaaagattggcaacttgattccaagttggagggcacagaaatagtggaatctggcctttacttcaataaggatattggtaacattttacatagtggatctattggtgaaataactccatctggttctggtttatcaaaagattcatctgtggactatagaggggaggttttagatggcttctcaatggaagcatctcttgaaaggtcttctacacgtggggaacaaaatggttgtagactagatgctattgagaatccttcaattactttagcaacttctggttataagcatgaaggtgctttatctgaggaagcagtgtacacaaagaagaattacgctggaacatgcttgtcaaatcccagggaattaatcatggagctgcaatcccatttctcaaaggaaaacataaatgaatctgatcctcatgacagccttgtattcccaactgctgaaaattcagcagatgaacagctggttaaagtacaccatggttctaatctgtctcagttaggattaactgatctgttggatggaccaattgggtgttccaataccgacgtgttgtgccagtgtgacaatcataaaaatcaatccaatgaggacaaggtagaggaagttgaggcggtgtctgctgctaaatacatagaaagtgaagttgtgctgctcccatctcaagagagatcaaatttgaataatgagcagcttaacaccaagttggaaagcccaaacattatgggatcttgccttaactgtgataacgatgtttgtaatacttcggacaatggatctgtttttgtcattggtaaaagaactccatctgcttctggcttaccagaagattatcctaaggatagtgacttgcaacaaccggttttagatagcttctcagtggtttcatcttttcaagacaatatatctgggaagaaaactgtttctggtgtagcaggcagtgagattctttctttaagtttagcaactcctgattataaacatgaagatggtttctctgaggaagcagtatgcagaacaaagaattatactggaacttcctcggtagatccgaggcatttagacatggaggggcactctatttactctgagggagatacataccaaggtccttgtcaagatctaggcagacatgaagaacaagagagctgcatgtctattcctatgcaagccaaagaaagtggaggggttttgaggtctagccacacgaaagggtcagttacagcagcccaaattgatttggcaggtgatgcccatcttattgtgagtgataatgctgctgccaagcaagtgtttagtgaggagaaagaggaaacaaaatctatctcttcttcagatattgatatccttcatgaaaaatcatactccagtggacacgatgaccatgctgcttgtgctgccgaaactcagttctaccatccacagaaagcatctatatctgatggactacatttgggtcctagttctttgcaagtagaatcactggatgctttggatagcgatatactgtatgttaacacaggagttctcgagcagcatcataaagagggttactatgaacccagtgtctaccaaatcacttcaggcatttgcacaatgtctgaagctgaaccattcgaagttttagaaactggaaaagatgtaaaaacgccatctaagctagatgagcaacttaatcctgggttggacggagatgaagctgagaaacacagcttagactgtggtacagacaccagtcctgtgatgagcaagagaaccctttcttcaccaggatcaggaccatgccagcagtatgtaaatgaaagcaccaccagtacacagtcgactgataatcacccaaacgacctacccgctccgagatctcctgaacaatccgcgtgttttcagaatgacaacgattcgggttcagtaggcatttgtcaaagcagcaggcgaagaggtatagatgaactttgcggtaagctgcagagtttcaaagtttccagcgccgtaaaaggaagctacgtagctatgggtgcacctcgtccgaagcctggggacagcacgagccgatctgcagccgcgctgctcaggaacatagagaacacaactgctgttaaagctggccgtcctcctgtcaagccaaacgccgatggtaaggactcgtctaggcgagccctgcagcccataagcggaaggcctgacagtaggtagttcggcggttccttaataagtgtgtcgtgtttgtgttcaaccctttgttgaaagccaggtccgtgtatttgtgcagcttgttgtcatgaagctgctgtgtgcgtgtcatttaacataagcgtgcgtgaagttgtgttatggaagtggctaaatatgtgttcgttaggaggtcaattggcttgaactgaccctgctgttccgtgatttctgtctaaatatacttgtgtggctgtgtcactttgattggccttatcgatcacatgcaatgggatcacatctagcgtgctctag

SEQ ID NO: 208772 - DNA, 4055 bp, Zea Mays
attaatcctgcccagactgacctagaaattaagttaaacgatgaacttgctgatccggaccatgaagagcaaagcaatgtgttcggagaacggagagttagcttggaagcaaatgccaacgagcctgaggaaaagaacctagctaacgtcatatcaactgatctccacaccaaaactctgcagcatgataatgacagaatagctgaagagactgataaagaccatgaagagcaaagcaatgtgtccggagaacggagagttagcttggaagcaaatgccaacgagcctgaggaaaagaacctagctaacgtcatatcaactgatctccacaccaaaactctgcagcatgataatgacagaatagctgaagagactgataaagatgtttcgtctttggttttccctattgaagagcatgaagaaaaatatgcagtgagccctatagctgttgaaaagagcgtcagtcgggaagccagtgcatgtgaatctgcaggaaaacccctaactgtcatcttttctaacgatctccacaccaaacatctgcaacatgattgtgatgtgctaattaaggagactggtgaagatgttttagctcaggagaattgtaatgaccagcctgttccggcccagactgacctagaaatgaagttaaacgatgaacttgctgatccggaagttttagctcaggagaattgtaatgaccagcctgttcttgctcagactgacctagaaactaagttaaacgatgaacttgctgatctggctatggaatcaggttgtagcattactgaaaggaatgaagggcttgttgctcataatcttgatcaagaaggtttccttgaagcaacaccagagtgcaaacaggaatgtggtttgcctgaggagacagtaatttcctcaaaagaaacaggatctctgctgtgtgcagatcaatcaccaattggtctggaatctttattttcgcaagaaagcatagttgaatcagtggggcattgtgcacttgcttcagcaacaactcataccgaaaatggctttgatgattcaaaagattgccataacaagtctgcacttgaaaatgttcatgtgccagaaccttgttcacacaatgatactaaaggaggcatttttaaaaatgttgattgtatgcatacatcccagcgagatgatagaatggaaggagtaccagaggctaacactgatgaagaacatgttctgtcagcctttttgctggatgcaaatcacctaaacgtagtcattaattctgaagaagtggtttgtgagggtgaagatagtaaggagcttctccattcggaagactgtaaagcttcatccgagaaaacagatgtgaatgatggcaatgtatatggtattagtgatgctgtagtgagatgtgcactgcatgctccagccgatgataattatgagatttttttgggtcccaatactgatgtaccacgtcaggtttataatgacggatgcagtgatgtcaaagaagatcgatttgcttccaaaccctggacaattgatattattgaggatgcctctgtcaaagaaagatcaaatttaaaagattggcaacttgattccaagttggagggcacagaaatagtggaatctggcctttacttcaataaggatattggtaacattttacatagtggatctattggtgaaataactccatctggttctggtttatcaaaagattcatctgtggactatagaggggaggttttagatggcttctcaatggaagcatctcttgaaaggtcttctacacgtggggaacaaaatggttgtagactagatgctattgagaatccttcaattactttagcaacttctggttataagcatgaaggtgctttatctgaggaagcagtgtacacaaagaagaattacgctggaacatgcttgtcaaatcccagggaattaatcatggagctgcaatcccatttctcaaaggaaaacataaatgaatctgatcctcatgacagccttgtattcccaactgctgaaaattcagcagatgaacagctggttaaagtacaccatggttctaatctgtctcagttaggattaactgatctgttggatggaccaattgggtgttccaataccgacgtgttgtgccagtgtgacaatcataaaaatcaatccaatgaggacaaggtagaggaagttgaggcggtgtctgctgctaaatacatagaaagtgaagttgtgctgctcccatctcaagagagatcaaatttgaataatgagcagcttaacaccaagttggaaagcccaaacattatgggatcttgccttaactgtgataacgatgtttgtaatacttcggacaatggatctgtttttgtcattggtaaaagaactccatctgcttctggcttaccagaagattatcctaaggatagtgacttgcaacaaccggttttagatagcttctcagtggtttcatcttttcaagacaatatatctgggaagaaaactgtttctggtgtagcaggcagtgagattctttctttaagtttagcaactcctgattataaacatgaagatggtttctctgaggaagcagtatgcagaacaaagaattatactggaacttcctcggtagatccgaggcatttagacatggaggggcactctatttactctgagggagatacataccaaggtccttgtcaagatctaggcagacatgaagaacaagagagctgcatgtctattcctatgcaagccaaagaaagtggaggggttttgaggtctagccacacgaaagggtcagttacagcagcccaaattgatttggcaggtgatgcccatcttattgtgagtgataatgctgctgccaagcaagtgtttagtgaggagaaagaggaaacaaaatctatctcttcttcagatattgatatccttcatgaaaaatcatactccagtggacacgatgaccatgctgcttgtgctgccgaaactcagttctaccatccacagaaagcatctatatctgatggactacatttgggtcctagttctttgcaagtagaatcactggatgctttggatagcgatatactgtatgttaacacaggagttctcgagcagcatcataaagagggttactatgaacccagtgtctaccaaatcacttcaggcatttgcacaatgtctgaagctgaaccattcgaagttttagaaactggaaaagatgtaaaaacgccatctaagctagatgagcaacttaatcctgggttggacggagatgaagctgagaaacacagcttagactgtggtacagacaccagtcctgtgatgagcaagagaaccctttcttcaccaggatcaggaccatgccagcagtatgtaaatgaaagcaccaccagtacacagtcgactgataatcacccaaacgacctacccgctccgagatctcctgaacaatccgcgtgttttcagaatgacaacgattcgggttcagcatttgtcaaagcagcaggcgaagaggtatagatgaactttgcggtaagctgcagagtttcaaagtttccagcgccgtaaaaggaagctacgtagctatgggtgcacctcgtccgaagcctggggacagcacgagccgatctgcagccgcgctgctcaggaacatagagaacacaactgctgttaaagctggccgtcctcctgtcaagccaaacgccgatggtaaggactcgtctaggcgagccctgcagcccataagcggaaggcctgacagtaggtagttcggcggttccttaataagtgtgtcgtgtttgtgttcaaccctttgttgaaagccaggtccgtgtatttgtgcagcttgttgtcatgaagctgctgtgtgcgtgtcatttaacataagcgtgcgtgaagttgtgttatggaagtggctaaatatgtgttcgttaggaggtcaattggcttgaactgaccctgctgttccgtgatttctgtctaaatatacttgtgtggctgtgtcactttgattggccttatcgatcacatgcaatgggatcacatctagcgtgctctag

SEQ ID NO: 208773 - DNA, 4124 bp, Zea Mays
ctgatccggaccatgaagagcaaagcaatgtgttcggagaacggagagttagcttggaagcaaatgccaacgagcctgaggaaaagaacctagctaacgtcatatcaactgatctccacaccaaaactctgcagcatgataatgacagaatagctgaagagactgataaagaccatgaagagcaaagcaatgtgtccggagaacggagagttagcttggaagcaaatgccaacgagcctgaggaaaagaacctagctaacgtcatatcaactgatctccacaccaaaactctgcagcatgataatgacagaatagctgaagagactgataaagatgtttcgtctttggttttccctattgaagagcatgaagaaaaatatgcagtgagccctatagctgttgaaaagagcgtcagtcgggaagccagtgcatgtgaatctgcaggaaaacccctaactgtcatcttttctaacgatctccacaccaaacatctgcaacatgattgtgatgtgctaattaaggagactggtgaagatgttttagctcaggagaattgtaatgaccagcctgttccggcccagactgacctagaaatgaagttaaacgatgaacttgctgatccggaagttttagctcaggagaattgtaatgaccagcctgttcttgctcagactgacctagaaactaagttaaacgatgaacttgctgatctggctatggaatcaggttgtagcattactgaaaggaatgaagggcttgttgctcataatcttgatcaagaaggtttccttgaagcaacaccagagtgcaaacaggaatgtggtttgcctgaggagacagtaatttcctcaaaagaaacaggatctctgctgtgtgcagatcaatcaccaattggtctggaatctttattttcgcaagaaagcatagttgaatcagtggggcattgtgcacttgcttcagcaacaactcataccgaaaatggctttgatgattcaaaagattgccataacaagtctgcacttgaaaatgttcatgtgccagaaccttgttcacacaatgatactaaaggaggcatttttaaaaatgttgattgtatgcatacatcccagcgagatgatagaatggaaggagtaccagaggctaacactgatgaagaacatgttctgtcagcctttttgctggatgcaaatcacctaaacgtagtcattaattctgaagaagtggtttgtgagggtgaagatagtaaggagcttctccattcggaagactgtaaagcttcatccgagaaaacagatgtgaatgatggcaatgtatatggtattagtgatgctgtagtgagatgtgcactgcatgctccagccgatgataattatgagatttttttgggtcccaatactgatgtaccacgtcaggtttataatgacggatgcagtgatgtcaaagaagatcgatttgcttccaaaccctggacaattgatattattgaggatgcctctgtcaaagaaagatcaaatttaaaagattggcaacttgattccaagttggagggcacagaaatagtggaatctggcctttacttcaataaggatattggtaacattttacatagtggatctattggtgaaataactccatctggttctggtttatcaaaagattcatctgtggactatagaggggaggttttagatggcttctcaatggaagcatctcttgaaaggtcttctacacgtggggaacaaaatggttgtagactagatgctattgagaatccttcaattactttagcaacttctggttataagcatgaaggtgctttatctgaggaagcagtgtacacaaagaagaattacgctggaacatgcttgtcaaatcccagggaattaatcatggagctgcaatcccatttctcaaaggaaaacataaatgaatctgatcctcatgacagccttgtattcccaactgctgaaaattcagcagatgaacagctggttaaagtacaccatggttctaatctgtctcagttaggattaactgatctgttggatggaccaattgggtgttccaataccgacgtgttgtgccagtgtgacaatcataaaaatcaatccaatgaggacaaggtagaggaagttgaggcggtgtctgctgctaaatacatagaaagtgaagttgtgctgctcccatctcaagagagatcaaatttgaataatgagcagcttaacaccaagttggaaagcccaaacattatgggatcttgccttaactgtgataacgatgtttgtaatacttcggacaatggatctgtttttgtcattggtaaaagaactccatctgcttctggcttaccagaagattatcctaaggatagtgacttgcaacaaccggttttagatagcttctcagtggtttcatcttttcaagacaatatatctgggaagaaaactgtttctggtgtagcaggcagtgagattctttctttaagtttagcaactcctgattataaacatgaagatggtttctctgaggaagcagtatgcagaacaaagaattatactggaacttcctcggtagatccgaggcatttagacatggaggggcactctatttactctgagggaggtactgaaaaatctaatctgcaagataatcttgcatttctaagcgctgagagtggaaaagatgaacctattatttgccatgttgagaaactggttgacgcacatgcttcttcagatacataccaaggtccttgtcaagatctaggcagacatgaagaacaagagagctgcatgtctattcctatgcaagccaaagaaagtggaggggttttgaggtctagccacacgaaagggtcagttacagcagcccaaattgatttggcaggtgatgcccatcttattgtgagtgataatgctgctgccaagcaagtgtttagtgaggagaaagaggaaacaaaatctatctcttcttcagatattgatatccttcatgaaaaatcatactccagtggacacgatgaccatgctgcttgtgctgccgaaactcagttctaccatccacagaaagcatctatatctgatggactacatttgggtcctagttctttgcaagtagaatcactggatgctttggatagcgatatactgtatgttaacacaggagttctcgagcagcatcataaagagggttactatgaacccagtgtctaccaaatcacttcaggcatttgcacaatgtctgaagctgaaccattcgaagttttagaaactggaaaagatgtaaaaacgccatctaagctagatgagcaacttaatcctgggttggacggagatgaagctgagaaacacagcttagactgtggtacagacaccagtcctgtgatgagcaagagaaccctttcttcaccaggatcaggaccatgccagcagtatgtaaatgaaagcaccaccagtacacagtcgactgataatcacccaaacgacctacccgctccgagatctcctgaacaatccgcgtgttttcagaatgacaacgattcgggttcagtaggcatttgtcaaagcagcaggcgaagaggtatagatgaactttgcggtaagctgcagagtttcaaagtttccagcgccgtaaaaggaagctacgtagctatgggtgcacctcgtccgaagcctggggacagcacgagccgatctgcagccgcgctgctcaggaacatagagaacacaactgctgttaaagctggccgtcctcctgtcaagccaaacgccgatggtaaggactcgtctaggcgagccctgcagcccataagcggaaggcctgacagtaggtagttcggcggttccttaataagtgtgtcgtgtttgtgttcaaccctttgttgaaagccaggtccgtgtatttgtgcagcttgttgtcatgaagctgctgtgtgcgtgtcatttaacataagcgtgcgtgaagttgtgttatggaagtggctaaatatgtgttcgttaggaggtcaattggcttgaactgaccctgctgttccgtgatttctgtctaaatatacttgtgtggctgtgtcactttgattggccttatcgatcacatgcaatgggatcacatctagcgtgctctag

SEQ ID NO: 208774 - DNA, 3222 bp, Zea Mays
gttttaaaatgcccggcctctagaggcctccccgatctgatgccccctggccgcctccctgcctcctcgccgccgccaccgcttgtagcctccgctacgtagaccacgtgtattttcttgtttgatctggagcatgctgtatcggtgattttctccttcttttgccgacgctgcggagcggcgaggagttttgattcagctgtagagagattctaggatctatggggtccgagaagggtggagccaaggttattggcggcggtggaggaggaggcgggatcttcaacctatttgattggaagcgaaagtcacgcaagaagctgttctccaactcgccagaggcgtctaagcttgtcaagaggagcgaagaaaccttgctgtcagtgcgtctccacttgggtgatgaagatgaggggattggtgtatcaagcttcaagggaagcagcgactacagctgtgcgtcttcagtgaccgatgaggaagggcgtgagatgaaggcgccaggtgttgtggccaggctcatgggcctggacgccatgcccaccttgggtgttccagaaccgtactgcacaccgttccgagacacaatatcattcagggacagccacagcctcaagaggagccctgagtactcaacgaatgaccaattcggtcatgttcctcgaagagttgatggatatatcaggaagccattggatttcagagcaccaaagatgccaagcagcccgattgaaaggttccagatggaagcattgccaccaaggtccgcaaagcctctaccaatgtctcaccatagattgttgtcccccatcaagaatccaggtttcacttcagcgaggaatgctgtccagatcatggaggaagcagccaagattcttcagccaagggcacaaacaagctctagggagaaagtatgttcttttagcccggcgcggattcctttgagagtttcggagccaagagagaacatccctttttctcagagggctgtgcctctgaaaccgcaatcatccaggactgctcctgagctgccaaatgtgagaatctctagagcacagcagatgaaccgaagctggaatagtgaggaggatattgtcatattcagaccatcggttgattcttatgagattaataatcctagttgttctaagaacaacaagggaaagtctgtttcattggcagtccaggcaaagaacaacgtccagaagagggaaggcgcaactggttctgggaggaattcacgagtacaaaaagaacatgatgagaaaagggtaaaccaaccatttaggagtcagtctaatctccagagaaacaagcagcaaaagaagccatcatcatctggcacttcttcccctgttctttggcaaaataatcagaaacagaattctttggtgaccaaaggcaaggtggcactaaacaaaaccgtctcaacacagcaaggcagaaaggtgatggccggagattcatcttctgggaagatcaagagtggaagcaagaactctaaagttggcagaaaagacattgtggaaagcattagtggtgatagagaaggatcatcgtcgaacaacaaggacttcccgcagaagaaacggttgatagagagaaactccaccaacgagaagggtacatttgtgcctgaaaacccagtgggtaaacttctgaagcaggttcaacctaatgttgttatggacgagcacattaaatggaacaaggaatgtaaagataccacagatgttgtgtcatttaccttcacctcacccttggtcaaaccatcggcaggaccgtccagactggcgggtaagtgggatacaagaagcaatcttgatatggacgcaggatgtgataaagatgattcagataacaaggctcaagggttgtcatcagtggggctgaactttgtaaatggtgatgcattgagccttcttctagaaaagaagctgaaggagctaacatcaaaaattgatccatcaatcacctttacgaggggtgacacatttgcgcctgctacttttaccttggaggaaccaccaacctcttcatgcagtaattggggctcagaaagtggagcatttgactgtagcccttctgaactaaaaccttctcagtatgattattgcccttcagcccagtcatctacaaaaggccaaaattttcgaggcagtaaaataaaggtggaagaacaagaagaatgcagcagcataagcaatgcaaggaaggaacaggaaaatgaagatctaagtcccctatctgtgcttgaacccaccacctctctaagcgagagttgctggtcttctgagtgttcggacagcagcggtgggggtaaggtttatccatcactttttgatgttaaaaatggtcaggggaatttcttgattaacccagcatcagttgatatcgaggcaaagacaacagactcagcctcttcggcatcagcagatacatcggatgtttcagatatcacccaatgctctaaaagatcaagacacacagagctggagtacatcgcagatgtgctaagcagtgtgaacttgacaacagatgaactgggatcactcttcgtcaatcaggatagatcagctctgcaccccctcctcttcgagaaactggagaatacgcatgcgtacacacaagggaaagagcccttttgccatcgagggtacaggcggctgttgttcgactgcgtgaatgagtgcctggagacaagacgcacgacctacttccgggcaggatatgcggcatggagcaaaggagcagcgacgctgggcatggaggaggcccaagtctgcagtgaggtaaccagctggaagcgcatgggagactggacggaggacgagctcgtcgacaaggacatgagcggcgggctgggcacatgggtcgatttccgggtggaggagttcgaggccggtgaggaggtggagaaccacgtactgagctcactgctcgatgaggtggtgggcgacatggtcgcgagacggcggcggccaggagtatttgtgatttgagaatgggccctgtaattttgtttcgttttgctgttacatatctccccaatttattttgtcaccccagaagtgtgctgttcaaatcagtgataaatgttcatcgatcgttttcagctcggctactgaatgccctgcttgacacggtttctgaagtctttttacctctgtgataggcaaaacaactctggccatttctactcgtaattcgatccaaaactaa

SEQ ID NO: 208775 - DNA, 2664 bp, Zea Mays
atcggctcagggtcacacccgcaaagctaccgccgcagtgccgcacggcgactccgactctgtctcctgcgcggctccagctcaccctctcctcacatcgaggcggaccggcccacgtcgccggcaaccgaaacgtcggccgtagcctcgcacctccggcatcggcgagcgcgcgcgcccgtccggcggcggagatggcgctgcggcacctggtcacgggccagaacaactgcgcgccggacggcgcctcgtcgtccaaccccctcaacgccctcgccaacgccttccttggccagtcctccaaggcgcagtcaataaaggaacttcctggttctgttagtgttccatctacatctggcttcagcgcgcctgctcccttgtcaaacatccctggttcagaaaatgagttcaaacaagaccagcgaccttttgtgcagggctctgactttattcatggtggtcctgctaatgattggattaagtcttttcggcctccgggggttcctgaacttggtggaatagaagcacactttccagattttgagcaaatttataacaatgcaggaacaacctttcagccgccattggatggtccaccacaaagagtgttgtctggtgtcttgcattcctttctcacaagtggcccagctggtgtgccatttcaacctcttccagtaccagctgctcttggtttatctgaaagtgacaaacagtgcatacgtgatcgtagctgcataatggcacggcatattttttctgaccaaccggaagaatatatacaggctcaggtcaatactttgctgcattcgcttgatatagacaaccgtatgagaggacctatgcatggacaatacccagaactacaggagtactggaaccagtcccaaagttctatgggtcctgccctgatgcataataccgctgataaatggattactgagtttggcaaacaaaataataatccggaaaattgggcaaagtctttcgaacaacaatatggccccaatgggtgggcctctgagtttgaacagcatcagtctcagatggccatgggccagatgggaggagtgaacatggccaacctggctgctatggagcaatcccgaatgcttgcacaaactttagcaagtaataatgatcccaagtttcaggtaaaagaaggtttagcatcccaatccagtggctgggctgatgaatttcaaacacagtacaaagctaatgcaaactcatgggcggatcagtttgcacgtgaagagctttcacaaggggcggataagtgggttagtgagttctctagtcaacataatcaaggtgcgctaaatgagagctgggttgatgagttctcgaaattaaatgtcactgatgaatgggcagaggaattcagtggaggtggttttggcgaaagctctgctgatccgtgggtagatgagttccaagaacacttgtcatctttcaaacaaagttcaggcgcctctcgaggggtttatgtttattctgagaacaacccgtatgttggtcaccctaatccaatgcaagaaggacaggagctcttccgcaagggcctcttaagtgaagctgttcttgctttagaggctgaagttttgaagaatcctgataatgctgaaggttggaggttgttaggcataacacatgcagaaaatgatgatgaccaacaggccattgcagcaatgatgcgtgcgttggaagctaatccgacaaaccttgaagttcttcttgctcttggtgttagtcacacaaatgaattggagcagggagaagcattaaggtatctttataggtggcttcagaatcatccaaaatatggtggccttgtccctccgcagtcaactgattcaccttatggtcctgatgttgttagattgtttaatgacgctgctcagatgtcacctgaagatgcagatgttcatgtagttctgggagtcttatacaacctatcaagagagtatgataaagctataacttcatttaagacagcagtacagctcaaaccacaggactactcactctggaacaagcttggtgcaacccaagcaaacagcatccagagtgctgatgcaatattggcgtatcagcaggcactagacttgaaacccaactacgtgcgtgcatgggcgaacatgggaatcagctatgccaaccagggtctgtatgaggattccattcgatactatgtaagggcagttacaatgaacccaaaagctgacaacgcttggcagtacttgaggatttctcttggcaacgcttcaagagctgacatgattgccgcatgcgacgcccgcaacctcgacgctcttcagaaagagtttcctctctgagtcctccctagctttctccagcagcgatctccatggaaatggaattggaggaactaggaagtgagggggaacaacatcccgtcgatgtgtgaagtatcattgcaagaaggcaatagtggcaaagggggaattatacatctgtaagtacacaggaataaaggaatggttgagtaataaattgtttttagggcgaaccactgcttgttttataaagttaatataaaaaatgcaatgcgggtgcttcttggtggtggtgccagatcgagtttaactgagacgatccaaattaaattccatggtccacgccacgggtcctgctgggccgtta

SEQ ID NO: 208776 - DNA, 2611 bp, Zea Mays
ccgcaaagctaccgccgcagtgccgcacggcgactccgactctgtctcctgcgcggctccagctcaccctctcctcacatcgaggcggaccggcccacgtcgccggcaaccgaaacgtcggccgtagcctcgcacctccggcatcggcgagcgcgcgcgcccgtccggcggcggagatggcgctgcggcacctggtcacgggccagaacaactgcgcgccggacggcgcctcgtcgtccaaccccctcaacgccctcgccaacgccttccttggccagtcctccaaggcgcagtcaataaaggaacttcctggttctgttagtgttccatctacatctggcttcagcgcgcctgctcccttgtcaaacatccctggttcagaaaatgagttcaaacaagaccagcgaccttttgtgcagggctctgactttattcatggtggtcctgctaatgattggattaagtcttttcggcctccgggggttcctgaacttggtggaatagaagcacactttccagattttgagcaaatttataacaatgcaggaacaacctttcagccgccattggatggtccaccacaaagagtgttgtctggtgtcttgcattcctttctcacaagtggcccagctggtgtgccatttcaacctcttccagtaccagctgctcttggtttatctgaaagtgacaaacagtgcatacgtgatcgtagctgcataatggcacggcatattttttctgaccaaccggaagaatatatacaggctcaggtcaatactttgctgcattcgcttgatatagacaaccgtatgagaggacctatgcatggacaatacccagaactacaggagtactggaaccagtcccaaagttctatgggtcctgccctgatgcataataccgctgataaatggattactgagtttggcaaacaaaataataatccggaaaattgggcaaagtctttcgaacaacaatatggccccaatgggtgggcctctgagtttgaacagtctcagatggccatgggccagatgggaggagtgaacatggccaacctggctgctatggagcaatcccgaatgcttgcacaaactttagcaagtaataatgatcccaagtttcagctttcacaaggggcggataagtgggttagtgagttctctagtcaacataatcaaggtgcgctaaatgagagctgggttgatgagttctcgaaattaaatgtcactgatgaatgggcagaggaattcagtggaggtggttttggcgaaagctctgctgatccgtgggtagatgagttccaagaacacttgtcatctttcaaacaaagttcaggcgcctctcgaggggtttatgtttattctgagaacaacccgtatgttggtcaccctaatccaatgcaagaaggacaggagctcttccgcaagggcctcttaagtgaagctgttcttgctttagaggctgaagttttgaagaatcctgataatgctgaaggttggaggttgttaggcataacacatgcagaaaatgatgatgaccaacaggccattgcagcaatgatgcgtgcgttggaagctaatccgacaaaccttgaagttcttcttgctcttggtgttagtcacacaaatgaattggagcagggagaagcattaaggtatctttataggtggcttcagaatcatccaaaatatggtggccttgtccctccgcagtcaactgattcaccttatggtcctgatgttgttagattgtttaatgacgctgctcagatgtcacctgaagatgcagatgttcatgtagttctgggagtcttatacaacctatcaagagagtatgataaagctataacttcatttaagacagcagtacagctcaaaccacaggactactcactctggaacaagcttggtgcaacccaagcaaacagcatccagagtgctgatgcaatattggcgtatcagcaggcactagacttgaaacccaactacgtgcgtgcatgggcgaacatgggaatcagctatgccaaccagggtctgtatgaggattccattcgatactatgtaagggcagttacaatgaacccaaaagctgacaacgcttggcagtacttgaggatttctcttggcaacgcttcaagagctgacatgattgccgcatgcgacgcccgcaacctcgacgctcttcagaaagagtttcctctctgagtcctccctagctttctccagcagcgatctccatggaaatggaattggaggccagtaacatttttgtatttgcctgttgattcttctgtttttattttgcttaagtgttgttgggtaaatgtataggaactaggaagtgagggggaacaacatcccgtcgatgtgtgaagtatcattgcaagaaggcaatagtggcaaagggggaattatacatctgtaagtacacaggaataaaggaatggttgagtaataaattgtttttagggcgaaccactgcttgttttataaagttaatataaaaaatgcaatgcgggtgcttcttggtggtggtgccagatcgagtttaactgagacgatccaaattaaattccatggtccacgccacgggtcctgctgggccgtta

SEQ ID NO: 208777 - DNA, 2564 bp, Zea Mays
accgccgcagtgccgcacggcgactccgactctgtctcctgcgcggctccagctcaccctctcctcacatcgaggcggaccggcccacgtcgccggcaaccgaaacgtcggccgtagcctcgcacctccggcatcggcgagcgcgcgcgcccgtccggcggcggagatggcgctgcggcacctggtcacgggccagaacaactgcgcgccggacggcgcctcgtcgtccaaccccctcaacgccctcgccaacgccttccttggccagtcctccaaggcgcagtcaataaaggaacttcctggttctgttagtgttccatctacatctggcttcagcgcgcctgctcccttgtcaaacatccctggttcagaaaatgagttcaaacaagaccagcgaccttttgtgcagggctctgactttattcatggtggtcctgctaatgattggattaagtcttttcggcctccgggggttcctgaacttggtggaatagaagcacactttccagattttgagcaaatttataacaatgcaggaacaacctttcagccgccattggatggtccaccacaaagagtgttgtctggtgtcttgcattcctttctcacaagtggcccagctggtgtgccatttcaacctcttccagtaccagctgctcttggtttatctgaaagtgacaaacagtgcatacgtgatcgtagctgcataatggcacggcatattttttctgaccaaccggaagaatatatacaggctcaggtcaatactttgctgcattcgcttgatatagacaaccgtatgagaggacctatgcatggacaatacccagaactacaggagtactggaaccagtcccaaagttctatgggtcctgccctgatgcataataccgctgataaatggattactgagtttggcaaacaaaataataatccggaaaattgggcaaagtctttcgaacaacaatatggccccaatgggtgggcctctgagtttgaacagcatcagtctcagatggccatgggccagatgggaggagtgaacatggccaacctggctgctatggagcaatcccgaatgcttgcacaaactttagcaagtaataatgatcccaagtttcagctttcacaaggggcggataagtgggttagtgagttctctagtcaacataatcaaggtgcgctaaatgagagctgggttgatgagttctcgaaattaaatgtcactgatgaatgggcagaggaattcagtggaggtggttttggcgaaagctctgctgatccgtgggtagatgagttccaagaacacttgtcatctttcaaacaaagttcaggcgcctctcgaggggtttatgtttattctgagaacaacccgtatgttggtcaccctaatccaatgcaagaaggacaggagctcttccgcaagggcctcttaagtgaagctgttcttgctttagaggctgaagttttgaagaatcctgataatgctgaaggttggaggttgttaggcataacacatgcagaaaatgatgatgaccaacaggccattgcagcaatgatgcgtgcgttggaagctaatccgacaaaccttgaagttcttcttgctcttggtgttagtcacacaaatgaattggagcagggagaagcattaaggtatctttataggtggcttcagaatcatccaaaatatggtggccttgtccctccgcagtcaactgattcaccttatggtcctgatatgcagatgttcatgtagttctgggagtcttatacaacctatcaagagagtatgataaagctataacttcatttaagacagcagtacagctcaaaccacaggactactcactctggaacaagcttggtgcaacccaagcaaacagcatccagagtgctgatgcaatattggcgtatcagcaggcactagacttgaaacccaactacgtgcgtgcatgggcgaacatgggaatcagctatgccaaccagggtctgtatgaggattccattcgatactatgtaagggcagttacaatgaacccaaaagctgacaacgcttggcagtacttgaggatttctcttggcaacgcttcaagagctgacatgattgccgcatgcgacgcccgcaacctcgacgctcttcagaaagagtttcctctctgagtcctccctagctttctccagcagcgatctccatggaaatggaattggaggccagtaacatttttgtatttgcctgttgattcttctgtttttattttgcttaagtgttgttgggtaaatgtataggaactaggaagtgagggggaacaacatcccgtcgatgtgtgaagtatcattgcaagaaggcaatagtggcaaagggggaattatacatctgtaagtacacaggaataaaggaatggttgagtaataaattgtttttagggcgaaccactgcttgttttataaagttaatataaaaaatgcaatgcgggtgcttcttggtggtggtgccagatcgagtttaactgagacgatccaaattaaattccatggtccacgccacgggtcctgctgggccgtta

SEQ ID NO: 208778 - DNA, 2620 bp, Zea Mays
gtcacaaaccgaggcccagcaaaatttccccgttcttgcttcccctccgtgtccactctcgatcttcccttccccctcggcgccggtctccaaacccgcttccgcaattcgtaccgcttccggttccgggggcgggcgggcagcaccgtctcggctctcggatactatggcttccggcgaggggtgggaggcggcggtgcgggcggaggtgggcgccgttgcctggtgggacgacctggacagcgccgacctccgcgccaggttcaaggccttcacggggcagcgcagcgactggcctcagcccacggtcctcttctggaaggaccttctcctccgcgtcgccaggcgactccgcgtctgctccgcccctgcccaccacgtgacgagcgcttggttcgcgcgccccggggggctcacgccgctatgcttgccgcaagttctggaagagatgcgtgcggatggggacgtactgctgaaatccgagctgattgatccatcctcaacgaacctgcaccagctggtcaggagggtgagactcatgaccatcagctccaggaaggcggtttggcaggaggatatcctcgtgttcaaattgttgattgaggaacgagctgccgatattgctaggcaattgagtgactctcattggacatcgacatgtgttgtcacgattagcaaattcaatagcttctttgttgacatggatgatgctcatattgcattatgttttttgacgcaacatgggaaagctaggtaccttttgggcaggaaacaagaccctattgagggtgtcaaggttgcactcactgcttcacaagttcctgctgtatccaaacttgaccatgacaccttgcacttagtctggacagaagagaagttgcaagaacagcttgatgtgcttgatcgacgatgggagatttcaaggcgaagggcattggcatccttcaagtctggagataaactagctgcttatcgttatgtgaggcagtctaaattattctcacaaagccggagcagatgcacacagttgttggaaaggattgaagaagtcatcagcctaattgctagtgctgaatcaaataagaaggtttatgaggcaatacaaattggtatcctggcaatgaaggacaacactgtcagcatagatgaggttaacatccacatgaaggagattgatgagcttgttgctgcacaaagagaagttgatgctgcccttgtaccactccagtcgttagatgatgaaggagatattgatgaagagttcagcaagcttgaagcagaattgcaggatgacgtccctcatattcatgttcaagaaccaatggcaccttccaacgaggaatcacctgatgaagtggttgaatcattgagccataacatgtcaagaattagactggagcccatctaaatgctccattttacgtttaatcaatttgacctgtacatagtgtgatctagtcaaatcatctagtcccaacaatgtgtcttatgtttcttgttacaccatccttataaaagggcaattctgttgcagatattcctcaatgttgcctgctgttttattgagcctccatggttcacctcctacattttttttgaaacggtggtttcaataccctaaaaacttagttcatatactgtttgatgcatatcgtttagtgactggcattttactttattttctcgatttcagcgcttatgctgtccataaatttagttattttcagtgcactgaatctgtggttcatatttgtatatggcatctattggagaaattgaagaacacatcttatcataggagaatcttgtgtaaatggtatagggttttttaggaatcaatgaaatgtatcactctttgtgatgttgatttgtattgtggcaggttttaagttcatcctttcataaagttgacttcctacaaaaatgaactgtctttgttgaactgtgacccgttcttatcattgctacctcaatggtgatggaaaagggagaagaatggatggatcatctgcaggtgcctctcattaagtattggcaacataagtgatttgtctgagatctattctatcttcatgatgatgctggcctttccggaccagtctttctccatatgagagagttgatcagggcatggataggtgctgactgctgaccaaaagaacaagtcgggatggagtagtaaaatatctgttatacaaaagcagaggaggaaaagaaaagataggcgtaggataagctggcaaggcacatagcatttcctcgatttgaggggatcaagatccatcaatggacgatctgaagataggcctgaaaactgacgacaacacctagtcctgaatgataagacctgaattattggaggggactttgcttgtgctttctccacatgcatagatgcatgaatgtatcagatgcctgtccacaccagtcttcaaagttatgtcacatcacgaataaaatagtttactgtagagtgatttgtgtgcaatggaaaacataagattaaaatgccagggcagatgactagtactagcagtacaccgtgatgcatgctttctttttctaggccaaagatgtacgtactttaagactttatcaagtccagcatttcagattaaaa

SEQ ID NO: 208779 - DNA, 2420 bp, Zea Mays
gtcacaaaccgaggcccagcaaaatttccccgttcttgcttcccctccgtgtccactctcgatcttcccttccccctcggcgccggtctccaaacccgcttccgcaattcgtaccgcttccggttccgggggcgggcgggcagcaccgtctcggctctcggatactatggcttccggcgaggggtgggaggcggcggtgcgggcggaggtgggcgccgttgcctggtgggacgacctggacagcgccgacctccgcgccaggttcaaggccttcacggggcagcgcagcgactggcctcagcccacggtcctcttctggaaggaccttctcctccgcgtcgccaggcgactccgcgtctgctccgcccctgcccaccacgtgacgagcgcttggttcgcgcgccccggggggctcacgccgctatgcttgccgcaagttctggaagagatgcgtgcggatggggacgtactgctgaaatccgagctgattgatccatcctcaacgaacctgcaccagctggtcaggagggtgagactcatgaccatcagctccaggaaggcggtttggcaggaggatatcctcgtgttcaaattgttgattgaggaacgagctgccgatattgctaggcaattgagtgactctcattggacatcgacatgtgttgtcacgattagcaaattcaatagcttctttgttgacatggatgatgctcatattgcattatgttttttgacgcaacatgggaaagctaggtaccttttgggcaggaaacaagaccctattgagggtgtcaaggttgcactcactgcttcacaagttcctgctgtatccaaacttgaccatgacaccttgcacttagtctggacagaagagaagttgcaagaacagcttgatgtgcttgatcgacgatgggagatttcaaggcgaagggcattggcatccttcaagtctggagataaactagctgcttatcgttatgtgaggcagtctaaattattctcacaaagccggagcagatgcacacagttgttggaaaggattgaagaagtcatcagcctaattgctagtgctgaatcaaataagaaggtttatgaggcaatacaaattggtatcctggcaatgaaggacaacactgtcagcatagatgaggttaacatccacatgaaggagattgatgagcttgttgctgcacaaagagaagttgatgctgcccttgtaccactccagtcgttagatgatgaaggagatattgatgaagagttcagcaagcttgaagcagaattgcaggatgacgtccctcatattcatgttcaagaaccaatggcaccttccaacgaggaatcacctgatgaagtggttgaatcattgagccataacatgtcaagaattagactggagcccatctaaatgctccattttacgtttaatcaatttgacctgtacatagtgtgatctagtcaaatcatctagtcccaacaatgtgtcttatgtttcttgttacaccatccttataaaagggcaattctgttgcagatattcctcaatgttgcctgctgttttattgagcctccatggttcacctcctacattttttttgaaacggttttaagttcatcctttcataaagttgacttcctacaaaaatgaactgtctttgttgaactgtgacccgttcttatcattgctacctcaatggtgatggaaaagggagaagaatggatggatcatctgcaggtgcctctcattaagtattggcaacataagtgatttgtctgagatctattctatcttcatgatgatgctggcctttccggaccagtctttctccatatgagagagttgatcagggcatggataggtgctgactgctgaccaaaagaacaagtcgggatggagtagtaaaatatctgttatacaaaagcagaggaggaaaagaaaagataggcgtaggataagctggcaaggcacatagcatttcctcgatttgaggggatcaagatccatcaatggacgatctgaagataggcctgaaaactgacgacaacacctagtcctgaatgataagacctgaattattggaggggactttgcttgtgctttctccacatgcatagatgcatgaatgtatcagatgcctgtccacaccagtcttcaaagttatgtcacatcacgaataaaataggtagggaaaagcaatcctgtacctccatcaagtgatacaataatgttagataccataactagcttatcctcttacacagtttactgtagagtgatttgtgtgcaatggaaaacataagattaaaatgccagggcagatgactagtactagcagtacaccgtgatgcatgctttctttttctaggccaaagatgtacgtactttaagactttatcaagtccagcatttcagattaaaa

SEQ ID NO: 208780 - DNA, 2174 bp, Zea Mays
gtcacaaaccgaggcccagcaaaatttccccgttcttgcttcccctccgtgtccactctcgatcttcccttccccctcggcgccggtctccaaacccgcttccgcaattcgtaccgcttccggttccgggggcgggcgggcagcaccgtctcggctctcggatactatggcttccggcgaggggtgggaggcggcggtgcgggcggaggtgggcgccgttgcctggtgggacgacctggacagcgccgacctccgcgccaggttcaaggccttcacggggcagcgcagcgactggcctcagcccacggtcctcttctggaaggaccttctcctccgcgtcgccaggcgactccgcgtctgctccgcccctgcccaccacgtgacgagcgcttggttcgcgcgccccggggggctcacgccgctatgcttgccgcaagttctggaagagatgcgtgcggatggggacgtactgctgaaatccgagctgattgatccatcctcaacgaacctgcaccagctggtcaggagggtgagactcatgaccatcagctccaggaaggcggtttggcaggaggatatcctcgtgttcaaattgttgattgaggaacgagctgccgatattgctaggcaattgagtgactctcattggacatcgacatgtgttgtcacgattagcaaattcaatagcttctttgttgacatggatgatgctcatattgcattatgttttttgacgcaacatgggaaagctaggtaccttttgggcaggaaacaagaccctattgagggtgtcaaggttgcactcactgcttcacaagttcctgctgtatccaaacttgaccatgacaccttgcacttagtctggacagaagagaagttgcaagaacagcttgatgtgcttgatcgacgatgggagatttcaaggcgaagggcattggcatccttcaagtctggagataaactagctgcttatcgttatgtgaggcagtctaaattattctcacaaagccggagcagatgcacacagttgttggaaaggattgaagaagtcatcagcctaattgctagtgctgaatcaaataagaaggtttatgaggcaatacaaattggtatcctggcaatgaaggacaacactgtcagcatagatgaggttaacatccacatgaaggagattgatgagcttgttgctgcacaaagagaagttgatgctgcccttgtaccactccagtcgttagatgatgaaggagatattgatgaagagttcagcaagcttgaagcagaattgcaggatgacgtccctcatattcatgttcaagaaccaatggcaccttccaacgaggaatcacctgatgaagtggttttaagttcatcctttcataaagttgacttcctacaaaaatgaactgtctttgttgaactgtgacccgttcttatcattgctacctcaatggtgatggaaaagggagaagaatggatggatcatctgcaggtgcctctcattaagtattggcaacataagtgatttgtctgagatctattctatcttcatgatgatgctggcctttccggaccagtctttctccatatgagagagttgatcagggcatggataggtgctgactgctgaccaaaagaacaagtcgggatggagtagtaaaatatctgttatacaaaagcagaggaggaaaagaaaagataggcgtaggataagctggcaaggcacatagcatttcctcgatttgaggggatcaagatccatcaatggacgatctgaagataggcctgaaaactgacgacaacacctagtcctgaatgataagacctgaattattggaggggactttgcttgtgctttctccacatgcatagatgcatgaatgtatcagatgcctgtccacaccagtcttcaaagttatgtcacatcacgaataaaataggtagggaaaagcaatcctgtacctccatcaagtgatacaataatgttagataccataactagcttatcctcttacacagtttactgtagagtgatttgtgtgcaatggaaaacataagattaaaatgccagggcagatgactagtactagcagtacaccgtgatgcatgctttctttttctaggccaaagatgtacgtactttaagactttatcaagtccagcatttcagattaaaa

SEQ ID NO: 208781 - DNA, 2139 bp, Zea Mays
gtcacaaaccgaggcccagcaaaatttccccgttcttgcttcccctccgtgtccactctcgatcttcccttccccctcggcgccggtctccaaacccgcttccgcaattcgtaccgcttccggttccgggggcgggcgggcagcaccgtctcggctctcggatactatggcttccggcgaggggtgggaggcggcggtgcgggcggaggtgggcgccgttgcctggtgggacgacctggacagcgccgacctccgcgccaggttcaaggccttcacggggcagcgcagcgactggcctcagcccacggtcctcttctggaaggaccttctcctccgcgtcgccaggcgactccgcgtctgctccgcccctgcccaccacgtgacgagcgcttggttcgcgcgccccggggggctcacgccgctatgcttgccgcaagttctggaagagatgcgtgcggatggggacgtactgctgaaatccgagctgattgatccatcctcaacgaacctgcaccagctggtcaggagggtgagactcatgaccatcagctccaggaaggcggtttggcaggaggatatcctcgtgttcaaattgttgattgaggaacgagctgccgatattgctaggcaattgagtgactctcattggacatcgacatgtgttgtcacgattagcaaattcaatagcttctttgttgacatggatgatgctcatattgcattatgttttttgacgcaacatgggaaagctaggtaccttttgggcaggaaacaagaccctattgagggtgtcaaggttgcactcactgcttcacaagttcctgctgtatccaaacttgaccatgacaccttgcacttagtctggacagaagagaagttgcaagaacagcttgatgtgcttgatcgacgatgggagatttcaaggcgaagggcattggcatccttcaagtctggagataaactagctgcttatcgttatgtgaggcagtctaaattattctcacaaagccggagcagatgcacacagttgttggaaaggattgaagaagtcatcagcctaattgctagtgctgaatcaaataagaaggtttatgaggcaatacaaattggtatcctggcaatgaaggacaacactgtcagcatagatgaggttaacatccacatgaaggagattgatgagcttgttgctgcacaaagagaagttgatgctgcccttgtaccactccagtcgttagatgatgaaggagatattgatgaagagttcagcaagcttgaagcagaattgcaggatgacgtccctcatattcatgttcaagaaccaatggcaccttccaacgaggaatcacctgatgaagtggttgaatcattgagccataacatgtcaagaattagactggagcccatctaaatgctccattttacgtttaatcaatttgacctgtacatagtgtgatctagtcaaatcatctagtcccaacaatgtgtcttatgtttcttgttacaccatccttataaaagggcaattctgttgcagatattcctcaatgttgcctgctgttttattgagcctccatggttcacctcctacattttttttgaaacggtggtttcaataccctaaaaacttagttcatatactgtttgatgcatatcgtttagtgactggcattttactttattttctcgatttcagcgcttatgctgtccataaatttagttattttcagtgcactgaatctgtggttcatatttgtatatggcatctattggagaaattgaagaacacatcttatcataggagaatcttgtgtaaatggtatagggttttttaggaatcaatgaaatgtatcactctttgtgatgttgatttgtattgtggcaggttttaagttcatcctttcataaagttgacttcctacaaaaatgaactgtctttgttgaactgtgacccgttcttatcattgctacctcaatggtgatggaaaagggagaagaatggatggatcatctgcaggtgcctctcattaagtattggcaacataagtgatttgtctgagatctattctatcttcatgatgatgctggcctttccggaccagtctttctccatatgagagaggttacactttaagaattgaa

SEQ ID NO: 208782 - DNA, 3285 bp, Zea Mays
ggaacatccgagcgttttaggtaagccgcgtagaacgtccgtttcgagtttaagcgttgcttaagcgtcctaatcgcgttttaggacgttttacgcgtgctgaggacgttctacccgtcccgggcctttcctgggcctttaggtttttctctaggtggttggacgcacgtcgccctccactctcctctcctccaacggctcagccggccgccgccctcctctctcctctcctccaacatctctggcgcgtctctcctctcctcagccatggaggcacagccggccgtcggccgtggaggcacagcagacctgcgccaccgccggccgcctaccccacagcagatctgcgcccaagaccagcagccagccagccatcctctgcggctccactccgccagcgccctagaccagcagccagctatcctccacctccactgctctctattttgatcatttgtgaatttcaatggcaacaaatagtgaggcattgtctgtcggtcaaagtaatgactcctatgacccactcaaagatcagtcacgaaggccaaagtcaaatgatccaggatggaaatatgctcatggtcttaatattgatgagttcgatgatggttactgatcatgcataaaagtcgtaacttgtgtggttgaacttgatctgtttctttttatgctatttggtttgtgaactcaagtactcaacttatgtattaacttattctatatttgaacttctatgtcaagtctgaaaagacgtttcaacgttcgtttaaatgtttaaatgttaaaaaggtggttcataatgttttaccgctttaataaccatgaccccaaaacactgcctagacgacagatataatggggcagagggaatatctttcgtgtatctcaactttcaaaaggactgcctttcgtgtattggttggttgtcttctatagattgcaaactcctgaagagtacatgacccagcagatgatacttttttggccagttttgtacacagaagtgcattaatatcgctggttgcccaaaggtgatccatctactttcaacacattaataacacaacatgtaaacagtgaataggttattatgattttctatatatgaccttttgaattgggaaggggctacccagcctattgcttcctgctagtgctacgagatctgacaatttcatgctattggattctccatcacttcctcacacctttctggtactgctgccccttctgccttttgtacttgtgatgtcaatttttttaggatctcaaattcctacatttggctgttggatgttgttcagtgttgaaaattacgtcacacaatcattggtatattaatatttaatatagcaaccagaaggtctagattaaatcgtaaactgaataaggttctgtactatgggttaatactgaactccatgaattgtactatgatcatagtggagtttgataaatgctagtgcaaaaatttgctgacttgtaaagaattatcttttgatagttcaaggcgaagggcattggcatccttcaagtctggagataaactagctgcttatcgttatgtgaggcagtctaaattattctcacaaagccggagcagatgcacacagttgttggaaaggattgaagaagtcatcagcctaattgctagtgctgaatcaaataagaaggtttatgaggcaatacaaattggtatcctggcaatgaaggacaacactgtcagcatagatgaggttaacatccacatgaaggagattgatgagcttgttgctgcacaaagagaagttgatgctgcccttgtaccactccagtcgttagatgatgaaggagatattgatgaagagttcagcaagcttgaagcagaattgcaggatgacgtccctcatattcatgttcaagaaccaatggcaccttccaacgaggaatcacctgatgaagtggttgaatcattgagccataacatgtcaagaattagactggagcccatctaaatgctccattttacgtttaatcaatttgacctgtacatagtgtgatctagtcaaatcatctagtcccaacaatgtgtcttatgtttcttgttacaccatccttataaaagggcaattctgttgcagatattcctcaatgttgcctgctgttttattgagcctccatggttcacctcctacattttttttgaaacggtggtttcaataccctaaaaacttagttcatatactgtttgatgcatatcgtttagtgactggcattttactttattttctcgatttcagcgcttatgctgtccataaatttagttattttcagtgcactgaatctgtggttcatatttgtatatggcatctattggagaaattgaagaacacatcttatcataggagaatcttgtgtaaatggtatagggttttttaggaatcaatgaaatgtatcactctttgtgatgttgatttgtattgtggcaggttttaagttcatcctttcataaagttgacttcctacaaaaatgaactgtctttgttgaactgtgacccgttcttatcattgctacctcaatggtgatggaaaagggagaagaatggatggatcatctgcaggtgcctctcattaagtattggcaacataagtgatttgtctgagatctattctatcttcatgatgatgctggcctttccggaccagtctttctccatatgagagagttgatcagggcatggataggtgctgactgctgaccaaaagaacaagtcgggatggagtagtaaaatatctgttatacaaaagcagaggaggaaaagaaaagataggcgtaggataagctggcaaggcacatagcatttcctcgatttgaggggatcaagatccatcaatggacgatctgaagataggcctgaaaactgacgacaacacctagtcctgaatgataagacctgaattattggaggggactttgcttgtgctttctccacatgcatagatgcatgaatgtatcagatgcctgtccacaccagtcttcaaagttatgtcacatcacgaataaaataggtagggaaaagcaatcctgtacctccatcaagtgatacaataatgttagataccataactagcttatcctcttacacagtttactgtagagtgatttgtgtgcaatggaaaacataagattaaaatgccagggcagatgactagtactagcagtacaccgtgatgcatgctttctttttctaggccaaagatgtacgtactttaagactttatcaagtccagcatttcagattaaaa

SEQ ID NO: 208783 - DNA, 2996 bp, Zea Mays
ggaacatccgagcgttttaggtaagccgcgtagaacgtccgtttcgagtttaagcgttgcttaagcgtcctaatcgcgttttaggacgttttacgcgtgctgaggacgttctacccgtcccgggcctttcctgggcctttaggtttttctctaggtggttggacgcacgtcgccctccactctcctctcctccaacggctcagccggccgccgccctcctctctcctctcctccaacatctctggcgcgtctctcctctcctcagccatggaggcacagccggccgtcggccgtggaggcacagcagacctgcgccaccgccggccgcctaccccacagcagatctgcgcccaagaccagcagccagccagccatcctctgcggctccactccgccagcgccctagaccagcagccagctatcctccacctccactgctctctattttgatcatttgtgaatttcaatggcaacaaatagtgaggcattgtctgtcggtcaaagtaatgactcctatgacccactcaaagatcagtcacgaaggccaaagtcaaatgatccaggatggaaatatgctcatggtcttaatattgatgagttcgatgatggttactgatcatgcataaaagtcgtaacttgtgtggttgaacttgatctgtttctttttatgctatttggtttgtgaactcaagtactcaacttatgtattaacttattctatatttgaacttctatgtcaagtctgaaaagacgtttcaacgttcgtttaaatgtttaaatgttaaaaaggtggttcataatgttttaccgctttaataaccatgaccccaaaacactgcctagacgacagatataatggggcagagggaatatctttcgtgtatctcaactttcaaaaggactgcctttcgtgtattggttggttgtcttctatagattgcaaactcctgaagagtacatgacccagcagatgatacttttttggccagttttgtacacagaagtgcattaatatcgctggttgcccaaaggtgatccatctactttcaacacattaataacacaacatgtaaacagtgaataggttattatgattttctatatatgaccttttgaattgggaaggggctacccagcctattgcttcctgctagtgctacgagatctgacaatttcatgctattggattctccatcacttcctcacacctttctgttcaaggcgaagggcattggcatccttcaagtctggagataaactagctgcttatcgttatgtgaggcagtctaaattattctcacaaagccggagcagatgcacacagttgttggaaaggattgaagaagtcatcagcctaattgctagtgctgaatcaaataagaaggtttatgaggcaatacaaattggtatcctggcaatgaaggacaacactgtcagcatagatgaggttaacatccacatgaaggagattgatgagcttgttgctgcacaaagagaagttgatgctgcccttgtaccactccagtcgttagatgatgaaggagatattgatgaagagttcagcaagcttgaagcagaattgcaggatgacgtccctcatattcatgttcaagaaccaatggcaccttccaacgaggaatcacctgatgaagtggttgaatcattgagccataacatgtcaagaattagactggagcccatctaaatgctccattttacgtttaatcaatttgacctgtacatagtgtgatctagtcaaatcatctagtcccaacaatgtgtcttatgtttcttgttacaccatccttataaaagggcaattctgttgcagatattcctcaatgttgcctgctgttttattgagcctccatggttcacctcctacattttttttgaaacggtggtttcaataccctaaaaacttagttcatatactgtttgatgcatatcgtttagtgactggcattttactttattttctcgatttcagcgcttatgctgtccataaatttagttattttcagtgcactgaatctgtggttcatatttgtatatggcatctattggagaaattgaagaacacatcttatcataggagaatcttgtgtaaatggtatagggttttttaggaatcaatgaaatgtatcactctttgtgatgttgatttgtattgtggcaggttttaagttcatcctttcataaagttgacttcctacaaaaatgaactgtctttgttgaactgtgacccgttcttatcattgctacctcaatggtgatggaaaagggagaagaatggatggatcatctgcaggtgcctctcattaagtattggcaacataagtgatttgtctgagatctattctatcttcatgatgatgctggcctttccggaccagtctttctccatatgagagagttgatcagggcatggataggtgctgactgctgaccaaaagaacaagtcgggatggagtagtaaaatatctgttatacaaaagcagaggaggaaaagaaaagataggcgtaggataagctggcaaggcacatagcatttcctcgatttgaggggatcaagatccatcaatggacgatctgaagataggcctgaaaactgacgacaacacctagtcctgaatgataagacctgaattattggaggggactttgcttgtgctttctccacatgcatagatgcatgaatgtatcagatgcctgtccacaccagtcttcaaagttatgtcacatcacgaataaaataggtagggaaaagcaatcctgtacctccatcaagtgatacaataatgttagataccataactagcttatcctcttacacagtttactgtagagtgatttgtgtgcaatggaaaacataagattaaaatgccagggcagatgactagtactagcagtacaccgtgatgcatgctttctttttctaggccaaagatgtacgtactttaagactttatcaagtccagcatttcagattaaaa

SEQ ID NO: 208784 - DNA, 784 bp, Zea Mays
ataaacgaccacgcgcccacggtgaactgcttgtctagggttcagggataaaagaccccgctcctgtcccgcaggcaactgagcgccggcccgcccgcccgcccaccagccgccgccgcaccgccaccgcgcgacctcccttcttcgccgcaaaccgctctgggcgcttgaagaagatcgtgaagaagcgggtcaagcagttcaagaggccccacctcgaccgctacaagtgcctcaagccaagctggcgcaggcccaagggtatcgactcccgtgtcaggcggaagttcaagggatgcaccttgatgcctaacattggatatggctctgacaagaagaccaggcactacctccccaacaagtttaagaagtttgtcgtgcacaatgtttctgagctggagttgcttatgatgcacaacaggacatactgcgctgaaatcgcacacaacgtgtccactaagaagcgcaaggaaatcgtggagcgagctgctcagcttgacattgtggtcaccaataagcttgcccgtctccgcagccaggaagatgagtaaactgtttctagcagtagttttggaatggtgcggctttagaggacttgctgtgtatgatgattcagttatcatttctttttgcttcatgattctgagtactgtgaacccacttgctatcagtagcaacttaactgtggcactgttattatcttttaccatctcaaatacagcagttttgatataaaaaaaatgtctgcattggttaatgttaatctgtgtttttgttggcgccc

SEQ ID NO: 208785 - DNA, 574 bp, Zea Mays
tttagaatcttgctccaaccgcccgaagtccaagctggcgcaggcccaagggtatcgactcccgtgtcaggcggaagttcaagggatgcaccttgatgcctaacattggatatggctctgacaagaagaccaggcactacctccccaacaagtttaagaagtttgtcgtgcacaatgtttctgagctggagttgcttatgatgcacaacaggacatactgcgctgaaatcgcacacaacgtgtccactaagaagcgcaaggaaatcgtggagcgagctgctcagcttgacattgtggtcaccaataagcttgcccgtctccgcagccaggaagatgagtaaactgtttctagcagtagttttggaatggtgcggctttagaggacttgctgtgtatgatgattcagttatcatttctttttgcttcatgattctgagtactgtgaacccacttgctatcagtagcaacttaactgtggcactgttattatcttttaccatctcaaatacagcagttttgatataaaaaaaatgtctgcattggttaatgttaatctgtgtttttgttggcgccc

SEQ ID NO: 208786 - DNA, 2209 bp, Zea Mays
gctaccttatcccatccgatttctgcagtgcagagggccattcgctcgaaggaggcaccccctagttgatgctgcactggtttcagagattcgaagatgcatagacaatggcattgagttccgtggtgatttactaaatttcagaaaagatggatctccagtgatgaacagattgcatctgacccctatttatggagatgatgaaaccataacccattatatgggcattcaattcttcactgatgctaatgttgatttgggaccattgccctgttcaatgacaaaggaaccagtgaggtcaacacggtttgctctagataacacatttcgacccatttctacgaggccagagcacagcaatttctgcccgggaatattctagtctcttccaattaacggatgaagtgctttgccaaaagtatactgtcaagattgtcaccaagagatatagcatctgtgagctctgtgtgcaggcgattgtatgatttgacaagaaatgaagatctttggagaatggtttgccagaacgcttggggtagtgagaccactcgagctcttgagacagtgcctgccgcaagaaggctgggttggggtcggctggcaagagaactgacaaccctggaagctgttgcctggaggaaattgacagttgggggtgcagtggaaccatctcgatgcaatttcagtgcctgtgctgtagggaatcgtgttgttctctttggtggggaaggtgttaacatgcaaccgatgaatgacacatttgtattagatttaaacgctagcaatccagagtggaggcatatcgatgtgagtgcagctcctccaggtcgctggggccatactctatcatgcttaaatggctcctggttggttgtttttggtgggtgtggaaggcagggtctgcttaacgatgtattcatgctggatttggatgcaaaacaaccaacctggcgtgagatacctggagttgcacccccagttccacgttcatggcacagctcctgcactttggatggaacgaagttggttgtttctggtggctgtgctgattcaggtgtactcctcagtgacacatatcttcttgatgtagccatggataggccagtttggagagaagttcctgcatcctggaaaccaccttctaggctggggcactcaatgtctgtttatggtggcaggaagatcctgatgtttggtggtcttgctaagagcggccctctgcggctccggtctagtgatgtgtacacaatggacttgagtgaagaagagttttgctggcgatgcctcactggtagtggaatgcctggggctggaaatccagctggtgcaggcccacctcctcgcctcgatcatgttgctgtgagcctgccaggcggaagaattttgatatttggcggctcagtggcaggtcttcactcagcgtcacagctttatctgttggatccaactgaagaaaagccgacctggagaatattgaatattcctggtcgtcctccccgtttcgcctggggccacagcacctgtgttgttggaggaacaaaggcgatagtgcttggtggacaaactggagaagagtggatgcttacagaaatacatgagctttctttggtcagccgctcagtttgagttctggaatggtttgtagtcatgttccttgcaaattagatgcggcttcttatgcaacctgaagtttgattgccgtcttcagaagaactagaagaatgaatgctgggcatactgaatcttctggcagctacctggcggacttggaagatgaaatggcatcgactggtttgctcgctttgtgtagaaaaggggtagtgatatgttcatttttattgccgtttgtttggccttttttaccagataattacaattcataagctactactgttgtggaatgagtagcaaattttatatgtattctcagaagttcaagacttgcaatatgttaggaaaacaaaagactgcactgtatatagtttaatcttttgatgtacggtacgtggacaacttgatgctgctgtcttgtggcacaggcacacagctagatggcattatgtatggtgatcactgatcaaccatgtttttttttgtagaacttgtataatatgtagaagtttcaatctggtgagcttagctcagaatcggtttacttgtcttctgtttcacatgtttgcattatcatggacatgattatgaacagcgg

SEQ ID NO: 208787 - DNA, 308 bp, Zea Mays
gagttcaagttttaagcccagcagagatcaaggatttcttggaagaggtggagtaagctgtctgttgatgatactagttcggacaacaatagcagtgtcacttatgagcagccaacctgaagattgtcttggttttattactctgtaaactgatttgctccagcgccatgtggtggttacatttgaaccctcctcaacgcatactgtagacaatgagataacgtaggatggatgatgtatttgacatactttgcaacttgtttatgtgatgcacgttcttgcggacagtatcgatacccagttgtagg

SEQ ID NO: 208788 - DNA, 2957 bp, Zea Mays
cgtagatttcatcctatgcctactgtataaattcattctgcatcctgaaagatctttcatacaaacccctagtgatagtaaaagtaagtaaacaaacaagctagtagtaaatattctactcaatctacaataaaggatgccatggcaggtccttgccaaaaaatataataggataaacaaagatgtcaggttaactaactaactatggatcttcaggtcccccagggcaacaactgtgcaccgctcgctgccttctctaccgtgaccgagagggtgagagctcccagcccttcctcctgtagccaagatatatacctaaaggttgaacaagcagcagcagaggcaaagccgttagccaatctgctgttgcgtgttgcaccgatcaacgtcggttcccagcgcttgctcgtcaagcgtgtcctgctgctgttctctgctcctgcttgccgcgagagctcctctcgctcatctacccaaggtcctctcggcgccgagatgtccgacagcaacgacttcgtcgagctgctatgggagaacggccaggcggtggtgcacgggaggaggaagcagcatccccaggccgccttcccgcccttcacctgcggcgcggccagcagcagtagagctcaagaaaaccagccgggtactaccgacccggtctcgctgttcaagacgggaggcctcttcgccgacttctcgtccggcctagacgccgcccgtggcaacggtgaccttgacgacaccgtgccctggatccactgccccatcgtcgaggaagacagcgccgcacccgcacctgccctcgcggagggctacagcccagatttcttctcggagctccatgcagcggcgttagcagcggcggcggcagagacgaacctcagccctctgccaccaccggtccagcacaacagaagcaccccggttgccaccaccagcagaggaccagaaccctcgaaggaagccccgcgcataccagtaccaggtccaggcagcaggcccgagccacaatctgagttcgcggccaccaggaaacctcggccggagagcggtggagagggattgatgaacttctccctcttctctaggcctgcagccttggtccgggcaagcctacagaggccaccgccaccgcagacaggcactgacaaggtgtccaatgtcaccacgagcacccgcgtggagtcgacggttctacagtcggctagtgggccaagaatcgcccctgtgttcacggaccagaggacggcgtggtcacaatccaaggaggtgcggttttcatgcgcaccagcgctggcggctggtaacctgcaccaggatatgcctctgggaagacctggcaacaacatgactccccaggggaaaatggagaccaaaaaggcttgtgaggttgcagtcgctactccatcgctctgctccggcaatggcgagtcctggcgcgaacaaaagaggaagagtcaggccgaatgttctgcaagtcaagacgatgatcttgatgatgagtccggtgggatgcgaggatcaggcggcagaggtacgaagcgcagccgcaccgcggaggtgcacaatttgtccgaaaggaggagaagggacaggatcaatgagaaaatgcgcgccctgcaagagctcatccccaactgcaacaagattgacaaagcctccatgctggatgaagcgatcgagtacctcaaaaccctccagcttcaagttcagatgatggccatgggaagtggactgtgcattcctcccatgctgctgccgcgagccatgcagctgcaaattccttcaattgctcatttccatcatctcggcatgggattgggttatgggatgggtgtcctcgatatgaacagcacagcggcagttccatttcagcccatccctggtgctcactatacttgtccgatgatcccaggcacgccaccacaaggtcttggaattggaatgcctggcacaaacacgatgccagtgtttggactccctgggcaagcaatccatccctcagcgtctagcgtacagccattcccatcgttggcgggtcttcctgttaggccaaacctggcacctcaagtcccagccgtcatggctaacatggtgcaggagcaacagcaaggcgtagcgactcagcagcagcagagtctgaataatgaagctcaacagaaagcaaataccggagatccacaaatactacaaaaatagatgaagagatcttcgccagtaatcagtttctggatggtggtggcaacaggactaatactatagggagaaatgaggctgaaacataaaaacggtcagcaagtgccagtctcgactaacaagctgcaggtgtgaatatcagcaccaactcatcatggaagagcttaacgagtttcatgattcacgaagcagatctatcacttgaaaaaggtccaatcaatcaagatggatttggtggcgggatgtctagcttagcgagctaagatgctccaaagttttgtgtaaaatgtagatggaaccttgttacaagtaacatttcttggcagcgatgccgttttcaggtgttttttttttttgttgcttcactgaagttttcttgagtcaatatatcttattttcccagaccttaagtgatcatatgcacaaagatatctgtgtggctctgctttaactctatctcttcacaaataataatgagctaataactgttcagagctgcatccttaagcaaatatgcaaccacattattctgcagatgtatgcatagggccagaaaagcagtaatatgaaagttttgaaaatttccagtaatgacaccatacttaaatatcttttgaacatcaaggagcagaaatgaattaattcacatagatgatctgtatagtcaatataatttagccgaagttatgttctagactgcttagtttgccacaaaaaaaataagaatagaagatgtaatccatattctggtcaatcagagt

SEQ ID NO: 208789 - DNA, 2141 bp, Zea Mays
cgacggcagctccacgcgctggcatagccgtctgttctcagcaaacccacccgtctgttctcgtcgtggcggccgccctgtccccattccccaatccctgtcgccgtgtccctaatccggctccgacaatcccacgcccagcagtccagctccagcaccaccagcgccgccctgccccacgcggccacacccaggacccagcggccagcactactgccaggctggcagcgcgcggaggtccagcgccagccgccagcaccaggcttccaggtctctagtgactcgatctcaagcaaaggcgtttcgggatgtttatcatggatcgatcgatcatggcggatggggagacatcggcggaggaaaagaggaggtggacggggccaccagaggcgcaggagttggaggagacaaagaggaggcggacggggccaccagaggcgcaggagttggaggagcgcctggactctctcagggacaaaattgcggccgcaagtcttgtcgctggcagccgattcggcgaggagcagcgacggtccttgttgcaggagtggttgcgcctcgcatctgccaagttggatctggatctctcaggcataagcgagtttgacctatcagcagaggcgttgccttggttgatgccgccggaggaggcagacaagaggacgacgcacacgcggcaagaggcgcaggagttggaggagcgcatgacctgtctgcggttgctattcgaggacgcagcagatgacagaattctcgccagaagggagcttggagcagcagccgacgagttcctgctccgcttgacgacgcgtcaacaggccttgacgcgcgagtactcgcgcctcgccaacctgaagaggcctctggatctctccggcatgactgaggccgaccgggcggcggaggcagagaggctgagggaggagaagctgcagaaggcgcgtcaactccaggaccagggggacatgagcggcgcccgcgagtgtgaaggtctggcacgcatcatcgacttcgatgtcaagcagggcggcgaatacctcaacagtatctgctgtgtcggcaacatctacaccttcgaccacacagaggagtcgcccgttggtccgatgagatttaccaacagaccctggcaagacaagatgtgtgtgaattgtgcgtcgataaacatcctatctgtcaagattgcatgctcggatatcgacttccccatccaagtctatggcaccgttgttgccagggactgcatcgactacaagtgtgtttacctcttccgccgagataatgaccattgccaactcatcagctctaatgctcagtactgtggatgtgacatatgacgtttgtggaatgtgcggtggaggcaactgttgcagctgaagttacacagggggaattctttggagcaatgactgcccacaccactagaagcaagaggaggattgtgctgtttgatagccaagtaggaggtgataaatgtcatggtatgattcaattgatgcgacctgttgtatcggtctctgtgatggacaagctgaaaattttcgtaacgaccgctgctggtgtctctacaggcattgaagttactcctagatggaatggtggacacgaatttgtactcactttaggtgacgctacgatttgtgtgaaggttacttggtcgatggtagatccacggctttaaatgggttcgcctgttcgttgttaagcatcatcggtggaagtgtagtagtgctcttgctctggtttgttgtctgaggctgttggagtctagataagtataacagtgttcacactatcatgcccgtcctgttatttagtgaaccttaatttgtctaatgttgctactcttgttatttattgaaccttagtttattctagttgcattggaagggtttattctactcttgttatttgtctaagtgcatcaattttttgtgtggtggtggtggggttctgttgctgggttctcaggtaatattttaaataaaacctgaaaatccaggcagatctcaccttttggtgcggccatggtggtcttcaccttttgctggattctcatgcttgtttgaggcagatatgatgagtggctacaaacaaactggagcgttcaggtgtgcgagcatccagagctgaacggaatt

SEQ ID NO: 208790 - DNA, 2353 bp, Zea Mays
tggagacaagctttgaagattgacgttggggctgataattgtctaggaattatcttgtttagtactgtaaagaggtctggagactaaggatgctaggataaatgctatgcgttcagctatatctgagacatttcctgagcccaatcggaggttgctgcagagaattttaaaaatgatgcacactgttgcatctcacacttctgaaaatcgaatgactgcatcggcagttgctgcctgcatggcgcctcttctgttgcgtccacttctggctggtgaatgtgagatggatgaggtatttgatatggatggtgacgattctgcgcagcttcttgctgcagcaaatgccgcaaacagtgctcaaggaattgtcgcaactctcttggaggaatatgagggcatttttcatgatgaacacctcagatgttccttgtcacctgaatctcaaattgaagatagtggtactgaagcatcaactgatgatggtaatttggaagccaagggcaatggatttcatgatgcagaaaatgatgtagatcaagaaatggatgatgacaatggcgtggaacgtatacttagtgggaaattgagtgagagcagtggatatgctggcagtgacctctatgactacaaggcagtcaatgctgaggagtcagatgctgaacgccctgtgaagatgttggaaggaaatttgaatttgagcaaagtacagaacagcctttcaactgaaaatggttcagcgaatgtggatagcttactaagcgaaaataatccttctaacccaacagttggtcacgagactttgtctatgggggagatcctttcttcttttgatcctggaatttctgtaccgacccatagtcctgaatattctgtagagagacagacaaacaaaactaatggatctcacccacatgtgaagcggagtaacttttgggggaggaataatgcaaggaagggccaaaactctgaatcagtcgattcatctggagaagaagagcttgctattcaaagactagagattgcgaagaatgatctgcaaaacagaattgcaaaagaggctagagggaatgcaattctacaggcgagtttggaaagaagaaaacaagcgctacatgaacgcagattggctttggaacaggatgtctccaggttgcaagaacaactgcaagctgaaagggatctgcgagctgcattggaggttggcttgagcatgtcttctggacagttttcaagtgctcgttcgatggacgtgaagacaaaggcagaacttgaggagattgctctcgctgaagctgatgttgcaaggttaaaacagaaggttgcagagcttcacctccaactcaatcaacaacgtcaacaccagtatggctctgtagtagatgcaaatgatcgtcatcaccgcctccctggtcatttctcacagcaaaactttgttcaacaaggatttgatatgaaccttgctttctgcaatcaagagaagcagagaaatgaggagagttcggtggagtcatcacaatggagaaacatcaagcagcatgtgctaccttatggttcttcgaggccactcacacgaaagctttcatttgatgcctcctcaagtgaatcaaggggcacagaaccctcaacaagtatgtcaacagagaacacctctgtgtccatcaacgtcccaaagctggcagagggcattgaatttgggaggcaaccaatggtcacatcctccactttggtagagctaacaactagactagatttcttcaaggagcgaaggtcgcaactgatggaacaacttcatagccttgatttgggacgtggatctgctccgcagggctttccattcaagccaccctctccttggaaccacccgaggtaggaggatgaccgtttgatttcatgattgtaaattcttcagtagtggttcttttctccccgcctggcgattgcagaaaactgcatatacgagtgtaaatgtattttgctcttcgatatggttttagctttcgtgttgtgcgaggatagctccttaagtgggatgtgtgatatagtcttttctgtataacacgttgtcatggagagatgccttttagacaagtttttccagtgttgtggcggtgtatatgtattttgtgcgacttggcgaagaaattgaataggttgactgcttgtatggccgtttgattcatgcctagggcaaaggacaggatgaggaaaactgggatcaaatgagaacccagcacgagtttataaataattcgggggtaggcttgaggctgtgttttattttatccttgcaattagttcccatcgccagtggcttgattccgctccgtgttgtttgtctgctagtggcttccag

SEQ ID NO: 208791 - DNA, 2998 bp, Zea Mays
cagcgccattgctgccatcgcattcacagcgctaccgtctgcgtcgctttcctttcctccctttccctcgccgtaccaccacccgctcctcttctccgcctctgcctcctcctgcagaagccgccgcacaaaacccaaaccctaaccgccgcccctccgaggcgcgccagatcggcggcggcgcccactgctgctgctccggatccaatgcagcggctgccgtagcgcgggagctgccgatctgaggcggcggcggcggcgctggcgcaggtgggacagggatgtcgtctgcgccggtggcgggggcggcgttcgagcggtaccagcagcgcggaggtggcggccccgcggcggccaacggcaacacggttttcaagagtgggcctcttttcatatcatccaaagggattggatggaaatcatggaagaaacgttggttcatcctcacaagaacatcattggttttcttcaagagtgatcctagtaccttgccccagagaggtggtgaagtgaatgttactctaggagggattgatttgaacaattctgggagtgtggtagtcagagaagacaagaagttattgactgtacttttcccagatggccgtgatggtcgtgcattcactcttaaggcagaaacttctgaagacttgtttgagtggaaaacagcattggaagaagctcttgcacaagctccaaatgcagctcttgtgatgggacataatgggatatttcgtaatgacacagctgacacatatgaaggagctattccaaattggagagagaagagaccgatcaagtcattggtgacaggcaggccaattctgcttgcacttgaggatattgatggcagcccttcttttttagaaaaagccctgcgctttcttgagaaacatggaataaaggtggaaggaattttgaggcagtctgcagataattttaaaaatgatgcacactgttgcatctcacacttctgaaaatcgaatgactgcatcggcagttgctgcctgcatggcgcctcttctgttgcgtccacttctggctggtgaatgtgagatggatgaggtatttgatatggatggtgacgattctgcgcagcttcttgctgcagcaaatgccgcaaacagtgctcaaggaattgtcgcaactctcttggaggaatatgagggcatttttcatgatgaacacctcagatgttccttgtcacctgaatctcaaattgaagatagtggtactgaagcatcaactgatgatggtaatttggaagccaagggcaatggatttcatgatgcagaaaatgatgtagatcaagaaatggatgatgacaatggcgtggaacgtatacttagtgggaaattgagtgagagcagtggatatgctggcagtgacctctatgactacaaggcagtcaatgctgaggagtcagatgctgaacgccctgtgaagatgttggaaggaaatttgaatttgagcaaagtacagaacagcctttcaactgaaaatggttcagcgaatgtggatagcttactaagcgaaaataatccttctaacccaacagttggtcacgagactttgtctatgggggagatcctttcttcttttgatcctggaatttctgtaccgacccatagtcctgaatattctgtagagagacagacaaacaaaactaatggatctcacccacatgtgaagcggagtaacttttgggggaggaataatgcaaggaagggccaaaactctgaatcagtcgattcatctggagaagaagagcttgctattcaaagactagagattgcgaagaatgatctgcaaaacagaattgcaaaagaggctagagggaatgcaattctacaggcgagtttggaaagaagaaaacaagcgctacatgaacgcagattggctttggaacaggatgtctccaggttgcaagaacaactgcaagctgaaagggatctgcgagctgcattggaggttggcttgagcatgtcttctggacagttttcaagtgctcgttcgatggacgtgaagacaaaggcagaacttgaggagattgctctcgctgaagctgatgttgcaaggttaaaacagaaggttgcagagcttcacctccaactcaatcaacaacgtcaacaccagtatggctctgtagtagatgcaaatgatcgtcatcaccgcctccctggtcatttctcacagcaaaactttgttcaacaaggatttgatatgaaccttgctttctgcaatcaagagaagcagagaaatgaggagagttcggtggagtcatcacaatggagaaacatcaagcagcatgtgctaccttatggttcttcgaggccactcacacgaaagctttcatttgatgcctcctcaagtgaatcaaggggcacagaaccctcaacaagtatgtcaacagagaacacctctgtgtccatcaacgtcccaaagctggcagagggcattgaatttgggaggcaaccaatggtcacatcctccactttggaaccacccgaggtaggaggatgaccgtttgatttcatgattgtaaattcttcagtagtggttcttttctccccgcctggcgattgcagaaaactgcatatacgagtgtaaatgtattttgctcttcgatatggttttagctttcgtgttgtgcgaggatagctccttaagtgggatgtgtgatatagtcttttctgtataacacgttgtcatggagagatgccttttagacaagtttttccagtgttgtggcggtgtatatgtattttgtgcgacttggcgaagaaattgaataggttgactgcttgtatggccgtttgattcatgcctagggcaaaggacaggatgaggaaaactgggatcaaatgagaacccagcacgagtttataaataattcgggggtaggcttgaggctgtgttttattttatccttgcaattagttcccatcgccagtggcttgattccgctccgtgttgtttgtctgctagtggcttccag

SEQ ID NO: 208792 - DNA, 3248 bp, Zea Mays
cggacagcgccattgctgccatcgcattcacagcgctaccgtctgcgtcgctttcctttcctccctttccctcgccgtaccaccacccgctcctcttctccgcctctgcctcctcctgcagaagccgccgcacaaaacccaaaccctaaccgccgcccctccgaggcgcgccagatcggcggcggcgcccactgctgctgctccggatccaatgcagcggctgccgtagcgcgggagctgccgatctgaggcggcggcggcggcgctggcgcaggtgggacagggatgtcgtctgcgccggtggcgggggcggcgttcgagcggtaccagcagcgcggaggtggcggccccgcggcggccaacggcaacacggttttcaagagtgggcctcttttcatatcatccaaagggattggatggaaatcatggaagaaacgttggttcatcctcacaagaacatcattggttttcttcaagagtgatcctagtaccttgccccagagaggtggtgaagtgaatgttactctaggagggattgatttgaacaattctgggagtgtggtagtcagagaagacaagaagttattgactgtacttttcccagatggccgtgatggtcgtgcattcactcttaaggcagaaacttctgaagacttgtttgagtggaaaacagcattggaagaagctcttgcacaagctccaaatgcagctcttgtgatgggacataatgggatatttcgtaatgacacagctgacacatatgaaggagctattccaaattggagagagaagagaccgatcaagtcattggtgacaggcaggccaattctgcttgcacttgaggatattgatggcagcccttcttttttagaaaaagccctgcgctttcttgagaaacatggaataaaggtggaaggaattttgaggcagtctgcagatgtggaagaagttgacaggagattgcaagaatatgaacaaggaaggactgagttttcagcagatgaagacgctcatgttgtcggtgactgtgtaaagcatgttctccgagagctgccatcatcccccgtgcctgcttcttgctgtacagcattattggaagcgtttcgtctggagactaaggatgctaggataaatgctatgcgttcagctatatctgagacatttcctgagcccaatcggaggttgctgcagagaattttaaaaatgatgcacactgttgcatctcacacttctgaaaatcgaatgactgcatcggcagttgctgcctgcatggcgcctcttctgttgcgtccacttctggctggtgaatgtgagatggatgaggtatttgatatggatggtgacgattctgcgcagcttcttgctgcagcaaatgccgcaaacagtgctcaaggaattgtcgcaactctcttggaggaatatgagggcatttttcatgatgaacacctcagatgttccttgtcacctgaatctcaaattgaagatagtggtactgaagcatcaactgatgatggtaatttggaagccaagggcaatggatttcatgatgcagaaaatgatgtagatcaagaaatggatgatgacaatggcgtggaacgtatacttagtgggaaattgagtgagagcagtggatatgctggcagtgacctctatgactacaaggcagtcaatgctgaggagtcagatgctgaacgccctgtgaagatgttggaaggaaatttgaatttgagcaaagtacagaacagcctttcaactgaaaatggttcagcgaatgtggatagcttactaagcgaaaataatccttctaacccaacagttggtcacgagactttgtctatgggggagatcctttcttcttttgatcctggaatttctgtaccgacccatagtcctgaatattctgtagagagacagacaaacaaaactaatggatctcacccacatgtgaagcggagtaacttttgggggaggaataatgcaaggaagggccaaaactctgaatcagtcgattcatctggagaagaagagcttgctattcaaagactagagattgcgaagaatgatctgcaaaacagaattgcaaaagaggctagagggaatgcaattctacaggcgagtttggaaagaagaaaacaagcgctacatgaacgcagattggctttggaacaggatgttgcaagaacaactgcaagctgaaagggatctgcgagctgcattggaggttggcttgagcatgtcttctggacagttttcaagtgctcgttcgatggacgtgaagacaaaggcagaacttgaggagattgctctcgctgaagctgatgttgcaaggttaaaacagaaggttgcagagcttcacctccaactcaatcaacaacgtcaacaccagtatggctctgtagtagatgcaaatgatcgtcatcaccgcctccctggtcatttctcacagcaaaactttgttcaacaaggatttgatatgaaccttgctttctgcaatcaagagaagcagagaaatgaggagagttcggtggagtcatcacaatggagaaacatcaagcagcatgtgctaccttatggttcttcgaggccactcacacgaaagctttcatttgatgcctcctcaagtgaatcaaggggcacagaaccctcaacaagtatgtcaacagagaacacctctgtgtccatcaacgtcccaaagctggcagagggcattgaatttgggaggcaaccaatggtcacatcctccactttggaaccacccgaggtaggaggatgaccgtttgatttcatgattgtaaattcttcagtagtggttcttttctccccgcctggcgattgcagaaaactgcatatacgagtgtaaatgtattttgctcttcgatatggttttagctttcgtgttgtgcgaggatagctccttaagtgggatgtgtgatatagtcttttctgtataacacgttgtcatggagagatgccttttagacaagtttttccagtgttgtggcggtgtatatgtattttgtgcgacttggcgaagaaattgaataggttgactgcttgtatggccgtttgattcatgcctagggcaaaggacaggatgaggaaaactgggatcaaatgagaacccagcacgagtttataaataattcgggggtaggcttgaggctgtgttttattttatccttgcaattagttcccatcgccagtggcttgattccgctccgtgttgtttgtctgctagtggcttccag

SEQ ID NO: 208793 - DNA, 3257 bp, Zea Mays
gggaggggaaagacggacagcgccattgctgccatcgcattcacagcgctaccgtctgcgtcgctttcctttcctccctttccctcgccgtaccaccacccgctcctcttctccgcctctgcctcctcctgcagaagccgccgcacaaaacccaaaccctaaccgccgcccctccgaggcgcgccagatcggcggcggcgcccactgctgctgctccggatccaatgcagcggctgccgtagcgcgggagctgccgatctgaggcggcggcggcggcgctggcgcaggtgggacagggatgtcgtctgcgccggtggcgggggcggcgttcgagcggtaccagcagcgcggaggtggcggccccgcggcggccaacggcaacacggttttcaagagtgggcctcttttcatatcatccaaagggattggatggaaatcatggaagaaacgttggttcatcctcacaagaacatcattggttttcttcaagagtgatcctagtaccttgccccagagaggtggtgaagtgaatgttactctaggagggattgatttgaacaattctgggagtgtggtagtcagagaagacaagaagttattgactgtacttttcccagatggccgtgatggtcgtgcattcactcttaaggcagaaacttctgaagacttgtttgagtggaaaacagcattggaagaagctcttgcacaagctccaaatgcagctcttgtgatgggacataatgggatatttcgtaatgacacagctgacacatatgaaggagctattccaaattggagagagaagagaccgatcaagtcattggtgacaggcaggccaattctgcttgcacttgaggatattgatggcagcccttcttttttagaaaaagccctgcgctttcttgagaaacatggaataaaggtggaaggaattttgaggcagtctgcagatgtggaagaagttgacaggagattgcaagaatatgaacaaggaaggactgagttttcagcagatgaagacgctcatgttgtcggtgactgtgtaaagcatgttctccgagagctgccatcatcccccgtgcctgcttcttgctgtacagcattattggaagcgtttcgtctggagactaaggatgctaggataaatgctatgcgttcagctatatctgagacatttcctgagcccaatcggagaattttaaaaatgatgcacactgttgcatctcacacttctgaaaatcgaatgactgcatcggcagttgctgcctgcatggcgcctcttctgttgcgtccacttctggctggtgaatgtgagatggatgaggtatttgatatggatggtgacgattctgcgcagcttcttgctgcagcaaatgccgcaaacagtgctcaaggaattgtcgcaactctcttggaggaatatgagggcatttttcatgatgaacacctcagatgttccttgtcacctgaatctcaaattgaagatagtggtactgaagcatcaactgatgatggtaatttggaagccaagggcaatggatttcatgatgcagaaaatgatgtagatcaagaaatggatgatgacaatggcgtggaacgtatacttagtgggaaattgagtgagagcagtggatatgctggcagtgacctctatgactacaaggcagtcaatgctgaggagtcagatgctgaacgccctgtgaagatgttggaaggaaatttgaatttgagcaaagtacagaacagcctttcaactgaaaatggttcagcgaatgtggatagcttactaagcgaaaataatccttctaacccaacagttggtcacgagactttgtctatgggggagatcctttcttcttttgatcctggaatttctgtaccgacccatagtcctgaatattctgtagagagacagacaaacaaaactaatggatctcacccacatgtgaagcggagtaacttttgggggaggaataatgcaaggaagggccaaaactctgaatcagtcgattcatctggagaagaagagcttgctattcaaagactagagattgcgaagaatgatctgcaaaacagaattgcaaaagaggctagagggaatgcaattctacaggcgagtttggaaagaagaaaacaagcgctacatgaacgcagattggctttggaacaggatgtctccaggttgcaagaacaactgcaagctgaaagggatctgcgagctgcattggaggttggcttgagcatgtcttctggacagttttcaagtgctcgttcgatggacgtgaagacaaaggcagaacttgaggagattgctctcgctgaagctgatgttgcaaggttaaaacagaaggttgcagagcttcacctccaactcaatcaacaacgtcaacaccagtatggctctgtagtagatgcaaatgatcgtcatcaccgcctccctggtcatttctcacagcaaaactttgttcaacaaggatttgatatgaaccttgctttctgcaatcaagagaagcagagaaatgaggagagttcggtggagtcatcacaatggagaaacatcaagcagcatgtgctaccttatggttcttcgaggccactcacacgaaagctttcatttgatgcctcctcaagtgaatcaaggggcacagaaccctcaacaagtatgtcaacagagaacacctctgtgtccatcaacgtcccaaagctggcagagggcattgaatttgggaggcaaccaatggtcacatcctccactttggaaccacccgaggtaggaggatgaccgtttgatttcatgattgtaaattcttcagtagtggttcttttctccccgcctggcgattgcagaaaactgcatatacgagtgtaaatgtattttgctcttcgatatggttttagctttcgtgttgtgcgaggatagctccttaagtgggatgtgtgatatagtcttttctgtataacacgttgtcatggagagatgccttttagacaagtttttccagtgttgtggcggtgtatatgtattttgtgcgacttggcgaagaaattgaataggttgactgcttgtatggccgtttgattcatgcctagggcaaaggacaggatgaggaaaactgggatcaaatgagaacccagcacgagtttataaataattcgggggtaggcttgaggctgtgttttattttatccttgcaattagttcccatcgccagtggcttgattccgctccgtgttgtttgtctgctagtggcttccag

SEQ ID NO: 208794 - DNA, 3207 bp, Zea Mays
ggagggaggggaaagacggacagcgccattgctgccatcgcattcacagcgctaccgtctgcgtcgctttcctttcctccctttccctcgccgtaccaccacccgctcctcttctccgcctctgcctcctcctgcagaagccgccgcacaaaacccaaaccctaaccgccgcccctccgaggcgcgccagatcggcggcggcgcccactgctgctgctccggatccaatgcagcggctgccgtagcgcgggagctgccgatctgaggcggcggcggcggcgctggcgcaggtgggacagggatgtcgtctgcgccggtggcgggggcggcgttcgagcggtaccagcagcgcggaggtggcggccccgcggcggccaacggcaacacggttttcaagagtgggcctcttttcatatcatccaaagggattggatggaaatcatggaagaaacgttggttcatcctcacaagaacatcattggttttcttcaagagtgatcctagtaccttgccccagagaggtggtgaagtgaatgttactctaggagggattgatttgaacaattctgggagtgtggtagtcagagaagacaagaagttattgactgtacttttcccagatggccgtgatggtcgtgcattcactcttaaggcagaaacttctgaagacttgtttgagtggaaaacagcattggaagaagctcttgcacaagctccaaatgcagctcttgtgatgggacataatgggatatttcgtaatgacacagctgacacatatgaaggagctattccaaattggagagagaagagaccgatcaagtcattggtgacaggcaggccaattctgcttgcacttgaggatattgatggcagcccttcttttttagaaaaagccctgcgctttcttgagaaacatggaataaaggtggaaggaattttgaggcagtctgcagatgtggaagaagttgacaggagattgcaagaatatgaacaaggaaggactgagttttcagcagatgaagacgctcatgttgtcggtgactgtgtaaagcatgttctccgagagctgccatcatcccccgtgcctgcttcttgctgtacagcattattggaagcgtttcgtctggagactaaggatgctaggataaatgctatgcgttcagctatatctgagacatttcctgagcccaatcggaggttgctgcagagttgctgcctgcatggcgcctcttctgttgcgtccacttctggctggtgaatgtgagatggatgaggtatttgatatggatggtgacgattctgcgcagcttcttgctgcagcaaatgccgcaaacagtgctcaaggaattgtcgcaactctcttggaggaatatgagggcatttttcatgatgaacacctcagatgttccttgtcacctgaatctcaaattgaagatagtggtactgaagcatcaactgatgatggtaatttggaagccaagggcaatggatttcatgatgcagaaaatgatgtagatcaagaaatggatgatgacaatggcgtggaacgtatacttagtgggaaattgagtgagagcagtggatatgctggcagtgacctctatgactacaaggcagtcaatgctgaggagtcagatgctgaacgccctgtgaagatgttggaaggaaatttgaatttgagcaaagtacagaacagcctttcaactgaaaatggttcagcgaatgtggatagcttactaagcgaaaataatccttctaacccaacagttggtcacgagactttgtctatgggggagatcctttcttcttttgatcctggaatttctgtaccgacccatagtcctgaatattctgtagagagacagacaaacaaaactaatggatctcacccacatgtgaagcggagtaacttttgggggaggaataatgcaaggaagggccaaaactctgaatcagtcgattcatctggagaagaagagcttgctattcaaagactagagattgcgaagaatgatctgcaaaacagaattgcaaaagaggctagagggaatgcaattctacaggcgagtttggaaagaagaaaacaagcgctacatgaacgcagattggctttggaacaggatgtctccaggttgcaagaacaactgcaagctgaaagggatctgcgagctgcattggaggttggcttgagcatgtcttctggacagttttcaagtgctcgttcgatggacgtgaagacaaaggcagaacttgaggagattgctctcgctgaagctgatgttgcaaggttaaaacagaaggttgcagagcttcacctccaactcaatcaacaacgtcaacaccagtatggctctgtagtagatgcaaatgatcgtcatcaccgcctccctggtcatttctcacagcaaaactttgttcaacaaggatttgatatgaaccttgctttctgcaatcaagagaagcagagaaatgaggagagttcggtggagtcatcacaatggagaaacatcaagcagcatgtgctaccttatggttcttcgaggccactcacacgaaagctttcatttgatgcctcctcaagtgaatcaaggggcacagaaccctcaacaagtatgtcaacagagaacacctctgtgtccatcaacgtcccaaagctggcagagggcattgaatttgggaggcaaccaatggtcacatcctccactttggaaccacccgaggtaggaggatgaccgtttgatttcatgattgtaaattcttcagtagtggttcttttctccccgcctggcgattgcagaaaactgcatatacgagtgtaaatgtattttgctcttcgatatggttttagctttcgtgttgtgcgaggatagctccttaagtgggatgtgtgatatagtcttttctgtataacacgttgtcatggagagatgccttttagacaagtttttccagtgttgtggcggtgtatatgtattttgtgcgacttggcgaagaaattgaataggttgactgcttgtatggccgtttgattcatgcctagggcaaaggacaggatgaggaaaactgggatcaaatgagaacccagcacgagtttataaataattcgggggtaggcttgaggctgtgttttattttatccttgcaattagttcccatcgccagtggcttgattccgctccgtgttgtttgtctgctagtggcttccag

SEQ ID NO: 208795 - DNA, 3248 bp, Zea Mays
gagagagagagaggggagggagggaggggaaagacggacagcgccattgctgccatcgcattcacagcgctaccgtctgcgtcgctttcctttcctccctttccctcgccgtaccaccacccgctcctcttctccgcctctgcctcctcctgcagaagccgccgcacaaaacccaaaccctaaccgccgcccctccgaggcgcgccagatcggcggcggcgcccactgctgctgctccggatccaatgcagcggctgccgtagcgcgggagctgccgatctgaggcggcggcggcggcgctggcgcaggtgggacagggatgtcgtctgcgccggtggcgggggcggcgttcgagcggtaccagcagcgcggaggtggcggccccgcggcggccaacggcaacacggttttcaagagtgggcctcttttcatatcatccaaagggattggatggaaatcatggaagaaacgttggttcatcctcacaagaacatcattggttttcttcaagagtgatcctagtaccttgccccagagaggtggtgaagtgaatgttactctaggagggattgatttgaacaattctgggagtgtggtagtcagagaagacaagaagttattgactgtacttttcccagatggccgtgatggtcgtgcattcactcttaaggcagaaacttctgaagacttgtttgagtggaaaacagcattggaagaagctcttgcacaagctccaaatgcagctcttgtgatgggacataatgggatatttcggagagagaagagaccgatcaagtcattggtgacaggcaggccaattctgcttgcacttgaggatattgatggcagcccttcttttttagaaaaagccctgcgctttcttgagaaacatggaataaaggtggaaggaattttgaggcagtctgcagatgtggaagaagttgacaggagattgcaagaatatgaacaaggaaggactgagttttcagcagatgaagacgctcatgttgtcggtgactgtgtaaagcatgttctccgagagctgccatcatcccccgtgcctgcttcttgctgtacagcattattggaagcgtttcgtctggagactaaggatgctaggataaatgctatgcgttcagctatatctgagacatttcctgagcccaatcggaggttgctgcagagaattttaaaaatgatgcacactgttgcatctcacacttctgaaaatcgaatgactgcatcggcagttgctgcctgcatggcgcctcttctgttgcgtccacttctggctggtgaatgtgagatggatgaggtatttgatatggatggtgacgattctgcgcagcttcttgctgcagcaaatgccgcaaacagtgctcaaggaattgtcgcaactctcttggaggaatatgagggcatttttcatgatgaacacctcagatgttccttgtcacctgaatctcaaattgaagatagtggtactgaagcatcaactgatgatggtaatttggaagccaagggcaatggatttcatgatgcagaaaatgatgtagatcaagaaatggatgatgacaatggcgtggaacgtatacttagtgggaaattgagtgagagcagtggatatgctggcagtgacctctatgactacaaggcagtcaatgctgaggagtcagatgctgaacgccctgtgaagatgttggaaggaaatttgaatttgagcaaagtacagaacagcctttcaactgaaaatggttcagcgaatgtggatagcttactaagcgaaaataatccttctaacccaacagttggtcacgagactttgtctatgggggagatcctttcttcttttgatcctggaatttctgtaccgacccatagtcctgaatattctgtagagagacagacaaacaaaactaatggatctcacccacatgtgaagcggagtaacttttgggggaggaataatgcaaggaagggccaaaactctgaatcagtcgattcatctggagaagaagagcttgctattcaaagactagagattgcgaagaatgatctgcaaaacagaattgcaaaagaggctagagggaatgcaattctacaggcgagtttggaaagaagaaaacaagcgctacatgaacgcagattggctttggaacaggatgtctccaggttgcaagaacaactgcaagctgaaagggatctgcgagctgcattggaggttggcttgagcatgtcttctggacagttttcaagtgctcgttcgatggacgtgaagacaaaggcagaacttgaggagattgctctcgctgaagctgatgttgcaaggttaaaacagaaggttgcagagcttcacctccaactcaatcaacaacgtcaacaccagtatggctctgtagtagatgcaaatgatcgtcatcaccgcctccctggtcatttctcacagcaaaactttgttcaacaaggatttgatatgaaccttgctttctgcaatcaagagaagcagagaaatgaggagagttcggtggagtcatcacaatggagaaacatcaagcagcatgtgctaccttatggttcttcgaggccactcacacgaaagctttcatttgatgcctcctcaagtgaatcaaggggcacagaaccctcaacaagtatgtcaacagagaacacctctgtgtccatcaacgtcccaaagctggcagagggcattgaatttgggaggcaaccaatggtcacatcctccactttggaaccacccgaggtaggaggatgaccgtttgatttcatgattgtaaattcttcagtagtggttcttttctccccgcctggcgattgcagaaaactgcatatacgagtgtaaatgtattttgctcttcgatatggttttagctttcgtgttgtgcgaggatagctccttaagtgggatgtgtgatatagtcttttctgtataacacgttgtcatggagagatgccttttagacaagtttttccagtgttgtggcggtgtatatgtattttgtgcgacttggcgaagaaattgaataggttgactgcttgtatggccgtttgattcatgcctagggcaaaggacaggatgaggaaaactgggatcaaatgagaacccagcacgagtttataaataattcgggggtaggcttgaggctgtgttttattttatccttgcaattagttcccatcgccagtggcttgattccgctccgtgttgtttgtctgctagtggcttccag

SEQ ID NO: 208796 - DNA, 2833 bp, Zea Mays
cgcgaccccgcgccacgccggcgagaaccccgaccactacccggcggggcgagggcgaccaatgcgcgagcgcgcccggcacgcgacccgggtgtcaccgatgccgccgcccacgggtggcgaggaccccgaggccgacgcggcgccctcctgcagtggctcagccgacgaagccgacccccacgagcaggtgctccccaacggcgacatctacacgggccagtggcgcggcgccgtgccccacggcgccggcaagtacctctgggcggacgggtgcatgtatgagggcgagtggcgccgcggcaaggccaccggccgcggcaggttctcctggccctcgggcgccacctacgagggcgagttcctcgacggcttcatgcacggcgccggcacctacgttggtgcctcgggggacacctaccgcggcgtctgggccaagaacctcgagcatggcgccggcgagaaacgctacgctaacggcgactgctacgacggcgagtggcgcgcggggctccccgatggttgcggacgctacgcctggcgcgacggcaccgagtacgccggcggctggcgcgctgggctcatccacggccgcggcacgctcgtctgggccaatggcaatcgctacgatggcggttgggagggcggccgaccccgcgggcagggcacgttccgctgggccgacggcagcctctacgttggcttctggggccgcgaggcgcccagcggcgccgtccaccagaagggcgtttactacccgtccccggcggcgatgggcaactccccccgggcgcgcgacccgagggaggtgtttgcacgtgacctgccggagtgcgtgcgctccggaaccgaggcccaatcagcgctcacgtctctgagatccctcaaatggctgatgcggtcggtcagcgggcgcggcagctcgtcgtctggctggagcaatggctcgggaggcagcctcgtgcacttctgggggtcggacggggaggtcaagtgcgaccttggggacgactggagacggcggagcgtcagagaagggagggggctgccaccaccgtcgcccgctctggttccatacctgcccaacggcgcgcccctgcggttgtccaagaagcagggggtgaccattgccaaagggcataagaactatgagctaatgctcaatctgcagctcgggatcagtaggaaggcaaggtcaagttttattagatctgaaatcatcagcatttgatccaaaagagaaagtgtggacaaaattccctcctgaaggctcaaaacatacccctccacacaattcttgtgatttcaaatggaaggattactgcccaaaggtgttccgaacactccgtaagctgttcaaggttgacccagctgattatatgttgtccctctgtggagatgatgctcttcgtgagctctcatcccctggtaagagtggaagcttcttttacttgacaaatgatgatcgttacatgataaaaacaatgaagaaaggtgaagtgaagatgcttttgaggatgcttcaagcttactacaatcatgtccgtgcatttgaggataccttagtgacaaagttctttggcctacattgtgtgaagtctggatcacaccagaagaaggtccgttttgtcataatgggaaacctgttctgctccgactactccatccataggcggtttgacctgaaaggttcgtcactgggacggacgacggataagccacagacggagattgacgagtacactaccctgaaggatcttgatcttaacttcgtgttccggttgcaaaagcactggtaccaggagttccaaagacaggtcgacagggactgcgagtttctggagcaggaaaatatcatggactatagtcttctggttggtgtacattttagggacactagggataggctattgaccggaggttcattcgatagcgactgcagcagaggatcgtcgcctcacttgtctcgaggagatacggatccaaacaggttagccaagataaaacttgggtctaacatgccgacgagagccgaacggacgatacgaaagggtgactgtgaggtgcagatcatgggagagcctacgggggagttgtacgatgtcatactgtacttcgggatcatagacatcctccaggactacgacatcagcaagaagctcgagcacgcgtacaagtccttccagtacgacccgacgtccatttcggcggtggatccgaagcagtactcgaggcgcttcagggatttcgtgttcaaagcgttccaggaagacaggttcgacttgtgaagggacgcgtgggaagctcgatcgggaggctaccgttgccgctgacacgggttaaccagtgttgagatccgcactgcagcagagcttttggtgaccctacttccacttgcactcgccggattgatgaagctcctgcatgcattgcatgcggagtctccaaggggatttcagctggcactcatgcattcaagtaaaggctccaattcgagataccggtgcgtttcaataagcaggttcaacagtatctttcattacaaaaaaaacagctctgcttttcgggcagctgctatgtcgcactgcacagtgtggcgtagcgcagcgatggcaagctaagcctaagaaaaaaacatacgtgcatatagaaaccactgatattagtgtagacgctgacaacctacggagaaatttgtaattgcagttcagggatgtaaatctttttacgaggcaacaggtcacagttcttattgtctggtagtgatagcagtgtgcgcatttcaatatattctctgatggaattgtcttgggtttggatcataagttgtttc

SEQ ID NO: 208797 - DNA, 1862 bp, Zea Mays
atggggacaacacgtgcggcattgccgagaggaggtgcgagagcgacgcttttggagaaggacgaagacgacgacgagggggcgcgccgcgacgggccctacgccggcggtcggcgcgggccgcggcggcagggcgagaccatagccaagggccacaagaactacgagctcatgctgaacctgcagctcggcatcaggcacgcagtaggaaagcaaggcccaattacacttgatctcaagtcatcagcattcgaccccaaggagaaagtatggacaaggttcccaccggaaggctcgaaatacactcctccacacagttcgtgcgacttcagatggaaggactactgcccgcaagtattccggacgttgcgcaagctgttcaaggtcgatgccgcggactacatgctgtctctctgtggagaccaggctctccgggagctctcgtctccgggcaagagtgggagcttcttctatctcacgagcaacgaccagtacatgatcaagacgatgaagaaatctgaagtgaagatatttctgaagatgattcgagcttattacaaccatgtcagagcgttcgagagcactctggtcaccaagttcttcggtcttcactgtgtcaagttagctggagcgaaccaaaagaaggtccgttttgtcataatgggaaacctgttctgctccgactactccatccataggcggtttgacctgaaaggttcgtcactgggacggacgacggataagccacagacggagattgacgagtacactaccctgaaggatcttgatcttaacttcgtgttccggttgcaaaagcactggtaccaggagttccaaagacaggtcgacagggactgcgagtttctggagcaggaaaatatcatggactatagtcttctggttggtgtacattttagggacactagggataggctattgaccggagaaggttcattcgatagcgactgcagcagaggatcgtcgcctcacttgtctcgaggagatacggatccaaacaggttagccaagataaaacttgggtctaacatgccgacgagagccgaacggacgatacgaaagggtgactgtgaggtgcagatcatgggagagcctacgggggagttgtacgatgtcatactgtacttcgggatcatagacatcctccaggactacgacatcagcaagaagctcgagcacgcgtacaagtccttccagtacgacccgacgtccatttcggcggtggatccgaagcagtactcgaggcgcttcagggatttcgtgttcaaagcgttccaggaagacaggttcgacttgtgaagggacgcgtgggaagctcgatcgggaggctaccgttgccgctgacacgggttaaccagtgttgagatccgcactgcagcagagcttttggtgaccctacttccacttgcactcgccggattgatgaagctcctgcatgcattgcatgcggagtctccaaggggatttcagctggcactcatgcattcaagtaaaggctccaattcgagataccggtgcgtttcaataagcaggttcaacagtatctttcattacaaaaaaaacagctctgcttttcgggcagctgctatgtcgcactgcacagtgtggcgtagcgcagcgatggcaagctaagcctaagaaaaaaacatacgtgcatatagaaaccactgatattagtgtagacgctgacaacctacggagaaatttgtaattgcagttcagggatgtaaatctttttacgaggcaacaggtcacagttcttattgtctggtagtgatagcagtgtgcgcatttcaatatattctctgatggaattgtcttgggtttggatcataagttgtttc

SEQ ID NO: 208798 - DNA, 2111 bp, Zea Mays
ctcgcaacaatatcttctctttcttctgtaaaaatataaaagacccgtctccgtctcgggggagcaggagagggggagaggccaagaacccagccgcgaagccaagcccatctgatccggcccctgctgccctgccccagctcgtctctcaggtcgccttgccgttgccggttccgcgcccgggcccggctcagagtcgcgagctcgtctcgcagatccggcttcgcttgcttgaattctgttctttgggagcaaagaggtgctggccggtggcgtggcttggtgctctggggccggcgagtttttttttttgcgtccgctcgctctgcctgtagtcttcttgctgcggcggcggggtggagatgggggtggcgggggagaagttccagctggggacggtgggggcactcagcctctcggtggtgtcctccgtctccatcgtcatctgcaacaaggctctcatgagctcccttggcttcaacttcgccactactttgacaagctggcatctcctggttacattctgttctctccatgtggcattatgtatgaagctgtttgagcacaaacctttcgatgcaaggactgtcatgggattcggagtgctcaatggcatatctattggacttcttaacttgagtctgggtttcaattctgttggtttctatcaggtatgcatcccttttctgtttgtattcagccaaacttaaggtttattgggtgacctggcaccgacttcttattcggcactcatagcatgacatgttatcatcggtaaaggtatatcaggatgggccaaaaacatcgtacaaccatatggtttcaatttgacgctatttatgtcactacatctcacatgctaattactccaccatgctcataacaaaatactgtttatatgttcagatgacaaagctggccataattccctgtactgttatactggagacccttttcttccggaagaaatttagccggaatatcaagctttcccttagtgtgctccttcttggtgttggtgttgcaactgtaactgatctgcaactcaacgttatgggatctgtactgtccctactggcaatcatcacaacctgcatcgctcagatcatgacaaatacaatacagaagaagttcaaggtatcttcaacacagctcctgtaccagtcatgcccataccaggcattgacgttgttccttgtcggtccattcctcgatggatttttgaccaaccaaaatgtctttgctttcgactacacaactcaagttctgtttttcatcgtgctgtcgtgcctgatttcagtctcggtgaacttcagcacttttctcgtgatcgggaagacgtctcctgtaacctaccaagtccttggccatctgaaaacatgcttggtcctcacctttggctatgtcctgcttcacgacccgtttagctggagaaacatacttgggatcctaatcgcggtaatcgggatggttctgtactcgtacttctgcactagagagactcagcaaaaaccagcagaagcctccccgcaagccgttcaggcaaaggagggtgaatcgaacccgctgatctcggactccctgagcgctgccgaaaatggaggcagtgccaccgacgatgaacctctgaaggtaccaatgtggagctcgaagtactcgaaggcgtgaagtggctgttctggtattagtgcacacggtgctatacagaattcagcgtggtaggcagatactagggttggaaggcaaccctgttcctgttccatttttggccttctattttttcttcttcctggcacaaatactataaatatgtgctgtcagtaaatggatctcactcttgagaggaatacctcagctcgagaccgagtgttctgttctgcctgaaagctagtatttgtttgtgctccactccacgtgtaaagtggtagatggacatgatctcaacagtagtagtttgcattcttttgtactagtgatatacaatatttatgtattcctcgtgttccctaagctctgcatgtcccacaccactaccaagcaggggcggagccaaggggccccagcaggggccatggccccgtccaaggctgtggaatacacatatatatttt

SEQ ID NO: 208799 - DNA, 1417 bp, Zea Mays
atattttgcgtccccaagtgtggtgagccactactttgacaagctggcatctcctggttacattctgttctctccatgtggcattatgtatgaagctgtttgagcacaaacctttcgatgcaaggactgtcatgggattcggagtgctcaatggcatatctattggacttcttaacttgagtctgggtttcaattctgttggtttctatcagatgacaaagctggccataattccctgtactgttatactggagacccttttcttccggaagaaatttagccggaatatcaagctttcccttagtgtgctccttcttggtgttggtgttgcaactgtaactgatctgcaactcaacgttatgggatctgtactgtccctactggcaatcatcacaacctgcatcgctcagatcatgacaaatacaatacagaagaagttcaaggtatcttcaacacagctcctgtaccagtcatgcccataccaggcattgacgttgttccttgtcggtccattcctcgatggatttttgaccaaccaaaatgtctttgctttcgactacacaactcaagttctgtttttcatcgtgctgtcgtgcctgatttcagtctcggtgaacttcagcacttttctcgtgatcgggaagacgtctcctgtaacctaccaagtccttggccatctgaaaacatgcttggtcctcacctttggctatgtcctgcttcacgacccgtttagctggagaaacatacttgggatcctaatcgcggtaatcgggatggttctgtactcgtacttctgcactagagagactcagcaaaaaccagcagaagcctccccgcaagccgttcaggcaaaggagggtgaatcgaacccgctgatctcggactccctgagcgctgccgaaaatggaggcagtgccaccgacgatgaacctctgaaggtaccaatgtggagctcgaagtactcgaaggcgtgaagtggctgttctggtattagtgcacacggtgctatacagaattcagcgtggtaggcagatactagggttggaaggcaaccctgttcctgttccatttttggccttctattttttcttcttcctggcacaaatactataaatatgtgctgtcagtaaatggatctcactcttgagaggaatacctcagctcgagaccgagtgttctgttctgcctgaaagctagtatttgtttgtgctccactccacgtgtaaagtggtagatggacatgatctcaacagtagtagtttgcattcttttgtactagtgatatacaatatttatgtattcctcgtgttccctaagctctgcatgtcccacaccactaccaagcaggggcggagccaaggggccccagcaggggccatggccccgtccaaggctgtggaatacacatatatatttt

SEQ ID NO: 208800 - DNA, 1446 bp, Zea Mays
ctgtccttgagtcacacaaatcacgtcaccagctggacacttggttggcttccacgaaagccacggcactggcaccgcgcgcggtttcccgctgccaccgactcgtgggaccggccggcgctgccctttgacccgcctcgacgtcggtgcctcgcgtcccttcctctcccaccgatcaggcgaacaaatacgcacgcgaacgcaaagaaaaaaaaactgttgttttgttcttgcggagacgagacgagacgaggcgacgcgagtcgcgaggagtcgaggaggatcggggctcaggcaagatgaacaggaagccaggagactgggactgcagggcgtgccagcacctcaacttcagccgccgagacatatgccagcgctgcagcgagccacgtggagttgctgatcgtggcggcggaggaggaggaggcgactacgccagcttcggtggccgcggtggctcctccttcggcggcggctttggcgctgctggctctgacgtccggcctggtgactggtactgctcctgcggcgcgcacaacttcgccagccgctccagctgcttcaagtgctccgcctacaaggaggaggccgctgtgaacagtggcgctggcggctttgacggcgacatgtcacgctcacggggctacggcttcggcagcggtgctgctggtgctggtgctggcgctgcccgtactaccaaccgccccggttggaagtccggagactggatctgcaccagatccggatgcaacgagcacaacttcgccagcaggatggagtgcttcaggtgcaacgcaccgcgggactctggcactgaggtgtaggatcgagcaagttaaaaagtctgcagcgccgaagaaagcgacgacaagaggagtcctcatcacgtcgtaacgtaagagagagagagagtagtggatttgcaacaaaaaaaaaaaaagacggccgcgatgctctgttactagctagctagttttgttcaaccacccatgccgtctcttctcttttattagatttggtttggttctcatagccctttaattaccatttgggacctatgtttgctgttctgtttcccgttcgtctcctccgcatgtttgcgcttggatcgagtcttgtgatgtaaccccccaaaaaacgcttgcttaactagtactgttgcttcttaatatctccgggggcgttcatcttgttcttgctttatggtgtaaggctagctccaacaaggagctttaaaaggttctgtaccctaaatttagaggatcagggtcatctactctctccagcagcgtctctaaatgctgctggatcctttatatatagagtttctctaaacggttttttatctatttgaatactttaaacaaccggtttagtaaaactaaaatatgtataatatatttgagagtatgataaatacgtatgtataaaaaataaaaaatatct

SEQ ID NO: 208801 - DNA, 2833 bp, Zea Mays
atgcacgttatccatggcgcctcgaggagaccccggcgaatgctggcccttggatccaaccgagctagcatgcatgcgcattcgctgccttccaaacggaggaaggggaaattaacaacgcgattacgcgaagccttcaaaaagccagccccctcctctcccttccaggcaacccaaccacaggccacagcgcagcggtgtgtgtgggtgtgtgtctgcgccagagaccaaacaccaacctccccccaccctcgacccatccccacctcgccgccgccgccgccgccgcacggtctccttccccgagatttgaatgcgttaggaagtgcatggggagaaaggatgccagagttgcgtagtggagtccggcagtctcggttgagggcaaagaaggttgaggatcttgtggttcaagaccctactgacaacttggttgtggcggcacctacggtggcaggaagacgtgttccagtgattaacttggatcctgaccagcctcttgaggttcttccaggagctggtgttggtgcccgcgctgcaggtggggcgcagcccattgaagacattgctaataaggtattgaagatggatggtgggagtgctgagaagattgctggaggtgaagatgaagggactacatctccagtcccagagaaggttcaagtaggccattctccacagtacaaggttgaacgcaagttggggaaaggtggttttgggcaagtatatgttggcagaaggatttctgggggaacagagcgcactggacctgatgcttacgaggttgctttgaaatttgagcaccgaaacagcaagggctgcaattatggccctccatatgagtggcaagtttatagtgctctgaacgggtgttatggtgtaccatgggttcattacaaaggtcgacaaggagattattatgttctggtgatggatattctagggcccagcctttgggatgtctggaattcatttgggcagttgatgacacctaatatggttgcttgcattgctgtagaggcaatttctatacttgagaaacttcatgcaaaagggtttgttcatggagacgttaaacccgagaattttctacttggccagcctggatcccctgacgagaaaaaactttttctgattgatcttgggttagcatctagatggaaggaatcagggtcatctggacaacatgttgaatatgatcagaaaccagatattttcagaggtacaataagatacgctagtgtccatgcacatttaggacgtactggtagcagaagggatgatctggaatcattagcatatacattgatatttcttcttagaggaaggttgccgtggcaaggttatcagggcgagaacaagagttttcttgtttgcaagaagaaaatggctacctctccagatctattatgctgtttttgcccaactccattcaaacttttcctggagactgtgacaaacatgaaatttgatgaagaaccaaattactcaaagcttatttcccttttcgatgaattgattgagccccagcatttgaggcctattagaattgatggtgcattgaaggctggacaaaaacgtggaagattacatgtaaatccagaagaagatgagcaaccgaagaagaaagttcgacttggaagcccagcaaatcagtggatttcagtttataatgctagaaggcccatgaagcagagataccattacaatgtagcagatgccaggcttcatcaacacatagagaaggggactggtttcacatcccaagtatatgaactgtcacccatattccttcataaggattggattatggagcagtgggaaaataactactacatcagtgccatagctggtgcaatgaatgggagttccttggtggtcatgtcaaaaggaactccttacactcagcagtcttacaaagttagtgaatcattcccctacaagtggatcaacaagaaatggaaagaaggttttcatgttacatcaatgacaactgcaggaagccgctggggtgtagttatgtcaaggaactctggatactctgaacaggtagtggagttggattttctttatcctagtgaaggtattcaccgacgatgggagaacggatatagaataacttctacagcagctactggcgatcaagctgctttcatattgagtatacctaaaagaaagttaatggatgagacacaagaaactcttagaacatctgcttttccaagcaaccatgtgaaggagaaatgggccaagaacctttacattgcttcaatatgctatggccggacagtgtcatgaggcttgctcggctgcatccctagttgggaagagcatgttctgatgagtatatattgggaaaaaagcagcaatctttgttgctgctctctattaatctctgtatgtgtaggtaacccgttcaagatgaagcaccttacagtggccagagtaggagctcaagaaagaaccgagaggaaggtggaaagcaatcggccaataagcagacgaggagtatgtgatctggctagtagcgggtacaggcgctaatggcgtcaaatgttttgtatcagcatgttttgcttttgcttcgctcctgaccgctgtgcaaagagtagacagcttgtttctttcggaggcaagtcatctgagaaccatcgtgtatagcgtatgatgtcattgtattttctttagtggaggccaagttccatctttccggaactcccaaaatgctaagttattatgcgaggaaacaagtgtactgataaaatcggtgtatcaattccattattcgacaattctcacctgcattaattaatgcaatgctgcattacttatc

SEQ ID NO: 208802 - DNA, 2717 bp, Zea Mays
atgcacgttatccatggcgcctcgaggagaccccggcgaatgctggcccttggatccaaccgagctagcatgcatgcgcattcgctgccttccaaacggaggaaggggaaattaacaacgcgattacgcgaagccttcaaaaagccagccccctcctctcccttccaggcaacccaaccacaggccacagcgcagcggtgtgtgtgggtgtgtgtctgcgccagagaccaaacaccaacctccccccaccctcgacccatccccacctcgccgccgccgccgccgccgcacggtctccttccccgagcctcttgaggttcttccaggagctggtgttggtgcccgcgctgcaggtggggcgcagcccattgaagacattgctaataaggtattgaagatggatggtgggagtgctgagaagattgctggaggtgaagatgaagggactacatctccagtcccagagaaggttcaagtaggccattctccacagtacaaggttgaacgcaagttggggaaaggtggttttgggcaagtatatgttggcagaaggatttctgggggaacagagcgcactggacctgatgcttacgaggttgctttgaaatttgagcaccgaaacagcaagggctgcaattatggccctccatatgagtggcaagtttatagtgctctgaacgggtgttatggtgtaccatgggttcattacaaaggtcgacaaggagattattatgttctggtgatggatattctagggcccagcctttgggatgtctggaattcatttgggcagttgatgacacctaatatggttgcttgcattgctgtagaggcaatttctatacttgagaaacttcatgcaaaagggtttgttcatggagacgttaaacccgagaattttctacttggccagcctggatcccctgacgagaaaaaactttttctgattgatcttgggttagcatctagatggaaggaatcagggtcatctggacaacatgttgaatatgatcagaaaccagatattttcagaggtacaataagatacgctagtgtccatgcacatttaggacgtactggtagcagaagggatgatctggaatcattagcatatacattgatatttcttcttagaggaaggttgccgtggcaaggttatcagggcgagaacaagagttttcttgtttgcaagaagaaaatggctacctctccagatctattatgctgtttttgcccaactccattcaaacttttcctggagactgtgacaaacatgaaatttgatgaagaaccaaattactcaaagcttatttcccttttcgatgaattgattgagccccagcatttgaggcctattagaattgatggtgcattgaaggctggacaaaaacgtggaagattacatgtaaatccagaagaagatgagcaaccgaagaagaaagttcgacttggaagcccagcaaatcagtggatttcagtttataatgctagaaggcccatgaagcagagataccattacaatgtagcagatgccaggcttcatcaacacatagagaagggtaatgaagatggattgttcattagttcagtagcatcttcagccaatctttgggctctcattatggatgcagggactggtttcacatcccaagtatatgaactgtcacccatattccttcataaggattggattatggagcagtgggaaaataactactacatcagtgccatagctggtgcaatgaatgggagttccttggtggtcatgtcaaaaggaactccttacactcagcagtcttacaaagttagtgaatcattcccctacaagtggatcaacaagaaatggaaagaaggttttcatgttacatcaatgacaactgcaggaagccgctggggtgtagttatgtcaaggaactctggatactctgaacaggtagtggagttggattttctttatcctagtgaaggtattcaccgacgatgggagaacggatatagaataacttctacagcagctactggcgatcaagctgctttcatattgagtatacctaaaagaaagttaatggatgagacacaagaaactcttagaacatctgcttttccaagcaaccatgtgaaggagaaatgggccaagaacctttacattgcttcaatatgctatggccggacagtgtcatgaggcttgctcggctgcatccctagttgggaagagcatgttctgatgagtatatattgggaaaaaagcagcaatctttgttgctgctctctattaatctctgtatgtgtaggtaacccgttcaagatgaagcaccttacagtggccagagtaggagctcaagaaagaaccgagaggaaggtggaaagcaatcggccaataagcagacgaggagtatgtgatctggctagtagcgggtacaggcgctaatggcgtcaaatgttttgtatcagcatgttttgcttttgcttcgctcctgaccgctgtgcaaagagtagacagcttgtttctttcggaggcaagtcatctgagaaccatcgtgtatagcgtatgatgtcattgtattttctttagtggaggccaagttccatctttccggaactcccaaaatgctaagttattatgcgaggaaacaagtgtactgataaaatcggtgtatcaattccattattcgacaattctcacctgcattaattaatgcaatgctgcattacttatc

SEQ ID NO: 208803 - DNA, 2698 bp, Zea Mays
atgcacgttatccatggcgcctcgaggagaccccggcgaatgctggcccttggatccaaccgagctagcatgcatgcgcattcgctgccttccaaacggaggaaggggaaattaacaacgcgattacgcgaagccttcaaaaagccagccccctcctctcccttccaggcaacccaaccacaggccacagcgcagcggtgtgtgtgggtgtgtgtctgcgccagagaccaaacaccaacctccccccaccctcgacccatccccacctcgccgccgccgccgccgccgcacggtctccttccccgaggagctggtgttggtgcccgcgctgcaggtggggcgcagcccattgaagacattgctaataaggtattgaagatggatggtgggagtgctgagaagattgctggaggtgaagatgaagggactacatctccagtcccagagaaggttcaagtaggccattctccacagtacaaggttgaacgcaagttggggaaaggtggttttgggcaagtatatgttggcagaaggatttctgggggaacagagcgcactggacctgatgcttacgaggttgctttgaaatttgagcaccgaaacagcaagggctgcaattatggccctccatatgagtggcaagtttatagtgctctgaacgggtgttatggtgtaccatgggttcattacaaaggtcgacaaggagattattatgttctggtgatggatattctagggcccagcctttgggatgtctggaattcatttgggcagttgatgacacctaatatggttgcttgcattgctgtagaggcaatttctatacttgagaaacttcatgcaaaagggtttgttcatggagacgttaaacccgagaattttctacttggccagcctggatcccctgacgagaaaaaactttttctgattgatcttgggttagcatctagatggaaggaatcagggtcatctggacaacatgttgaatatgatcagaaaccagatattttcagaggtacaataagatacgctagtgtccatgcacatttaggacgtactggtagcagaagggatgatctggaatcattagcatatacattgatatttcttcttagaggaaggttgccgtggcaaggttatcagggcgagaacaagagttttcttgtttgcaagaagaaaatggctacctctccagatctattatgctgtttttgcccaactccattcaaacttttcctggagactgtgacaaacatgaaatttgatgaagaaccaaattactcaaagcttatttcccttttcgatgaattgattgagccccagcatttgaggcctattagaattgatggtgcattgaaggctggacaaaaacgtggaagattacatgtaaatccagaagaagatgagcaaccgaagaagaaagttcgacttggaagcccagcaaatcagtggatttcagtttataatgctagaaggcccatgaagcagagataccattacaatgtagcagatgccaggcttcatcaacacatagagaagggtaatgaagatggattgttcattagttcagtagcatcttcagccaatctttgggctctcattatggatgcagggactggtttcacatcccaagtatatgaactgtcacccatattccttcataaggattggattatggagcagtgggaaaataactactacatcagtgccatagctggtgcaatgaatgggagttccttggtggtcatgtcaaaaggaactccttacactcagcagtcttacaaagttagtgaatcattcccctacaagtggatcaacaagaaatggaaagaaggttttcatgttacatcaatgacaactgcaggaagccgctggggtgtagttatgtcaaggaactctggatactctgaacaggtagtggagttggattttctttatcctagtgaaggtattcaccgacgatgggagaacggatatagaataacttctacagcagctactggcgatcaagctgctttcatattgagtatacctaaaagaaagttaatggatgagacacaagaaactcttagaacatctgcttttccaagcaaccatgtgaaggagaaatgggccaagaacctttacattgcttcaatatgctatggccggacagtgtcatgaggcttgctcggctgcatccctagttgggaagagcatgttctgatgagtatatattgggaaaaaagcagcaatctttgttgctgctctctattaatctctgtatgtgtaggtaacccgttcaagatgaagcaccttacagtggccagagtaggagctcaagaaagaaccgagaggaaggtggaaagcaatcggccaataagcagacgaggagtatgtgatctggctagtagcgggtacaggcgctaatggcgtcaaatgttttgtatcagcatgttttgcttttgcttcgctcctgaccgctgtgcaaagagtagacagcttgtttctttcggaggcaagtcatctgagaaccatcgtgtatagcgtatgatgtcattgtattttctttagtggaggccaagttccatctttccggaactcccaaaatgctaagttattatgcgaggaaacaagtgtactgataaaatcggtgtatcaattccattattcgacaattctcacctgcattaattaatgcaatgctgcattacttatc

SEQ ID NO: 208804 - DNA, 4741 bp, Zea Mays
gtcttctctacctggcgctctcccagatcagatcaccaccaccgcccaccgcccaccaccgctcaccgagctcgcggtcgccggagatcaccgttctccggcggccccgcgtacgccggtatcagtaaaggttggttatccacatcgaaaccccagctcgcgcctcccacccgagtcagtcacgccgctaaatttggctcatccgccattcagaccagcgccgctagggttttggacctatggatccgctccggagctacctgggccggatcctcctcgaagagatcacaccggtggtgatggtgctgtccacaccgctcgccgaggccgcctgccgtaagaacggcctcagcttcgtcgacatgctctccccgttctcgctcttcaaaaaaatcgacgtgcccgtgcggacggcgagcgaggttccgtacaggctgcaaatgtttaagatccggatggtttacgcgtccgacgtccggaaggaggactgcgaggtggcagacgagaagattaagcctgtagtttctgaggccaatgagaaggctcttccggatttgctttcagacccgcctcaggctgaagatgtacttggaaagcctgaggccgagctgtgcccattgtggattaagaagttcaatagagaactaatgcgaacactctcattttcggagcatgaaacgtttgaccatcccgtggcatgtcttctagttgtgtcatcaatggacaaagaaccagtcaataaatttgttgatctcttcaacacaaatcagttgccatctcttttgaatgaaggcataatggatccacagattttgaagcattatcttgtacttcatgaccagcaagaggggccacaagacatagctgtgaatgtcttagctgaaatgaggagtacccttggtctgaatgactgtaaattattatgcataaattcgtctacagaagcaggtggtagtaatgctgacaattcatggctaccttataaagctcttgttttgaacaatcatgatggatcctgtattcttagtgtggatgatctgaatgagataaaggacttcatgcaagattttgtttcaaaccatatcatcccctacatggaacaaaagatccgtgtcctcaatcagcagtaccgttttaggtagccacaacaagaaagggttttagaaatcagatcaagaacttgtggtggagaaaaagagatgatgtcccagaagctccaaatgggccaatgtatacattcacctccatagaatcacagatcagagtacttggtgatttcgccttcatgttacgggactacgagcttgccttgtcaaactacagactactcgctactgattataagcttgataaggcttggaagcgatttgctggtgtacaggagatgagtggactttgctatttcattttggatcagtcgaggaaggacgcggagtattgcatggaaaatgccttcagtacatatttgagaattggatcttctggccagagaaatgctactagatgtggcctttggtgggctgaaatgcttaaaacaagaggacagtatagggaagcatctaatgtgtatttccgtgtttctaatgaggaaccttctttgcattctgctgtactgcttgagcaagccgcttgttgctatctattatgcaatccacccatgcttcggaaatacggatttcacctaatcttagctgggaatagctacttcgtgtctgatcagaaacaacatgctgttcgggtgtacagaaatgctttgttcgtttacaaacaaaacccttggagttacatcaacaatcatgtacactttaatattggaaggtggtatggagttctcgggatacttgacgtagccatcaagcacttgcttgaggtcattgcttgtagccatcagtcgctgactacacaaaacatgttcctcaatgattttttccattatgttcagagcatggggaagaaatttgatgtgtacaagctccaacttcctgtttttaacatgtcatctctcaaagttctacatgaggatcatcgcacttatgcatcacatgcagatgttggcgttagtgaaagcacgtggcaggagctggaggaagaattgatcccatcatcatcaattgtcaaaactaattggctggatactcagccaatgagaaaatacaaggactcctgtatttgtgtggctggagaagcagtaaaattgagtgttgaacttaaaaatcccctccaaattcctgttgctgtttctggcatctctattatatgccagctttccagcactttggatgcattaagttctgatgttagtggactggacttggatggtggggaagataaggttaacacagagccatctatttcaatgttggagactgatggagataagtttacattgtcaaagcttgacattgtattaggaggaggtgaaagtaaaagagtgcaacttgatgttactccaaaggttgaaggtattttgaagttggttgggataaggtggactctttcagagtcagtagtaggttatcaatactttgaatttaatgcacagaaaaaaatcaagaaagggaaaagaggcccacaccgttcttggaataacagcctggttgtaatcaagggtttaccaaaacttacaggatctattgatcgcatgcctacaaaagcgtttgctggtgatttaaagctgcttacactaaatctgagaaaccattccgaatatgctgtgaagggtataaaaatgaaacttagcaacccaagatttttaattcccggcgattcatcggacattggcctcaagttcccacactgcttaaagaggcacgtgcaatcagaaagcagtgttgtatcagccaaaactatgaaggacaatttcaagagtctgctctttgcatttcctcaggatatagaaattcaagcaggggcagcactctcttggcctatttggtttcatgcggcaactcctggaaatgtttctctttatatatctctgtattacgaaatggggagttccagtgatattaaataccgtacactacgcatgcacttcaatcttgaggttttgccgtcacttgacgtatccttttctgtaagcacgtcctcatcaagattgcaagagtatattgttcgcatggatgtcatgaacaagactccatcagagtcatttgtgcttcatcagttatcatgtgtcggtgataaatgggcagtttcagcattggcggcgtgcagttcaatcaactctgttgaaacagtatcagaaaatcaggctgtgtcgtacttcttcaaaattaaggattgtgaggcggattcttgtaaagaggcagaaagtgattcctgcacaagcgatatggctttgtgtccaggaagtagcactgatctgtttgacattgcacgatctccttttgttgattttcaccatcaagaaagatgcaggcaagtgaagatggcaaaggggccatgcagccttcttgattttgttctaatctcaaaggcagttgataactcttccaagcctactccagacttcgaactactttctcatcacacatgtcattgcagtgctctaagccagaaccctatatggtggcttatggaagggcctcggacaattagtcatgatttctcaaagtcttattgtgaggctaacctccaattggtcattcacaattcagaagctcataagattttggtgagagtggtcacttttgatgtaattccagagaaaaccgtccatcctcatgactcaaccagtgctcagggtggatggtatgatgtatcactggaaagtgacgtaaaggccatctctagttccaagagtacacatcaagagaagcgatcttcgaagagcattccaccatatgtttggtgttcattgagttgtgctcaaatcgagctccaacctgacagttgtgctagagttcctctaaaagtgtgcatatttgcaccgggcacatacaatttttccaattatgagctgcaatggaaagtgcatctatctgagggaccacatgtgggtgaaaatgagaaccggttatctggcggtggtctaggctatcctttctatgtcactgtccttcaaggtgtctaagtaattatcaggattcaagaagtaccttcttgagcgtcaatatagaccagtgcaaaactcaggaactacacccaattgcaacgggctgatgataataggtgccagccagtccagtttgtgcaaagatctgccccggaagttccctgactgaatatacttggatacgctcatggttctgcttcggtaccgatatatttacacgtcattttgaaggatgagttctggtgagtacatgtatacaattgtcgctgggaacaaaaactaacggtaattgctggtggatttttggcagacagaatataccgatagaagttttgcttgtctaattgttgatggtggctagtaggagcatatactattcctgtacatcctgtttaacttgtcgctgctagacgatttcgcaaatgtagtatgtagtggtagatggatccgataaattttctgtaattttgacgaggtaatcaggcaatcgtctcgagattgttgttgtatgggcgacagtattttttcattgtttgtacaatccttttaaaaatcatcgtctggccttgagcctttatgccatatgggtatatgttgattccccttttcagttcctcgtatcgacgtccagctgtccacatcaggtgcaagtgtctgaggggtgctgttatttttgatattttc

SEQ ID NO: 208805 - DNA, 2331 bp, Zea Mays
ggcatttgttgtttcatataggtgcaacttgatgttactccaaaggttgaaggtattttgaagttggttgggataaggtggactctttcagagtcagtagtaggttatcaatactttgaatttaatgcacagaaaaaaatcaagaaagggaaaagaggcccacaccgttcttggaataacagcctggttgtaatcaagggtttaccaaaacttacaggatctattgatcgcatgcctacaaaagcgtttgctggtgatttaaagctgcttacactaaatctgagaaaccattccgaatatgctgtgaagggtataaaaatgaaacttagcaacccaagatttttaattcccggcgattcatcggacattggcctcaagttcccacactgcttaaagaggcacgtgcaatcagaaagcagtgttgtatcagccaaaactatgaaggacaatttcaagagtctgctctttgcatttcctcaggatatagaaattcaagcaggggcagcactctcttggcctatttggtttcatgcggcaactcctggaaatgtttctctttatatatctctgtattacgaaatggggagttccagtgatattaaataccgtacactacgcatgcacttcaatcttgaggttttgccgtcacttgacgtatccttttctgtaagcacgtcctcatcaagattgcaagagtatattgttcgcatggatgtcatgaacaagactccatcagagtcatttgtgcttcatcagttatcatgtgtcggtgataaatgggcagtttcagcattggcggcgtgcagttcaatcaactctgttgaaacagtatcagaaaatcaggctgtgtcgtacttcttcaaaattaaggattgtgaggcggattcttgtaaagaggcagaaagtgattcctgcacaagcgatatggctttgtgtccaggaagtagcactgatctgtttgacattgcacgatctccttttgttgattttcaccatcaagaaagatgcaggcaagtgaagatggcaaaggggccatgcagccttcttgattttgttctaatctcaaaggcagttgataactcttccaagcctactccagacttcgaactactttctcatcacacatgtcattgcagtgctctaagccagaaccctatatggtggcttatggaagggcctcggacaattagtcatgatttctcaaagtcttattgtgaggctaacctccaattggtcattcacaattcagaagctcataagattttggtgagagtggtcacttttgatgtaattccagagaaaaccgtccatcctcatgactcaaccagtgctcagggtggatggtatgatgtatcactggaaagtgacgtaaaggccatctctagttccaagagtacacatcaagagaagcgatcttcgaagagcattccaccatatgtttggtgttcattgagttgtgctcaaatcgagctccaacctgacagttgtgctagagttcctctaaaagtgtgcatatttgcaccgggcacatacaatttttccaattatgagctgcaatggaaagtgcatctatctgagggaccacatgtgggtgaaaatgagaaccggttatctggcggtggtctaggctatcctttctatgtcactgtccttcaaggtgtctaagtaattatcaggattcaagaagtaccttcttgagcgtcaatatagaccagtgcaaaactcaggaactacacccaattgcaacgggctgatgataataggtgccagccagtccagtttgtgcaaagatctgccccggaagttccctgactgaatatacttggatacgctcatggttctgcttcggtaccgatatatttacacgtcattttgaaggatgagttctggtgagtacatgtatacaattgtcgctgggaacaaaaactaacggtaattgctggtggatttttggcagacagaatataccgatagaagttttgcttgtctaattgttgatggtggctagtaggagcatatactattcctgtacatcctgtttaacttgtcgctgctagacgatttcgcaaatgtagtatgtagtggtagatggatccgataaattttctgtaattttgacgaggtaatcaggcaatcgtctcgagattgttgttgtatgggcgacagtattttttcattgtttgtacaatccttttaaaaatcatcgtctggccttgagcctttatgccatatgggtatatgttgattccccttttcagttcctcgtatcgacgtccagctgtccacatcaggtgcaagtgtctgaggggtgctgttatttttgatattttc

SEQ ID NO: 208806 - DNA, 2908 bp, Zea Mays
caacgcaaacccacaagaaagtttcaaaaaaacattcgcactccctccctctaccgccactagccaccctcccctaccccaatcccctctccccagatcgagcgccgcgtggctagggtttgcgcgaccgccggcagcgatgcccgcgtcctccgtctcggggggtagcggccccggaggcgtctccccggatgccatcatcgagtggctgcaggacgagatggggtacccctcggcccctcctgcaccggatcagctccgcaagatctgccggggcaacatgatccccgtctggtccttcctgctccgccgcgtccgctccgagcgaaccgtcgccaccgcgcgccgcaatatcctcgtccacggcgtcgcggcccggcgggcgcgggagggcggagcgatgggggcgggcgcgggtgacgctgcggccagggaggccgaggcgagggagcgggacctcgccgctgaggaggccgagcggttgcgtgggatcgtgaggaggcagcgcaaggagcttcgcgcgcgcatcgcggaggtcgccagggaggaggcggagcgcaagcgcgtcctcggtgagcgctccaatgccaggcacaagcaagttatgctccaagcatatgaacagcaatgcgatgaagcgcacaaaatatttgctgaataccagcgccggctacatcagttcgttaaccaagcaagggacgtgcgaagatcaagtataggcgtggctggagctacaggtgaaaggagcattcggaaggcatgtgaaactcttgctgcggatatgattgaaacaattcgaagttcattcccggcatttgaagggtgtggcattaattcaagttgccaattagatgcagaaaagctgggtattgacttggttggtgaaataccaacatatgttaaacttgttgcattggattccctaaagaatccattcatgcttctgcagtcaatcattacctacacatcacgcatgaaaacacttatacatagagaaactgacaagattgacatacgcgctgatgcagaactactgaggtataaatatgaaaatgagcaggttattgatgctgcttcaactgatgcaagctcacccttaccatatcaggtgtatggaaatgggaagactggatcacaattgtcaactcgaggaacatatgatcagctactagaaagacagaaagagcatgtacaacagtttttggcaacagaagatgctttgaacaaagctgcagaagctaaagcactaagtcagaagctattgcaacgcttgtatggcactgctgacatggcaggaaataagaagctgcccactgggaacaccacacagaatgtgaccaacagtaggcatttagagttggacgtttgggccaaggaaagagaagttgcaggactaaaggcgagcttgagtacacttacatctgaggtacaacgtttgtataagttatgcgctgagtggaaggaagcagaagattcactgaagaagaagtggaagaaaatcgaagaatttgacgcccgtcgatcagagctggagttcatttacagtgctcttcagcgggccaatatggattcatcagcattttgggagcaacagccattatcagctagaggatatgcatcaactacaattatccctgcgtgccatgctgtggtagacatgtctacgaactcaagggacctcatagagcgagagttagctgcatttagccagagcttggataatagcttgtgcaggttgccagcaacccctcaggcccttttggaggctgtgggttctaacggcgtgacaggatcagaagcacttgcagctgctgagaaacatgcagctttgttgactgcaagagctggtgccagagatccatctgctgtgccgtctatatgccgcatctctgctgctcttcagtataactttgtttcaccaggtacagaaggcacagattctggcttggcttcagtattaaattcactggagttctgcctaaaaccatgtgggtctgaagctagcatattagaggatttatcaaaatctatcaacttggtgcacacacggagaaatcttgttgagaatgaccgtgttttgctgaaccgtgcacatcgtgctcaacaagaatatgaaagagtggccaactattgtcttaaattagctggcgaacaagaaaaggtggtgagtgaaagatggcttccggaactgagaaatgcagttcaagaagctcgaaggtgttttgatgactgccagcgtgttaggggtctggttgatgagtggtacgagcagccagccgccacaattgtggattgggtaacgatagatggacagagcgttggtgcctggatcaacctcgtgaagcaactccacatggagatctccagacggacgttggccatgtcatcggtaggagacgactgaagcaaccagccgtgacctgcggctttggaagttcggaggctcctttatgggttcggtttggcgccaagatatcttctatctactcgatagccttttcccattgtagtttatacgtctctctctctggtttggtctgtaattagttcctaacatgttccttttgtatgttgtcaattgtcatgtgctggttgtcacttggctcaaacgatcagtgttggtgttgtgcctttgctgatttgggttgtttgtatgttgtcaatggtcatgtgcgtgttgtcatttggctcaaacgatcagggttggtgttgtggctttgatgatttgcgcacatgtgtgttcaatcagtccgggaattgtttcagttataacgttcatgtaacttagggtatgtttggcaccaaaatatgtttggcccattttgttatggcttgcttgttaaccttgatggttatcatcttgtcatttttttctttgaggagatagggtgtggtagccttcttgttc

SEQ ID NO: 208807 - DNA, 1913 bp, Zea Mays
gcaaaaacgaaacggcgaccacatacaaaacagcgactcccttgttgccggctatagcttttgcctccgtttcgctttgataaataaaagccataactcccggccgtccatcgctcgcctcccctccctccctccccgccgctgtctccggcgacagccagcctcatcgtccatggcctctacatgcctagcccccgcctccctctccacgcccctgctctccgactccatcgcgcgcgcgcccgccgccaacgggcacgccaccaaccaccgacaccaccaccacgacgacagcgacggtgctgcggcggtctccgtttgcgacgacggcggcggggacccgttcgcgttcctctcggaggaccggccgccgagggaccgagggccgtccccggccgacccgttccgcaacggcacgccggcgtggggcggcggcgtgtacgcgtggtcgaggacgctgctgctcctgccggtcgcgttggtgcggctggcactgttcgggctctccatcgcgatcggctacgcggccacgtgggtggctctccgcgggtgggcggacacgcacgggaggccgcgggtgggcggcgggcctatgccggcgtggcgccgccggctcatgtggatcacgcggatctcagctcgctgcatcctcttctctttcgggtaccattggatcagaaagaaaggaaggcccgctcgtagggagctcgcacctattgttgtttccaatcatatctcgtacatagaacccatattcttcttctatgaattgttcccaaccattgtttcgtcagagtctcatgatgccctaccatttgttggaacaattattcgagcgatgcaggttatatatgttgacagattctcaccagcttctcggaaggctgctgtaaatgaaataaaggatgtcctttcagagaaaggcagcttgcaatagcttcccgcgggtcctgttattccctgaaggtaccacaacaaatgggagattcctgatttcgttccaacatggtgcattcatacctggctaccctgttcaacctgttgttgtccgttatccacatgtgcactttgatcaatcatgggggaatatatcgttattaaagctcatgtttaagatgttcacccaatttcataatttcatggaggtagagtaccttcctgttgtctaccctcctgagatcaagcaagagaatgcccttcattttgcggaggataccagctatgctatggcacgtgccctcaatgtcttgccaacttcctattcatatggtgattctatgattatggcacgggcaatagaagctggaaaggtgaatggctcaaattacatggtagaaatggcttgggtaaaagatatttatggtgtgagcacagcagaagcaatggacctattggaacatttcctggcaatgaatccagataacgatggacgtgtgaaagcacaagatttttgggctcattttggtctggattgcagtcctctgtgtaagaagatatttcactactttgatttaggcattaaggaatcgattacgttccgtcagttcttggttgggtgcgcgcacctgaggaagcaaccgttgttccagggtgcctgtgagaccgcctttgagaagtgccgggatcctgaaacatctgagatctccagggcacagctagccgatgtcctgcggttaagcatgctgctgccgtctggtgatagaatgctggacctgttcaagacgtttgacatagatggcgacgaaaagatcagcaaggacgacttcatgacgtgtcttgggaggttcccgttcctgattgcgttctttgcagccccgatcaatggggaagtgtacatcgagatagtctgaaggcaaggcgatgccgtgtaagagtaaccaggcgcagggctctgtaaagtgggtctgtgcgtt

SEQ ID NO: 208808 - DNA, 1580 bp, Zea Mays
gaactattatcacaatgaccagtgagctgatgcctggaggtgttaattcgccggtccgtgccttcaaatctgttggtgggcagccagtagtgttcgactctgtaaagggttctcgtatgtgggatgttgatgggaatgagtacattgattacgttggttcctggggtcctgcaatcatcggccatgcagatgataaggttaatgctgcattgattgaaactctgaagaaaggaactagctttggtgctccatgtttgctggagaacgtattggctgagatggtcatctctgccgtgccaagtatcgaaatggtccgctttgtcaactcagggacagaagcctgcatgggagcgctccgcctcgtgcgcgcattcaccgggcgggagaagatcatcaagttcgaaggctgctaccatggccatgccgattccttccttgtcaaagctggcagtggtgtcgccacccttggcctcccagactcccctggcgtccccaagggggccacctacgagactctaacggcaccctacaatgatgtcgaggcagtgaagaaactgttcgaggacaacgcgggggagattgctgccgtcttcctcgagccagttgttggcaacgctggtttcatccccccacagcctggtttccttaacgctctccgcgacttgaccagacaggatggtgcgctcctggtcttcgatgaagtgatgaccggcttccgtctgtcttacggtggagctcaggagtacttcgggatcacccctgacgtgacgaccttgggcaagatcatcgggggtggcctccccgttggtgcctacggtgggagaagggacatcatggagatggttgcccccgcagggccgatgtaccaggcaggaactctcagcgggaaccctctagccatgaccgctgggatccacacgctcaagcggctgacagagcccggcacctacgagtacttggacaagatcaccggcgaactcgtccgtgggatactggacgtcggtgcgaaagcagggcatgagatgtgcggaggacatatcagaggaatgtttggcttcttcttcaccggcgggcccgtccacaatttcggggacgccaagaagagcgacaccgagaagttcgggaggttctaccgtggcatgctggaggagggcgtgtacttcgctccatcgcagttcgaggcggggttcaccagcttggcgcacacctcccaggacatcgagaagaccgtcgaggccgctgagaaggttctgaagcggatatagggggtccgcttcaagcaagcatgcagagagcatttcctcgtatttacgttcttgtactcttagttctatatgccaccgaggttttgtattgtgcagcagcaggacagcttctgtaagttcctctttctgaattagtgggtcttgtttttgtcagtgccaataaatctatggtccacgattacggtttcgttgttgtactgatgttcagatacaggattgtctagaacctttttttttagaaaaaaaaaacaatatccacattagtaatgcactgacccgggacttgcataagccatctcggactcttcccagctc

SEQ ID NO: 208809 - DNA, 908 bp, Zea Mays
agggaatctgttccatactgtaaatgccgtttggtcaggttccagctctgcaggatggtgacttgtacctcttcgaatcacgagcaatctgcaagtacgctgctcgcaaaaacaagccagagctgttgagggaaggaaacctcgaggaggcagcaatggtggatgtttggatcgaggtggaggctaaccagtacaccgctgcactgaatcccatcctcttccaggtcctcatcagtcctatgcttgggggaaccaccgaccagaaagttgtggatgagaaccttgagaagctgaagaaggtgctagaggtgtacgaggcacgcctgaccaagtgcaagtaccttgctggagacttcctcagcctcgccgacctgaaccatgtgtctgtcactctctgcctgttcgctacgccctacgcatctgtgctcgacgcctacccgcatgtgaaggcctggtggtctggtctgatggagaggccgtctgtccagaaggtcgctgccctgatgaagccatctgcttgaaacggttgccctgtcaatcggtgaatggaataagccaagtctgttctgggttgtttgcttgttcagtgatgtgtcttctatgacgaaagttgagtgcctatgtgtgagcatgcttgcttgtaacgagacattgaattgttcggaaatgagcattcctgtgctcttcttgaaaataaactttgcgttaggttcctcaggatcttgatggtttggttgctgctgcaatcttcaggttcgatgttatcgatcatggccatggcaaatgcatctgcatagtctaactctaatggatagcaagcctggatgtcacgaccattatgcctttaaaaaaggccaactgacggtaggcttcctaacgaaattaccaagatggattaatgtgtgttc

SEQ ID NO: 208810 - DNA, 902 bp, Zea Mays
ctccatctggatgggattagccgtttggtcaggttccagctctgcaggatggtgacttgtacctcttcgaatcacgagcaatctgcaagtacgctgctcgcaaaaacaagccagagctgttgagggaaggaaacctcgaggaggcagcaatggtggatgtttggatcgaggtggaggctaaccagtacaccgctgcactgaatcccatcctcttccaggtcctcatcagtcctatgcttgggggaaccaccgaccagaaagttgtggatgagaaccttgagaagctgaagaaggtgctagaggtgtacgaggcacgcctgaccaagtgcaagtaccttgctggagacttcctcagcctcgccgacctgaaccatgtgtctgtcactctctgcctgttcgctacgccctacgcatctgtgctcgacgcctacccgcatgtgaaggcctggtggtctggtctgatggagaggccgtctgtccagaaggtcgctgccctgatgaagccatctgcttgaaacggttgccctgtcaatcggtgaatggaataagccaagtctgttctgggttgtttgcttgttcagtgatgtgtcttctatgacgaaagttgagtgcctatgtgtgagcatgcttgcttgtaacgagacattgaattgttcggaaatgagcattcctgtgctcttcttgaaaataaactttgcgttaggttcctcaggatcttgatggtttggttgctgctgcaatcttcaggttcgatgttatcgatcatggccatggcaaatgcatctgcatagtctaactctaatggatagcaagcctggatgtcacgaccattatgcctttaaaaaaggccaactgacggtaggcttcctaacgaaattaccaagatggattaatgtgtgttc

SEQ ID NO: 208811 - DNA, 859 bp, Zea Mays
gtcaaggtgtgtgcaccttcataaagaatcacgagcaatctgcaagtacgctgctcgcaaaaacaagccagagctgttgagggaaggaaacctcgaggaggcagcaatggtggatgtttggatcgaggtggaggctaaccagtacaccgctgcactgaatcccatcctcttccaggtcctcatcagtcctatgcttgggggaaccaccgaccagaaagttgtggatgagaaccttgagaagctgaagaaggtgctagaggtgtacgaggcacgcctgaccaagtgcaagtaccttgctggagacttcctcagcctcgccgacctgaaccatgtgtctgtcactctctgcctgttcgctacgccctacgcatctgtgctcgacgcctacccgcatgtgaaggcctggtggtctggtctgatggagaggccgtctgtccagaaggtcgctgccctgatgaagccatctgcttgaaacggttgccctgtcaatcggtgaatggaataagccaagtctgttctgggttgtttgcttgttcagtgatgtgtcttctatgacgaaagttgagtgcctatgtgtgagcatgcttgcttgtaacgagacattgaattgttcggaaatgagcattcctgtgctcttcttgaaaataaactttgcgttaggttcctcaggatcttgatggtttggttgctgctgcaatcttcaggttcgatgttatcgatcatggccatggcaaatgcatctgcatagtctaactctaatggatagcaagcctggatgtcacgaccattatgcctttaaaaaaggccaactgacggtaggcttcctaacgaaattaccaagatggattaatgtgtgttc

SEQ ID NO: 208812 - DNA, 3658 bp, Zea Mays
attacagatccatgatcaatcgggcaggtagaggtagagaagaaacaaaataaaaacacctttttatctccaccgccaatcgttccatcggacggccgagaaaattcctaaaatgaagactggagacccagcaggtacgcggagcgtagcaaattcttcacgacaccccgatcgagactctggagcgcagagacggcagagagcacagtagccaagcgactggagactcatcactggagactggagagcatccggagccagtgctcgcaccaccgctcccgattcccaatcgccttcccgccgccgaaggggcgccgcactgtcccccggcctcgatctctctcgggccagccgtcggccgtggccctgcgcctcctgcgttatctggctggagatccggccggagtgccattcctactctcggtcaataagtattctggaatgtttttccgagctgaaatagatagcttctggagctggatctcagtattctgttagggacatgctccaaccgagggaagctgatttgcctgcactctttcttgtcttcattgtacttcctgtggtagcttattttcttctcgggagatggcatgatgctgcaagtaagaaggcaagggtaagtgtgcttgctcagcgagctgcagaagaagcctatagagaggaaacaatggcgtgcccagacattattctgccagggtcttccttgagaactatgccctatttcagacctatgcctgcattaagacaggaataccatgaatgtgcaacttgccatgcccctgcaaagactcgttgctccagatgcaaggctgttagatattgctctgggaagtgtcaaatagtacactggaggcaaggacataaggaaacatgccaaaagtggcttggtagtggttctagcagctttggtggatctagcactgaggctactgaacagatgccgttcttgactaacttaaattcacctcttccgggtggtgacattcacttgcgtgacttgaacttcgatactttatcagaaccatcctttcccacaactgatggttataatctagatactgatccatttttggcagacagaagcaacatgaataaatcaaatcaaggtattcatatgagcgaaaatggtgctgttggtgtatcttttgaaaagaataattataatgctgatgatgaaatccactcaccggaaaatttatctagaaacaaggtgtcaaacaactattttggttcagatgcaataagtggtaatggggatgcaatttatcctgccaaaagtaatgcacagcagcctagcagctgtgctcctgacatgagaaaacagccaaaagcaagcatcacagtttatcagcctgacataggtgtctatttaacttctgacatggtcagttcttgtgaggggtcatatgcttctgccagtgagccactgcaaaggagcttgtcatctggaagaactattgggaaagcaaacgcggtgaataagaggcctccatacccatcaagtaaggtggtttcagcacaaaagccacaggatagggtgtctacatcatatcaaaatgatggccatgagaagaatccttgcaacaaaaatgaccaaagatctacccccaaatgtgaatcaagtcaatcaacaagcagcaatctacaaaagtttggagcatccaaggttgaagttttaaagaagccttcaaaatttctcaaaaccagccttgtgggattgatcaatgataataagaggaacaaggtattgttcccatatgaagatcttgtcaagttttttcagtatgaagcccggggtatttcccctagaggtcttttcaattgtggaaacagctgctatgctaatgctgttcttcaatgtctcatgtgcacaaagccactgatgatctaccttcttctgagattgcattctaaagattgttcttcaaaaaaatggtgccttatgtgtgaacttgagcaatatgcttcaactttacgtgaaagtggtgggcccttatctccaagtagaattctttctaatctgaggaatattggatgtcgcttgggtggtggaactcaggaagatgctcatgagtttttaaggcatcttgtgatgtctatgcaagcagcttgcttggatgggctgggtggtgagaagcatgttgagccaagtttgcaggaaacaacactgatacaacagatgtttggtggccgtcttaaatccaaggttaagtgcctcagatgttatcacgagtctgaacgatatgagaatataatggatcttactttggagattcacggctgggtagagtccttgcaggatgctttgacacagttcactgcccctgaagatttagatggtgataatatgtataaatgtggaagttgtgctgcctatgttaaagccaggaagcaactgagcgtgcatgaggtgccaaacatattaacagttgttcttaaaagatttcagtcaggaaaatatggcaagatcaacaaatgtgttactttccctgatatgttggacatggttccttttgtgactgggtctggtgacaatccccctctttatttcttgtatgccgtggttgtacatgtggatacagaaaatgcatcattctctgggcactatatatcatatgtcaaagatatgcagggtacatggttgagaattgatgattcagaggtccaggttgtatcagtgaatcaagttatgtcagaaggtgcatatatgcttttctacatgaggtctttcccccgaccaccaagaatatacatcgagaaggggccgactgttccatccgcgaagcgccacacatcaaagtattccaagggctctaaacacgagcgcgagcagacagagttactcctctcggcgaacgatccagcatacggtgtttatgactttagacctgatggcgagggctacacgcaagatcagcaagcagagttgagatccagggatttccatcgcgccgacgatgccttcgcagactcggtcagcgcggacttctcggaggccacgtcaagcgaatggtcgctgtttaccagctccgacgagtcctcattcaccaccgagagcacaagggactcgttcagcgttgtggactacggcgacaacgctggcctggacccaatctcctcgatatttgggccaagctatgctccggagcatcatcccggtccacctggcagtttcgccgcgtgcacgaggctctcgccttccaacccacagacaaggtgaaattttagagcgcggtggagctgctccggttgaagccatcccccgaggcccgaaccagtaaattacgccgaatccggcagtcgtatggccctgcacaccagtgctttgtgaaaagcttgcagattcatcaattgacgtgcacttgccttttatatggacgctgacgtatggaggtgcacactctccacctccgtatatctcgccacctactctgtttatattagaaggttgattgctgacacacaacacctgctcgtacttttttgtcgaaatcatgacggacaacaacgctaaacatatagtacaatcttcttgtcttgctgatctgctatgcccctttgtgaaatctgccggtgacatcagcgatggcgtcttgctgatctcgtggtatacctgatgtttcctcggtctcagcttttatcacgcagtagtgca

SEQ ID NO: 208813 - DNA, 3796 bp, Zea Mays
attacagatccatgatcaatcgggcaggtagaggtagagaagaaacaaaataaaaacacctttttatctccaccgccaatcgttccatcggacggccgagaaaattcctaaaatgaagactggagacccagcaggtacgcggagcgtagcaaattcttcacgacaccccgatcgagactctggagcgcagagacggcagagagcacagtagccaagcgactggagactcatcactggagactggagagcatccggagccagtgctcgcaccaccgctcccgattcccaatcgccttcccgccgccgaaggggcgccgcactgtcccccggcctcgatctctctcgggccagccgtcggccgtggccctgcgcctcctgcgttatctggctggagatccggccggagtgccattcctactctcggtcaataagtattctggaatgtttttccgagctgaaatagatagcttctggagctggatctcagtattctgttagggacatgctccaaccgagggaagctgatttgcctgcactctttcttgtcttcattgtacttcctgtggtagcttattttcttctcgggagatggcatgatgctgcaagtaagaaggcaagggtaagtgtgcttgctcagcgagctgcagaagaagcctatagagaggaaacaatggcgtgcccagacattattctgccagggtcttccttgagaactatgccctatttcagacctatgcctgcattaagacaggaataccatgaatgtgcaacttgccatgcccctgcaaagactcgttgctccagatgcaaggctgttagatattgctctgggaagtgtcaaatagtacactggaggcaaggacataaggaaacatgccaaaagtggcttggtagtggttctagcagctttggtggatctagcactgaggctactgaacagatgccgttcttgactaacttaaattcacctcttccgggtggtgacattcacttgcgtgacttgaacttcgatactttatcagaaccatcctttcccacaactgatggttataatctagatactgatccatttttggcagacagaagcaacatgaataaatcaaatcaaggtattcatatgagcgaaaatggtgctgttggtgtatcttttgaaaagaataattataatgctgatgatgaaatccactcaccggaaaatttatctagaaacaaggtgtcaaacaactattttggttcagatgcaataagtggtaatggggatgcaatttatcctgccaaaagtaatgcacagcagcctagcagctgtgctcctgacatgagaaaacagccaaaagcaagcatcacagtttatcagcctgacataggtgtctatttaacttctgacatggtcagttcttgtgaggggtcatatgcttctgccagtgagccactgcaaaggagcttgtcatctggaagaactattgggaaagcaaacgcggtgaataagaggcctccatacccatcaagtaaggtggtttcagcacaaaagccacaggatagggtgtctacatcatatcaaaatgatggccatgagaagaatccttgcaacaaaaatgaccaaagatctacccccaaatgtgaatcaagtcaatcaacaagcagcaatctacaaaagtttggagcatccaaggttgaagttttaaagaagccttcaaaatttctcaaaaccagccttgtgggattgatcaatgataataagaggaacaaggtattgttcccatatgaagatcttgtcaagttttttcagtatgaagcccggggtatttcccctagaggtcttttcaattgtggaaacagctgctatgctaatgctgttcttcaatgtctcatgtgcacaaagccactgatgatctaccttcttctgagattgcattctaaagattgttcttcaaaaaaatggtgccttatgtgtgaacttgagcaatatgcttcaactttacgtgaaagtggtgggcccttatctccaagtagaattctttctaatctgaggaatattggatgtcgcttgggtggtggaactcaggaagatgctcatgagtttttaaggcatcttgtgatgtctatgcaagcagcttgcttggatgggctgggtggtgagaagcatgttgagccaagtttgcaggaaacaacactgatacaacagatgtttggtggccgtcttaaatccaaggttaagtgcctcagatgttatcacgagtctgaacgatatgagaatataatggatcttactttggagattcacggctgggtagagtccttgcaggatgctttgacacagttcactgcccctgaagatttagatggtgataatatgtataaatgtggaagttgtgctgcctatgttaaagccaggaagcaactgagcgtgcatgaggtgccaaacatattaacagttgttcttaaaagatttcagtcaggaaaatatggcaagatcaacaaatgtgttactttccctgatatgttggacatggttccttttgtgactgggtctggtgacaatccccctctttatttcttgtatgccgtggttgtacatgtggatacagaaaatgcatcattctctgggcactatatatcatatgtcaaagatatgcagggtacatggttgagaattgatgattcagaggtccaggttgtatcagtgaatcaagttatgtcagaaggtgcatatatgcttttctacatgaggtctttcccccgaccaccaagaatatacatcgagaaggggccgactgttccatccgcgaagcgccacacatcaaagtattccaagggctctaaacacgagcgcgagcagacagagttactcctctcggcgaacgatccagcatacggtgtttatgactttagacctgatggcgagggctacacgcaagatcagcaagcagagttgagatccagggatttccatcgcgccgacgatgccttcgcagactcggtcagcgcggacttctcggaggccacgtcaagcgaatggtcgctgtttaccagctccgacgagtcctcattcaccaccgagagcacaagggactcgttcagcgttgtggactacggcgacaacgctggcctggacccaatctcctcgatatttgggccaagctatgctccggagcatcatcccggtccacctggcagtttcgccgcgtgcacgaggctctcgccttccaacccacagacaaggtacttctcggagagcacagggttcgtctcggactactcttccagcggcattgtacatagaggaagggatccaggtagggcatacacctgttcagcggaaccgctcgcttcggctgcggcggcgcaccagcaccagcggtgaaattttagagcgcggtggagctgctccggttgaagccatcccccgaggcccgaaccagtaaattacgccgaatccggcagtcgtatggccctgcacaccagtgctttgtgaaaagcttgcagattcatcaattgacgtgcacttgccttttatatggacgctgacgtatggaggtgcacactctccacctccgtatatctcgccacctactctgtttatattagaaggttgattgctgacacacaacacctgctcgtacttttttgtcgaaatcatgacggacaacaacgctaaacatatagtacaatcttcttgtcttgctgatctgctatgcccctttgtgaaatctgccggtgacatcagcgatggcgtcttgctgatctcgtggtatacctgatgtttcctcggtctcagcttttatcacgcagtagtgca

SEQ ID NO: 208814 - DNA, 3955 bp, Zea Mays
attacagatccatgatcaatcgggcaggtagaggtagagaagaaacaaaataaaaacacctttttatctccaccgccaatcgttccatcggacggccgagaaaattcctaaaatgaagactggagacccagcaggtacgcggagcgtagcaaattcttcacgacaccccgatcgagactctggagcgcagagacggcagagagcacagtagccaagcgactggagactcatcactggagactggagagcatccggagccagtgctcgcaccaccgctcccgattcccaatcgccttcccgccgccgaaggggcgccgcactgtcccccggcctcgatctctctcgggccagccgtcggccgtggccctgcgcctcctgcgttatctggctggagatccggccggagtgccattcctactctcggtcaataagtattctggaatgtttttccgagctgaaatagatagcttctggagctggatctcagtattctgttagggacatgctccaaccgagggaagctgatttgcctgcactctttcttgtcttcattgtacttcctgtggtagcttattttcttctcgggagatggcatgatgctgcaagtaagaaggcaagggtaagtgtgcttgctcagcgagctgcagaagaagcctatagagaggaaacaatggcgtgcccagacattattctgccagggtcttccttgagaactatgccctatttcagacctatgcctgcattaagacaggaataccatgaatgtgcaacttgccatgcccctgcaaagactcgttgctccagatgcaaggctgttagatattgctctgggaagtgtcaaatagtacactggaggcaaggacataaggaaacatgccaaaagtggcttggtagtggttctagcagctttggtggatctagcactgaggctactgaacagatgccgttcttgactaacttaaattcacctcttccgggtggtgacattcacttgcgtgacttgaacttcgatactttatcagaaccatcctttcccacaactgatggttataatctagatactgatccatttttggcagacagaagcaacatgaataaatcaaatcaaggtattcatatgagcgaaaatggtgctgttggtgtatcttttgaaaagaataattataatgctgatgatgaaatccactcaccggaaaatttatctagaaacaaggtgtcaaacaactattttggttcagatgcaataagtggtaatggggatgcaatttatcctgccaaaagtaatgcacagcagcctagcagctgtgctcctgacatgagaaaacagccaaaagcaagcatcacagtttatcagcctgacataggtgtctatttaacttctgacatggtcagttcttgtgaggggtcatatgcttctgccagtgagccactgcaaaggagcttgtcatctggaagaactattgggaaagcaaacgcggtgaataagaggcctccatacccatcaagtaaggtggtttcagcacaaaagccacaggatagggtgtctacatcatatcaaaatgatggccatgagaagaatccttgcaacaaaaatgaccaaagatctacccccaaatgtgaatcaagtcaatcaacaagcagcaatctacaaaagtttggagcatccaaggttgaagttttaaagaagccttcaaaatttctcaaaaccagccttgtgggattgatcaatgataataagaggaacaaggtattgttcccatatgaagatcttgtcaagttttttcagtatgaagcccggggtatttcccctagaggtcttttcaattgtggaaacagctgctatgctaatgctgttcttcaatgtctcatgtgcacaaagccactgatgatctaccttcttctgagattgcattctaaagattgttcttcaaaaaaatggtgccttatgtgtgaacttgagcaatatgcttcaactttacgtgaaagtggtgggcccttatctccaagtagaattctttctaatctgaggaatattggatgtcgcttgggtggtggaactcaggaagatgctcatgagtttttaaggcatcttgtgatgtctatgcaagcagcttgcttggatgggctgggtggtgagaagcatgttgagccaagtttgcaggaaacaacactgatacaacagatgtttggtggccgtcttaaatccaaggttaagtgcctcagatgttatcacgagtctgaacgatatgagaatataatggatcttactttggagattcacggctgggtagagtccttgcaggatgctttgacacagttcactgcccctgaagatttagatggtgataatatgtataaatgtggaagttgtgctgcctatgttaaagccaggaagcaactgagcgtgcatgaggtgccaaacatattaacagttgttcttaaaagatttcagtcaggaaaatatggcaagatcaacaaatgtgttactttccctgatatgttggacatggttccttttgtgactgggtctggtgacaatccccctctttatttcttgtatgccgtggttgtacatgtggatacagaaaatgcatcattctctgggcactatatatcatatgtcaaagatatgcagggtacatggttgagaattgatgattcagaggtccaggttgtatcagtgaatcaagttatgtcagaaggtgcatatatgcttttctacatgaggtctttcccccgaccaccaagaatatacatcgagaaggggccgactgttccatccgcgaagcgccacacatcaaagtattccaagggctctaaacacgagcgcgagcagacagagttactcctctcggcgaacgatccagcatacggtgtttatgactttagacctgatggcgagggctacacgcaagatcagcaagcagagttgagatccagggatttccatcgcgccgacgatgccttcgcagactcggtcagcgcggacttctcggaggccacgtcaagcgaatggtcgctgtttaccagctccgacgagtcctcattcaccaccgagagcacaagggactcgttcagcgttgtggactacggcgacaacgctggcctggacccaatctcctcgatatttgggccaagctatgctccggagcatcatcccggtccacctggcagtttcgccgcgtgcacgaggctctcgccttccaacccacagacaaggtacttctcggagagcacagggttcgtctcggactactcttccagcggcattgtacatagaggaagggatccaggtagggcatacacctgttcagcggaaccgctcgcttcggctgcggcggcgcaccagcaccagcggtacgcccttagcggccgagacggtttggtccagacatctgggttctgccaaatgtaaccggctttacgatttcgtagctatagctgtagctggtgctcgggcagctgcggtttagcactgccactgatgctgctgcctctatgttctttttatttcaggtgaaattttagagcgcggtggagctgctccggttgaagccatcccccgaggcccgaaccagtaaattacgccgaatccggcagtcgtatggccctgcacaccagtgctttgtgaaaagcttgcagattcatcaattgacgtgcacttgccttttatatggacgctgacgtatggaggtgcacactctccacctccgtatatctcgccacctactctgtttatattagaaggttgattgctgacacacaacacctgctcgtacttttttgtcgaaatcatgacggacaacaacgctaaacatatagtacaatcttcttgtcttgctgatctgctatgcccctttgtgaaatctgccggtgacatcagcgatggcgtcttgctgatctcgtggtatacctgatgtttcctcggtctcagcttttatcacgcagtagtgca

SEQ ID NO: 208815 - DNA, 3869 bp, Zea Mays
gaaaattcctaaaatgaagactggagacccagcaggtacgcggagcgtagcaaattcttcacgacaccccgatcgagactctggagcgcagagacggcagagagcacagtagccaagcgactggagactcatcactggagactggagagcatccggagccagtgctcgcaccaccgctcccgattcccaatcgccttcccgccgccgaaggggcgccgcactgtcccccggcctcgatctctctcgggccagccgtcggccgtggccctgcgcctcctgcgttatctggctggagatccggccggagtgccattcctactctcggtcaataagtattctggaatgtttttccgagctgaaatagatagcttctggagctggatctcagtattctgttagggacatgctccaaccgagggaagctgatttgcctgcactctttcttgtcttcattgtacttcctgtggtagcttattttcttctcgggagatggcatgatgctgcaagtaagaaggcaagggtaagtgtgcttgctcagcgagctgcagaagaagcctatagagaggaaacaatggcgtgcccagacattattctgccagggtcttccttgagaactatgccctatttcagacctatgcctgcattaagacaggaataccatgaatgtgcaacttgccatgcccctgcaaagactcgttgctccagatgcaaggctgttagatattgctctgggaagtgtcaaatagtacactggaggcaaggacataaggaaacatgccaaaagtggcttggtagtggttctagcagctttggtggatctagcactgaggctactgaacagatgccgttcttgactaacttaaattcacctcttccgggtggtgacattcacttgcgtgacttgaacttcgatactttatcagaaccatcctttcccacaactgatggttataatctagatactgatccatttttggcagacagaagcaacatgaataaatcaaatcaaggtattcatatgagcgaaaatggtgctgttggtgtatcttttgaaaagaataattataatgctgatgatgaaatccactcaccggaaaatttatctagaaacaaggtgtcaaacaactattttggttcagatgcaataagtggtaatggggatgcaatttatcctgccaaaagtaatgcacagcagcctagcagctgtgctcctgacatgagaaaacagccaaaagcaagcatcacagtttatcagcctgacataggtgtctatttaacttctgacatggtcagttcttgtgaggggtcatatgcttctgccagtgagccactgcaaaggagcttgtcatctggaagaactattgggaaagcaaacgcggtgaataagaggcctccatacccatcaagtaaggtggtttcagcacaaaagccacaggatagggtgtctacatcatatcaaaatgatggccatgagaagaatccttgcaacaaaaatgaccaaagatctacccccaaatgtgaatcaagtcaatcaacaagcagcaatctacaaaagtttggagcatccaaggttgaagttttaaagaagccttcaaaatttctcaaaaccagccttgtgggattgatcaatgataataagaggaacaaggtattgttcccatatgaagatcttgtcaagttttttcagtatgaagcccggggtatttcccctagaggtcttttcaattgtggaaacaggttcttcaaaaaaatggtgccttatgtgtgaacttgagcaatatgcttcaactttacgtgaaagtggtgggcccttatctccaagtagaattctttctaatctgaggaatattggatgtcgcttgggtggtggaactcaggaagatgctcatgagtttttaaggcatcttgtgatgtctatgcaagcagcttgcttggatgggctgggtggtgagaagcatgttgagccaagtttgcaggaaacaacactgatacaacagatgtttggtggccgtcttaaatccaaggttaagtgcctcagatgttatcacgagtctgaacgatatgagaatataatggatcttactttggagattcacggctgggtagagtccttgcaggatgctttgacacagttcactgcccctgaagatttagatggtgataatatgtataaatgtggaagttgtgctgcctatgttaaagccaggaagcaactgagcgtgcatgaggtgccaaacatattaacagttgttcttaaaagatttcagtcaggaaaatatggcaagatcaacaaatgtgttactttccctgatatgttggacatggttccttttgtgactgggtctggtgacaatccccctctttatttcttgtatgccgtggttgtacatgtggatacagaaaatgcatcattctctgggcactatatatcatatgtcaaagatatgcagggtacatggttgagaattgatgattcagaggtccaggttgtatcagtgaatcaagttatgtcagaaggtgcatatatgcttttctacatgaggtctttcccccgaccaccaagaatatacatcgagaaggggccgactgttccatccgcgaagcgccacacatcaaagtattccaagggctctaaacacgagcgcgagcagacagagttactcctctcggcgaacgatccagcatacggtgtttatgactttagacctgatggcgagggctacacgcaagatcagcaagcagagttgagatccagggatttccatcgcgccgacgatgccttcgcagactcggtcagcgcggacttctcggaggccacgtcaagcgaatggtcgctgtttaccagctccgacgagtcctcattcaccaccgagagcacaagggactcgttcagcgttgtggactacggcgacaacgctggcctggacccaatctcctcgatatttgggccaagctatgctccggagcatcatcccggtccacctggcagtttcgccgcgtgcacgaggctctcgccttccaacccacagacaaggtacttctcggagagcacagggttcgtctcggactactcttccagcggcattgtacatagaggaagggatccaggtagggcatacacctgttcagcggaaccgctcgcttcggctgcggcggcgcaccagcaccagcggtacgcccttagcggccgagacggtttggtccagacatctgggttctgccaaatgtaaccggctttacgatttcgtagctatagctgtagctggtgctcgggcagctgcggtttagcactgccactgatgctgctgcctctatgttctttttatttcaggtgaggcgtattaaattttggctgcatgtcattcctaggctagctcgattcaatgtagcgagagagagaggaacaaatttagattgtgtctatatgcaggtgaaattttagagcgcggtggagctgctccggttgaagccatcccccgaggcccgaaccagtaaattacgccgaatccggcagtcgtatggccctgcacaccagtgctttgtgaaaagcttgcagattcatcaattgacgtgcacttgccttttatatggacgctgacgtatggaggtgcacactctccacctccgtatatctcgccacctactctgtttatattagaaggttgattgctgacacacaacacctgctcgtacttttttgtcgaaatcatgacggacaacaacgctaaacatatagtacaatcttcttgtcttgctgatctgctatgcccctttgtgaaatctgccggtgacatcagcgatggcgtcttgctgatctcgtggtatacctgatgtttcctcggtctcagcttttatcacgcagtagtgca

SEQ ID NO: 208816 - DNA, 3590 bp, Zea Mays
ctgagctgctgtgctcctgtgggcttgtgagccaaagccatggaaatcatcatacaaggtcaataagtattctggaatgtttttccgagctgaaatagatagcttctggagctggatctcagtattctgttagggacatgctccaaccgagggaagctgatttgcctgcactctttcttgtcttcattgtacttcctgtggtagcttattttcttctcgggagatggcatgatgctgcaagtaagaaggcaagggtaagtgtgcttgctcagcgagctgcagaagaagcctatagagaggaaacaatggcgtgcccagacattattctgccagggtcttccttgagaactatgccctatttcagacctatgcctgcattaagacaggaataccatgaatgtgcaacttgccatgcccctgcaaagactcgttgctccagatgcaaggctgttagatattgctctgggaagtgtcaaatagtacactggaggcaaggacataaggaaacatgccaaaagtggcttggtagtggttctagcagctttggtggatctagcactgaggctactgaacagatgccgttcttgactaacttaaattcacctcttccgggtggtgacattcacttgcgtgacttgaacttcgatactttatcagaaccatcctttcccacaactgatggttataatctagatactgatccatttttggcagacagaagcaacatgaataaatcaaatcaaggtattcatatgagcgaaaatggtgctgttggtgtatcttttgaaaagaataattataatgctgatgatgaaatccactcaccggaaaatttatctagaaacaaggtgtcaaacaactattttggttcagatgcaataagtggtaatggggatgcaatttatcctgccaaaagtaatgcacagcagcctagcagctgtgctcctgacatgagaaaacagccaaaagcaagcatcacagtttatcagcctgacataggtgtctatttaacttctgacatggtcagttcttgtgaggggtcatatgcttctgccagtgagccactgcaaaggagcttgtcatctggaagaactattgggaaagcaaacgcggtgaataagaggcctccatacccatcaagtaaggtggtttcagcacaaaagccacaggatagggtgtctacatcatatcaaaatgatggccatgagaagaatccttgcaacaaaaatgaccaaagatctacccccaaatgtgaatcaagtcaatcaacaagcagcaatctacaaaagtttggagcatccaaggttgaagttttaaagaagccttcaaaatttctcaaaaccagccttgtgggattgatcaatgataataagaggaacaaggtattgttcccatatgaagatcttgtcaagttttttcagtatgaagcccggggtatttcccctagaggtcttttcaattgtggaaacagctgctatgctaatgctgttcttcaatgtctcatgtgcacaaagccactgatgatctaccttcttctgagattgcattctaaagattgttcttcaaaaaaatggtgccttatgtgtgaacttgagcaatatgcttcaactttacgtgaaagtggtgggcccttatctccaagtagaattctttctaatctgaggaatattggatgtcgcttgggtggtggaactcaggaagatgctcatgagtttttaaggcatcttgtgatgtctatgcaagcagcttgcttggatgggctgggtggtgagaagcatgttgagccaagtttgcaggaaacaacactgatacaacagatgtttggtggccgtcttaaatccaaggttaagtgcctcagatgttatcacgagtctgaacgatatgagaatataatggatcttactttggagattcacggctgggtagagtccttgcaggatgctttgacacagttcactgcccctgaagatttagatggtgataatatgtataaatgtggaagttgtgctgcctatgttaaagccaggaagcaactgagcgtgcatgaggtgccaaacatattaacagttgttcttaaaagatttcagtcaggaaaatatggcaagatcaacaaatgtgttactttccctgatatgttggacatggttccttttgtgactgggtctggtgacaatccccctctttatttcttgtatgccgtggttgtacatgtggatacagaaaatgcatcattctctgggcactatatatcatatgtcaaagatatgcagggtacatggttgagaattgatgattcagaggtccaggttgtatcagtgaatcaagttatgtcagaaggtgcatatatgcttttctacatgaggtctttcccccgaccaccaagaatatacatcgagaaggggccgactgttccatccgcgaagcgccacacatcaaagtattccaagggctctaaacacgagcgcgagcagacagagttactcctctcggcgaacgatccagcatacggtgtttatgactttagacctgatggcgagggctacacgcaagatcagcaagcagagttgagatccagggatttccatcgcgccgacgatgccttcgcagactcggtcagcgcggacttctcggaggccacgtcaagcgaatggtcgctgtttaccagctccgacgagtcctcattcaccaccgagagcacaagggactcgttcagcgttgtggactacggcgacaacgctggcctggacccaatctcctcgatatttgggccaagctatgctccggagcatcatcccggtccacctggcagtttcgccgcgtgcacgaggctctcgccttccaacccacagacaaggtacttctcggagagcacagggttcgtctcggactactcttccagcggcattgtacatagaggaagggatccaggtagggcatacacctgttcagcggaaccgctcgcttcggctgcggcggcgcaccagcaccagcggtacgcccttagcggccgagacggtttggtccagacatctgggttctgccaaatgtaaccggctttacgatttcgtagctatagctgtagctggtgctcgggcagctgcggtttagcactgccactgatgctgctgcctctatgttctttttatttcaggtgaaattttagagcgcggtggagctgctccggttgaagccatcccccgaggcccgaaccagtaaattacgccgaatccggcagtcgtatggccctgcacaccagtgctttgtgaaaagcttgcagattcatcaattgacgtgcacttgccttttatatggacgctgacgtatggaggtgcacactctccacctccgtatatctcgccacctactctgtttatattagaaggttgattgctgacacacaacacctgctcgtacttttttgtcgaaatcatgacggacaacaacgctaaacatatagtacaatcttcttgtcttgctgatctgctatgcccctttgtgaaatctgccggtgacatcagcgatggcgtcttgctgatctcgtggtatacctgatgtttcctcggtctcagcttttatcacgcagtagtgca

SEQ ID NO: 208817 - DNA, 3332 bp, Zea Mays
agccatggaaatcatcatacaaggtcaataagtattctggaatgtttttccgagctgaaatagatagcttctggagctggatctcagtattctgttagggacatgctccaaccgagggaagctgatttgcctgcactctttcttgtcttcattgtacttcctgtggtagcttattttcttctcgggagatggcatgatgctgcaagtaagaaggcaagggtaagtgtgcttgctcagcgagctgcagaagaagcctatagagaggaaacaatggcgtgcccagacattattctgccagggtcttccttgagaactatgccctatttcagacctatgcctgcattaagacaggaataccatgaatgtgcaacttgccatgcccctgcaaagactcgttgctccagatgcaaggctgttagatattgctctgggaagtgtcaaatagtacactggaggcaaggacataaggaaacatgccaaaagtggcttggtagtggttctagcagctttggtggatctagcactgaggctactgaacagatgccgttcttgactaacttaaattcacctcttccgggtggtgacattcacttgcgtgacttgaacttcgatactttatcagaaccatcctttcccacaactgatggttataatctagatactgatccatttttggcagacagaagcaacatgaataaatcaaatcaaggtattcatatgagcgaaaatggtgctgttggtgtatcttttgaaaagaataattataatgctgatgatgaaatccactcaccggaaaatttatctagaaacaaggtgtcaaacaactattttggttcagatgcaataagtggtaatggggatgcaatttatcctgccaaaagtaatgcacagcagcctagcagctgtgctcctgacatgagaaaacagccaaaagcaagcatcacagtttatcagcctgacataggtgtctatttaacttctgacatggtcagttcttgtgaggggtcatatgcttctgccagtgagccactgcaaaggagcttgtcatctggaagaactattgggaaagcaaacgcggtgaataagaggcctccatacccatcaagtaaggtggtttcagcacaaaagccacaggatagggtgtctacatcatatcaaaatgatggccatgagaagaatccttgcaacaaaaatgaccaaagatctacccccaaatgtgaatcaagtcaatcaacaagcagcaatctacaaaagtttggagcatccaaggttgaagttttaaagaagccttcaaaatttctcaaaaccagccttgtgggattgatcaatgataataagaggaacaaggtattgttcccatatgaagatcttgtcaagttttttcagtatgaagcccggggtatttcccctagaggtcttttcaattgtggaaacagctgctatgctaatgctgttcttcaatgtctcatgtgcacaaagccactgatgatctaccttcttctgagattgcattctaaagattgttcttcaaaaaaatggtgccttatgtgtgaacttgagcaatatgcttcaactttacgtgaaagtggtgggcccttatctccaagtagaattctttctaatctgaggaatattggatgtcgcttgggtggtggaactcaggaagatgctcatgagtttttaaggcatcttgtgatgtctatgcaagcagcttgcttggatgggctgggtggtgagaagcatgttgagccaagtttgcaggaaacaacactgatacaacagatgtttggtggccgtcttaaatccaaggttaagtgcctcagatgttatcacgagtctgaacgatatgagaatataatggatcttactttggagattcacggctgggtagagtccttgcaggatgctttgacacagttcactgcccctgaagatttagatggtgataatatgtataaatgtggaagttgtgctgcctatgttaaagccaggaagcaactgagcgtgcatgaggtgccaaacatattaacagttgttcttaaaagatttcagtcaggaaaatatggcaagatcaacaaatgtgttactttccctgatatgttggacatggttccttttgtgactgggtctggtgacaatccccctctttatttcttgtatgccgtggttgtacatgtggatacagaaaatgcatcattctctgggcactatatatcatatgtcaaagatatgcagggtacatggttgagaattgatgattcagaggtccaggttgtatcagtgaatcaagttatgtcagaaggtgcatatatgcttttctacatgaggtctttcccccgaccaccaagaatatacatcgagaaggggccgactgttccatccgcgaagcgccacacatcaaagtattccaagggctctaaacacgagcgcgagcagacagagttactcctctcggcgaacgatccagcatacggtgtttatgactttagacctgatggcgagggctacacgcaagatcagcaagcagagttgagatccagggatttccatcgcgccgacgatgccttcgcagactcggtcagcgcggacttctcggaggccacgtcaagcgaatggtcgctgtttaccagctccgacgagtcctcattcaccaccgagagcacaagggactcgttcagcgttgtggactacggcgacaacgctggcctggacccaatctcctcgatatttgggccaagctatgctccggagcatcatcccggtccacctggcagtttcgccgcgtgcacgaggctctcgccttccaacccacagacaaggtacttctcggagagcacagggttcgtctcggactactcttccagcggcattgtacatagaggaagggatccaggtgaaattttagagcgcggtggagctgctccggttgaagccatcccccgaggcccgaaccagtaaattacgccgaatccggcagtcgtatggccctgcacaccagtgctttgtgaaaagcttgcagattcatcaattgacgtgcacttgccttttatatggacgctgacgtatggaggtgcacactctccacctccgtatatctcgccacctactctgtttatattagaaggttgattgctgacacacaacacctgctcgtacttttttgtcgaaatcatgacggacaacaacgctaaacatatagtacaatcttcttgtcttgctgatctgctatgcccctttgtgaaatctgccggtgacatcagcgatggcgtcttgctgatctcgtggtatacctgatgtttcctcggtctcagcttttatcacgcagtagtgca

SEQ ID NO: 208818 - DNA, 1717 bp, Zea Mays
tcgcttctgctgctaatgccgccatgttgataagtctcgtcgggttgccggatctttccctgatctcagcggtttcgtgcgtgcattgcagtacaaggaggtcgtgggatcaggggccttcaagacagtctacaaaggtttcgacgtggtcgaaggcatcgaggtggcatgggctaaagtggagataaccggccggaccatgggatcccccaaggagctccagcggctcaagacggagatccagctgctgcggtcgctccatcacaagcacattctcaagctctacgcctcatgggtcgacaacaagaagagggcggtcaatataatcactgagcttttcacgtccggcaacttgagagagtaccgtacgaagcacaagaaagttgacatgaaggcaatgaggcgatgggccaaacaaatactgacagggctagcctatctgcatagtcagaagccaccaatcatacacagggacttgaagtgtgacaacattttcatcaatgggaaccatgggaaagttaagattggagacttcggtttggcaatggtgatgcagcagaggaaaacacagagtatacaaggcaccttagagttcatggcaccagagctgtttggtgaaaactacaacgagttggtggatatatactctttcggcatgtgcatgcttgagatggtgactggtgagtgcccttacagtgaatgtcagggctttgttcagatatacaagaagatatctgaaggtgtaaaaccagttgctctctccaaggtcaaagatgcagaagtaaggagtttcatagagagctgcctagcttcagctgctgatagattgccagcaagtgagctcttgaagagcccttttctcatgatagatgacatcatcatcaatgataaaacctctaatcctgtgcaagaacctatagcattcccgccaaatttggatctggatcttgaagccacaccaatttttatatctttgctaccaaatggaaccgttgataatgggaagggatctttcagcctagtgcttcgaaggggtggattcgtactagaaggagatatgagtggtagcaaccctgttaatttattactaaggattcctgtccccaatggtaaatgtaagaacattgagttcgcgtttgacctggagaatgatacaagtcttttggtggctacagagatggtgcaagagcttgaactaccttcttggagcatgcctattgtggcaaagctggtagatgcgttcctgctcaaaactgttcgtggttggaggccgtgtgttcaggtcggtcagatgattcaggcagtgcaaaacactgcatccgtgaatggaaaaagcatctgaatcaatgtttgtagctgatgcattattctgcaccttatgtaaatatatcatgcccgaatgcaacgccaggccttgctgactaagcacatcttcttttatctgatgctggttaaagtttgggcatgattcctaattagaatagtggtatgtttcgtattttttttggttcgtattgttagaaagaggttcagagataagagaaattaagaatgctgtaacagccatccttgctttttttcagttttttttaaaagccttaccatgtgtctatttggtactgctcaacttcatgatttgcagcttagctttacaagaagtctgttgttcacttgttaccaaatgctatggataaaaaacaagacaattgttaaggat

SEQ ID NO: 208819 - DNA, 1718 bp, Zea Mays
ctctctgtctctctctatcttgaccatatatacgaccaagccaaggcacaagcacaagtcacaacgccctagagtagaggctgagctgcatatatcaccgagcaccctctctctctctgttcccctccctcgctcgacatggaggtcgccgccgccacttgtacgctccttgctgccgtcgccctaccagtttcgtcctcagcagcagcagcacgctctgcgacgaaacagagctactcgaggaggaagacgacggccgtgcgagccgtcatggcgaggccgcatcaggtgccgccgcctgccactgccaccgccaccgccaccacgtaccgcgacaactggttcgacaagctggccatcgggtacctgtcccggaaccttcaagaagcttctgggatgaagaacggaaaggacggctacgagggcctgatagaggcggccctggccatctccgcgctgttcagggttgaccagcagtgggacactgtggccagcgctctccaacgggccttccccagctacatcctcaccatggcaaatatatatatacacacacacttgattttaacatatacacatgctgcctgcgagcaaagctattgcaaaacaagattataaaaataaataaaactctttcgtcacgaaaggaaaaaagaaaaaaagaaaagaaagaaagcctacacattaaagtagggtcaggggttctttgaatataataaaaaggtggattttggttgcgtttttatttccttacctgactgttgcatgcatatgcagatcaaggtgatgatgccaccctctcgattctcgcgggagtatttcgccgccttcaccacggtgttcttcccttggctcgtcggaccatgtgaggtcagggaatcccaagtggatggaagggaagagaggaacgtggtctacatacccaaatgcagatttctggaaagcaccaactgtgtcggaatgtgcacgaacctctgcaaaatcccatgccagaggttcatccaggattcacttggcacggctgtctacatgtctcccaattttgaggacatgagctgcgagatgatctttggacagcaaccacctgaagatgatccagcactgaagcagccctgcttccggacaaaatgcatcgcaaagcagaatcatcaagtgaattgctctatttgatttgagaggaagtggatatgtaaattactatactactatcagtggaaattcccaaaattacatgctttcatgtttattcccttagtaagcagcatcagtttcatagattctttttacttgaaaacatagcagaaggcaattctagtatacgtcaaattgttaggaaactggttgctgatcaagaggattgaagaggaaacacaagatatgcctttggaaaatgcacaggattttagtgaatcccttgtaagaaagatatattaaagaagtgtgaagaatggaattacccataccagaaagtttcatgttaattgaggaaactaaactagataagaaaagtaggctagaccaaataatagatgtaaactaaacaaaagaatatgttttatggtatttttatgtatctcaagctaatggtgcagagatataacgtgctccacctagatggtgaccagtattaatagaggttttaaagtcgtctgactaatcatgattagtcggcctcatcgctagagggagcttgattagggcctccgactcgattagag

SEQ ID NO: 208820 - DNA, 1680 bp, Zea Mays
gcgtgctccaggcccctctcgaagtcgaagccaggaattttacccgcgttccaaatgagctttagcggtcgctgtcgtggagcacagccgcaccgcactcacaccatttcaccatctctccgcggaagcagatcctctccgctcgccagcctccccctcctgctgctgcctcctcgcttcaagcaacacccgaagcggcaacaaccaccaccaccaccaccaccggacctgcctgagcgaccccttggcttcccactccactgaagcagggcgagagagagtaaggaggaggaggagaagccatggcgagcgacggcgacggtaagggccgcgtcgctacggcgccgggggcagggtacgggtacgcggcgtacggcggctaccagggggcggaggagcggaagtggtggccgtggctcgtgcccaccgtcatcgtcgcctgcatcgccgtgttcgtcgtcgagatgtacgagaacaactgccccaagcacgggagccagctcggcgactgcgtcgccggcttcctccgccgcttctccttccagccgctccgcgagaacccgctgctcggcccgtcctcctccactttggagaaaatgggagctcttgactggaataaaattgtccatcaaaaccaagggtggcgccttattagctgcatctggctccatgctggcctaatccatttggttgtgaacatgctaagtttgctgtttattggaatccgccttgagcagcaatttggatttgttcgcattggtgccatatacctactgtctggttttggtggcagcgtgttgtctgcactcttcctacggaacagctacatctccgttggtgcttctggagctctatttggcctgctgggatccatgctttctgaactactcatgaactggactatatactccaacaaggcagcagctataataacactgttgtttattattgcactcaatttggctattgggatactacctcacgttgacaactttgctcacattggtggattcgcgacgggtttcctcttgggttttgttctgttggcaaggcctcaatttagctggatggaaagtcatgagttgccacacactaaccaacctcccaagtacaaagcataccagtatattttgtgggttgtggcactcgtcttgctgttagttggaaaacgtgcaacaaagattcgtgattctggactaatgctaaattttggacgagctataaagatgtcacttgttttttgtgaaagcttgaaataacactaatgtcaaaattcttggggcacaggtttgtgatttcactggtgatgcttttcaaagggaagaacgggaacgatggctgccattggtgccactacctgaactgcgtgccaacatccaagtggaagtgtaacacctagacacctcagttttctgtacactcgggggcaaaaatgtagtatccagatttacaagaccattctctatgtttgtttgtctgtagatatgaacaagttctttgttgtttactggttttgagtttccttgcctatgtaaactgcttcgttgagcgttctatgtttataattggagtttgatagctgttttaaattgctcaatggaaaagcagtagctttggtgcgcagttgatcgtggtgtttacacaaataaaaatacgataattttttatctaacagataac

SEQ ID NO: 208821 - DNA, 330 bp, Zea Mays
gcgtttattccacgccgcaccgtcctttccagaaccctctggtctccgcgtgcggcggcgcgatttctttgcttctcccttccacttcgagagattgttgattattctagagccagatccgggtaacagattcgagtttgcgcccgccctgttcggcttcagatatggggaacactacatctgtgcaagctgaggcttcagattcagcgcagaaacctgccacaacagctcctgcacctgggtcaaagccgaaaaagatctattgttgattattctagagccagatccgggtaacagattcgagtttgcgcccgccctgttcggcttcag

SEQ ID NO: 208822 - DNA, 3332 bp, Zea Mays
accgagccttatccaaagcccttcccttcactgtcccgctaaaccccggccacgaccacgatggccaccccctccacctccgctccgtcgccgtcgccgtcctccgccttcccactcaccaccaccacacgcttcccccgctcatgctcctgccccgtgcgagcctccgcgctcgccgagcggcggcgcacgcggcggcgccgggcgcccgatggtgggggcgccggtggggaccgctcggcggccgccggggcggtggagaagggcctgcgcctggtcttcctcgagcagctcgcggagcgcgcgagggctgccgacgccacgggcgtggccgacaccatctacgacatggtcgccgcggggctttcgcccgggccgcgctccttccacggcctcgtcgccgcgcatgtcctcgctggcaacgctgaaggcgccatgcaatctcttagaagggaactcagttctggtgtgcgccctctacatgaaacttttgtggctctggtccgtgtttttgccaagaagggtctttctaccaggggcatggagatccttgctgccatggagagatataaaggaactagtgaagaatcattatctcgaggatgccaatacggtatttctgaaaggggcaaaaggcggtctacgaggaactgatgatatttatgatcttctgattgaagaagattgcaaagctggagatcactccaatgctttgacagttgcttaccaaatggaggcttatggaagaatggcaaccacattccattttaattgccttctcagcgtgcaggctacttgtggaattcctgaagttgcctttgcaacatttgaaaacatggaatatggaggtgaagattacatgaaacctgatacagagtcttataactgggttatacaagcatttactagagctacgtcctatgacagggcagcggatgtcgcagaattactcgggatgatggtggaagatcacaaacgcattcaacctaatgcaagaacttatgcgttgttagtggaatgctttacaaagtactgtatggttaatgaatcaatcaggcattttcgtgctttacaaagaatccctggaggaacagaagtcctttacaatgaaggaaattgtggtgacccactttctctctatctacgatcattgtgcctcgatggaaggcctgttgagttgcttgaggctttagaagcaatggctaatgataaccaaagtattgcacctcgagcaatgatcttaaacagaaaatatcgcacattggtgagctcctggatagaaccattacaagaagaagctgatgttggttttgaaattgattatgtggccagatatattgaagaaggaggtcttacaggagagcgcaaacgttgggtgcctcgcagaggaaaaactcctttggatccagatgaatttggatttgcctattcaaatccgatagaaacatcctttaaacagcgatgctttgaggaattgaagttatatcatcgaaaactcctaattacgttgagaaatgaaggccctggtattttgggtgatgtctctgaagaagatgtacgcagagttattgaaaggctaaaaaagttagttgtagggccaaagaaaaatgttgttaagcccaaggcggcaagcaaaatggtagtatctgaactgaaaactgagcttgaagctcaaggattacctactgatggaactagacaagtgctttaccagagagttcaaaaggctaggagaatcaatcgctcacgtggtgtaccactttgggttcctcctgtagaagacgaggaagaggttgatgaagatttagatgagctgatctcacgaatcaagccagaagatgggaacacggagttctggaaacgccgttttctgggagaaactcgaaactatctttgtgaagaagatagtaaagaagacggtcaagatttagatgatgaattggaagatgatgatgacaacgatgatgatgaggatgacgatgaatctgtaaaagaagcagaagaagatgagatagatgatgaagaggttgttgagcaaacagaaaatcaagttggtgatgacactaaagataaaccagcaaaagaacccaaccatcatcttcaaatgataggggtacagttattgaaggatatagagaggacacctgtttcttcaaagaaattaaagcggatgccagagattgatgatgatgaagactggtttcctgaagatccaattgaagcctttaaggttatgcgggaggagaggatgttcgatgtatcagacatgtatactactgcagatgcctggggatggacgtgggaaagagaaataaagaacaagatgccacgtaagtggtcacaagaatgggaggttgagttggctatcaagataatgcacaaggtaatagaactgggtggtactccgacaattggtgattgtgccattatattgcgagctgctatgagagcaccactcccatctgcttttataccaatattgcaaacaacacacagtctaggttataagtttggaagcccactgtatgacgaagtagtcctattgtgccttgatctggaagaaattgacgcagccattgcagtagttgcggaaatggagacttgtggggttaaggtgccagatgaaaccttggacaaggtgcttgcgtccaaacggtctggaaattctgccctcccaccacctacggaggagtaatcaatttggacatgcgagacttctgctgctcgtgcttgacgtgacaccagaaaatcacaagcaatgcatatgtttggagcttctcctggaaaagaacatgctgtatgatagtttgtcggtgctgtgtccaacgatagaggagatatgaagttgttagtatgatacctggcatggtatatttgattagtccgttgaatttttgtatggatggtgaagcatgagaaaaggtcgagtttttttttataactggtggaatggtgtgggtgcgttgtcttagggtgctttgggtttggcttctgggagttgcttttgcttcaaaaagtcaaaagctgattaaagtgatagaaacaagaactttcggattttaactttttgctttttaaaatggtcaaaacagttgtttagagacatagataacaagtagaatttcaagtagaatttctacttgtttgaatcaaataatttaaagttttttatatagtttacaacacaacgcagtttaaccaaatacatccttaatcacttctgctaaaataccacgtctgctttaagatctagattctgtcagagagttaagacttttctagttgtattttaatccagaaaattgatatgaaataactagtgtggatctaat

SEQ ID NO: 208823 - DNA, 3156 bp, Zea Mays
cagaaacaccgagccttatccaaagcccttcccttcactgtcccgctaaaccccggccacgaccacgatggccaccccctccacctccgctccgtcgccgtcgccgtcctccgccttcccactcaccaccaccacacgcttcccccgctcatgctcctgccccgtgcgagcctccgcgctcgccgagcggcggcgcacgcggcggcgccgggcgcccgatggtgggggcgccggtggggaccgctcggcggccgccggggcggtggagaagggcctgcgcctggtcttcctcgagcagctcgcggagcgcgcgagggctgccgacgccacgggcgtggccgacaccatctacgacatggtcgccgcggggctttcgcccgggccgcgctccttccacggcctcgtcgccgcgcatgtcctcgctggcaacgctgaaggcgccatgcaatctcttagaagggaactcagttctggtgtgcgccctctacatgaaacttttgtggctctggtccgtgtttttgccaagaagggtctttctaccaggggcatggagatccttgctgccatggagagatataagtatgatattcgcaaggcctggctaattcttgtaggctacttgtggaattcctgaagttgcctttgcaacatttgaaaacatggaatatggaggtgaagattacatgaaacctgatacagagtcttataactgggttatacaagcatttactagagctacgtcctatgacagggcagcggatgtcgcagaattactcgggatgatggtggaagatcacaaacgcattcaacctaatgcaagaacttatgcgttgttagtggaatgctttacaaagtactgtatggttaatgaatcaatcaggcattttcgtgctttacaaagaatccctggaggaacagaagtcctttacaatgaaggaaattgtggtgacccactttctctctatctacgatcattgtgcctcgatggaaggcctgttgagttgcttgaggctttagaagcaatggctaatgataaccaaagtattgcacctcgagcaatgatcttaaacagaaaatatcgcacattggtgagctcctggatagaaccattacaagaagaagctgatgttggttttgaaattgattatgtggccagatatattgaagaaggaggtcttacaggagagcgcaaacgttgggtgcctcgcagaggaaaaactcctttggatccagatgaatttggatttgcctattcaaatccgatagaaacatcctttaaacagcgatgctttgaggaattgaagttatatcatcgaaaactcctaattacgttgagaaatgaaggccctggtattttgggtgatgtctctgaagaagatgtacgcagagttattgaaaggctaaaaaagttagttgtagggccaaagaaaaatgttgttaagcccaaggcggcaagcaaaatggtagtatctgaactgaaaactgagcttgaagctcaaggattacctactgatggaactagacaagtgctttaccagagagttcaaaaggctaggagaatcaatcgctcacgtggtgtaccactttgggttcctcctgtagaagacgaggaagaggttgatgaagatttagatgagctgatctcacgaatcaagccagaagatgggaacacggagttctggaaacgccgttttctgggagaaactcgaaactatctttgtgaagaagatagtaaagaagacggtcaagatttagatgatgaattggaagatgatgatgacaacgatgatgatgaggatgacgatgaatctgtaaaagaagcagaagaagatgagatagatgatgaagaggttgttgagcaaacagaaaatcaagttggtgatgacactaaagataaaccagcaaaagaacccaaccatcatcttcaaatgataggggtacagttattgaaggatatagagaggacacctgtttcttcaaagaaattaaagcggatgccagagattgatgatgatgaagactggtttcctgaagatccaattgaagcctttaaggttatgcgggaggagaggatgttcgatgtatcagacatgtatactactgcagatgcctggggatggacgtgggaaagagaaataaagaacaagatgccacgtaagtggtcacaagaatgggaggttgagttggctatcaagataatgcacaaggtaatagaactgggtggtactccgacaattggtgattgtgccattatattgcgagctgctatgagagcaccactcccatctgcttttataccaatattgcaaacaacacacagtctaggttataagtttggaagcccactgtatgacgaagtagtcctattgtgccttgatctggaagaaattgacgcagccattgcagtagttgcggaaatggagacttgtggggttaaggtgccagatgaaaccttggacaaggtgcttgcgtccaaacggtctggaaattctgccctcccaccacctacggaggagtaatcaatttggacatgcgagacttctgctgctcgtgcttgacgtgacaccagaaaatcacaagcaatgcatatgtttggagcttctcctggaaaagaacatgctgtatgatagtttgtcggtgctgtgtccaacgatagaggagatatgaagttgttagtatgatacctggcatggtatatttgattagtccgttgaatttttgtatggatggtgaagcatgagaaaaggtcgagtttttttttataactggtggaatggtgtgggtgcgttgtcttagggtgctttgggtttggcttctgggagttgcttttgcttcaaaaagtcaaaagctgattaaagtgatagaaacaagaactttcggattttaactttttgctttttaaaatggtcaaaacagttgtttagagacatagataacaagtagaatttcaagtagaatttctacttgtttgaatcaaataatttaaagttttttatatagtttacaacacaacgcagtttaaccaaatacatccttaatcacttctgctaaaataccacgtctgctttaagatctagattctgtcagagagttaagacttttctagttgtattttaatccagaaaattgatatgaaataactagtgtggatctaat

SEQ ID NO: 208824 - DNA, 2303 bp, Zea Mays
atgcacggatccacggagccactggagcgtccacgaaggagatccagagagggcgagggccgactgagagaggagagggaaatgtggaagactggaagggtcaagggaggttgggcgacagtgggtaacggggacggggggagatattttgatgtttggtcgggcctggaacgggccgtgctcgggctcagcacggcgtgccccgactcaggcccaagcacggcccgggtgtcgtgccggaccgtgctggggctcagcacggtgtgccccgactcaggtccaagcacagctcaggtgtcgtaccgggtcggctcgagcccgtcgagtaccgtgccgtgccggatacgggtcgggcctaacccgtgccgtgcttcgggctacgcgttaggcccgattcgtttggacatgtatagtttcgtccaaaccgaaggagattaaggggatgctacattggtgtggggctttcggttcgctcccggcgccggcgacctatggtgattaaacgagtagtagcgaccgataagatagaaacaacgattcggcgaggatacagtactacggaagggacggcccaatggcgagcggcattttaatatccacgcacgatgcaaggaacagaaagcatatggtcaccgatggttcgtagcgacgtcgccgcccacgcatttatgccgccgcgcgccgcgctggtacgttcgagcgagccctgtggtctggtctctcgacgtttgcccggctaagctgcggagccgtccgacgacctgcccggccgcgtgctactgcatatacactgcacgtccccgtggtctgtcgttctgtcaacagtgcccacgggacgggcccccgggcacgacgacgttgaacgaaacgaacgttgctgccttgctggcgtgaaaggcgacgcgcgtcgtgcgacggccaccagagagtctccgcgctcacgggatccgagcgcccagcggtgcgggccagctcgtctcgtctgagcacacagcacagggcgattgcgctgggagccaatgcgctgcgcccgcgggccacggcgggcccaatgccatgatgcgccggcccgggtcgccgtcacgtacgcgcgcatgggttccttcatcccttgccgactcccctgtcagaaaaaaaaaatacgaggccgtgtccttcctgtcagaatttagaaacacatcaaaccttccgctctcttcccttcctttgcgggctgctctccagttcaggcgtccagcttcgcccagagtccagacacggccaacagttaaacgcgccaccgccaccacgctcgcacgcacgccccacaggtacagctagctcccacccctcaacagcaacagctaagcttctcctagcagacagcaacatgaccgaggaggaggccaaaaaggtggaggtggaagtggaggtcaccaaggcggcgccggcgaaggagaacgccgccgaagagaaggccgtcatccccgcgaccgagccgccggccgcccaggagaagccgccagcgccggccgacgactccaaggccctggccatcgtcgagaataaatctactcctgagaagcctatcgctgagaagcaagggggctccagtatcagagatctcgctcttgcaagggtggaaacggagaagaggaactctctgattaaagcatgggaagataatgagaaggcaaaagctgataacaaggctactaagaaagtatctgttattctttcatgggagaacacaaagaaagcaaacatagaagctgaaatgaagaagattgaggaacaactggaaaagaagaaagctgaatatgctgagaagatgaaaaacaaggttgcaatgatccacagggaagccgaagagaagcgagcgatggtggaggcaaagcgcggcgaggaggtcctgaaggccgaggagatggctgccaagtatcgggccaccggccacgcccctaagaagcccattgggtgcttcggagcctaagaaatgttccaagtcacaccgagcagaaagtgagaaacctcaaccagtgattgcttggtcacctcgctctatcaagtgtgtagtgtgtgttcgaaagtgtgtaagtcctactgctcctgtatatatagatatcgcttccaagacgtgtacatgttggatgcttgatgtgaaacttttttatgtatagttaaggagtcacactgttgttttcgttgttgttgacatttaagtggatttttttgttgttctccttgtgttggtattttttgtccctgtctctttgttccttactactgatttaagtttctgtccatgtgcatctatgattttc

SEQ ID NO: 208825 - DNA, 2966 bp, Zea Mays
ctcctttctcccgtccccgcacaaaaacatttgccccccacccggccacccctcccgagtcccgactgctactgccgctgcctcctctccctttccgcctgccttcgctctcctcgtcgtctcctccgtctagggttctccaccccacccgccccgccgccgcccgatccgaggcagatgccgcccgcagccatggcgctgccgtcccaggccccgtctaactcaggggatccgctgtacccggagctctggcgcgcctgcgccggcccgctcgtcaccgtcccccgcgtcggcgacctcgtcttctacttcccccagggacacatcgagcaggtggaggcgtccatgaaccaggttgccgggaacccgatgcgtctctacgatctgccttccaagctgctctgccgcgtgctcaacgtcgagctgaagggcaacccaggaggcatctccttcagagtggttggagtgtttttgtcagttccaaaaggcttgttgctggagacgccttcattttcctcagaggagaaaacggtgaacttcgagttggtgttaggcgcgctatgaggcagttgtctaatgtaccttcttcggttatatctagccaaagcatgcatctcggggttcttgcgactgcatggcacgctattaacacaaagtccatgttcactgtctactacaaacctaggacgagcccttcagagttcatcattccatatgatcaatatatggagtcagtaaaaaacaattattctattgggatgagattcaggatgaggtttgaaggggaagaggcccccgagcagaggtttactggtacaatagttggctgtgaaaatcttgacccactatggcctgattccagttggagatacttgaaggtgcgctgggatgagccttctactatcccgcggccagataaggtctctccctggaagatagagcctgcttcatcacctcctgttaatcctctccctctttctagaggaaaaagacctagacaaaatgcacctccaccttcccctgaatcatctgttctcacaaaagaaggtgcaaccaagattgatactgattctgctcaaacaccacatcaaaattcggtcttgcaaagtcaagagcagatgagctttaggaacaacctgactgaaagcaccgactctgattccactgttcagaagcagatgatgtggtccccatcacccaatgggaaagttcacactaattttcagccgagacctgctatggataactggatgccattgggaaggcgtgaaactgacttcaaggacacccgttctgccttcaaggatgcccgcaccgcttctcaatcgtttggagatacacaggggttctttatgcaagcttatgatgacagtcgtcaccgtctttctttcaacaatcagtttcaagatcagggttcagctcatcgctttgcagatccatacttctatatgcctcaacaaccttctctgacggttgaatcaggcacaaggacgcaaacagcgaacaatgacttgcgtttttggagtgagcggaattcgatgtatggtaatccaagtgaccaacagcagggtttcagctttgggcaaaacacatcaagttggttgaaccagccacttccccaggttgaacagtcacgagtggtcaggccgcatgcaacggttgctccatttgatttagagaagactagagaaggcagtgggttcaaaatatttggtttccaagttgatacaaccaatccatcacctgtccaattgagctctccattgtctgctatccgagagcatgtggtacaaactcgaccatcggcaccagtgaatgaattgcaacctgtgcaaattgagtgcttgcctgaggtgtccgtaagcacagctggaactgcagctgagaacattcagcaagtccagcaaagttcgaaagatattcaaagcaagtcccagggcgcttcaacaaggagctgtacaaaggttcataagcaaggagttgcgcttggccggtccgtggacctctctaaattcaccgactacggtgagctcaaagcggaactagacaagatgtttgagttcgagggcgaattggtatctgctaaccggaactggcagatcgtttataccgacaacgagggtgatatgatgcttgtcggagatgacccgtgggatccattgcttacgagcagggagttctgcaacatagtgcgcaagatctacatctacacgaaggaggaggtccagaagatgaactcgaaatcatccgtgccgaggaaggaggaacccccagcagcaggcgaaggctgcgccgccgccgccgcaaacgagtaggatgtctgcctgcactgcagcaagcagttttagatgactaggtcgtgtggaggaagccgacgatgatgcatgcgtgatgaacccgttccttgtgcaggaggtggtgccagcccgggtcccagggaagtaaaaactcctgagatcttttgcttgtccgttgcagccccatcccccgtccgtttgggttttagttgggaacgtagaaactactgtctccgcctgcttctccgaagctcgctgttggtagcaagttttattgctagtattattgttattgctgatttgctcccctctgcctttgcgatgtaaatatttgtgtacccagccccagccccagccccagccccagcttgtagtgagcagtaacaagcagtagcggtaccttcggtattaaccggcagctagctatttcgcggcattttaatccctgtaagcgtagctctgtggcgtgagatagatgacaaacactgggtatatgtatgtctgatctttctcactgaatgtaccataagagagtttgtagagtacctgacctgtgaccaaccccgttcctgtcagctctctggtctcagcaacacgctgtgtgatgccgcatatggtcaatgcaagtccgtgtcgtttacaacgtccgtcttcgtggcgatgacggcg

SEQ ID NO: 208826 - DNA, 3529 bp, Zea Mays
ctctgctctcctttctcccgtccccgcacaaaaacatttgccccccacccggccacccctcccgagtcccgactgctactgccgctgcctcctctccctttccgcctgccttcgctctcctcgtcgtctcctccgtctagggttctccaccccacccgccccgccgccgcccgatccgaggcagatgccgcccgcagccatggcgctgccgtcccaggccccgtctaactcaggggatccgctgtacccggagctctggcgcgcctgcgccggcccgctcgtcaccgtcccccgcgtcggcgacctcgtcttctacttcccccagggacacatcgagcaggtggaggcgtccatgaaccaggttgccgggaacccgatgcgtctctacgatctgccttccaagctgctctgccgcgtgctcaacgtcgagctgaaggcggagaccgacaccgacgaggtgtacgcgcagatcatgctcatgccggagcccgagcaaaacgatgtggctgccgagaagacgagctctgggtctgctgcgccaccgaggccagcggtcaggtcattctgcaagacgctcaccgcctccgacaccagcacacacggcggcttctctgtcctgcgccgccacgctgacgagtgcctccctgccctggatatgtcccagtcgcctcccactcaggagctggtggcgaaggatctgcatggcatggagtggcgattccgccacatcttccgcgggcaacccaggaggcatctccttcagagtggttggagtgtttttgtcagttccaaaaggcttgttgctggagacgccttcattttcctcagaggagaaaacggtgaacttcgagttggtgttaggcgcgctatgaggcagttgtctaatgtaccttcttcggttatatctagccaaagcatgcatctcggggttcttgcgactgcatggcacgctattaacacaaagtccatgttcactgtctactacaaacctaggacgagcccttcagagttcatcattccatatgatcaatatatggagtcagtaaaaaacaattattctattgggatgagattcaggatgaggtttgaaggggaagaggcccccgagcagaggtttactggtacaatagttggctgtgaaaatcttgacccactatggcctgattccagttggagatacttgaaggtgcgctgggatgagccttctactatcccgcggccagataaggtctctccctggaagatagagcctgcttcatcacctcctgttaatcctctccctctttctagaggaaaaagacctagacaaaatgcacctccaccttcccctgaatcatctgttctcacaaaagaaggtgcaaccaagattgatactgattctgctcaaacaccacatcaaaattcggtcttgcaaagtcaagagcagatgagctttaggaacaacctgactgaaagcaccgactctgattccactgttcagaagcagatgatgtggtccccatcacccaatgggaaagttcacactaattttcagccgagacctgctatggataactggatgccattgggaaggcgtgaaactgacttcaaggacacccgttctgccttcaaggatgcccgcaccgcttctcaatcgtttggagatacacaggggttctttatgcaagcttatgatgacagtcgtcaccgtctttctttcaacaatcagtttcaagatcagggttcagctcatcgctttgcagatccatacttctatatgcctcaacaaccttctctgacggttgaatcaggcacaaggacgcaaacagcgaacaatgacttgcgtttttggagtgagcggaattcgatgtatggtaatccaagtgaccaacagcagggtttcagctttgggcaaaacacatcaagttggttgaaccagccacttccccaggttgaacagtcacgagtggtcaggccgcatgcaacggttgctccatttgatttagagaagactagagaaggcagtgggttcaaaatatttggtttccaagttgatacaaccaatccatcacctgtccaattgagctctccattgtctgctatccgagagcatgtggtacaaactcgaccatcggcaccagtgaatgaattgcaacctgtgcaaattgagtgcttgcctgaggtgtccgtaagcacagctggaactgcagctgagaacattcagcaagtccagcaaagttcgaaagatattcaaagcaagtcccagggcgcttcaacaaggagctgtacaaaggttcataagcaaggagttgcgcttggccggtccgtggacctctctaaattcaccgactacggtgagctcaaagcggaactagacaagatgtttgagttcgagggcgaattggtatctgctaaccggaactggcagatcgtttataccgacaacgagggtgatatgatgcttgtcggagatgacccgtgggaggagttctgcaacatagtgcgcaagatctacatctacacgaaggaggaggtccagaagatgaactcgaaatcatccgtgccgaggaaggaggaacccccagcagcaggcgaaggctgcgccgccgccgccgcaaacgagtaggatgtctgcctgcactgcagcaagcagttttagatgactaggtaagtcctccgtttgagccgcagtactctgttttttttgttgttgttgcaacagtggtggtgaatggggttttgactctggactaaaggagcaacgaatttgtctttgttgaatacctgttaatgcattgctaaattcagcatctcggctgcattggcgctctggtcacatgatacttaagtttggcattggcatgataggaggctgcagtgatgggaaaaggaaaaaggggggctcatcttttggttgtcgctttttggctttgtgtgtaggtcgtgtggaggaagccgacgatgatgcatgcgtgatgaacccgttccttgtgcaggaggtggtgccagcccgggtcccagggaagtaaaaactcctgagatcttttgcttgtccgttgcagccccatcccccgtccgtttgggttttagttgggaacgtagaaactactgtctccgcctgcttctccgaagctcgctgttggtagcaagttttattgctagtattattgttattgctgatttgctcccctctgcctttgcgatgtaaatatttgtgtacccagccccagccccagccccagccccagcttgtagtgagcagtaacaagcagtagcggtaccttcggtattaaccggcagctagctatttcgcggcattttaatccctgtaagcgtagctctgtggcgtgagatagatgacaaacactgggtatatgtatgtctgatctttctcactgaatgtaccataagagagtttgtagagtacctgacctgtgaccaaccccgttcctgtcagctctctggtctcagcaacacgctgtgtgatgccgcatatggtcaatgcaagtccgtgtcgtttacaacgtccgtcttcgtggcgatgacggcg

SEQ ID NO: 208827 - DNA, 2378 bp, Zea Mays
tcccccgcggaaggacgacgacgcaactggcagtcaccgacgcgacgcgggtcgtctcctcagccctcctgttcagcctcctcgccagcgatggcttcgggcgccgacgccgcggcgctggtgacctccggcgccgacgagtgggcagcggcgtgtccgccgctgcggcggaacctgcagctgctcgcgcctgacgaggttgagctagcaaaaatgctgttgaatgagggccagattcacctatttgaacactggcctgaaccaggcattgatgacgacaagaaaagaggcttctttgatcaggttcgccggcttaattcaagctatcctggaggtctggtatcttacatcaagaatgccaaaaaacttcttgcagattcaaaggcaggaaaaaacccatatgatggtttcaccccttctgtgccttcaggggaaattttgaacttcggcgatgacaattttgtttcactggaagcagctgggataaaagaagcccacaatgctgcatttgttcttgtagctggagggcttggtgaaaggcttggttacaaaggaattaaggtagcacttccccgggaaacaacaactggaaaatgtttcattcaacattatatagagtctatcctggttttacaagaggccagctgcaaaacggttgatgatgggtgccaaaaaaagattccatttgtcattatgacttctgatgatacaaatgcactaactatcaagcttttggagtcaaactcttactttggaatggaaccatctcaagtgaaattgctaaagcaggaaaaagtagcttgtctagctgacaatgatgcaaggcttgcattagacccaagtgacaagtacaaaattcagacaaagccacatgggcatggagatgttcattctcttctttattcaagtggcttgcttgagcaatggcaattccgtctgctttaggtgtcagtgccaccaagggttacaatgtaaattctctcgcagttcctaggaaggctaaggaagcaattggaggaattaccaaacttactcatgttgatggtagaacaatggtcatcaatgtagagtacaatcagcttgatccactccttcgtgcaactggttatcctgatggagatacaaattctgagacaggctattctccataccctggaaatataaaccagttgatactggagcttggaccatacattgaggagctaaagaaaacgcatggtgccatttctgaatttgtaaatcccaagtatactgattcgaccaagacatcatttaaatcatccactcgtctagagtgcatgatgcaagactatccaaagacgttgccaccctcaacaaaagttggattcacggtgatggatacatggcttgcttatgctcctgtgaagaataatcctgaagacgcggctaaagttccaaaaggcaatccttatcatagtgcaacctcaggagagatggcaatttacagggcaaacagccttattttgagaaaggctggtgcgcagatagctgaccctgtcgttgataccttcaacgggcaagaggtagaggtctggccacgcgtaacctggagtccacggtggggtctcaccttccagagcgtcaaggagaaagtgcatggcagctgttcagtttctcagaggtcagctttggtcatcgatggccggagtgtcttcctcgacggactttcattggacggcacccttattgtcaatgctgtggatggtgcagaggttaaagttactggtcatgtagaaaataagggctggactatccggcatgtggactacaaggacacctcggagaaggaagaggtcaggatccgtgggttcaagttcaacaagtctgagcagctagaggtgaactacaccgagccaggaaagcatagcttgagtgcgtgaaaagaaaacattcttgacctgactagcttcgtaccaaaatggaaatagctcacatctgggtcgcctcccagattctgggagggaggccaatgccagcgtagctgaaaccgttcttctccttcccccacgtacaacaaggagcaaagtgcttcaccaagcactcaacattctttatgtatatcttgtacagaactcctcttcagtgcaatcagagttcattgtttgtttgggatctgatgtttatgttacaattttttattttagaaaacttggcactgaatcaagtaataagtgtggtagtgtgtagaagtatagtaacgggctataagcctacttatgtggcattttttgtctgtgtggatgagagacattaaaaagtggaggtgggctctcatgcaagagtcagcttctatatgagctcttagataaaaggatgaaatagaaagatacactataatgatctaagagtcaactttg

SEQ ID NO: 208828 - DNA, 1826 bp, Zea Mays
cgttacggcatgtcccgtcccgtcccagagagagaaaccacggctgcgcacagcgagttagatagagagagagagagagagagaccaagaccaaggccaaggagcaccgctccccgtacatccccagcaggagagggagagagacagagaaggctgtgcgaagggaagaagacccggcgggagagaagggcgacatggagaggccggcgcccgtgaggaagtcccacacgtcgacggcggacctgctggtctggccggaaggtgcgccgcaggagttgcccgccgggtccacgccgccatccaaccgccggccgcaccagccgtcggaggcgctcaggaaggtggtgttcggcgggcaggtgacggaggcggaggccgagagcctcaacaagagttctggtctataggctccggaaaaggaatggctagtagtgttaccgtaatgtgactatggtttagcccttcatggaattgccatctcaccaactatgttggagtactgcaaactgaccgtagccatcaaaatgctccccgtaaggtatgctgactaacgatgagctgtgaaaccaatagttccatttgagatcacttgcactctttaaacgacaacgactaatctggctttcgtgcactatcgatgaacgtcgatcacagcgctcctggtctgtgtatgtttcggcaagttctgcgtatgtcgtagtttcattggttatttagattccagagtaccacccgagtggaaggagatgacaagctgttcttttcccccttcaggaaaccatgctctgctcccaagtggaaggagatgacaggaagcggtatatttgcagctgggggcgagggtgaagaagatgaatccgccaatgtctctgcaacttccgtccggacggctccaaagaattatcaggcaatcagtactataagccacatctcatttgccgaggaagaaagcatctctccaaagaagccaacttcgatatcagaggtcgcaaagcagcgcgagctaagcggcacgcttctgagcgaggacgacagcaagatgaagaggcagatatcggacctgaaatccaaggagctcagcggccacgacatctttgcccctccggaggatcccaggccacgcaactcggagaacggctcgacctcgcagactccgggcaaaaatgtaagcaacttcaagttcggcgaggccgacgaggacagcgcggtgaagaccgcgaagaagatccccaccaagaagttcaccgacctcgcgggcaatatcttcaagggcgacgacgaggcacccgggacggcggagaagcaccacctgagcacggcgaagctgaaggagatgaccggcagcgacatcttcgcggacggggaggccccctcccgggactacctgggcggaatccgcaagccgcccggcggggagagcagcatcgcgctggtttaacagcagggacaaacaaccagatggacatagcagcccctcccctacatcattcgtttcttcctcatcgccgtcgccgtcgccatcttaggagtgatcttttattagggagttttttttttcgttcattggaggactgatcgattggaacccctggcttgctttcctgtttcccgtgactttcgtcaggttttcgttggtaatcccctccgatggtggtgttgtgtgggtatgacaacaacgatggttatctctaatttaacattgatttggcttgggcttacctgatgcaacaacaaccgccagtggtgcgttgtctgatttccgtgactggatgtctcagctgctgcagagtgcagagggccgggggcgtgacgacgaccacgatgac

SEQ ID NO: 208829 - DNA, 2136 bp, Zea Mays
cgttacggcatgtcccgtcccgtcccagagagagaaaccacggctgcgcacagcgagttagatagagagagagagagagagagaccaagaccaaggccaaggagcaccgctccccgtacatccccagcaggagagggagagagacagagaaggctgtgcgaagggaagaagacccggcgggagagaagggcgacatggagaggccggcgcccgtgaggaagtcccacacgtcgacggcggacctgctggtctggccggaaggtgcgccgcaggagttgcccgccgggtccacgccgccatccaaccgccggccgcaccagccgtcggaggcgctcaggaaggtggtgttcggcgggcaggtgacggaggcggaggccgagagcctcaacaagaggtgagcttccgggcgttttgcccctgccatgttctcttgccggagtggtgggattttttgctctgtttcttgttgtgtcgcctggcgacgagcttctggccttggccactagatctccagagatttacggccccaacactgcggaggtgttctttttctttttttttttgcgcgccgttgttgatctatgcagctgcgggttgagaacttcgttggatttgtttgaggtttgctgcgatatgcgccctagagtcttttaactcggttcttgaagagtttcttttttcagttctggtctataggctccggaaaaggaatggctagtagtgttaccgtaatgtgactatggtttagcccttcatggaattgccatctcaccaactatgttggagtactgcaaactgaccgtagccatcaaaatgctccccgtaaggtatgctgactaacgatgagctgtgaaaccaatagttccatttgagatcacttgcactctttaaacgacaacgactaatctggctttcgtgcactatcgatgaacgtcgatcacagcgctcctggtctgtgtatgtttcggaaaccatgctctgctcccaagtggaaggagatgacaggaagcggtatatttgcagctgggggcgagggtgaagaagatgaatccgccaatgtctctgcaacttccgtccggacggctccaaagaattatcaggcaatcagtactataagccacatctcatttgccgaggaagaaagcatctctccaaagaagccaacttcgatatcagaggtcgcaaagcagcgcgagctaagcggcacgcttctgagcgaggacgacagcaagatgaagaggcagatatcggacctgaaatccaaggagctcagcggccacgacatctttgcccctccggaggatcccaggccacgcaactcggagaacggctcgacctcgcagactccgggcaaaaatgcacacgtcctgacctctgactctgaactcaccctcatcataattacatgaaccaaaccaacccagttacaaaaaagctgcagtgttgcttactgttggttgtcgtgctcgcaacaggtaagcaacttcaagttcggcgaggccgacgaggacagcgcggtgaagaccgcgaagaagatccccaccaagaagttcaccgacctcgcgggcaatatcttcaagggcgacgacgaggcacccgggacggcggagaagcaccacctgagcacggcgaagctgaaggagatgaccggcagcgacatcttcgcggacggggaggccccctcccgggactacctgggcggaatccgcaagccgcccggcggggagagcagcatcgcgctggtttaacagcagggacaaacaaccagatggacatagcagcccctcccctacatcattcgtttcttcctcatcgccgtcgccgtcgccatcttaggagtgatcttttattagggagttttttttttcgttcattggaggactgatcgattggaacccctggcttgctttcctgtttcccgtgactttcgtcaggttttcgttggtaatcccctccgatggtggtgttgtgtgggtatgacaacaacgatggttatctctaatttaacattgatttggcttgggcttacctgatgcaacaacaaccgccagtggtgcgttgtctgatttccgtgactggatgtctcagctgctgcagagtgcagagggccgggggcgtgacgacgaccacgatgac

SEQ ID NO: 208830 - DNA, 1631 bp, Zea Mays
cgttacggcatgtcccgtcccgtcccagagagagaaaccacggctgcgcacagcgagttagatagagagagagagagagagagaccaagaccaaggccaaggagcaccgctccccgtacatccccagcaggagagggagagagacagagaaggctgtgcgaagggaagaagacccggcgggagagaagggcgacatggagaggccggcgcccgtgaggaagtcccacacgtcgacggcggacctgctggtctggccggaaggtgcgccgcaggagttgcccgccgggtccacgccgccatccaaccgccggccgcaccagccgtcggaggcgctcaggaaggtggtgttcggcgggcaggtgacggaggcggaggccgagagcctcaacaagagttctggtctataggctccggaaaaggaatggctagtagtgttaccgtaatgtgactatggtttagcccttcatggaattgccatctcaccaactatgttggagtactgcaaactgaccgtagccatcaaaatgctccccgtaagcgctcctggtctgtgtatgtttcggcaagttctgcgaaaccatgctctgctcccaagtggaaggagatgacaggaagcggtatatttgcagctgggggcgagggtgaagaagatgaatccgccaatgtctctgcaacttccgtccggacggctccaaagaattatcaggcaatcagtactataagccacatctcatttgccgaggaagaaagcatctctccaaagaagccaacttcgatatcagaggtcgcaaagcagcgcgagctaagcggcacgcttctgagcgaggacgacagcaagatgaagaggcagatatcggacctgaaatccaaggagctcagcggccacgacatctttgcccctccggaggatcccaggccacgcaactcggagaacggctcgacctcgcagactccgggcaaaaatgcacacgtaagcaacttcaagttcggcgaggccgacgaggacagcgcggtgaagaccgcgaagaagatccccaccaagaagttcaccgacctcgcgggcaatatcttcaagggcgacgacgaggcacccgggacggcggagaagcaccacctgagcacggcgaagctgaaggagatgaccggcagcgacatcttcgcggacggggaggccccctcccgggactacctgggcggaatccgcaagccgcccggcggggagagcagcatcgcgctggtttaacagcagggacaaacaaccagatggacatagcagcccctcccctacatcattcgtttcttcctcatcgccgtcgccgtcgccatcttaggagtgatcttttattagggagttttttttttcgttcattggaggactgatcgattggaacccctggcttgctttcctgtttcccgtgactttcgtcaggttttcgttggtaatcccctccgatggtggtgttgtgtgggtatgacaacaacgatggttatctctaatttaacattgatttggcttgggcttacctgatgcaacaacaaccgccagtggtgcgttgtctgatttccgtgactggatgtctcagctgctgcagagtgcagagggccgggggcgtgacgacgaccacgatgac

SEQ ID NO: 208831 - DNA, 2155 bp, Zea Mays
cagttctacaggcgtgggtttcttctactgacaggctctaagaaaggcatcttagactatctccagcagcttacccatccccatacccatattcaaactctactctgcgaacagcgcaatctatagtacaaaacagtgcttttgggtaaactatgggtagactgctgcagacggtcttaggacagagaaattcaataactccggacacaatttggataaaatgatgatcaacatggtcaacttttcatctgacagctgcaacctaaaagaagacaaacgtcaaacgcgtgatatagaccacgcgctacacacagtatcaccaagcccaaaacataccaaaaaaagttgaaccaagtggttgagaattccccttttgctctcatggccatggagaacactgcgccatgcggtgacttcgggaagatcgtggccgatcttgagtctgagaacttggtggctaacgtctctgccgtgaatcaagcctcggcgttgattgctggaggtaaaatccctgaaccccagcttctgtgccgcctgatcgctggtcttgcttccaatctggagaagcctgaccatgactctgccatcaagaggtgtgtttcctttactctaaaggcaatcagggtggccgtcatcaagaaccgcatgaacatggattcctcagctcgtggtgaggctctccatgccatctggtgttgttttatggatcaaggccttcgccgtattcagcgtgattcaaatatggtgaggctgtggacagtccaggatcaattgtctgcagtcaaaatcatatgtactttcttccgtctctcaccggtaaacatcagtgacacaaggtgtgtcacagccttcgcctcactgatgttgtcaccgtacagcactgtggtgtgtgcatgtgcagatgccctgctctctttgccccctgttgttccaggattttcatttgccattgcaagagcctattgccatatgcttgcaacagtgtcaccacaatcaccacttgaggtaagcagcatggttgcgatgcttggtaggctgaagcaagtaagtacgaccatggtccaccacccaggggtttagtgaccttgctgtggatgtcctagcagctttatcaaattgcaatcttgctgttcgaaagaatcttctgaacctgatggtgaggctcctcactccaaggaacatcagtgctgtgctattgctccttgataatgagctgaatagggctgctaacatccatatcgagtaccacaagatgctagaggaggcgatcagagaatgccatgctgcttttccggggtgtattgtagaattcacactagatcccaagtacagtgtgttcattgatagtattctgtacatcatagacatcatgaatcccgaccagtcgttgcgaggcccacttctgaaaggtctactaagggcgctccggcatgtgaagtcaccactggtatgcgccgctgctgtttgggccatctcaatgttctctggatcactggaagaggtcagtgatgccattgttgcactttcatgcttcttcaaggacctgcttgatcgacgtaagattgagaagctgatacttggaggagaagcggagaatcaatacaagctttctactgactattatggtgtcactgccggagatgcaacacagggaaagcaccagcagccatggctgatggagatggaggaactgctgtttgtgcgcatagggctcacacggcaagcaggtgggagctatgccattccttcgagttccaagagcagtgctagttcttcaaacgcgtatcttcctgagccattgggtaatacagacaatctgatcttcctcgtgcattctggagatgccctcttggcagatttcgtggaaatcatgctgtctaacctcaagaagaaggtcaaagagctggagtgatgctgatgagttcatttgatgtaataatttggaggtcaaataactagaaatggagtcgttgaaccttggccaatcgtacctcaatatgcataataatgctgtcttctgtgtgcttattacttctattattactatattatcactgatactttttctattcaacattttgccatctatttgtgtgacttgtgtggtctcatctagcctaccccaatctacatgagatcgaatatactctcatcg

SEQ ID NO: 208832 - DNA, 1936 bp, Zea Mays
cttgcagttctacaggcgtgggtttcttctactgacaggctctaagaaagaagacaaacgtcaaacgcgtgatatagaccacgcgctacacacagtatcaccaagcccaaaacataccaaaaaaagttgaaccaagtggttgagaattccccttttgctctcatggccatggagaacactgcgccatgcggtgacttcgggaagatcgtggccgatcttgagtctgagaacttggtggctaacgtctctgccgtgaatcaagcctcggcgttgattgctggaggtaaaatccctgaaccccagcttctgtgccgcctgatcgctggtcttgcttccaatctggagaagcctgaccatgactctgccatcaagaggtgtgtttcctttactctaaaggcaatcagggtggccgtcatcaagaaccgcatgaacatggattcctcagctcgtggtgaggctctccatgccatctggtgttgttttatggatcaaggccttcgccgtattcagcgtgattcaaatatggtgaggctgtggacagtccaggatcaattgtctgcagtcaaaatcatatgtactttcttccgtctctcaccggtaaacatcagtgacacaaggtgtgtcacagccttcgcctcactgatgttgtcaccgtacagcactgtggtgtgtgcatgtgcagatgccctgctctctttgccccctgttgttccaggattttcatttgccattgcaagagcctattgccatatgcttgcaacagtgtcaccacaatcaccacttgaggtaagcagcatggttgcgatgcttggtaggctgaagcaagtaagtacgaccatggtccaccacccaggggtttagtgaccttgctgtggatgtcctagcagctttatcaaattgcaatcttgctgttcgaaagaatcttctgaacctgatggtgaggctcctcactccaaggaacatcagtgctgtgctattgctccttgataatgagctgaatagggctgctaacatccatatcgagtaccacaagatgctagaggaggcgatcagagaatgccatgctgcttttccggggtgtattgtagaattcacactagatcccaagtacagtgtgttcattgatagtattctgtacatcatagacatcatgaatcccgaccagtcgttgcgaggcccacttctgaaaggtctactaagggcgctccggcatgtgaagtcaccactggtatgcgccgctgctgtttgggccatctcaatgttctctggatcactggaagaggtcagtgatgccattgttgcactttcatgcttcttcaaggacctgcttgatcgacgtaagattgagaagctgatacttggaggagaagcggagaatcaatacaagctttctactgactattatggtgtcactgccggagatgcaacacagggaaagcaccagcagccatggctgatggagatggaggaactgctgtttgtgcgcatagggctcacacggcaagcaggtgggagctatgccattccttcgagttccaagagcagtgctagttcttcaaacgcgtatcttcctgagccattgggtaatacagacaatctgatcttcctcgtgcattctggagatgccctcttggcagatttcgtggaaatcatgctgtctaacctcaagaagaaggtcaaagagctggagtgatgctgatgagttcatttgatgtaataatttggaggtcaaataactagaaatggagtcgttgaaccttggccaatcgtacctcaatatgcataataatgctgtcttctgtgtgcttattacttctattattactatattatcactgatactttttctattcaacattttgccatctatttgtgtgacttgtgtggtctcatctagcctaccccaatctacatgagatcgaatatactctcatcg

SEQ ID NO: 208833 - DNA, 2475 bp, Zea Mays
tgctgtccggtgctcctcgtcgggcgcttcgctgccgccttgcaattgcaacccacggcaaatgctgctcgacgatgagcgaggctagcaggagccacctcctcacctggatcgatggcggccgttcatctcggctaagatccaaatctcggcatcggcggcacccctcgactctccccacgcccctagccatcctaactgcgaccgtggatgaagatctcaaagaatcttggaggtgcagcggcttgtacaacatttgatcgatgagtcagtgggcctaaagaaaataaagcagcccaagatgatctccatcatgggaatccgtggctccggcaagaccgcacttgccacagaggtgcatgagaggcatcttagactatctccagcagcttacccatccccatacccatattcaaactctactctgcgaacagcgcaatctatagtacaaaacagtgcttttgggtaaactatgggtagactgctgcagacggtcttaggacagagaaattcaataactccggacacaatttggataaaatgatgatcaacatggtcaacttttcatctgacagctgcaacctaaaagaagacaaacgtcaaacgcgtgatatagaccacgcgctacacacagtatcaccaagcccaaaacataccaaaaaaagttgaaccaagtggttgagaattccccttttgctctcatggccatggagaacactgcgccatgcggtgacttcgggaagatcgtggccgatcttgagtctgagaacttggtggctaacgtctctgccgtgaatcaagcctcggcgttgattgctggaggtaaaatccctgaaccccagcttctgtgccgcctgatcgctggtcttgcttccaatctggagaagcctgaccatgactctgccatcaagaggtgtgtttcctttactctaaaggcaatcagggtggccgtcatcaagaaccgcatgaacatggattcctcagctcgtggtgaggctctccatgccatctggtgttgttttatggatcaaggccttcgccgtattcagcgtgattcaaatatggtgaggctgtggacagtccaggatcaattgtctgcagtcaaaatcatatgtactttcttccgtctctcaccggtaaacatcagtgacacaaggtgtgtcacagccttcgcctcactgatgttgtcaccgtacagcactgtggtgtgtgcatgtgcagatgccctgctctctttgccccctgttgttccaggattttcatttgccattgcaagagcctattgccatatgcttgcaacagtgtcaccacaatcaccacttgaggtaagcagcatggttgcgatgcttggtaggctgaagcaagtaagtacgaccatggtccaccacccaggggtttagtgaccttgctgtggatgtcctagcagctttatcaaattgcaatcttgctgttcgaaagaatcttctgaacctgatggtgaggctcctcactccaaggaacatcagtgctgtgctattgctccttgataatgagctgaatagggctgctaacatccatatcgagtaccacaagatgctagaggaggcgatcagagaatgccatgctgcttttccggggtgtattgtagaattcacactagatcccaagtacagtgtgttcattgatagtattctgtacatcatagacatcatgaatcccgaccagtcgttgcgaggcccacttctgaaaggtctactaagggcgctccggcatgtgaagtcaccactggtatgcgccgctgctgtttgggccatctcaatgttctctggatcactggaagaggtcagtgatgccattgttgcactttcatgcttcttcaaggacctgcttgatcgacgtaagattgagaagctgatacttggaggagaagcggagaatcaatacaagctttctactgactattatggtgtcactgccggagatgcaacacagggaaagcaccagcagccatggctgatggagatggaggaactgctgtttgtgcgcatagggctcacacggcaagcaggtgggagctatgccattccttcgagttccaagagcagtgctagttcttcaaacgcgtatcttcctgagccattgggtaatacagacaatctgatcttcctcgtgcattctggagatgccctcttggcagatttcgtggaaatcatgctgtctaacctcaagaagaaggtcaaagagctggagtgatgctgatgagttcatttgatgtaataatttggaggtcaaataactagaaatggagtcgttgaaccttggccaatcgtacctcaatatgcataataatgctgtcttctgtgtgcttattacttctattattactatattatcactgatactttttctattcaacattttgccatctatttgtgtgacttgtgtggtctcatctagcctaccccaatctacatgagatcgaatatactctcatcg

SEQ ID NO: 208834 - DNA, 2000 bp, Zea Mays
ctctctcacacacacttgcctaatccagccacccgactcctatcggttaccggcgacctcaccggcggctaaaaggatttgacttgcggccgccgccgcgcgtcttcgaccgtgctctcccaccccaatctccgggttgattactaccagagactaactcgaatcgtcgatgagcgctcgatcgatcccgtgacggagcggctcggttgctccaaagctccgttctacgccatgctcgccgccgccgccgccatggcggtgaccgtccctcgggcggcttctcattgttttccagcaaatacggccaggaaatgtaggacttgctggagctgtcgtgcggcaagagtcgaggctgggcactcccgattggaggtgagaaaagtcacctatcgacctcctggaactgaacagaacttgttgaatgaaattaacctctctcttcaggaaaaaagttttggtttgatatttggacggagtgggagtggaaagacaacccttttgcagctgttggctggtctatcagaacctacctctgggtctatttgcattcagaagtatgatgatactgggaatcctattggcttgcctgaactgctaacttctcaacgagttggaattgtatttcagtttcctgagaggtatttcttagcggatactgtacttgaagaagttacttttggatggcctaggcaaaaggcagacctcctattaaaagaacagctcgctttaaatcttcaaaatgcttttaactcggttggtctgacaaccatctcattagatgaaaatccgcaagctctaagtggtggatttaagaggcgacttgctttggcaattcaactggttcaaactcctgatctgttgctgcttgatgagccacttgctggtctagattggaaggctcgagctgatgttgtgaatctcctaaaggacctgaagaaacatcatactatactggttgtaagtcacgatctaagggaactatatccactagtggatcgctcatggcgaatggaaatggggggaagtttgaaggaggaagctttgcctgtctaaacatgtgcttgtcagtatagctgtcagacagcatgtacatattggtcatccaaatctagtcacatcaactacttttacaaacttagattatgtcggctgggaaatttcttcaagatacaatggagtcagagatggttgtgaacagtcatttggtaatgcgtggtaacttccgagcacgaaaaaatgctagaaaaaatcagcagagatcgtgaatgttagcacggagctttgactactgctggaacggggaacagtctgacgcagacattgttgagctaccatgaacgttgaacattccattgaagtttaggttcaggaatcaggatccagcgatagctccttgttgcaaacatgaggattgcagaaggcctgtacactttgaaaggtggggggtcaagtttcaaaatggtgcggatgatggtttggaaatggtttcctttgttgaagtttcccactggagagattcagagaacatcatttacttgcactatcgatagtctgcatcattcacaatttgctgttccttacgaactcatttgtctggattctggaagaatatgttgtgcacatgagtagattcttgtttcctccaaagatctttgacctgctgttatcaccacttctggcatgcgaggagcaatctcagtcatgcagttatgtatatgaatgtgcacctctgtttgaaacgtccacgtcaccgtaccggcagaagggaggtatgtttggctggttcggggggctctgaacgctatgcaagtgatgctattgctatccaagatcctgtaaaaggagccaaagaatcttgcaaacaggacacctcttctgaccagggctgttgccggtccattcgaaacttctgctaggaaggctccaggaagctgatgcagagttggaaagatctggttgatcgggtcgctctccgcctctccctgctggatagattgctg

SEQ ID NO: 208835 - DNA, 3261 bp, Zea Mays
ctctctcacacacacttgcctaatccagccacccgactcctatcggttaccggcgacctcaccggcggctaaaaggatttgacttgcggccgccgccgcgcgtcttcgaccgtgctctcccaccccaatctccgggttgattactaccagagactaactcgaatcgtcgatgagcgctcgatcgatcccgtgacggagcggctcggttgctccaaagctccgttctacgccatgctcgccgccgccgccgccatggcggtgaccgtccctcgggcggcttctcattgttttccagcaaatacggccaggaaatgtaggacttgctggagctgtcgtgcggcaagagtcgaggctgggcactcccgattggaggtgagaaaagtcacctatcgacctcctggaactgaacagaacttgttgaatgaaattaacctctctcttcaggaaaaaagttttggtttgatatttggacggagtgggagtggaaagacaacccttttgcagctgttggctggtctatcagaacctacctctgggtctatttgcattcagaagtatgatgatactgggaatcctattggcttgcctgaactgctaacttctcaacgagttggaattgtatttcagtttcctgagaggtatttcttagcggatactgtacttgaagaagttacttttggatggcctaggcaaaaggcagacctcctattaaaagaacagctcgctttaaatcttcaaaatgcttttaactcggttggtctgacaaccatctcattagatgaaaatccgcaagctctaagtggtggatttaagaggcgacttgctttggcaattcaactggttcaaactcctgatctgttgctgcttgatgagccacttgctggtctagattggaaggctcgagctgatgttgtgaatctcctaaaggacctgaagaaacatcatactatactggttgtaagtcacgatctaagggaactatatccactagtggatcgctcatggcgaatggaaatggggggaagtttgaaggaggaagctttgcctgtctaaacatgtgcttgtcagtatagctgtcagacagcatgtacatattggtcatccaaatctagtcacatcaactacttttacaaacttagattatgtcggctgggaaatttcttcaagatacaatggagtcagagatggttgtgaacagtcatttggtaatgcgtggtaacttccgagcacgaaaaaatgctagaaaaaatcagcagagatcgtgaatgttagcacggagctttgactactgctggaacggggaacagtctgacgcagacattgttgagctaccatgaacgttgaacattccattgaagtttaggttcaggaatcaggatccagcgatagctccttgttgcaaacatgaggattgcagaaggcctgtacactttgaaaggtggggggtcaagtttcaaaatggtgcggatgatggtttggaaatggtttcctttgttgaagtttcccactggagagattcagagaacatcatttacttgcactatcgatagtctgcatcattcacaatttgctgttccttacgaactcatttgtctggattctggaagaatatgttgtgcacatgagtagattcttgtttcctccaaagatctttgacctgctgttatcaccacttctggcatgcgaggagcaatctcagtcatgcagttatgtatatgaatgtgcacctctgtttgaaacggtgagcaaattctctcccccttttgtgtccagtcattcattttgtgattagcacgatactctgcttcagcttcagcttgacgccagtcttcttatcttatgtactcactccgctcttttttatttgtcgcggtttagttcaaaaatgaactagtgggtgacaaatattcgagaacggaggtagtatatacaatattcacaaggcgtgctgtaaatatgtatccacttttacaaacgaagtaacctactgagagttacttgtgccacatagctacctacatcaatgtgtgcatgttcaaagcacgaaacttttctttgtcttctagactcctgttgtcgctttcagcttgctcatcttttttttccaaccattgtaaaccccacgtgttcaagtccacgtcaccgtaccggcagaagggaggtatgtttggctggttcggggggctctgaacgctatgcaagtgatgctattgctatccaagatcctgtaaaaggagccaaagaatcttgcaaacaggacacctcttctgaccagggctgttgccggtccattcgaaacttctgctaggaaggctccaggaagctgatgcagagttggaaagatctggttgatcgggtcgctctccgcctctccctgctggatagattgctgctgctgtttttttttcccacacgaaaggaccttgctacctgttggtctatactttttatcattttccttgtgctgctttccttttggtctgctgagactttgggcatgtcagcatcagctgtcagatcggtacagttttatcaagcagatcatgtaccctgtcttaacgattaaggaaatgaaaaacaaatctttggataccttgaatattggtgaagtggatagatgtttcagagacgggattacctcatgtagagacgaatatctgaacacccgagaatggtatgaacaaatacgttgcgccaaggaactgcaactaagattactgcttaccattgactttgttcagttgataaattgtcaaggctttatggtaaaatctgtgttagaagaaacttgaaacaaatctcaaggagaaaggactgaactcagtcgggtagcatgtatgaatctatctaccagaataattgttttttttgccacatgtgggtctgatagcaattttgtttgttgtaatagcaaatatctaattcgctctgatctactctcattctccaataacacttaacacttcaaacttaaaaaaaaaaccggataaaaataaaaacgtggcctattcattgcattcacctggtaatccatctttaatacaatgtaagtaatattatttgcagaaaatcagcgatgtatgaaactaaggccccgtttgagattagtccctccattttagtcccatttaggccatgtttggtttcaattagtcttaggactaaactttagttctaagactaaattttagtccctacttgtttggttatagggactaaatagattctaaagttattaaatacattgtccaaagactcaaa

SEQ ID NO: 208836 - DNA, 1590 bp, Zea Mays
caatcatggcatttcccctctctctctctctacccagcatattgctgctcccacacacacacacaaggccaccacaacaaataaaagcactgctgcttgccagtattgctttgctttgccttgcttgcccccacacgccctctctctcctctctctctctcaaaccgaaaagaaaagaggaaagtgggatagctcaatctcttcttccttcgtcattcctctcccgtaggttctctctccctccctccctccctccctccctcagcacacataaactcgagatacacatatatatcagtaggagaggatggatgtgcaaacctagcctgctgcctttgtagctgcaaattaaattgagctgtacctgttggtcttcctcctcgctcttcttggttctcgctggttgccgggagctgggatcgaaagtactgctgttgttcgcacggcgaggcggcggcggagaccggtcagaaggaatgtcttcggcccaaatcgcgccggcagatcatgtgtgctatgtgcactgcagcttctgcaacacagttctcgcggtgagtgtcccggggaatagcatgctcaacatcgtgacagttcggtgtggacactgcgcaaatctactgtcagtgaacctgagagcactgatgcactcactcccagaacaagatcatcagctccaggagaacatcaaggtccatggcatcaacggcactttgcacgatgatcatcagtactgcggccatttggatcagctcggttcttcttcgtcgtcaaggttccggcggcttccagtgatgtgttcgccacagaacgagcagcacctgctgcaggagcaaacacttaacaacaatgctcgtcgtaaggctcccttccacctccagagaagaggcagcgggttccgtcggcgtataacagattcatcaaggaagagatacgcaggatcaaagcgaacaaccccgacattaaccacagggaagccttcagcacggcagccaagaatgtaagtaaagcctttttctagctagctggctaattgctatagtacgtacttgtcgtcgtgggcgcctgaattggttgttttacatatatatacactacgtacgaccgttgttgcatgcagtgggcacattatccaaacatccatttcggtttagacgactccgggcgagagggcaagaagaagctcgtggatcatgaggcggcggcgtctgtcgtcgcagtcgcagcagcaccgactgctgctaaaaagatccagggtttctactgatggtagcagatagatgtgtagattgattgatacatcatcgaccgggtggaagaattgataccacaaaaactgctttatatatatgtactgtgagtaaacagttaaaattaaacttgtgagatgtaccgtacatatgaagagctagctagtagtgagtcataaagtgggaaagtgaagcatatatagtcgtaaaaacaatcacatgaattgctattaggcaccatatatatgcacttaattatattggttgaggagacctaataaatcatttgacctaccatgcatattattgcagtgcgaagcaccatatatatatatgcagtggc

SEQ ID NO: 208837 - DNA, 4782 bp, Zea Mays
cacaaatcttttgttgccccattgcttgccagatctgtgtggcagtgtgaaagtaagaggcggcctatgcgttgtaaccggcccatcatgggtcgtgcatcggtgggggccatttgactctcgtgctcgcctccgtgtgcgagtcagccccacttgattttttgtgctcccggccccgggcttgttcgtttcctccgtttggccccccgaaaacgctcccaagaaaacgcagcttttccgcggtttcacgctggttgggtttccatggccagacacccagactgcgcttctcttcggcggtgcacgacgccgtctctttcatctgccccggcgaggccagccagatagagcgctagctgctgctgggcttccctcgtagactagctcgctccacatgtcccctccccgctttattatctgccagcctctcgagctctctcgcacctctccctcctcgcccattcttccgccctcttcgtgagtccttcccctaggcgctactcgtctgctctcctctcttctttttagtagctcgctcgccaggccgccaagccacatgcagcatgtggcggagcgcaagtagatagctgctgcgtcttcctggcctgagggtttcggattcatcagccgggccgccggggtcgccatcgccgccgttgggacggcggcggcggagtttggcgtcgagttcttcagagggttaggttaggtgcacgcgtctctcgcgttcctccttcccaactcgaattcctttctttccatacccgtccccatgacgttcgttcttccatgattcccttccatatttgctccagccaggccatccgcggctgcgtggctgctctcctgctattttaatgcctgccttctctccctctcacgcctcataaaaaaaactaataattccttgggatctgaggggatccgcgtggggttggtaggatcgcgggcagagattttagccaggactggaggaaaaccagtccgctctctctccatgagcttcggcggcatgttcgacggcgccggctccggcgtcttctcctacgacgctaccggcggcggcacgggcatgcacaaccccggccgcctcgtcccggccccgcccctgccgaaacctggcggattcggcgccacgggtctctccctcgggctgcaaacgaacatggaaggggctcagctgggcgacttgggtcgtatgggcctgattggcggcggcgggagcgggagcggaggcgacggggactcgctgggccgcggccgtgaggacgagatcgacagccggtcaggcagcgacaacgtcgacggcgcctccggtgacgagatcgacccggacaacagtaaccctcgcaggaagaagaagcgataccaccgccacacaccgcagcaaatccaagaactcgaagctgtgttcaaggagtgcccccaccccgacgagaagcaaaggatggagctcagcaagcggctcaacctagagagccgccaggtcaagttctggttccagaaccgccgcacgcagatgaagacgcagatcgagcggcacgagaacgcgctgctgaggcaggagaacgacaagctgagggcggagaacatgacgatccgggaggcgatgcgcaaccccatctgcgccaactgtggcggcgcggccgtgctcggggaggtgtcgctggaggagcagcacctccgcatagagaacgcgcggctcaaggacgagctggaccgcgtctgcgccctcgccggcaagttcctcggccgcccaatctcctctggcagctccatgtcgtcgtccctgcaaggctgctccggcctcgagctcgccgtcggctccaacaacggctacgggcccggtcccctcggcgcgtcagcgctgcagcccctccccgacctactcggcgccggccttccgggccccgtgggctcggccgccatgcgcttgcccatgggcattggcgccctcgacgttgcgctgcacggggcggccgccgacggcatcgaccgcaccgtcctcctcgagctggcgctcgccgcgatggaggagctcatgaaagtggcgcagatggacgagccgctctggctccgcagtcccgacggcagcggcttggaggcgctcaacctcgacgagtaccaccgagcgttcgccagggtgttcgggccgagccccgcgggctacgtcaccgaggctacccgcgaggccggcgtcgccataaccagcagcgtagacctcgtagacagcctcatggacgcggctcggtggtcggagatgttcccgtgcatcgtggcgagggcgagcacgacggacatcatctcgagcggcatgggcggcacgcgcagcgggtcaatccagctgatgcacgcggagctgcaggtgctgtcgccgctggtgccgatccgtgaggtggtgttccttcggttctgcaagcagcacgccgaggggctgtgggccgtggtcgacgtctcggtggacgccatcctccggcccgacggcggccaccaccacgcgcagaacggcggcggcgccgggtacatgggctgccgcctgctccccaccggctgcatcgtgcaagacatgaacaacggctactccaaggtcacgtgggttgtccacgcggagtacgacgaggcggtggtgcaccaactctaccgcccgctgctccagtccggccaggcccttggcgcgcgccgctggctcgcctcgctccagcgccagtgccagtacctcgccatcctctgctccaactctctccctgcccgcgaccacgccgcgatcacgccggtggggcggaggagcatgctgaagctggcgcagcggatgacggacaacttctgcgccggtgtgtgtgcgtcggcggcgcagaagtggcggcgcctggacgagtggcgcagcggcgagggaggagacgctgctgggaacggcggatcagcagccgcgggcgagggcgaggagaaggtgcggatgatggcgcggcacagcgtgggggcgcccggggatccccccggcgtggtgctcagcgccaccacgtcggtgcggctgcccgccacgtccccgcagcgcgtgttcgactacctccgcgacgagcagcgccgcggcgagtgggacatcctggccaacggtgaggcaatgcaggagatggaccacatcgccaagggccagcaccacggcaacgccgtctccctcctccgcccaaatgtaagcactactactgccctcctccttacttcaatttttactgccgtttttaccgttgcgatcaatgaatcatctctttgatttttttttggtcccacattgtaatgcaatactgtttctcatcaagtgtagtacagtaccgtggtgccggatttgtgtttatatgcatgcactgcagtattgcatgggttgagggacaccatgacacagagaaaaggacaaaccggaaaaggttaaaacactggcagtttaccagaaactggtccatggttgacatttgtgagggaaagctcctgtcacttttgtgtgtttggaaccacgcaggctgcccttgtccttgccttcatcatccctctctgatctactagtactcaacagtctatttttagaattttaagttttaattaaaccaatttaaaagtttaatcaatacaaaaatagtatgacaatattatatatatctaaacaacatgcagtataaataagttcgcaatacatattttttactctcttcattacccctgatgaatttctgatgagatgtgttgcaggcaactagtggcaaccaaaacaacatgctcatcctgcaagagacctgcaccgacccgtcaggctctctggtggtgtacgccccggtggacgtgcagtccatgcacgtcgtcatgaacggtggcgactccgcctacgtctctctcctcccctctgggttcgccatcctcccggacggccactgccagtcaccaaacactgcacatcagggttcaccaagctgcggcggtagcagcagcagcagcagcacggggtctctagtcacggtggcattccagatcctggtgaacaacctgcccaccgcgaagctcaccgtggagtcggtggagaccgtcagcaacctgctctcctgcaccatccagaagatcaagtctgcgctccaggccagcatcgtcacgccctagctattagcgggcatttgacatggattccggccgccggttctcagaaaaaaggacggagtagtcggatgccatgtcaaatgcttagctagaggacgacatgctgtgacggcgcagatgctaaacaaggctgtgctcgtacgtacgtcgatcgcttcacatcagaccggcggggaactggtgcttgagaaggcagtgaaagaaaataagggtattaaaataaattatgtagtagtgtggagtatttattgcatagagcaatatatatatggggtgaggtacacagggattaagtcaagaacgaaccgttcgctaggctttgattgcttgagcaaacacgttttgctatcgctcaagcttgttatatgctcatgtggtggttcgggtattgacttaagtctctggcaaaagaaagtgaaacaccacctattagggcttctcctatatataaaatatatatgtagcagtttgttttcaaccatcttgtgaagagttctgttcttttgtttctccgatatagcgaaatatagagatgagaatgtctctgtgtttgtaacgtttgtgtagtgttatttcgtttgagttgatatatatgacatgtacgctttgttcatgtggaaaaaatatgttctagtgtagctcact

SEQ ID NO: 208838 - DNA, 1397 bp, Zea Mays
atttaacatccgaatccctgccccttcgcccttcccctccggccgcagccccttccctgccgctccggcctcctccgtcgggaccgccgacgacgcgccgcgcggaagcctgcggggatattgggtaagcagttgtgatcctgttctcttgctcggatgccgggttactatgacatcgatgacatcctcatggaggatgagcctatttcagttgttttccaagtaactgcaaatggtgttggcctgctagatcctggtgctgaaagtaactgtgtagagaagggcgccaaggtggacctcccattttggcttgcgcatgggctgctgtctctggaacaagctgtgtcaataaacccacctccatgcttcacacagaagtagtttttttcagtgtttgttattgcattacaccatacacagaaattcttggatcaacagcaaagcatgggagagcaaggagtattcttatttggaaaaacatatatggaattccctatcaacaacttaataaaaggatctgatctttttgacaccattgtggcctactgtagcttttcatagtaaatagtagcattttgcagatctttctcttataacttgatgatagaacttattaaagacatgaatctattcaaacggttctccagaatttgacttttgctgcatggcttgggttttggttctgactatgaactaaagcgtgaaatacagattctgcagtattattctcctaacaaatctgtattctgttatctccatatcatatatactgcagaacttggaaggagatccaagctgatgcggcctgtgtggatttgagggttcgttgcccgtacttttatgagctaggatgcaagattgttcctttggtgagtgacaagagcattggcctgttcttgcgatatgcattcaccagtaggtacaaagaggttctaagtaagtcccacagttcttccatgatgacagtgcccaagttcgttccacgccttacaaaagaagaaactcgggtgtttgaatctgccagagaatcgatgactggtttcaagaaatggcgagcaggtgggatgagactgcaaaaggcttccattcttggccggaagaggaagacaaagctgcctgaatgagttttaaggtgatgtgcgctgctttgatttgctagcaccgtgagcaaagagaaaagtgaatggcagattaaatctggatgtactatgatctgctgtacattgtgcacttgtgtacagcagctctgatcagtccgtcctttgtaaggaaaatgaacaccgtcttaaatcatgatatcctgtttggagcaggtgtcatgattttcagcagggtatcttgaatgagtttgaatcatgatatcctgtcttaaatttcacatgttctcaaaatttctg

SEQ ID NO: 208839 - DNA, 983 bp, Zea Mays
atttaacatccgaatccctgccccttcgcccttcccctccggccgcagccccttccctgccgctccggcctcctccgtcgggaccgccgacgacgcgccgcgcggaagcctgcggggatattgggtaagcagttgtgatcctgttctcttgctcggatgccgggttactatgacatcgatgacatcctcatggaggatgagcctatttcagttgttttccaagtaactgcaaatggtgttggcctgctagatcctggtgctgaaagtaactgtgtagagaagggcgccaaggtggacctcccattttggcttgcgcatgggctgctgtctctggaacaagctgtgtcaataaacccacctccatgcttcacacagaaaacttggaaggagatccaagctgatgcggcctgtgtggatttgagggttcgttgcccgtacttttatgagctaggatgcaagattgttcctttggtgagtgacaagagcattggcctgttcttgcgatatgcattcaccagtaggtacaaagaggttctaagtaagtcccacagttcttccatgatgacagtgcccaagttcgttccacgccttacaaaagaagaaactcgggagaatcgatgactggtttcaagaaatggcgagcaggtgggatgagactgcaaaaggcttccattcttggccggaagaggaagacaaagctgcctgaatgagttttaaggtgatgtgcgctgctttgatttgctagcaccgtgagcaaagagaaaagtgaatggcagattaaatctggatgtactatgatctgctgtacattgtgcacttgtgtacagcagctctgatcagtccgtcctttgtaaggaaaatgaacaccgtcttaaatcatgatatcctgtttggagcaggtgtcatgattttcagcagggtatcttgaatgagtttgaatcatgatatcctgtcttaaatttcacatgttctcaaaatttctg

SEQ ID NO: 208840 - DNA, 1443 bp, Zea Mays
atttaacatccgaatccctgccccttcgcccttcccctccggccgcagccccttccctgccgctccggcctcctccgtcgggaccgccgacgacgcgccgcgcggaagcctgcgggtgagcgtccagatccacccgcccccttcggcattccccgccgctccagcctcctccgccgggaccgccgccgacgcgccacggggaaggcctgcggggatattgggtaagcagttgtgatcctgttctcttgctcggatgccgggttactatgacatcgatgacatcctcatggaggatgagcctatttcagttgttttccaagtaactgcaaatggtgttggcctgctagatcctggtgctgaaagtaactgtgtagagaagggcgccaaggtggacctcccattttggcttgcgcatgggctgctgtctctggaacaagctgtgtcaataaacccacctccatgcttcacacagaagtagtttttttcagtgtttgttattgcattacaccatacacagaaattcttggatcaacagcaaagcatgggagagcaaggagtattcttatttggaaaaacatatatggaattccctatcaacaacttaataaaaggatctgatctttttgacaccattgtggcctactgtagcttttcatagtaaatagtagcattttgcagatctttctcttataacttgatgatagaacttattaaagacatgaatctattcaaacggttctccagaatttgacttttgctgcatggcttgggttttggttctgactatgaactaaagcgtgaaatacagattctgcagtattattctcctaacaaatctgtattctgttatctccatatcatatatactgcagaacttggaaggagatccaagctgatgcggcctgtgtggatttgagggttcgttgcccgtacttttatgagctaggatgcaagattgttcctttggtgagtgacaagagcattggcctgttcttgcgatatgcattcaccagtaggtacaaagaggttctaagtaagtcccacagttcttccatgatgacagtgcccaagttcgttccacgccttacaaaagaagaaactcggggtgggatgagactgcaaaaggcttccattcttggccggaagaggaagacaaagctgcctgaatgagttttaaggtgatgtgcgctgctttgatttgctagcaccgtgagcaaagagaaaagtgaatggcagattaaatctggatgtactatgatctgctgtacattgtgcacttgtgtacagcagctctgatcagtccgtcctttgtaaggaaaatgaacaccgtcttaaatcatgatatcctgtttggagcaggtgtcatgattttcagcagggtatcttgaatgagtttgaatcatgatatcctgtcttaaatttcacatgttctcaaaatttctg

SEQ ID NO: 208841 - DNA, 962 bp, Zea Mays
caaaaaaaaaaaatatttaacatccgaatccctgccccttcgcccttcccctccggccgcagccccttccctgccgctccggcctcctccgtcgggaccgccgacgacgcgccgcgcggaagcctgcggggatattgggtaagcagttgtgatcctgttctcttgctcggatgccgggttactatgacatcgatgacatcctcatggaggatgagcctatttcagttgttttccaagtaactgcaaatggtgttggcctgctagatcctggtgctgaaagtaactgtgtagagaagggcgccaaggtggacctcccattttggcttgcgcatgggctgctgtctctggaacaagctgtgtcaataaacccacctccatgcttcacacagaaaacttggaaggagatccaagctgatgcggcctgtgtggatttgagggttcgttgcccgtacttttatgagctaggatgcaagattgttcctttggtgagtgacaagagcattggcctgttcttgcgatatgcattcaccagtaggtacaaagaggttctaagtaagtcccacagttcttccatgatgacagtgcccaagttcgttccacgccttacaaaagaagaaactcggggtgggatgagactgcaaaaggcttccattcttggccggaagaggaagacaaagctgcctgaatgagttttaaggtgatgtgcgctgctttgatttgctagcaccgtgagcaaagagaaaagtgaatggcagattaaatctggatgtactatgatctgctgtacattgtgcacttgtgtacagcagctctgatcagtccgtcctttgtaaggaaaatgaacaccgtcttaaatcatgatatcctgtttggagcaggtgtcatgattttcagcagggtatcttgaatgagtttgaatcatgatatcctgtcttaaatttcacatgttctcaaaatttctg

SEQ ID NO: 208842 - DNA, 634 bp, Zea Mays
atttaacatccgaatccctgccccttcgcccttcccctccggccgcagccccttccctgccgctccggcctcctccgtcgggaccgccgacgacgcgccgcgcggaagcctgcggggatattgggtaagcagttgtgatcctgttctcttgctcggatgccgggttactatgacatcgatgacatcctcatggaggatgagcctatttcagttgttttccaagtaactgcaaatggtgttggcctgctagatcctggtgctgaaagtaactgtgtagagaagggcgccaaggtggacctcccattttggcttgcgcatgggctgctgtctctggaacaagctgtgtcaataaacccacctccatgcttcacacagaaaacttggaaggagatccaagctgatgcggcctgtgtggatttgagggttcgttgcccgtacttttatgagctaggatgcaagattgttcctttggtgagtgacaagagcattggcctgttcttgcgatatgcattcaccagtaggtacaaagaggttctaagtaagtcccacagttcttccatgatgacagtgcccaagttcgttccacgccttacaaaagaagaaactcgggccgaactttttttttgtctctgtg

SEQ ID NO: 208843 - DNA, 738 bp, Zea Mays
aaacttggagtagtcaaaaccgcaaaagttatcggatcccgcatcgtggaatgcttgccaaagggaggaaggtagctggaaggcgtgaagaaatgtctgcaaattatgcgtttggaccacaggatgatgatgcgattattaaacacaggcttctgactaggacaacgaccaccaggggtgaaccgccactaaagaagcttcagaagaagttcatgtcctttgcaactgagatcgagaaggatgcagataacataagtgactgtgaaagactgtacaaggcctttctacatgaaattaacacctttgagctacctcttctgaaaagcaaggctgtggttgatgcaaacattagggagaaagaaagctttaatgagctgcaggttgagattgagcggcagatcttgcatgctaagactgatattgaggaccttaagaagcaacttgagcagagcaagattgagaggcagcacaaagaagagtgtgaagccatccggaagctgattagtttgcagcctccacggtcagaaactgaaaaactcattgcagaccttgagaaggagataactgatttgaaggcggagaatgtagcatgcataaggactttggaactgaggaagaagcagtttgcccttcttctacatgtggattatctacaacatcaattctcttttgttaaatccaccatgaaatgtcttgatagtgcgtttatttggtatttagataattagtactttttat

SEQ ID NO: 208844 - DNA, 853 bp, Zea Mays
atctatcagaatacactttcaagttatggagggtgaaactttagaagcagacaatgctgatgtaatttcaggggaagttgaagtagaaaaagtccagacccacaacatagaatcaaggtcaaagaatctcataccagtcttcgactccctccatacatcaaggtttcaacagacaaggttgaacgctcctgataacagcaggtgcgggctgctgcagcgacagaaatctgggatttcagaagatggtagactctctcgcagaagcagctgtagttctttggactgcatgtctgaagggcccaaaagctctgatgacggtgctttcagtaaatatgtagtagatgataacagttctgctgtaattaacaacccaagtgttaaatttcatgccgagcttgtaaataatactgggagcctcaagtcagaggcccagctcggatttgtaaatagcgaggaggatggtggaggtggagagcaactcccagacttgtgatgttgactatgtcaagatggtcgatggtgatggaggagcctctttaatcgctgaagtcttcattgtgcgtgtgtagctgaattctttcatttctccatcctgagttctttacctctcttctatctatagttctattcataggcattcatgaaaattttaccgagagaaaagataggaagggaggtttaattctggccctatgggtgtggaagctttggtgatgttagttcgatatcttacaagttgtaaataacatgcaataatagcacgtaatttgtgaatatttaaatcataatgtgtccaactgaggtacgagacatcttccaccatttcagacgcgtcttttcttttgtacttcgt

SEQ ID NO: 208845 - DNA, 3510 bp, Zea Mays
cagcggccgccccaccccacttcacccgtctcgccctgcttccgcgccgtattctctcttctctcctacccacaaacaaacccgaactgaacactgcttagcagctagtattctatttctcttaatcccgtcgtctcgtccagcgaaaagaggaggaaaaaaacacacggaaccgcaggcaaaccctcgctttctccgatcgaattgctcgtccccgtgcaaccaccaccggttcggccgctccccaccaccagtcctccccgcccccgcccgccggacgatctactaggcctctcgccccgcgcgtgccgatttcccccacctcgagcgccgccctcctcccgcgcccatggcgagcacctgaggatacggtcagtgggctgtttctctgcgagagtcccacgagtccccacagaaacagcccgggggcatcagcgatcgattcggaacgccttggttcggtctgattgccggattggtggtttcgtctcggcctcggcttcctcaactatctagcttggaagccaagtctgggcttgcttcgtgtggattgcatctggggaggcggtagcgtgcacgggtgtgattctcggaccggcttcatgcgggacggcgcgccggctcctcgcgccggcgggggcttcttctcggcgcggtcgctctccaactgcatgaggatcgtgtcgtcgggggcgtccacggccgcctccacgctgcgctcggccggggcatcgctggtcaactcgatggccagccacgaggaggatgcaagtcgtgaccaggtacagtgggctggctttgataaacttgaatgtgggggtggcttgctacggcaagttttgttgctggcttataaatctggtttccaagtgtgggatgtggaacatgctgatgatgtaagacagctagaatccagacacgatggtgctgtttcgtttattcaagtgctgaaggatccaattttcacaacagaatctggagacagatttgcagacacacgaccattgctagctcttgcctgtgaaggaactcacacaggaagtggaaagaaccatgatactaatgttcctgtttttgatggaaccaatggtgctttccatagtataggcggtgaaaaccttcctactgtcttactattttattcactgagaacccatgaatatgtgcatacattgaggttcagatcagctgtttattccataaggtgcagtccgagagtcgtagctatttcacaggctactcagatacattgttttgatgccgcgaccatggagagagaatatactgttcttaccagtcctacggttgcacaagtttcaggctatggcccacttggattgggtcctagatggattgcatattctgggaatccagttccggttccagatactggacgtgttagcccacagcttcttagtctatctccctctgttccacctcctggttcaaatggtagtgtggtggcatattatgcaaaagaatcaagcaagcaactggcagctggcattgcaacacttggtgaggttggatataataagctgtccaagtactatgcagatttcattccaaatggtaatggtaccataaagcaaagaagttctgtttacaaagcaaatggtgtaacaaatggccacctcattgacagtgaatatgctggaacggtcatagttcgagatattgtctctaaattattgatagttcagttcagggcacacactagtcccatttctgcactttgctttgatccaagtggaactttgctggtgacagcatctgttcatggtcaaaacatgaatgttttccgcattatacctccacatgggacatcagaagctggtcaaattggaacctatgttcatctgtacaaactgcaaagaggcataaccaatgcgatcataaaagacatcagctttagtgatgatagtgactggataatgattagctcttcaagaggaactagccatttgttttcaatctctccatattgtggatcaacaagattccgttacagtgataacaaccctgtagaaaatgattacacagtggattcatcagttaatcatactgctcattggtcccaaaattcagcaacctctttgagtctgagtcagaagactctcttcgtatctggaccccctgtcacattgtctgttgttagtaggataagaaatgggagtaacgtgtttaagggtgctgtccatggtgctgctgcatttgcaactggtgcttccactccaatttctggtgcgattgcttcaacttttcacaaccgcatggctggtgacatcgattcagatggcagtttgcgcatgaagtattatttactagtattttctccatcaggaagcatcatacagtatgctctccatctctcagctgaacaggattctggattggatttccggacaagccccatttcttatgggccagagagagaaactgatacaaaatttgttattgaagctcttcagaagtgggatgtttgttataaaagaaatagaagagacagtgctgagagttttgcatatagtgattttgagaatggagaaaataataaacttttgctgaaagctatgtggaaagggactagtatctacccatttgactgttctgttgaaaggcaaaagctcagtgctgatgaaaaccgtaatctctatatttctcagaatacactttcaagttatggagggtgaaactttagaagcagacaatgctgatgtaatttcaggggaagttgaagtagaaaaagtccagacccacaacatagaatcaaggtcaaagaatctcataccagtcttcgactccctccatacatcaaggtttcaacagacaaggttgaacgctcctgataacagcaggtgcgggctgctgcagcgacagaaatctgggatttcagaagatggtagactctctcgcagaagcagctgtagttctttggactgcatgtctgaagggcccaaaagctctgatgacggtgctttcagtaaatatgtagtagatgataacagttctgctgtaattaacaacccaagtgttaaatttcatgccgagcttgtaaataatactgggagcctcaagtcagaggcccagctcggatttgtaaatagcgaggaggatggtggaggtggagagcaactcccagacttgtgatgttgactatgtcaagatggtcgatggtgatggaggagcctctttaatcgctgaagtcttcattgtgcgtgtgtagctgaattctttcatttctccatcctgagttctttacctctcttctatctatagttctattcataggcattcatgaaaattttaccgagagaaaagataggaagggaggtttaattctggccctatgggtgtggaagctttggtgatgttagttcgatatcttacaagttgtaaataacatgcaataatagcacgtaatttgtgaatatttaaatcataatgtgtccaactgaggtacgagacatcttccaccatttcagacgcgtcttttcttttgtacttcgt

SEQ ID NO: 208846 - DNA, 4363 bp, Zea Mays
ccccacttcacccgtctcgccctgcttccgcgccgtattctctcttctctcctacccacaaacaaacccgaactgaacactgcttagcagctagtattctatttctcttaatcccgtcgtctcgtccagcgaaaagaggaggaaaaaaacacacggaaccgcaggcaaaccctcgctttctccgatcgaattgctcgtccccgtgcaaccaccaccggttcggccgctccccaccaccagtcctccccgcccccgcccgccggacgatctactaggcctctcgccccgcgcgtgccgatttcccccacctcgagcgccgccctcctcccgcgcccatggcgagcacctgaggatacggtcagtgggctgtttctctgcgagagtcccacgagtccccacagaaacagcccgggggcatcagcgatcgattcggaacgccttggttcggtctgattgccggattggtggtttcgtctcggcctcggcttcctcaactatctagcttggaagccaagtctgggcttgcttcgtgtggattgcatctggggaggcggtagcgtgcacgggtgtgattctcggaccggcttcatgcgggacggcgcgccggctcctcgcgccggcgggggcttcttctcggcgcggtcgctctccaactgcatgaggatcgtgtcgtcgggggcgtccacggccgcctccacgctgcgctcggccggggcatcgctggtcaactcgatggccagccacgaggaggatgcaagtcgtgaccaggtacagtgggctggctttgataaacttgaatgtgggggtggcttgctacggcaagttttgttgctggcttataaatctggtttccaagtgtgggatgtggaacatgctgatgatgtaagacagctagaatccagacacgatggtgctgtttcgtttattcaagtgctgaaggatccaattttcacaacagaatctggagacagatttgcagacacacgaccattgctagctcttgcctgtgaaggaactcacacaggaagtggaaagaaccatgatactaatgttcctgtttttgatggaaccaatggtgctttccatagtataggcggtgaaaaccttcctactgtcttactattttattcactgagaacccatgaatatgtgcatacattgaggttcagatcagctgtttattccataaggtgcagtccgagagtcgtagctatttcacaggctactcagatacattgttttgatgccgcgaccatggagagagaatatactgttcttaccagtcctacggttgcacaagtttcaggctatggcccacttggattgggtcctagatggattgcatattctgggaatccagttccggttccagatactggacgtgttagcccacagcttcttagtctatctccctctgttccacctcctggttcaaatggtagtgtggtggcatattatgcaaaagaatcaagcaagcaactggcagctggcattgcaacacttggtgaggttggatataataagctgtccaagtactatgcagatttcattccaaatggtaatggtaccataaagcaaagaagttctgtttacaaagcaaatggtgtaacaaatggccacctcattgacagtgaatatgctggaacggtacagacctcttgtacatattttcatcgttaattctgttatcctggagttggcaataaacttgattaacattgttgctagcattaccatgtcatctctgtatactagtattagtaagaactaaccaaccctaaggctgtcagggaccacggaattcacctggccagtttgctaacaatttgatgatcttgctattcttcctcaggaattggccacggctgatcttctgtctcctgcatttgtatacacgctttacagaaatatatccgtggcagattgtgtacttcattttacatgcctgccattttgttcagttgtttgctttcattttacatccgtggcagaagtgtgaacaatattatccatcgaaactagacgagatagtatagcaggtaaggtgggtaattagttcttcatctggatggaatggaattcaaaagtagagtagcctaatggatgcggatggatggaaattttcttatctccgtgattaagtgttcagtgtatacaaatggttttttgccattacaagttcaattaatatgatcatgctgtattttttattttttttctttacttatctcacatgattttgatattgcaatggcaggtcatagttcgagatattgtctctaaattattgatagttcagttcagggcacacactagtcccatttctgcactttgctttgatccaagtggaactttgctggtgacagcatctgttcatggtcaaaacatgaatgttttccgcattatacctccacatgggacatcagaagctggtcaaattggaacctatgttcatctgtacaaactgcaaagaggcataaccaatgcgatcataaaagacatcagctttagtgatgatagtgactggataatgattagctcttcaagaggaactagccatttgttttcaatctctccatattgtggatcaacaagattccgttacagtgataacaaccctgtagaaaatgattacacagtggattcatcagttaatcatactgctcattggtcccaaaattcagcaacctctttgagtctgagtcagaagactctcttcgtatctggaccccctgtcacattgtctgttgttagtaggataagaaatgggagtaacgtgtttaagggtgctgtccatggtgctgctgcatttgcaactggtgcttccactccaatttctggtgcgattgcttcaacttttcacaaccgcatggctggtgacatcgattcagatggcagtttgcgcatgaagtattatttactagtattttctccatcaggaagcatcatacagtatgctctccatctctcagctgaacaggattctggattggatttccggacaagccccatttcttatgggccagagagagaaactgatacaaaatttgttattgaagctcttcagaagtgggatgtttgttataaaagaaatagaagagacagtgctgagagttttgcatatagtgattttgagaatggagaaaataataaacttttgctgaaagctatgtggaaagggactagtatctacccatttgactgttctgttgaaaggcaaaagctcagtgctgatgaaaaccgtaatctctatatttctcagagtgagttgcagactcatgttgtgcaaactccactctggtctaaatccaggatacactttcaagttatggagggtgaaactttagaagcagacaatgctgatgtaatttcaggggaagttgaagtagaaaaagtccagacccacaacatagaatcaaggtcaaagaatctcataccagtcttcgactccctccatacatcaaggtttcaacagacaaggtatattcaaattgtacacttgagcacttttgttagtggctgattaatgccaatactgctacataaggtatttcatctatgtggttgataaaggctgggtaattattgctggataattcaggccttcatcctgattttggaaattgctgctattgttttgtctgattagatttctcctgtggtgacttttatatttttaccctccaggttgaacgctcctgataacagcaggtgcgggctgctgcagcgacagaaatctgggatttcagaagatggtagactctctcgcagaagcagctgtagttctttggactgcatgtctgaagggcccaaaagctctgatgacggtgctttcagtaaatatgtagtagatgataacagttctgctgtaattaacaacccaagtgttaaatttcatgccgagcttgtaaataatactgggagcctcaagtcagaggcccagctcggatttgtaaatagcgaggaggatggtggaggtggagagcaactcccagacttgtgatgttgactatgtcaagatggtcgatggtgatggaggagcctctttaatcgctgaagtcttcattgtgcgtgtgtagctgaattctttcatttctccatcctgagttctttacctctcttctatctatagttctattcataggcattcatgaaaattttaccgagagaaaagataggaagggaggtttaattctggccctatgggtgtggaagctttggtgatgttagttcgatatcttacaagttgtaaataacatgcaataatagcacgtaatttgtgaatatttaaatcataatgtgtccaactgaggtacgagacatcttccaccatttcagacgcgtcttttcttttgtacttcgt

SEQ ID NO: 208847 - DNA, 3613 bp, Zea Mays
ccccacttcacccgtctcgccctgcttccgcgccgtattctctcttctctcctacccacaaacaaacccgaactgaacactgcttagcagctagtattctatttctcttaatcccgtcgtctcgtccagcgaaaagaggaggaaaaaaacacacggaaccgcaggcaaaccctcgctttctccgatcgaattgctcgtccccgtgcaaccaccaccggttcggccgctccccaccaccagtcctccccgcccccgcccgccggacgatctactaggcctctcgccccgcgcgtgccgatttcccccacctcgagcgccgccctcctcccgcgcccatggcgagcacctgaggatacggtcagtgggctgtttctctgcgagagtcccacgagtccccacagaaacagcccgggggcatcagcgatcgattcggaacgccttggttcggtctgattgccggattggtggtttcgtctcggcctcggcttcctcaactatctagcttggaagccaagtctgggcttgcttcgtgtggattgcatctggggaggcggtagcgtgcacgggtgtgattctcggaccggcttcatgcgggacggcgcgccggctcctcgcgccggcgggggcttcttctcggcgcggtcgctctccaactgcatgaggatcgtgtcgtcgggggcgtccacggccgcctccacgctgcgctcggccggggcatcgctggtcaactcgatggccagccacgaggaggatgcaagtcgtgaccaggtacagtgggctggctttgataaacttgaatgtgggggtggcttgctacggcaagttttgttgctggcttataaatctggtttccaagtgtgggatgtggaacatgctgatgatgtaagacagctagaatccagacacgatggtgctgtttcgtttattcaagtgctgaaggatccaattttcacaacagaatctggagacagatttgcagacacacgaccattgctagctcttgcctgtgaaggaactcacacaggaagtggaaagaaccatgatactaatgttcctgtttttgatggaaccaatggtgctttccatagtataggcggtgaaaaccttcctactgtcttactattttattcactgagaacccatgaatatgtgcatacattgaggttcagatcagctgtttattccataaggtgcagtccgagagtcgtagctatttcacaggctactcagatacattgttttgatgccgcgaccatggagagagaatatactgttcttaccagtcctacggttgcacaagtttcaggctatggcccacttggattgggtcctagatggattgcatattctgggaatccagttccggttccagatactggacgtgttagcccacagcttcttagtctatctccctctgttccacctcctggttcaaatggtagtgtggtggcatattatgcaaaagaatcaagcaagcaactggcagctggcattgcaacacttggtgaggttggatataataagctgtccaagtactatgcagatttcattccaaatggtaatggtaccataaagcaaagaagttctgtttacaaagcaaatggtgtaacaaatggccacctcattgacagtgaatatgctggaacggtcatagttcgagatattgtctctaaattattgatagttcagttcagggcacacactagtcccatttctgcactttgctttgatccaagtggaactttgctggtgacagcatctgttcatggtcaaaacatgaatgttttccgcattatacctccacatgggacatcagaagctggtcaaattggaacctatgttcatctgtacaaactgcaaagaggcataaccaatgcgatcataaaagacatcagctttagtgatgatagtgactggataatgattagctcttcaagaggaactagccatttgttttcaatctctccatattgtggatcaacaagattccgttacagtgataacaaccctgtagaaaatgattacacagtggattcatcagttaatcatactgctcattggtcccaaaattcagcaacctctttgagtctgagtcagaagactctcttcgtatctggaccccctgtcacattgtctgttgttagtaggataagaaatgggagtaacgtgtttaagggtgctgtccatggtgctgctgcatttgcaactggtgcttccactccaatttctggtgcgattgcttcaacttttcacaaccgcatggctggtgacatcgattcagatggcagtttgcgcatgaagtattatttactagtattttctccatcaggaagcatcatacagtatgctctccatctctcagctgaacaggattctggattggatttccggacaagccccatttcttatgggccagagagagaaactgatacaaaatttgttattgaagctcttcagaagtgggatgtttgttataaaagaaatagaagagacagtgctgagagttttgcatatagtgattttgagaatggagaaaataataaacttttgctgaaagctatgtggaaagggactagtatctacccatttgactgttctgttgaaaggcaaaagctcagtgctgatgaaaaccgtaatctctatatttctcagagtgagttgcagactcatgttgtgcaaactccactctggtctaaatccaggatacactttcaagttatggagggtgaaactttagaagcagacaatgctgatgtaatttcaggggaagttgaagtagaaaaagtccagacccacaacatagaatcaaggtcaaagaatctcataccagtcttcgactccctccatacatcaaggtttcaacagacaaggtatattcaaattgtacacttgagcacttttgttagtggctgattaatgccaatactgctacataaggttgaacgctcctgataacagcaggtgcgggctgctgcagcgacagaaatctgggatttcagaagatggtagactctctcgcagaagcagctgtagttctttggactgcatgtctgaagggcccaaaagctctgatgacggtgctttcagtaaatatgtagtagatgataacagttctgctgtaattaacaacccaagtgttaaatttcatgccgagcttgtaaataatactgggagcctcaagtcagaggcccagctcggatttgtaaatagcgaggaggatggtggaggtggagagcaactcccagacttgtgatgttgactatgtcaagatggtcgatggtgatggaggagcctctttaatcgctgaagtcttcattgtgcgtgtgtagctgaattctttcatttctccatcctgagttctttacctctcttctatctatagttctattcataggcattcatgaaaattttaccgagagaaaagataggaagggaggtttaattctggccctatgggtgtggaagctttggtgatgttagttcgatatcttacaagttgtaaataacatgcaataatagcacgtaatttgtgaatatttaaatcataatgtgtccaactgaggtacgagacatcttccaccatttcagacgcgtcttttcttttgtacttcgt

SEQ ID NO: 208848 - DNA, 4151 bp, Zea Mays
cttcacccgtctcgccctgcttccgcgccgtattctctcttctctcctacccacaaacaaacccgaactgaacactgcttagcagctagtattctatttctcttaatcccgtcgtctcgtccagcgaaaagaggaggaaaaaaacacacggaaccgcaggcaaaccctcgctttctccgatcgaattgctcgtccccgtgcaaccaccaccggttcggccgctccccaccaccagtcctccccgcccccgcccgccggacgatctactaggcctctcgccccgcgcgtgccgatttcccccacctcgagcgccgccctcctcccgcgcccatggcgagcacctgaggatacggtcagtgggctgtttctctgcgagagtcccacgagtccccacagaaacagcccgggggcatcagcgatcgattcggaacgccttggttcggtctgattgccggattggtggtttcgtctcggcctcggcttcctcaactatctagcttggaagccaagtctgggcttgcttcgtgtggattgcatctggggaggcggtagcgtgcacgggtgtgattctcggaccggcttcatgcgggacggcgcgccggctcctcgcgccggcgggggcttcttctcggcgcggtcgctctccaactgcatgaggatcgtgtcgtcgggggcgtccacggccgcctccacgctgcgctcggccggggcatcgctggtcaactcgatggccagccacgaggaggatgcaagtcgtgaccaggtacagtgggctggctttgataaacttgaatgtgggggtggcttgctacggcaagttttgttgctggcttataaatctggtttccaagtgtgggatgtggaacatgctgatgatgtaagacagctagaatccagacacgatggtgctgtttcgtttattcaagtgctgaaggatccaattttcacaacagaatctggagacagatttgcagacacacgaccattgctagctcttgcctgtgaaggaactcacacaggaagtggaaagaaccatgatactaatgttcctgtttttgatggaaccaatggtgctttccatagtataggcggtgaaaaccttcctactgtcttactattttattcactgagaacccatgaatatgtgcatacattgaggttcagatcagctgtttattccataaggtgcagtccgagagtcgtagctatttcacaggctactcagatacattgttttgatgccgcgaccatggagagagaatatactgttcttaccagtcctacggttgcacaagtttcaggctatggcccacttggattgggtcctagatggattgcatattctgggaatccagttccggttccagatactggacgtgttagcccacagcttcttagtctatctccctctgttccacctcctggttcaaatggtagtgtggtggcatattatgcaaaagaatcaagcaagcaactggcagctggcattgcaacacttggtgaggttggatataataagctgtccaagtactatgcagatttcattccaaatggtaatggtaccataaagcaaagaagttctgtttacaaagcaaatggtgtaacaaatggccacctcattgacagtgaatatgctggaacggtacagacctcttgtacatattttcatcgttaattctgttatcctggagttggcaataaacttgattaacattgttgctagcattaccatgtcatctctgtatactagtattagtaagaactaaccaaccctaaggctgtcagggaccacggaattcacctggccagtttgctaacaatttgatgatcttgctattcttcctcaggaattggccacggctgatcttctgtctcctgcatttgtatacacgctttacagaaatatatccgtggcagattgtgtacttcattttacatgcctgccattttgttcagttgtttgctttcattttacatccgtggcagaagtgtgaacaatattatccatcgaaactagacgagatagtatagcaggtaaggtgggtaattagttcttcatctggatggaatggaattcaaaagtagagtagcctaatggatgcggatggatggaaattttcttatctccgtgattaagtgttcagtgtatacaaatggttttttgccattacaagttcaattaatatgatcatgctgtattttttattttttttctttacttatctcacatgattttgatattgcaatggcaggtcatagttcgagatattgtctctaaattattgatagttcagttcagggcacacactagtcccatttctgcactttgctttgatccaagtggaactttgctggtgacagcatctgttcatggtcaaaacatgaatgttttccgcattatacctccacatgggacatcagaagctggtcaaattggaacctatgttcatctgtacaaactgcaaagaggcataaccaatgcgatcataaaagacatcagctttagtgatgatagtgactggataatgattagctcttcaagaggaactagccatttgttttcaatctctccatattgtggatcaacaagattccgttacagtgataacaaccctgtagaaaatgattacacagtggattcatcagttaatcatactgctcattggtcccaaaattcagcaacctctttgagtctgagtcagaagactctcttcgtatctggaccccctgtcacattgtctgttgttagtaggataagaaatgggagtaacgtgtttaagggtgctgtccatggtgctgctgcatttgcaactggtgcttccactccaatttctggtgcgattgcttcaacttttcacaaccgcatggctggtgacatcgattcagatggcagtttgcgcatgaagtattatttactagtattttctccatcaggaagcatcatacagtatgctctccatctctcagctgaacaggattctggattggatttccggacaagccccatttcttatgggccagagagagaaactgatacaaaatttgttattgaagctcttcagaagtgggatgtttgttataaaagaaatagaagagacagtgctgagagttttgcatatagtgattttgagaatggagaaaataataaacttttgctgaaagctatgtggaaagggactagtatctacccatttgactgttctgttgaaaggcaaaagctcagtgctgatgaaaaccgtaatctctatatttctcagagtgagttgcagactcatgttgtgcaaactccactctggtctaaatccaggatacactttcaagttatggagggtgaaactttagaagcagacaatgctgatgtaatttcaggggaagttgaagtagaaaaagtccagacccacaacatagaatcaaggtcaaagaatctcataccagtcttcgactccctccatacatcaaggtttcaacagacaaggttgaacgctcctgataacagcaggtgcgggctgctgcagcgacagaaatctgggatttcagaagatggtagactctctcgcagaagcagctgtagttctttggactgcatgtctgaagggcccaaaagctctgatgacggtgctttcagtaaatatgtagtagatgataacagttctgctgtaattaacaacccaagtgttaaatttcatgccgagcttgtaaataatactgggagcctcaagtcagaggcccagctcggatttgtaaatagcgaggaggatggtggaggtggagagcaactcccagacttgtgatgttgactatgtcaagatggtcgatggtgatggaggagcctctttaatcgctgaagtcttcattgtgcgtgtgtagctgaattctttcatttctccatcctgagttctttacctctcttctatctatagttctattcataggcattcatgaaaattttaccgagagaaaagataggaagggaggtttaattctggccctatgggtgtggaagctttggtgatgttagttcgatatcttacaagttgtaaataacatgcaataatagcacgtaatttgtgaatatttaaatcataatgtgtccaactgaggtacgagacatcttccaccatttcagacgcgtcttttcttttgtacttcgt

SEQ ID NO: 208849 - DNA, 3427 bp, Zea Mays
cctgcttccgcgccgtattctctcttctctcctacccacaaacaaacccgaactgaacactgcttagcagctagtattctatttctcttaatcccgtcgtctcgtccagcgaaaagaggaggaaaaaaacacacggaaccgcaggcaaaccctcgctttctccgatcgaattgctcgtccccgtgcaaccaccaccggttcggccgctccccaccaccagtcctccccgcccccgcccgccggacgatctactaggcctctcgccccgcgcgtgccgatttcccccacctcgagcgccgccctcctcccgcgcccatggcgagcacctgaggatacggtcagtgggctgtttctctgcgagagtcccacgagtccccacagaaacagcccgggggcatcagcgatcgattcggaacgccttggttcggtctgattgccggattggtggtttcgtctcggcctcggcttcctcaactatctagcttggaagccaagtctgggcttgcttcgtgtggattgcatctggggaggcggtagcgtgcacgggtgtgattctcggaccggcttcatgcgggacggcgcgccggctcctcgcgccggcgggggcttcttctcggcgcggtcgctctccaactgcatgaggatcgtgtcgtcgggggcgtccacggccgcctccacgctgcgctcggccggggcatcgctggtcaactcgatggccagccacgaggaggatgcaagtcgtgaccaggtacagtgggctggctttgataaacttgaatgtgggggtggcttgctacggcaagttttgttgctggcttataaatctggtttccaagtgtgggatgtggaacatgctgatgatgtaagacagctagaatccagacacgatggtgctgtttcgtttattcaagtgctgaaggatccaattttcacaacagaatctggagacagatttgcagacacacgaccattgctagctcttgcctgtgaaggaactcacacaggaagtggaaagaaccatgatactaatgttcctgtttttgatggaaccaatggtgctttccatagtataggcggtgaaaaccttcctactgtcttactattttattcactgagaacccatgaatatgtgcatacattgaggttcagatcagctgtttattccataaggtgcagtccgagagtcgtagctatttcacaggctactcagatacattgttttgatgccgcgaccatggagagagaatatactgttcttaccagtcctacggttgcacaagtttcaggctatggcccacttggattgggtcctagatggattgcatattctgggaatccagttccggttccagatactggacgtgttagcccacagcttcttagtctatctccctctgttccacctcctggttcaaatggtagtgtggtggcatattatgcaaaagaatcaagcaagcaactggcagctggcattgcaacacttggtgaggttggatataataagctgtccaagtactatgcagatttcattccaaatggtaatggtaccataaagcaaagaagttctgtttacaaagcaaatggtgtaacaaatggccacctcattgacagtgaatatgctggaacggtcatagttcgagatattgtctctaaattattgatagttcagttcagggcacacactagtcccatttctgcactttgctttgatccaagtggaactttgctggtgacagcatctgttcatggtcaaaacatgaatgttttccgcattatacctccacatgggacatcagaagctggtcaaattggaacctatgttcatctgtacaaactgcaaagaggcataaccaatgcgatcataaaagacatcagctttagtgatgatagtgactggataatgattagctcttcaagaggaactagccatttgttttcaatctctccatattgtggatcaacaagattccgttacagtgataacaaccctgtagaaaatgattacacagtggattcatcagttaatcatactgctcattggtcccaaaattcagcaacctctttgagtctgagtcagaagactctcttcgtatctggaccccctgtcacattgtctgttgttagtaggataagaaatgggagtaacgtgtttaagggtgctgtccatggtgctgctgcatttgcaactggtgcttccactccaatttctggaagcatcatacagtatgctctccatctctcagctgaacaggattctggattggatttccggacaagccccatttcttatgggccagagagagaaactgatacaaaatttgttattgaagctcttcagaagtgggatgtttgttataaaagaaatagaagagacagtgctgagagttttgcatatagtgattttgagaatggagaaaataataaacttttgctgaaagctatgtggaaagggactagtatctacccatttgactgttctgttgaaaggcaaaagctcagtgctgatgaaaaccgtaatctctatatttctcagagtgagttgcagactcatgttgtgcaaactccactctggtctaaatccaggatacactttcaagttatggagggtgaaactttagaagcagacaatgctgatgtaatttcaggggaagttgaagtagaaaaagtccagacccacaacatagaatcaaggtcaaagaatctcataccagtcttcgactccctccatacatcaaggtttcaacagacaaggttgaacgctcctgataacagcaggtgcgggctgctgcagcgacagaaatctgggatttcagaagatggtagactctctcgcagaagcagctgtagttctttggactgcatgtctgaagggcccaaaagctctgatgacggtgctttcagtaaatatgtagtagatgataacagttctgctgtaattaacaacccaagtgttaaatttcatgccgagcttgtaaataatactgggagcctcaagtcagaggcccagctcggatttgtaaatagcgaggaggatggtggaggtggagagcaactcccagacttgtgatgttgactatgtcaagatggtcgatggtgatggaggagcctctttaatcgctgaagtcttcattgtgcgtgtgtagctgaattctttcatttctccatcctgagttctttacctctcttctatctatagttctattcataggcattcatgaaaattttaccgagagaaaagataggaagggaggtttaattctggccctatgggtgtggaagctttggtgatgttagttcgatatcttacaagttgtaaataacatgcaataatagcacgtaatttgtgaatatttaaatcataatgtgtccaactgaggtacgagacatcttccaccatttcagacgcgtcttttcttttgtacttcgt

SEQ ID NO: 208850 - DNA, 1941 bp, Zea Mays
gaacaatattatccatcgaaactagacgagatagtatagcaggtcatagttcgagatattgtctctaaattattgatagttcagttcagggcacacactagtcccatttctgcactttgctttgatccaagtggaactttgctggtgacagcatctgttcatggtcaaaacatgaatgttttccgcattatacctccacatgggacatcagaagctggtcaaattggaacctatgttcatctgtacaaactgcaaagaggcataaccaatgcgatcataaaagacatcagctttagtgatgatagtgactggataatgattagctcttcaagaggaactagccatttgttttcaatctctccatattgtggatcaacaagattccgttacagtgataacaaccctgtagaaaatgattacacagtggattcatcagttaatcatactgctcattggtcccaaaattcagcaacctctttgagtctgagtcagaagactctcttcgtatctggaccccctgtcacattgtctgttgttagtaggataagaaatgggagtaacgtgtttaagggtgctgtccatggtgctgctgcatttgcaactggtgcttccactccaatttctggtgcgattgcttcaacttttcacaaccgcatggctggtgacatcgattcagatggcagtttgcgcatgaagtattatttactagtattttctccatcaggaagcatcatacagtatgctctccatctctcagctgaacaggattctggattggatttccggacaagccccatttcttatgggccagagagagaaactgatacaaaatttgttattgaagctcttcagaagtgggatgtttgttataaaagaaatagaagagacagtgctgagagttttgcatatagtgattttgagaatggagaaaataataaacttttgctgaaagctatgtggaaagggactagtatctacccatttgactgttctgttgaaaggcaaaagctcagtgctgatgaaaaccgtaatctctatatttctcagagtgagttgcagactcatgttgtgcaaactccactctggtctaaatccaggatacactttcaagttatggagggtgaaactttagaagcagacaatgctgatgtaatttcaggggaagttgaagtagaaaaagtccagacccacaacatagaatcaaggtcaaagaatctcataccagtcttcgactccctccatacatcaaggtttcaacagacaaggttgaacgctcctgataacagcaggtgcgggctgctgcagcgacagaaatctgggatttcagaagatggtagactctctcgcagaagcagctgtagttctttggactgcatgtctgaagggcccaaaagctctgatgacggtgctttcagtaaatatgtagtagatgataacagttctgctgtaattaacaacccaagtgttaaatttcatgccgagcttgtaaataatactgggagcctcaagtcagaggcccagctcggatttgtaaatagcgaggaggatggtggaggtggagagcaactcccagacttgtgatgttgactatgtcaagatggtcgatggtgatggaggagcctctttaatcgctgaagtcttcattgtgcgtgtgtagctgaattctttcatttctccatcctgagttctttacctctcttctatctatagttctattcataggcattcatgaaaattttaccgagagaaaagataggaagggaggtttaattctggccctatgggtgtggaagctttggtgatgttagttcgatatcttacaagttgtaaataacatgcaataatagcacgtaatttgtgaatatttaaatcataatgtgtccaactgaggtacgagacatcttccaccatttcagacgcgtcttttcttttgtacttcgt

SEQ ID NO: 208851 - DNA, 1282 bp, Zea Mays
gcggctcagatccagactcctccggtgtgggcgggcgctagttcccccggcggcgcggccctagcagcggccaccccggtgggcacggcttgtgcgcggccgtcctgacctgtgcgcgggcgcagcgtggccctcgacggcgcgcttgcaagcgccctaccggtgcgtgggcgggcagccacgatggcgcgcgggcgaagaccctcggcggcgcggcgggcccggctctgatccggtctcgtctggcgggcgcggccctgccccggcggctcccgtgaccctagtgcatggcaacggacaatgggcaaatgtcatggttgaacaaccccaatgatcagctatgagaagaaatgacacgtatctttgacacacacataggagccagacaaagaacatactaatgaaaagatcgatgaatgatattgatatggcatgagtgttttgaaatgtttggtaggttctgtttatatggatttttgtatgtacacaatgtttgcttacgtcatcgactcgagccaggtgagggttcggcgtggaggttcgtcgaggtctgctgctcgtagctcccgtcgctccactcaagatccagcagaagtggagcaaccacgagaagaacttaggcgacatcaggattacttgaagcaacaagctacgcaacatgaatattatgctacacagattcaacaatagcaaacactcatacaagtaagttcaaaagataatagctttcactttaagatatgtattgatttaaaacactgatgtgaatgagttcgacaaatttgtagcaactagcacaggcccaagggatacacgtcccggtgcccccaccaccaccacctctcgttcattatccttggtcttcacctccaccaacacctacatctccacctaccgaacatcaggtatgcaaattcatcataatttacttgttgttagttatattatgatctaactcagcaaatatcatttgtacatgtatattagacccctccagctaccttgccaacgcatgaacgagaagacgggttagactttgttgaaaccctcttcactagtggaggtatcgaccatcactcgtcactgtaacctgatggtgatcggcgaccgtgagctttcatgttattgtgttttgatacttgagacatttattatgactatgtatgtgatattgtctcttattagtactggatgagatgtgtcttattatgactatggatgagacttttatgatgtaattgatgagactatggatttaaatattgttatgtgattgtgtgtg

SEQ ID NO: 208852 - DNA, 1433 bp, Zea Mays
tggcggctcagatccagactcctccggtgtgggcgggcgctagttcccccggcggcgcggccctagcagcggccaccccggtgggcacggcttgtgcgcggccgtcctgacctgtgcgcgggcgcagcgtggccctcgacggcgcgcttgcaagcgccctaccggtgcgtgggcgggcagccacgatggcgcgcgggcgaagaccctcggcggcgcggcgggcccggctctgatccggtctcgtctggcgggcgcggccctgccccggcggctcccgtgaccctagtgcatggcaacggacaatgggtattgatgaagcaaatgtcatggttgaacaaccccaatgatcagctatgagaagaaatgacacgtatctttgacacacacataggagccagacaaagaacatactaatgaaaagatcgatgaatgatattgatatggcatgagtgttttgaaatgtttggtaggttctgtttatatggatttttgtatgtaagattgcattgttcttttgtatgaggctgcatatggcgaggcgatgtctagttagcacggaccagactatgactggaggacctcacctattgatcctcaggctgtgtatgcaagtggtggaaaagcacatggaaggtacacaatgtttgcttacgtcatcgactcgagccaggtgagggttcggcgtggaggttcgtcgaggtctgctgctcgtagctcccgtcgctccactcaagatccagcagaagtggagcaaccacgagaagaacttaggcgacatcaggattacttgaagcaacaagctacgcaacatgaatattatgctacacagattcaacaatagcaaacactcatacaagtaagttcaaaagataatagctttcactttaagatatgtattgatttaaaacactgatgtgaatgagttcgacaaatttgtagcaactagcacaggcccaagggatacacgtcccggtgcccccaccaccaccacctctcgttcattatccttggtcttcacctccaccaacacctacatctccacctaccgaacatcaggtatgcaaattcatcataatttacttgttgttagttatattatgatctaactcagcaaatatcatttgtacatgtatattagacccctccagctaccttgccaacgcatgaacgagaagacgggttagactttgttgaaaccctcttcactagtggaggtatcgaccatcactcgtcactgtaacctgatggtgatcggcgaccgtgagctttcatgttattgtgttttgatacttgagacatttattatgactatgtatgtgatattgtctcttattagtactggatgagatgtgtcttattatgactatggatgagacttttatgatgtaattgatgagactatggatttaaatattgttatgtgattgtgtgtg

SEQ ID NO: 208853 - DNA, 1937 bp, Zea Mays
tctatcgtgatttcttttattcgttccgagttctgacgatttcgtagacggatacggaatacgcatattgtcaactgtgcgtattttcagtctgtagaagccatcttttaaagaacattttgggcagaaattgccagtagcatttcttgtggttaacatggacttctcagctggttcctacttctcatcatggcctatcaattctgcttctgagagctacagtttggctgatggttcagcggaatcatatggagaaggaagcatgccaccgtcaacctatttcatgacagctagatcagatcacaatttaaatttcagtgtgcatgaacaggattccactatgcttccaaacgaacagttgacctatgctggtgctggccagattgatctattacctgctgagactctatctagggataagcttcctgaaaatcttctggagcttcaaggacttcagaatatcagcaacctacagagtaatttagtggccccaggggtgtttcagcacaatttaacacctggggtctttcatccacagttgaacactcctggactttcagaactgcctcatgccttatctagttcaattgacagtaatggaagtgaagtttctgcttttctcgctgatctaaacgctgtttcttcagcgccaactttatgttccacattccaaaacgcttcttcgttcatggaaccagtgaatctagaagctttcagtattcaaggcgcacaaagtgattgtgttttgaacagaacaagtcatccgaatgggaatatctcagatagcaaggagtttatcagtggtagtctcccttcttttgctagtgtccaggaaacaaacctagctgctagtggcttcaagactcagaagcaggagcaaaatgcagtgtgcaatatccctactttcactgcacggaatcaaatgtcagttgctgcaatgcaaggagcacttgtccctcaaaagattccttcacggatcaatgataataaaagtgagggtcctgttagccatccttctgatgtacaaactcaaccaaattcagctgttaatggtgttggtgtgaaaccacgagtaagggctcgtcgtggacaagcaactgatcctcatagtattgctgaacggcttcgcagagagaaaatttcagataggatgaaaaatctgcaggatcttgtcccaaattccaataaggtactttttttggagggtgggggtgggttgacttgtctggtgcatactgcaggcagacaaggcatccatgctggatgaaattattgattatgtgaagtttcttcagcttcaggtcaaggtcttgagcatgagtagggtaggagctccaggagcagttcttccccttctcacagaatctaagactgagggttaccacggccaacctctgccacaaggattactggacgcactagactcggaagacagcttcgtcttcgaggaagaggtcgtgaagctaatggagaccagcatcaccagcgcgatgcagtaccttcagagcaaggggctctgcctgatgccagtcgcccttgcttccgcaatatccacccagaaaggtgtgtccgctgctgcagtccctcctgaacggtgagataaagacacgctcctcccccatgagcacgaggaaacagccgcagatgacagaactcagacggctgaagaatgcagcaatgcaaagcccgtagagtgcagcataggaagttagtctgtgaccagagcgcatggcctcgtctactaatttcgctctcagaatcagctttttttttcgtacctattgcgcatcagttgattttgcctttttgccttctctcttttctttttggccgtatttcatcaggttgcatataaaaaaaagtaaaatctactggttctggcgttctgctatatgggatcttgtgatcaggcatctccaaagtgatcctcttgcccg

SEQ ID NO: 208854 - DNA, 2221 bp, Zea Mays
aaccaaccgcagtctttccttactgctagcgctgagcgagcatcagaaattcagcagtccaacgcgtcctccaatcttcgcccccggcaagcaataccgaaaaagccactccttttccttctccgcgcaaagccccaaaccgccgcctcccgttctctcgagtctcgacctctcctctcctctcctcttctcaggtctcacctgagtcacacctccacagacactgagacacacacatacgctatctctcatcgtcctccactcccggcaacggaagtttcactgctgccctcatctaactccccgtctcactgcatattgtcaactgtgcgtattttcagtctgtagaagccatcttttaaagaacattttgggcagaaattgccagtagcatttcttgtggttaacatggacttctcagctggttcctacttctcatcatggcctatcaattctgcttctgagagctacagtttggctgatggttcagcggaatcatatggagaaggaagcatgccaccgtcaacctatttcatgacagctagatcagatcacaatttaaatttcagtgtgcatgaacaggattccactatgcttccaaacgaacagttgacctatgctggtgctggccagattgatctattacctgctgagactctatctagggataagcttcctgaaaatcttctggagcttcaaggacttcagaatatcagcaacctacagagtaatttagtggccccaggggtgtttcagcacaatttaacacctggggtctttcatccacagttgaacactcctggactttcagaactgcctcatgccttatctagttcaattgacagtaatggaagtgaagtttctgcttttctcgctgatctaaacgctgtttcttcagcgccaactttatgttccacattccaaaacgcttcttcgttcatggaaccagtgaatctagaagctttcagtattcaaggcgcacaaagtgattgtgttttgaacagaacaagtcatccgaatgggaatatctcagtatgtgacagtgctgccttggcatcactacatgatagcaaggagtttatcagtggtagtctcccttcttttgctagtgtccaggaaacaaacctagctgctagtggcttcaagactcagaagcaggagcaaaatgcagtgtgcaatatccctactttcactgcacggaatcaaatgtcagttgctgcaatgcaaggagcacttgtccctcaaaagattccttcacggatcaatgataataaaagtgagggtcctgttagccatccttctgatgtacaaactcaaccaaattcagctgttaatggtgttggtgtgaaaccacgagtaagggctcgtcgtggacaagcaactgatcctcatagtattgctgaacggcttcgcagagagaaaatttcagataggatgaaaaatctgcaggatcttgtcccaaattccaataaggtactttttttggagggtgggggtgggttgacttgtctggtgcatactgcaggcagacaaggcatccatgctggatgaaattattgattatgtgaagtttcttcagcttcaggtcaaggtcttgagcatgagtagggtaggagctccaggagcagttcttccccttctcacagaatctaagactgagggttaccacggccaacctctgccacaaggattactggacgcactagactcggaagacagcttcgtcttcgaggaagaggtcgtgaagctaatggagaccagcatcaccagcgcgatgcagtaccttcagagcaaggggctctgcctgatgccagtcgcccttgcttccgcaatatccacccagaaaggtgtgtccgctgctgcagtccctcctgaacggtgagataaagacacgctcctcccccatgagcacgaggaaacagccgcagatgacagaactcagacggctgaagaatgcagcaatgcaaagcccgtagagtgcagcataggaagttagtctgtgaccagagcgcatggcctcgtctactaatttcgctctcagaatcagctttttttttcgtacctattgcgcatcagttgattttgcctttttgccttctctcttttctttttggccgtatttcatcaggttgcatataaaaaaaagtaaaatctactggttctggcgttctgctatatgggatcttgtgatcaggcatctccaaagtgatcctcttgcccg

SEQ ID NO: 208855 - DNA, 2989 bp, Zea Mays
aaccaaccgcagtctttccttactgctagcgctgagcgagcatcagaaattcagcagtccaacgcgtcctccaatcttcgcccccggcaagcaataccgaaaaagccactccttttccttctccgcgcaaagccccaaaccgccgcctcccgttctctcgagtctcgacctctcctctcctctcctcttctcaggtctcacctgagtcacacctccacagacactgagacacacacatacgctatctctcatcgtcctccactcccggcaacggaagtttcactgctgccctcatctaactccccgtctcactgcatattgtcaactgtgcgtattttcagtctgtagaagccatcttttaaagaacattttgggcagaaattgccagtagcatttcttgtggttaacatggacttctcagctggttcctacttctcatcatggcctatcaattctgcttctgagagctacagtttggctgatggttcagcggaatcatatggagaaggaagcatgccaccgtcaacctatttcatgacagctagatcagatcacaatttaaatttcagtgtgcatgaacaggattccactatgcttccaaacgaacagttgacctatgctggtgctggccagattgatctattacctgctgagactctatctagggataagcttcctgaaaatcttctggagcttcaaggacttcagaatatcagcaacctacagagtaatttagtggccccaggggtgtttcagcacaatttaacacctggggtctttcatccacagttgaacactcctggactttcagaactgcctcatgccttatctagttcaattgacagtaatggaagtgaagtttctgcttttctcgctgatctaaacgctgtttcttcagcgccaactttatgttccacattccaaaacgcttcttcgttcatggaaccagtgaatctagaagctttcagtattcaaggcgcacaaagtgattgtgttttgaacagaacaagtcatccgaatgggaatatctcagtatgtgacagtgctgccttggcatcactacatgatagcaaggagtttatcagtggtagtctcccttcttttgctagtgtccaggaaacaaacctagctgctagtggcttcaagactcagaagcaggagcaaaatgcagtgtgcaatatccctactttcactgcacggaatcaaatgtcagttgctgcaatgcaaggagcacttgtccctcaaaagattccttcacggatcaatgataataaaagtgagggtcctgttagccatccttctgatgtacaaactcaaccaaattcagctgttaatggtgttggtgtgaaaccacgagtaagggctcgtcgtggacaagcaactgatcctcatagtattgctgaacggcttcgcagagagaaaatttcagataggatgaaaaatctgcaggatcttgtcccaaattccaataaggtactttttttggagggtgggggtgggttgacttgtctggtgcatactgcaggtattaaatttggacatggaactaattatcaaagctttgctacttatatacgtaacaagaacatgtattttctagttgtggcttgaaaactgaagtgacaaatagaagggagcagcaattaaatttaaggttctttgggatttgcgtgaaagagcctctagttgagttgattaggtggtctgagtatctcggccggggagggaaagaccgtcctcctggtattatattaagaagagaccgaaacatggtcccggccaataaacccccgaacatcatcactaacgggttgatcaactgcccactctgcaacggcccagatggagggtggcacgcaggatatcgatcccccgagagcgggcgggatacaacgaggagatttttttaaccaagtccaaaatttgcccactcggaagccttaaccattacgctagaggccctttcgcaggtggtatgagtaacactccttaggttctgagtttgggccaacaatagtcattacgtattttgccattggctcagttccaccccgatgaagcttcaaagacaggttttgtgcttgtttgtttggattggatgtattaaatgctacattccaacgaaacatcatttatccaattccaaattccttgttcctgttgatgcggagcttgtttaatgcatggctaaaataccatagcaaggaagacaacagtcttacctttcattaaagaggttcatttgtttagttctcttaataatatggagtggcaaatcttttggtgcaagcaggcagacaaggcatccatgctggatgaaattattgattatgtgaagtttcttcagcttcaggtcaaggtcttgagcatgagtagggtaggagctccaggagcagttcttccccttctcacagaatctaagactgagggttaccacggccaacctctgccacaaggattactggacgcactagactcggaagacagcttcgtcttcgaggaagaggtcgtgaagctaatggagaccagcatcaccagcgcgatgcagtaccttcagagcaaggggctctgcctgatgccagtcgcccttgcttccgcaatatccacccagaaaggtgtgtccgctgctgcagtccctcctgaacggtgagataaagacacgctcctcccccatgagcacgaggaaacagccgcagatgacagaactcagacggctgaagaatgcagcaatgcaaagcccgtagagtgcagcataggaagttagtctgtgaccagagcgcatggcctcgtctactaatttcgctctcagaatcagctttttttttcgtacctattgcgcatcagttgattttgcctttttgccttctctcttttctttttggccgtatttcatcaggttgcatataaaaaaaagtaaaatctactggttctggcgttctgctatatgggatcttgtgatcaggcatctccaaagtgatcctcttgcccg

SEQ ID NO: 208856 - DNA, 2170 bp, Zea Mays
cgagtccttaaaaaaaaaggcagcaggaccgattaaccaaccgcagtctttccttactgctagcgctgagcgagcatcagaaattcagcagtccaacgcgtcctccaatcttcgcccccggcaagcaataccgaaaaagccactccttttccttctccgcgcaaagccccaaaccgccgcctcccgttctctcgagtctcgacctctcctctcctctcctcttctcaggtctcacctgagtcacacctccacagacactgagacacacacatacgctatctctcatcgtcctccactcccggcaacggaagtttcactgctgccctcatctaactccccgtctcactgcatattgtcaactgtgcgtattttcagtctgtagaagccatcttttaaagaacattttgggcagaaattgccagtagcatttcttgtggttaacatggacttctcagctggttcctacttctcatcatggcctatcaattctgcttctgagagctacagtttggctgatggttcagcggaatcatatggagaaggaagcatgccaccgtcaacctatttcatgacagctagatcagatcacaatttaaatttcagtgtgcatgaacaggattccactatgcttccaaacgaacagttgacctatgctggtgctggccagattgatctattacctgctgagactctatctagggataagcttcctgaaaatcttctggagcttcaaggacttcagaatatcagcaacctacagagtaatttagtggccccaggggtgtttcagcacaatttaacacctggggtctttcatccacagttgaacactcctggactttcagaactgcctcatgccttatctagttcaattgacagtaatggaagtgaagtttctgcttttctcgctgatctaaacgctgtttcttcagcgccaactttatgttccacattccaaaacgcttcttcgttcatggaaccagtgaatctagaagctttcagtattcaaggcgcacaaagtgattgtgttttgaacagaacaagtcatccgaatgggaatatctcagatagcaaggagtttatcagtggtagtctcccttcttttgctagtgtccaggaaacaaacctagctgctagtggcttcaagactcagaagcaggagcaaaatgcagtgtgcaatatccctactttcactgcacggaatcaaatgtcagttgctgcaatgcaaggagcacttgtccctcaaaagattccttcacggatcaatgataataaaagtgagggtcctgttagccatccttctgatgtacaaactcaaccaaattcagctgttaatggtgttggtgtgaaaccacgagtaagggctcgtcgtggacaagcaactgatcctcatagtattgctgaacggcttcgcagagagaaaatttcagataggatgaaaaatctgcaggatcttgtcccaaattccaataaggcagacaaggcatccatgctggatgaaattattgattatgtgaagtttcttcagcttcaggtcaaggtcttgagcatgagtagggtaggagctccaggagcagttcttccccttctcacagaatctaagactgagggttaccacggccaacctctgccacaaggattactggacgcactagactcggaagacagcttcgtcttcgaggaagaggtcgtgaagctaatggagaccagcatcaccagcgcgatgcagtaccttcagagcaaggggctctgcctgatgccagtcgcccttgcttccgcaatatccacccagaaaggtgtgtccgctgctgcagtccctcctgaacggtgagataaagacacgctcctcccccatgagcacgaggaaacagccgcagatgacagaactcagacggctgaagaatgcagcaatgcaaagcccgtagagtgcagcataggaagttagtctgtgaccagagcgcatggcctcgtctactaatttcgctctcagaatcagctttttttttcgtacctattgcgcatcagttgattttgcctttttgccttctctcttttctttttggccgtatttcatcaggttgcatataaaaaaaagtaaaatctactggttctggcgttctgctatatgggatcttgtgatcaggcatctccaaagtgatcctcttgcccg

SEQ ID NO: 208857 - DNA, 2285 bp, Zea Mays
agccttatcccaaaccgcctcctctctgttgattccgtggagcaccagccaagctcctcccctgcggctcgcctccctcacggcgccgcctgctccccattgccgacctccactcgagcacctgagcaagcgctcctgaggtcatcttccccatcttcctctagtgccggccgccaggtcgtcttccccatccctcccatggcgccctcacctctgctcctcccagcgccctggctctgttcaaccttcacagtgagctcgccctcagccatggcggatgatgcctccacctcccccttggtgctcgccgagctcgccctcagccctgccgcgcccctgctttctgttcccagtgcgccctctgttctgttccaaccgttctccacgccgtgttcccccatggctccccttgcctctccggtcagcactagcccgaacggtacagcagcatactggtgccaaacccgtgtccgcgacgctcgccaagtgctcgatgaaataccgcagtgagctccacctcgacctgtgcagccccaacccgcgacgtcgcaacacccttggtgaggcctcgccacccctgttgtttttgtgctcagcgtgcttgataaattgtctaaactgtgtgagcgtcattaatcgcagccctccgtcgatgtcgcgcttcgcgcattgctcctcgacgaagagccagaaccgtggtagacatgcatgcgcaatccgaactaatttcacctggttgttcgctttatgtgattgtggtttgctctaattacgtgtggtcgatggcgtgaatatgtgtgtgaaaatgtaagcacatactctcatgcttaacaaaacaatccaaaatattaccatatatggttgcaacagcagagtgccaaacaatggaaatcaaaatcgacttacttcttcgtgtgcttcatccactgtggtgctacatgactcttgttttcattcttctcctcgctagcgtctacatctggcctcacctcccaggaaactccagatggaactgcgttgcatggctccatggagtccactgaacatggttcttgtaccttacccagttcaatagttctcttctgctgagattaatttgtggcgttatcatgcataaattatatttaattgaacaattgcaaaataaggttagagaacatcgttaatacaagcaacacatactctatcagaagcttcagttattacagtaggagctgcagtttggataatgttcttggtcccctcagattcatcatcattactatctgtgtgattcaagtctccagatgcggctttgcataaagtatcaagcttctcctgcaagcaaatcagttctcgagcaacagacttcctagcttcccttacacttggatgcaagccctgtgtcaatattaccaaggtcttagaaacaacccagcaagtaccaaaaaagtttaccaaataagaaataagtctatgccactcagagaaaaacaggctggaatgaaaaatatacctggattgcgtcaagcttcaggagtaaattcataatagtttcacctatggccacttgctctttttgagatggtcccagttaccttacatggttctgttggacacaatgaagccatccagatatgctattaaaaatcctgctagtcattatggctttaaactgtaccacgtatgttctattttcagctaagcagagcatgttctatttacagcaggccagcagacaccaggcagtaaggtgatgtatgagtcaattatcaggtgacaaaatggttatgtttaatcatgcatgttatcttcctggctctctatgtttttttgaggcattcaactacttgtagtaccagtgcatcactgatatgtatatatgtgttgatgttcgtcatccaagatcaaatacatcctgataggtcattacttgctaatgtgcatctgattttgctgttgccaagatggaaaatttttttggcagctttctcagtgaatcagtatcaccgcagaacctttttggacacccaaatgtcgaaagatgcccattcctgaggaatatcaatggagctacaaccttttcccctcacttctgctttgccagtagctgctcaaagaggcaagggtccaatttttgaggaagggtcaggctttgagtcagcattcaagcttttctatggccgagatggaatagttcccctttgagaaagatcatatgtatctgatgaaaaccacaatttagagtacacttatgtatgagttatttgacaatgcttatttatgagatattgaatgttatttat

SEQ ID NO: 208858 - DNA, 2289 bp, Zea Mays
cgcggcgcagctcctttcttcctcctcggccctcgcgtctcttttcccagtcgacgcaccgccaaaagccctgggtagggtgactgggtgtctgggtctctacgcctccctcgtcatgctgcgccgcctccgtctgcgctcgccggtgtgcgctgtcgccggcgcggccgctgcaatggcgtcgctcaccaacgtcgcctacgccgatggcctcttccgccgccagtccccgccgtcgaatccaggcgacgaggacaatttgggagcctccgcgttcggccgcgacccggagaccctggagcgcatggctcgagcgctgcgggagatcaacaactcaccgctcgccaagcaggtgtttggactgatgcggaagcaggaggaaacacgccttactgagctggaggccgagaaggtccaatacgccatctacgagaagctcagggacatggaaaggatggagaaaaaagctgaagattacagaaatagtttgcaacaagaagcacaagtaaaagctcaagcattacgctttgaggatgaattagctagaaaaagaatgcagacagagcatgctgcacagaggcaacaggatgctgaacttgtgaagatgcaagaggcatctgccctcagaagagaagaagctaggcgtgcaacagaacagaagattttggaagaaatgatacggactgagaaggaaaaggctgaaatagatcaggaagtaaacagagctaaagctttagcagaagcagaagctcgtgttcatgaagagaagcaatcagaagaagttacaaaaagaatgatgttggaacgtatgaagggtgaaaaggaaaagtggctcgctgcaataaatacaaccttttcacacattgaaggtggattcaaagcactgttaactgataggagcaaactaataatgggtattggaggagttactgcactggccgctggagtctatactactagggaaggtgcgagggttacatggagttacatcaataggatcttgggtcagccttcactgatccgtgaatcatcaatgccaaagttcccactaccaatgtctaggttactcaaaccaagctcagcatctttgtcggggggagcaggctttgagaatgtgattctgcacccttcactcaagcggaggattgaacatcttgcacgagcaactgcaaatacaaagtctcatggtgcaccattccgcaacatgctgttttatggtcctcctggaactggcaaaactttagtagccagggagatggctcgcaaatctggcctggattatgccatgatgacgggaggagatgttgcacccttaggatcagaggctgttaccaagatccatcaaatatttgactgggctaagaagtccaagaaaggcgtaacagtacccatatgagcgaagctcagcggagtgctctcaatgcattgttgtttcgaactggcgaccagtccagggatattgtccttgtcctggcaacaaacagaccgggtgaccttgatgctgctatcactgaccgcattgatgaagtcatagagttccccttgcccggggaggaggagaggtttcaactgctcaagctatacttgcaccaatatatactcaaggaagagggcaaaggatcttggggtgcattattcaagaagcagcagcggaagattcaggtgaatggcataagcgacgatttgctcagggaagctgcaaggaggatcgatggcttctctggcagggagattgcaaagcttgtggctagcgtgcaagctgctgtttatggccggcctggctgcacattggatccccagttattttcggaggtagttgactacaaagttactgagcatcaccaacgcatcatgcttgcttctgagggtatggcttgatcaataagaaatattttacctggaagccacaggtttcaagctatcaaagatcgggtttggtgatgagcgacaaaactgacaatcacctcccactgacttgtagtcatgttttggatcccgtgggactttttgtaggcggaggttctatttccagaatttttgttccatgtgccttgcctgaagcaaggtctggtcccggatggacatccaaataggctggttgtggtcaactgagtttagtttaactcatttagtaggtttgcgctgtgttttaacttttccttaagtctctcgtgccccattcttggtagcatctgtacgcttgtttatgccaaagaaaaggatcaaattatttaggtgataattctttgtccattttttaattgattggttgctagcgatttttctttc

SEQ ID NO: 208859 - DNA, 2212 bp, Zea Mays
aacgtgttggttatttaccccgtttaccactgagtcctccgcaagccattcttcccgacatggcgatacccacggccacgcacgcgtcagagatgaggacgacgacaatcaggatgagggtttgagcacggacgaccccctctccatcgtccgctctaatttcttcctcccccgtcagcaacccttgtagtctctgctaccgtcagcccgtacgcgatcaaagccccgctgcactgcggccaaccgtttctggcaccggcaccggcaccggatccgccgccttcgtcgtccaggatggcgatgatgagccggacgcgggatctgctgatggaggggttcgaggggctggtgcgggatgggtcgttcaagtggggcctcccccgccgcggggacacggccatggacgacggcggcgacgacgacggctccctctccgtgcagcgctcctccatcgctggcctttccttcaaggccaacgccgtcgtcgcccgctgctcccgaatccttggcgtttctaccaatgatctacaaaataactttgataagcaagcatctgattccataaagcagccaaaaagctacgcaagaaattttttggagtactgctgcttcctggcacttgctcagatatcacaagtgacagggtatcttgctgacaagagctttcgccgcttgtcttttgacatgatgttagcttgggaggttccctattcttcaagccagctcactgttaaggctgaggtagatagcacagttagctcagaagcttttacaagaatagcacctgccatcccaaccattgctgatgtagtaacttgtgcaaatctctttgatgtactttcatgttcgagcggaggccgtctttcattttctgtatatgagaagtacctttcagaattggacagagcggttaaaaagatgaagacacaatctgagtcatcacttctatcaaactttcggtctcagagaggagaaaggattctggaagttgatggtacattgacaacacaaccagtacttgaacatgtgggtatttcaacgtggccaggaagattaatactcacagatcatgccctttactttgaagctcttcgggttgttacctatgataagcccaaagtttatgagcttgcagaagatttaaagcaggttgttaaacctgagctgactggtccatgggggtcacgtctctttgacaaagccgttatgtacaaatcaacaaccttaacagaacctgtgatcatagaatttccggagttagctggccattctcgccgagattattggctggccattatatcagaagtactttatgcccatagatttgttaggaagtttgatataagcggaattgacaaagaggaaacaattctgaaagcagtacttggtattatgaggttacaagccattgaagagttacattttgaagttccaaatcgttatgaatctcttttgttgttcagccaatgtgacaaacttcctggaggtgatgttatacttgaaacattagccagttctatagcatcaagaacttcagatcgaactaaccaacctggcacaagtagaggaatgcatgctgtcctgtcaaacctgggcatggtatcaccagttaatagtggtgagcgtttgtttgttggtgagattgttgttggggaaattagtgccttgcagaaggctgttactgattcaatgaacaactataagaaagttgaactggcccaagcgtcggttgatggagtcaaagttgatggtcttgatacaaacttagcagtaatgaaggaattgttatccccggtaagtgagctttggagggttttgctattgctcacatcatgggacgagcctatgaagtccatgttgttttgcttcctattctcttatattatcatcagggggtgggtaatctattttattgtcacggtactattgttttcagcaacttttatgtttctcacaagattaactaatcaaggaaagcaaatgagtgaggtaaaggtggtatccccacctccactgaacacaatggagcagctcctagctgttcaaaatgccatttctaaaattgaggagcttgtccaagatgcaaatattgttcttctgaagataagagctctattgttggcttttccatcccagctgtttttgttatgtggtagctttattacgacctttgaaggaaggcttctttggtgatgtgctccttcagaccttg

SEQ ID NO: 208860 - DNA, 1372 bp, Zea Mays
gcaaatatttgttcctctctttgccttgcagacaaatagcacacagcaatcaaccgtcgtcttcttcctcgacgcctcataggctcatagggttctccaaattctaaatcgttgcaagcgaaaccaccaaaactgtactcacaaccctcgtctgcgctgcgccaccactcccccgtggcggcttgtagttgtagaagttcccggaaccagacaacccctaggcgctgagttttctgatagcggcttcggatatctcgtcgtgggcggccatggcgggcccgtgctgagtgcggggcgggagcaggtgaaggtctccgagctcgagatctcgatgcagattcgggagggcccggcgcggcggcaggcgccgtccgccgctggggcgctgcggtcgcccatgtccgccatgatgctcgctatgttcgctactatggcctccttctacgtcgccggtcgattgtggcaggatgctcagaaccgacttcatctcattaaggagctcgacagacgaacaggccaggggcaatcagcaatatctgtggatgataccttgaaggttgttgcatgcaggcagcaagggaagcggttggcatcacttgagatggagctggctgcagcaaagcataaaggttttgttggcaaatatactcctgagacaaatggaactcattctgggaaaaagccactgattgttattggaataatgagtagctttgggaggaaaaactaccgtgatgctgtcaggaaatcatggcttccaacaggttcaatgctgaagaaactagaagaagaaaaaggcattgtagtacgttttgttgttggaagaagtgcaaatcgaggtgatactttcgatagggagattgatgacgaaaataggagcaccaaggatttcttgatattggatgatcatatagaatctgatgaagagcttcctaagaagacaaaaagtttctttgctaatgcagcagaaacattcaatgctgcattttatgctaaggtcaatgatgatatatacataaatgtcgatactttgagtgcaatgctcgaaactcactgggacaggcctcgtgtctatataggttgcatgaaatcgggcgaggttttctctgacttaacccacaagtggtacgaatcagactggtggaaatttggtgatgggaaatcgtactttcgacacgcttctggtgaaatgtttgtcatatccagggccatagctcagttcatttctataaacaagtccgctctccggacatatgcccatgatgatgttagtgttggatcgtggatgattggccttgccgtgaatcatgtaaatgaagcaaaactgtgctgttcatcgtggccctcagtggccctgcgatccgaaccacag

SEQ ID NO: 208861 - DNA, 2071 bp, Zea Mays
caaatatttgttcctctctttgccttgcagacaaatagcacacagcaatcaaccgtcgtcttcttcctcgacgcctcataggctcatagggttctccaaattctaaatcgttgcaagcgaaaccaccaaaactgtactcacaaccctcgtctgcgctgcgccaccactcccccgtggcggcttgtagttgtagaagttcccggaaccagacaacccctaggcgctgagttttctgatagcggcttcggatatctcgtcgtgggcggccatggcgggcccgtgctgagtgcggggcgggagcaggtgaaggtctccgagctcgagatctcgatgcagattcgggagggcccggcgcggcggcaggcgccgtccgccgctggggcgctgcggtcgcccatgtccgccatgatgctcgctatgttcgctactatggcctccttctacgtcgccggtcgattgtggcaggatgctcagaaccgacttcatctcattaaggagctcgacagacgaacaggccaggggcaatcagcaatatctgtggatgataccttgaaggttgttgcatgcaggcagcaagggaagcggttggcatcacttgagatggagctggctgcagcaaagcataaaggttttgttggcaaatatactcctgagacaaatggaactcattctgggaaaaagccactgattgttattggaataatgagtagctttgggaggaaaaactaccgtgatgctgtcaggaaatcatggcttccaacaggttcaatgctgaagaaactagaagaagaaaaaggcattgtagtacgttttgttgttggaagaagtgcaaatcgaggtgatactttcgatagggagattgatgacgaaaataggagcaccaaggatttcttgatattggatgatcatatagaatctgatgaagagcttcctaagaagacaaaaagtttctttgctaatgcagcagaaacattcaatgctgcattttatgctaaggtcaatgatgatatatacataaatgtcgatactttgagtgcaatgctcgaaactcactgggacaggcctcgtgtctatataggttgcatgaaatcgggcgaggttttctctgacttaacccacaagtggtacgaatcagactggtggaaatttggtgatgggaaatcgtactttcgacacgcttctggtgaaatgtttgtcatatccagggccatagctcagttcatttctataaacaagtccgctctccggacatatgcccatgatgatgttagtgttggatcgtggatgattggccttgccgtgaatcatgtaaatgaagcaaaactgtgctgttcatcgtggccctcagccaggccaaatttcatccgttgaccgaggaggctctgccgcttttggatgtgtgctgtttttttgggttatcggactgctatgactaatctccagtttcaaatttgatgcccctcccaggcttgattcggaacggctgaatcagcagccaaagttccgctgaactttggcacgacatacataggtggcatccaaacatgccctgaggttcctcactggtcctgatcaaggtgcgttatgttcagcgctataacgagcaacaatgcttaatgaggaagagttttgcaaacactgtgcctgttggatcgaatcggtattgggaaaattttgttttcttctgccatcttgtgtagtcctttggaggaggcttgtacgagccagttcatactgattactggatcggatatcttgtttttcttttccaaaggaaaggtcttgcatattttctttgcaaggccactacactagaatcatgagttctgacgaaaagccctctgcagattgtatcctgttccgcgtgccatttgtagatgccccaccctttaccattcttttttctgacagacactgccattgttggagtgacagaaatcaatagcaattcgggagattactttgctccagaatacatttatgcgtaatgcgtgtcttcagacctgttgccatggttgtgattttttgacacatacataatgatgccctcttgaagtcaagaatctgccat

SEQ ID NO: 208862 - DNA, 505 bp, Zea Mays
tatggcactgggtgcgttatgttcagcgctataacgagcaacaatgcttaatgaggaagagttttgcaaacactgtgcctgttggatcgaatcggtattgggaaaattttgttttcttctgccatcttgtgtagtcctttggaggaggcttgtacgagccagttcatactgattactggatcggatatcttgtttttcttttccaaaggaaaggtcttgcatattttctttgcaaggccactacactagaatcatgagttctgacgaaaagccctctgcagattgtatcctgttccgcgtgccatttgtagatgccccaccctttaccattcttttttctgacagacactgccattgttggagtgacagaaatcaatagcaattcgggagattactttgctccagaatacatttatgcgtaatgcgtgtcttcagacctgttgccatggttgtgattttttgacacatacataatgatgccctcttgaagtcaagaatctgccat

SEQ ID NO: 208863 - DNA, 202 bp, Zea Mays
  misc_feature (201)..(202): n is a, c, g, or t
gaatcagagatctctctggttatgacaaatgatgcacaactcagtacaatggtggcagaacaggtcgagcaagcccatgctggcatcaatgctctagcattatctcaggaaacaataaacaaactacgtgaaaacttcattgatatagacaagtaagctatgtatcttgatttttacatttttcacattctcttgcttgann

SEQ ID NO: 208864 - DNA, 756 bp, Zea Mays
caagatgcaaggcttgccgagctgcctagccattataatgcttggtccttgaattgaagtcaattgatttccgatttaataaggcacagtttgtttgagcttctgctgtcgtcttcacatattttaatttttaatgcatgtggggattactgaaattgttgtgcagacatgtgttttgagattgtgtgctatttgtgcctgattttattgcacaggcagggtggtctatctcaaagatttttgaaagttgtttcttattatggtctcacgactctgccatataaactggatgctctggaaccttacatgagaaagagaacagttgaacttcactagggtctcgaatcatcactttttctgggaatcgatgcaaccagaaggtggtggcttacctgagggaggtgtgctatagcagattgaaaaggattttggcttgtttactaattttagggaagagtttattcgttcagccttacaactattggggtctggttgggtttggcttgcttgtaagtttctttctattttctttgaagtacagacaccaccggttcaaactaccgatttcctgattgctctttctaaagctaatattctgctggatatttgttgcagtgaagagaaataagagaaagctttcagtagttcatacacgaaacattatctacccacttgcttttggtatattgtatgttcatacacaatgaatgatatagaaccaccaaagagttgattgtatattgatcctttttctgc

SEQ ID NO: 208865 - DNA, 902 bp, Zea Mays
ttttcgcttgtgcgaatggcagagctacgcttactagggtgctgccctgtgtgccccacccaggacacagtatgctgctcaccatggcgctgcgctgtgactcagcaaagtggcaagatgcaaggcttgccgagctgcctagccattataatgcttggtccttgaattgaagtcaattgatttccgatttaataaggcacagtttgtttgagcttctgctgtcgtcttcacatattttaatttttaatgcatgtggggattactgaaattgttgtgcagacatgtgttttgagattgtgtgctatttgtgcctgattttattgcacaggcagggtggtctatctcaaagatttttgaaagttgtttcttattatggtctcacgactctgccatataaactggtctgtaagcttgttggtgccaatctcagaaggatgctctggaaccttacatgagaaagagaacagttgaacttcactagggtaagcaccatcaagattacgtggatggcttgaataagtagctggctaccagccctctgtatgtatatacaccctggacgatctgataaaagaagcccacaacaatggtctcgaatcatcactttttctgggaatcgatgcaaccagaaggtggtggcttacctgagggaggtgtgctatagcagattgaaaaggattttggcttgtttactaattttagggaagagtttattcgttcagccttacaactattggggtctggttgggtttggcttgctttgaagagaaataagagaaagctttcagtagttcatacacgaaacattatctacccacttgcttttggtatattgtatgttcatacacaatgaatgatatagaaccaccaaagagttgattgtatattgatcctttttctgc

SEQ ID NO: 208866 - DNA, 3748 bp, Zea Mays
agttctcccacttccggggccgccaaaattccctccccaattctctcgtgctttctctcgaccgccgccaccgcctcctctcctccgccaccgccaccgccaccgacgcctccaaaaccctacaccccagcagagtcagcaagcgttgtagcaggctgcggccgctgcctcgctgcgatgcaccgcgccttcgaggagatctccgacgaggagtggtctaatcacaccttcgagccctcgcgcgtcctcaagcgccctaatcagcggccctcgcagcctccgccgtcgatcgattcattcatctacaaccccaaggcttgctccgccgccggcaccagcactgcaactgtcgtcctctcggacgacgacagcgacttcgacctaggtgcggacgggggttcccgccgcgctgcgaagagccaacgcgtcctcaagcgcccgcataacggggccccatcgcggccttctctgccagttaaatcgtcccgccgcaatccccaaccatccaatgccgctgccgcctttgggttctccgatagtgaggacgatgacttcgatcttcctacgtcgcctttgaggacgtcaagccttcgccgcaaaggaaagaaccaacgccccctcaaggcccctcagctcaaacctcacttgcgggctcctccgccacccaactcttccagccataatccgaaacggtccaaatttgcctccgatgtgaagctttccaacagtgaggacgacgatttcgacctcacaaaaacgttaagcctcaacagcagcacaaataggcaacacatccagaagcgtccacagcacaagccccgtttgcagcatcgtcagtcctttggctcatcttgcggcaatcagaagcattccaaggctgttgccaccacacggctatctgacagtgatgatgatgacttcaacatcacggacaatgactttgaccttccagcttcgcattcaaggatatcacgcccacgccgcactactagttgccgccggttgacgagttttgctattgacatctctgaggaagacgaagaagaccttgctgatgatgacttcgactaccaagacccaaggcctccccagcaacgctcctctggccgccgctttgtggtcggggacgatgatgacagtgatgtgcctgtagctctggaggaggaggatggggtgaattggtcggagctggagaaggaggacgtagatgaggactacaatggggtgagaagtgtacatgtggaggagcccgagggagatgtagtgggaatggcattgcacaaatgttcacgcatctcgtcagatctgcgcaaagagctttttggttcatcagcgcagaattgtgaaagctactgtgagatagatgcttccacttgtggtattgttactcaggaagacgtaaatgctgcatgcacacgtgagaagtctgggtttgagcctgtgttgaagccttatcagcttgtgggagtcaatttccttctcctactgcatcggaaaagcattggtggagcaattttggctgatgaaatgggtctagggaagacagtgcaggctgtcacttatcttaatctattacagcatctatataatgacccaggtccacatctgatagtttgcccagcttccgtgttggagaattgggaaagagaactcaggaaatggtgcccttcgttttcgatcatcatgtttcatggagctgcaaggactacctactcaaaggaattaagctccttaggaaaggctggctgtccagctccatttaatgtcctccttgttggctactcactttttgaaaggcggagtgctcagcaaaaggatgatcgtagggccctcaaaagatggcgatggagctgtgttttgatggatgaagcacatgttttgaaagataagggtagcttccgatggagaaacctgatggctgttgcgcaacatgctcgccaaaggctaatgctgacaggaactcctctccaaaatgatttgcatgagctatggtcattgttggagttcatgatgcctgatatatttgctactggggatgttgatctgaagaagctgctgaatgcagaagatcgcgaactaatttcacagataaagtccattttagggccatttattcttagacgtttgaagtcagatgtaatgcagcagcttgttcctaaaatccaacatgttaagtttgttgtcatgggcacagagcagtctgaagcttacaaaaatgccataaatgagtaccgtgctgcttgccaggctcgtagtgccaagtcttcagatggcatttccaataatgttgctggattgattccaaagcgacaaatatcaaactattttacacagtttcgtaagattgcgaatcaccctttgcttataaggtgtatttatggtgacaaagatgttgatcgaattgcacggttgctgtaccctaaaggtgcatttggcttcgaatgctccttggagagagcaatacaagagctaaagaactacagtgatttcaatatccaccaactattattgtcatatggtgatgtgggcacaaagggcgctctaaaggatgagcatgtttttgcatcggcaaaatgtcaggccttaggggagcttttaccttctctggcaaatgatggtcacagagtactcatatttagtcagtggaccacaatgcttgacatccttgaatgggcattggaaattataggagttacatatagacgccttgatggagggaccgctgtgacagaaaggcagactatagtggacacgttcaacaacgatctttctatatttgcatgtttactttctacaagagctggaggccagggtctgaaccttgtaggagctgacacagtcattatacatgatatggattttaacccccagatggatcggcaagctgaggaccgttgccatcgcattggacaacagaaacctgtcactatctataggctagtgacaaaggattcagttgatgaaaacatctatgagattgcaaggcggaagctagtactagacgctgcaattcttcattctggagcagagttggacaatagtaccgatgtaccagagaagacaatgggggagattttggcatctcttctcctggtctgaagttctaaccctggagtttcttgaaggtatacaattctacccgtgggatatcttcaacaatgggtttttggccttcatttaagcttaccattcaccctggttaatgtcttgaatcttgaggtcctaagatgtgcatccatgtatcctttttgctcttgaaacctcccatcttttagtctgccttatccatcttttgttctatgaatggcgtgctataaactgctggatttccgaagtgtttatggttctacataatgacataatgtttaaggttactgtaggttgtaatggagtccggttcccacccccccctctgatataggaagaactgaaatctgaagtaatacatctgtaccaaagttttaacttgttttaaatgaaacgcagaatagttccaaagtcgcaacattttcttcagtctgtaccattatttatctttatttttattttatctgcacaagtaggtacggggtacctaagctacacttaacattgtcaggatacgttttagagtgcagtttgaccacatgtacatgtatcttgacatactagtctaactgtcagtttgagattgacacccgctttatcagagaaactatatgggaaactttatatgtgttaaatttaactccacaagagtcatttggtg

SEQ ID NO: 208867 - DNA, 3114 bp, Zea Mays
gtcgggggtctattcgtcagcttcggcgccgcccagttctcccacttccggggccgccaaaattccctccccaattctctcgtgctttctctcgaccgccgccaccgcctcctctcctccgccaccgccaccgccaccgacgcctccaaaaccctacaccccagcagagtcagcaagcgttgtagcaggctgcggccgctgcctcgctgcgatgcaccgcgccttcgaggagatctccgacgaggagtggtctaatcacaccttcgagccctcgcgcgtcctcaagcgccctaatcagcggccctcgcagcctccgccgtcgatcgattcattcatctacaaccccaaggcttgctccgccgccggcaccagcactgcaactgtcgtcctctcggacgacgacagcgacttcgacctaggtgcggacgggggttcccgccgcgctgcgaagagccaacgcgtcctcaagcgcccgcataacggggccccatcgcggccttctctgccagttaaatcgtcccgccgcaatccccaaccatccaatgccgctgccgcctttgggttctccgatagtgaggacgatgacttcgatcttcctacgtcgcctttgaggacgtcaagccttcgccgcaaaggaaagaaccaacgccccctcaaggcccctcagctcaaacctcacttgcgggctcctccgccacccaactcttccagccataatccgaaacggtccaaatttgcctccgatgtgaagctttccaacagtgaggacgacgatttcgacctcacaaaaacgttaagcctcaacagcagcacaaataggcaacacatccagaagcgtccacagcacaagccccgtttgcagcatcgtcagtcctttggctcatcttgcggcaatcagaagcattccaaggctgttgccaccacacggctatctgacagtgatgatgatgacttcaacatcacggacaatgactttgaccttccagcttcgcattcaaggatatcacgcccacgccgcactactagttgccgccggttgacgagttttgctattgacatctctgaggaagacgaagaagaccttgctgatgatgacttcgactaccaagacccaaggcctccccagcaacgctcctctggccgccgctttgtggtcggggacgatgatgacagtgatgtgcctgtagctctggaggaggaggatggggtgaattggtcggagctggagaaggaggacgtagatgaggactacaatggggtgagaagtgtacatgtggaggagcccgagggagatgtagtgggaatggcattgcacaaatgttcacgcatctcgtcagatctgcgcaaagagctttttggttcatcagcgcagaattgtgaaagctactgtgagatagatgcttccacttgtggtattgttactcaggaagacgtaaatgctgcatgcacacgtgagaagtctgggtttgagcctgtgttgaagccttatcagcttgtgggagtcaatttccttctcctactgcatcggaaaagcattggtggagcaattttggctgatgaaatgggtctagggaagacagtgcaggctgtcacttatcttaatctattacagcatctatataatgacccaggtccacatctgatagtttgcccagcttccgtgttggagaattgggaaagagaactcaggaaatggtgcccttcgttttcgatcatcatgtttcatggagctgcaaggactacctactcaaaggaattaagctccttaggaaaggctggctgtccagctccatttaatgtcctccttgttggctactcactttttgaaaggcggagcaaaaggatgatcgtagggccctcaaaagatggcgatggagctgtgttttgatggatgaagcacatgttttgaaagataagggtagcttccgatggagaaacctgatggctgttgcgcaacatgctcgccaaaggctaatgctgacaggaactcctctccaaaatgatttgcatgagctatggtcattgttggagttcatgatgcctgatatatttgctactggggatgttgatctgaagaagctgctgaatgcagaagatcgcgaactaatttcacagataaagtccattttagggccatttattcttagacgtttgaagtcagatgtaatgcagcagcttgttcctaaaatccaacatgttaagtttgttgtcatgggcacagagcagtctgaagcttacaaaaatgccataaatgagtaccgtgctgcttgccaggctcgtagtgccaagtcttcagatggcatttccaataatgttgctggattgattccaaagcgacaaatatcaaactattttacacagtttcgtaagattgcgaatcaccctttgcttataaggtgtatttatggtgacaaagatgttgatcgaattgcacggttgctgtaccctaaaggtgcatttggcttcgaatgctccttggagagagcaatacaagagctaaagaactacagtgatttcaatatccaccaactattattgtcatatggtgatgtgggcacaaagggcgctctaaaggatgagcatgtttttgcatcggcaaaatgtcaggccttaggggagcttttaccttctctggcaaatgatggtcacagagtactcatatttagtcagtggaccacaatgcttgacatccttgaatgggcattggaaattataggagttacatatagacgccttgatggagggaccgctgtgacagaaaggcagactatagtggacacgttcaacaacgatctttctatatttgcatgtttactttctacaagagctggaggccagggtctgaaccttgtaggagctgacacagtcattatacatgatatggattttaacccccagatggatcggcaagctgaggaccgttgccatcgcattggacaacagaaacctgtcactatctataggtgctactgaaatgagtccgcgagagagggtggaaaacaaatcgcaactaaatggagagtgtgacacgcggatttgttttaccgaggttcggttcttgcaaacctactccccgttgaggaagccacaaaggccgggtctctttcaaccctt

SEQ ID NO: 208868 - DNA, 2474 bp, Zea Mays
cgagacatgacgaaggccgtgatgcgagagcgacaaaaaaacggcctcggcggcgccggcgtcttcggattctccgcccgacgcgcgccttatttccttccctctcagtctccgcgccgtcctgccaccctgcgtttcatcacgctcgcaggtttctaacaccaaggcacctgccaataaattttgcctactggcactccatatattagaagcaatatgaatccgtatttcttgggattcattctcccttttgtggcatctctgctgcttaccaagagaaagtccgagaagaagaggggggtgccagtcaatgtgggtggagagcctggctgcgccatccgtaaccacagatttgaaagacctgtcaagacgcgctgggaggggatttccacgcttgctgagctatttgagcaatcgtgcaagcagtttgcctctacacccctgtttggcaccaggaagctcattgcaagagaaatggtagtggctgctgatggaagatcctttgagaagctccatttgggaaactatgagtggagaagctatgctgatgcattcaaaactgtctgcaatttcgcttctggtctactgcggattggacacctcaaggatgagcgtgttgctatttttgctgacacacgggctgagtggcagattgcgttgcagaccgaggtaactactgttgtatgtggacgaaaagaatttaaaaagctgattgatataagtgggcaacttgacactgtgaaacatgtcatctacattgatgaggaaggcatctcagttgaagtgtccttggctgaaaactgtactagctggacagtcaagtcatttgaagaggtagagagtataggcttgcaaagacctgttgaagcaaacttgcctctcccatcagatactgcagtgattatgtatacgagtggaagcacaggaatgcctaagggagtcatgatgagccaccaaaatgtcttggctgtagtttcagctgttatgacgattgtgcctggtcttggcaagaaggatgtgtacctggcatatcttcccctagcacatatccttgaattggcagctgaggcaatcataactggtgttggggcttcaataggttacgggtcacctttgaccctgactgatacatcaaataaaataaaaaaggggacgcaaggtgatgcttctgtactgaagccaacgctaatgactgctgtacctgctatacttgatcgtgttcgtgatggtgtacgaaaaaatgtagatgcaaaaggtgggttagcgaagagattatttgatattgcctatagccgtcgtctagctgctgtcaatggaagctggttgggtgcgtggggactagagaagcttttgtgggatatgctcgtcttccgaaaggttcgtgcaatcttgggaggacggattcgctttattcttgcaggtggagcacctctgtcaggggaaacacagagatttatcaatatatgtcttggggctccaatatctcaaggatatggcttgactgaaacctgtgctggtgggacattttcagagtatgatgaaacatctgttggtcgcgttggtccccctttgccttgttcatacattaagttgatagactgggccgaaggtggatacttaacaaccgattcaccaatgcctcggggtgaaatagttattggaggtccaaatgtaactaaaggctacttcaaaaatgaagcaaaaacaaatgaggtgtacaaggttgatgaaagaggcatgcgatggttctactctggcgacattgggcgcttgcacccagatggatgtcttgaaattatcgaccgcaagaaggatatagtcaagcttcaacacggtgaatatgtttctctaggaaaggtggaggctactttgagtgtgtgctcatacgttgaccagatcatgatccatgctgaccccttccacagctactgtgtggcacttgttgtaactgcacagagtgagctgaaatcctgggcctcaaaacaaggaatgacatatagtgatttctcagatttgtgccacaagcaagggacagtcaaagaagtcctccaatctttggtgaaggctggtaagcaagcacggttggagaagtttgagatccctgccaaaatcaagctgataccggagccgtggacgccggagtcaggcctcgtcacggctgccctcaagctcaagagggaggtgatcaagaaggcatacgagatggaccttgcccagttgtacagtcagtgacctgccgctacagtttctcaacgataggggtgatcctggtagctaccggcaacaacagttttttttatttgtacctcgtactatgttcctgtctttcttttaagacaatagttgactggtaaatcagttgccgataatgtgtagccttccattgcccgcccaaagagaactataattagcccttatttatttggctattatcatattcacctcaattcaaatacgttagccattataattga

SEQ ID NO: 208869 - DNA, 2357 bp, Zea Mays
tggggtgcgaccgcgttgccgcccagttctctgcgtttctaacaccaaggcacctgccaataaattttgcctactggcactccatatattagaagcaatatgaatccgtatttcttgggattcattctcccttttgtggcatctctgctgcttaccaagagaaagtccgagaagaagaggggggtgccagtcaatgtgggtggagagcctggctgcgccatccgtaaccacagatttgaaagacctgtcaagacgcgctgggaggggatttccacgcttgctgagctatttgagcaatcgtgcaagcagtttgcctctacacccctgtttggcaccaggaagctcattgcaagagaaatggtagtggctgctgatggaagatcctttgagaagctccatttgggaaactatgagtggagaagctatgctgatgcattcaaaactgtctgcaatttcgcttctggtctactgcggattggacacctcaaggatgagcgtgttgctatttttgctgacacacgggctgagtggcagattgcgttgcagaccgaggtaactactgttgtatgtggacgaaaagaatttaaaaagctgattgatataagtgggcaacttgacactgtgaaacatgtcatctacattgatgaggaaggcatctcagttgaagtgtccttggctgaaaactgtactagctggacagtcaagtcatttgaagaggtagagagtataggcttgcaaagacctgttgaagcaaacttgcctctcccatcagatactgcagtgattatgtatacgagtggaagcacaggaatgcctaagggagtcatgatgagccaccaaaatgtcttggctgtagtttcagctgttatgacgattgtgcctggtcttggcaagaaggatgtgtacctggcatatcttcccctagcacatatccttgaattggcagctgaggcaatcataactggtgttggggcttcaataggttacgggtcacctttgaccctgactgatacatcaaataaaataaaaaaggggacgcaaggtgatgcttctgtactgaagccaacgctaatgactgctgtacctgctatacttgatcgtgttcgtgatggtgtacgaaaaaatgtagatgcaaaaggtgggttagcgaagagattatttgatattgcctatagccgtcgtctagctgctgtcaatggaagctggttgggtgcgtggggactagagaagcttttgtgggatatgctcgtcttccgaaaggttcgtgcaatcttgggaggacggattcgctttattcttgcaggtggagcacctctgtcaggggaaacacagagatttatcaatatatgtcttggggctccaatatctcaaggatatggcttgactgaaacctgtgctggtgggacattttcagagtatgatgaaacatctgttggtcgcgttggtccccctttgccttgttcatacattaagttgatagactgggccgaaggtggatacttaacaaccgattcaccaatgcctcggggtgaaatagttattggaggtccaaatgtaactaaaggctacttcaaaaatgaagcaaaaacaaatgaggtgtacaaggttgatgaaagaggcatgcgatggttctactctggcgacattgggcgcttgcacccagatggatgtcttgaaattatcgaccgcaagaaggatatagtcaagcttcaacacggtgaatatgtttctctaggaaaggtggaggctactttgagtgtgtgctcatacgttgaccagatcatgatccatgctgaccccttccacagctactgtgtggcacttgttgtaactgcacagagtgagctgaaatcctgggcctcaaaacaaggaatgacatatagtgatttctcagatttgtgccacaagcaagggacagtcaaagaagtcctccaatctttggtgaaggctggtaagcaagcacggttggagaagtttgagatccctgccaaaatcaagctgataccggagccgtggacgccggagtcaggcctcgtcacggctgccctcaagctcaagagggaggtgatcaagaaggcatacgagatggaccttgcccagttgtacagtcagtgacctgccgctacagtttctcaacgataggggtgatcctggtagctaccggcaacaacagttttttttatttgtacctcgtactatgttcctgtctttcttttaagacaatagttgactggtaaatcagttgccgataatgtgtagccttccattgcccgcccaaagagaactataattagcccttatttatttggctattatcatattcacctcaattcaaatacgttagccattataattga

SEQ ID NO: 208870 - DNA, 3482 bp, Zea Mays
cgatgaaacactgacatttgggggcagctgtcagcaatttctcccttttcttcctcatttacttatccctctcgcttcccgcatcccacgccgccgtcctccgcaccgtccacgccgccgtcctccgaccaccgcgactctgccgcagccgccctctgcaccgtcctcgccgcgcaccaccgcgactctgaccgtggcccgcagtcctgcctcgctgccagtactgagcccgcaggcggcgcccgcagccgagccggaggtcgccagcgccgccagaagacttgcttcgagggattccctacgggctcaaggtcaatcaggtgtggtcgcagttttccatttttagggttcagctaaactggccccccatgtcccatggtgtgcccgcccccatgttagaagagttggcgagggaggcaacactcgccgatgtgtctattcttgtagatgggaatgacgcagagctacatgtacatggcaatggcgcagaggtacatgataatggcacagagttacatggcaatggtgcagtgctgaaaagagttgaaatgccccaggatttgggagcgatttcagccaaggaggtgccgctgcatgagggcaaggaggtgatacttgtggatgataatgacagcgggcaggaagatgatgcagagggtaaggtggatgagaacacacctcgtgttgggctgagattcaaaacttatgatgacgctctcaagtactataaacaatatgctgaggattctgggttttcagcaatcattctgaagtcgtcgtatttaaagtcaggggtgtgccgaaggttggtgattggatgtagtcgagctgggagagggagagcaaatgcgtgctatctatcaagagagtcgaccaagataaattgtccagcaaggatatctttgaagttaaggcaagatagatggcttcatattgatgatgctaagctcgagcacaaccatccatacaaccagtccactacatcacttattaattgttataaaaaactaacagatgccaagaatggggtatctgcctcacgattgaagggtcgcaggaacattccagctgaaaaagagcaagggaacttcacggagataggaaggcttaaatttggggaaggagacgatgaatatatccagaagttttttgggaatatgcagaacaagaatccttacttcttctacttagtagatttggataatcagggacgtttgaggaacttattctggagtgatgctaggtcacgggcagcgaatgattactttggtcatgatgttgtttactttgacacctcatacttgacagagaaatatgatttgccacttgttttcttcactgggatgaataatcatggtcagcctgttctgtttggtactgctttactgtcagatctaagtgttgatagttatgcttggttacttagagcatttttatcatgtatgaagggtctctgcccaaaggcaatcatcactgaacattacaatgctattatggatgctgttcaagaagttctccctgaagttagacatcgcctttgcctgtatcgtattatgaaagatgtagcagagaacttgaaagaacatgcagagtttaaaacaataaataaagcactgaagaaagtaacatatggatctttgaagataccagagtttgaaatggagtggaagaagattatcgaagagcatggacttggaggaaatgagtgcctcagttccctttatgagcaccgccaactctgggcacctgcatatctgagagataaattctgggcagggatgtctatttcacagcgaggggagtctatttcctcgtactatgatgggtttgtgtacccaaaaacttctttgaagcaattttttagtaaatatgagatgatattagagaacaaatacaaaaaggagtggcaagcagatgaagaatcttcccataggtctccattgactgtaacaaaattttacatggaagagcagctggctaaagcctatacaataaacatgttcagaaaatttcaagatgagttgaaagcaacaatgtattgcgatggtatgccaattaaagttgatggccgacttgttacttttgaagtgaaagaatgctcatacatggaagatggaaaggacacagagagcaggacctatgaagtttacttttgtaaagaagaacccaaagttgaaattgagtgtgaatgtggtttcgttcagttcactggcatcctgtgtagacatgcattgtctgtgttgaagttgcaggagatatttgagatcccaaaagattatgttctcgatcgctggagaagggactataagaaattatattataatgcaaagaaacctaatgaaatgcctcttagtgacattgttgaacgctctgattatttgttcacacaatgtagtcagctgctcaatctagggtttgtatctgagagtaggtaccttgttgctctgaagttactgagagaaatggaaagatctcttctggatgatggactacctgctagagacaggcagccaatgcttctttcctttgaggctgatgcaccagaaaatggtcaaggcctttttagtcctcagttttcagagggcgtaaagaattctcagtcagcccatgcaaagcgccgtggccggccactgaagaaagtgacagaatctactgatgataccgtaacacagccaaataaagaacaggatttcctacgatcatcatttgtcacagaaaatacaaatatgatccaagggccatcttctgcctcccatcttgaaggtcctcacatgggagtgcaaggaggcattgatttaatggatggaataccaaatctctcatttggtaatcattttggaatggatattaatcaccaacatcaagtacccaaccaccaaaggatgcagcagaacaatttcatacaggtgcaggcagaaccacatgggtttgggaatcagtgggtttaccacccaatgttgcaggataatccagtgctaagaactcctgcacgaagagcagggtagtgtgtattcattgctctaattatttcagttaaactttaggcaccatgacttctcaggctcctgtaatgacttcctgagtcctgaactaacctaaggataccgaggctgtacgtggcactggcactccagaatccagatggcaagaacttggcagtgaatccaattgattctaacatttttgttatatgatactgttagctgctctcactaggatgaatgttcaaactgtacatagcactggctctataatatgatctttttatttcctgatttgcgccagaactgatattttgtggcagaggacgcgtattgtttagcatattggtttgtttcagacaaagatcagactagtatgctgtatgcctttaaaacgagggagtggcagtagctcaagaggccaataccgcctcgtcctcgccagcaccttgtactacttccgttccgtcgtcccaaaataaatataaatgtcacgcgctg

SEQ ID NO: 208871 - DNA, 3087 bp, Zea Mays
gaaacactgacatttgggggcagctgtcagcaatttctcccttttcttcctcatttacttatccctctcgcttcccgcatcccacgccgccgtcctccgcaccgtccacgccgccgtcctccgaccaccgcgactctgccgcagccgccctctgcaccgtcctcgccgcgcaccaccgcgactctgaccgtggcccgcagtcctgcctcgctgccagtactgagcccgcaggcggcgcccgcagccgagccggaggtcgccagcgccgccagaagacttgcttcgagggattccctacgggctcaaggtcaatcaggtgtggtcgcagttttccatttttagggttcagctaaactggccccccatgtcccatggtgtgcccgcccccatgttagaagagttggcgagggaggcaacactcgccgatgtgtctattcttgtagatgggaatgacgcagagctacatgtacatggcaatggcgcagaggtacatgataatggcacagagttacatggcaatggtgcagtgctgaaaagagttgaaatgccccaggatttgggagcgatttcagccaaggaggtgccgctgcatgagggcaaggaggtgatacttgtggatgataatgacagcgggcaggaagatgatgcagagggtaaggtggatgagaacacacctcgtgttgggctgagattcaaaacttatgatgacgctctcaagtactataaacaatatgctgaggattctgggttttcagcaatcattctgaagtcgtcgtatttaaagtcaggggtgtgccgaaggttggtgattggatgtagtcgagctgggagagggagagcaaatgcgtgctatctatcaagagagtcgaccaagataaattgtccagcaaggatatctttgaagttaaggcaagatagatggcttcatattgatgatgctaagctcgagcacaaccatccatacaaccagtccactacatcacttattaattgttataaaaaactaacagatgccaagaatggggtatctgcctcacgattgaagggtcgcaggaacattccagctgaaaaagagcaagggaacttcacggagataggaaggcttaaatttggggaaggagacgatgaatatatccagaagttttttgggaatatgcagaacaagaatccttacttcttctacttagtagatttggataatcagggacgtttgaggaacttattctggagtgatgctaggtcacgggcagcgaatgattactttggtcatgatgttgtttactttgacacctcatacttgacagagaaatatgatttgccacttgttttcttcactgggatgaataatcatggtcagcctgttctgtttggtactgctttactgtcagatctaagtgttgatagttatgcttggttacttagagcatttttatcatgtatgaagggtctctgcccaaaggcaatcatcactgaacattacaatgctattatggatgctgttcaagaagttctccctgaagttagacatcgcctttgcctgtatcgtattatgaaagatgtagcagagaacttgaaagaacatgcagagtttaaaacaataaataaagcactgaagaaagtaacatatggatctttgaagataccagagtttgaaatggagtggaagaagattatcgaagagcatggacttggaggaaatgagtgcctcagttccctttatgagcaccgccaactctgggcacctgcatatctgagagataaattctgggcagggatgtctatttcacagcgaggggagtctatttcctcgtactatgatgggtttgtgtacccaaaaacttctttgaagcaattttttagtaaatatgagatgatattagagaacaaatacaaaaaggagtggcaagcagatgaagaatcttcccataggtctccattgactgtaacaaaattttacatggaagagcagctggctaaagcctatacaataaacatgttcagaaaatttcaagatgagttgaaagcaacaatgtattgcgatggtatgccaattaaagttgatggccgacttgttacttttgaagtgaaagaatgctcatacatggaagatggaaaggacacagagagcaggacctatgaagtttacttttgtaaagaagaacccaaagttgaaattgagtgtgaatgtggtttcgttcagttcactggcatcctgtgtagacatgcattgtctgtgttgaagttgcaggagatatttgagatcccaaaagattatgttctcgatcgctggagaagggactataagaaattatattataatgcaaagaaacctaatgaaatgcctcttagtgacattgttgaacgctctgattatttgttcacacaatgtagtcagctgctcaatctagggtttgtatctgagagtaggtaccttgttgctctgaagttactgagagaaatggaaagatctcttctggatgatggactacctgctagagacaggcagccaatgcttctttcctttgaggctgatgcaccagaaaatggtcaaggcctttttagtcctcagttttcagagggcgtaaagaattctcagtcagcccatgcaaagcgccgtggccggccactgaagaaagtgacagaatctactgatgataccgtaacacagccaaataaagaacaggatttcctacgatcatcatttgtcacagaaaatacaaatatgatccaagggccatcttctgcctcccatcttgaaggtcctcacatgggagtgcaaggaggcattgatttaatggatggaataccaaatctctcatttggtaatcattttggaatggatattaatcaccaacatcaagtacccaaccaccaaaggatgcagcagaacaatttcatacaggtgcaggcagaaccacatgggtttgggaatcagtgggtttaccacccaatgttgcaggataatccagtgctaagaactcctgcacgaagagcagggtagtgtgtattcattgctctaattatttcagttaaactttagattcagacattcagtcatacactacggcatgattttttagcctggtt

SEQ ID NO: 208872 - DNA, 2381 bp, Zea Mays
ggggtgcggcgctgcggtggcgcgagacgggctcggcacggcggcggtgtgacggcctcacgcggagtcgcggctgcgacgacggcgtgcatggactcgggtcagcacgggtccggtggagggccgtgcgcccgtgcctaggccgtgctgcccgtttcccatgtatcccttccccatatccatacctgtgttccatatgccatatccaaacgcctactcgcttctcccgtcgtcttccccgctcctacgacctgcgtttgtcgatgctctctccatggcaccctctcctctcccccgttgcacctcctgccatggagctacggtcaccgctgaactcacataactgctcccttacctcctccattagaccaccgccaccgcgctccttggcgcgggcgccccccacgctttccgccaccgcagcagccgtctcgtcgctgtccgccacctcagcggccatctcgtcgccttcctgtccaaagaagaagggaggaatgcctggttcagtgcgattgagagacagtgacatccttcagaggatcacagttagacaggctgaggagaaaagattgtatggtgctatatgtgctgcaccggcggttgttctagtgccgtggggtctccacaggagaaaaaagatcacctgtcacccatcttttataggagatctccctgcattccgggcagttgaatcaaatgttcaggtttcaggagagcttactacaagtcgtgggccagggacaacatttcagttcgctttatcatttgttgagcaattgtttgggcttcgtgcagctgaagatatggacaagattttgatggcacagactcatgacggtcttgaaaggagtgcagaagtcaatgagcttgagtggtcttgtggtcgcaatcctgatgtccttattccaattgcaaatgggtgtgaagagttggaaatcataattctggttgatattttaagacgggcaaagataaatgttgtattagcttcagttgaaaaatatccagctgttcttggatctcaaaggatgaagattgttgctgataaaagcattatgagtgcctctgattcgatatatgatctaattattcttcctggaggacctgctggggctgagcagctgcacaggtccagaattctgaagaagttactcaaacaacaaatgcaagctggcaggatgtatggaggggtttgttctgctctgaaggttctgcagcaagaaggtttactcgaggataaaacagtgacagctcatcatgctgtagccagtgagctcacgtgccaagttatagaccaacccaatgttgtgatcgacggaaatttgatcactggtaaggggcttgggacagttgttgattttgccctagctatcatcaggaaattttttggccatggacgagccaaagctgtggcgaatggaatagtttttgagtaccctaagagctaaaccccaagaattgctgaaatcacgaaatctacaataaggactaatgaaacacattggctgtaattgaagatttggctatctatacttctgataaaaggtgagctgatgcttttgggatagcaaaagattcctctattgttgcctttctggacagctggactgaaatctccagatccactatatatgttggggtggaccaaatttacacgggaaagcttcagtggcagtcatttcatcagcttcatgacatgatttattggtggataaattacagagtggttgctaactgattatatgcgttcagaggaaactttactgtcttctgtgtgcctgtattggtttgggggcgtattttccaaggtttgaactctgaaggcattattcctcgatgttgccatcatgctatattgctgtgtttcccatctgtgaattcatctgagaagcttgacattctaattccggacttccccagatactgggtttcaagagtgcaggctagcaactgaatcagtatttaattaaatttcgaacttctgtgctgcgttttttttattggaagtcattttgccctctttttctgtgtattgctgatggattgcggttttagcttcatgggttgagcgggacataactgctcacatggttgtccctttaagaagtaacaacagttactgaatttaaattgcagttagcataacggagtagattattttgcttgctgtcttcacgctttcgcaagataaacttttggggtgaagccaagggtcgtgctcctgaaagactggtagtttctgtaaaagcgttgcaattgtagttagccagaagaggagctcctattattgtgtggccatagtcatcagacacaaataaccacagttctgcttgtggactcgtgccgagagagagcgcgagaacagtgcccctctgtttttg

SEQ ID NO: 208873 - DNA, 5590 bp, Zea Mays
gcgccatgtatctatcttcacttgaaagcaaactttcgtgtgccgacaaagccttgatgctgcagaggagaggcagcgtttgctcgtgagagtgtgagacggtggtggtggggctccgagggaggacagaatccaatccaaggcgcaagcaggcgagaagggtcaaagaagtgaaagcaaaagcagcaaacaattggggtggtgagtggtgacatggaggatgcaaaagaagatgctgccatggtgccatggccaggcctggccctggcccccagctgcctcacgcgccatattcccttgccttgcccgccgattcgaccccgggcgtatccatccatccatacatatgccgctgcccgctgcaggtggagacggaatatctccgagcggtgctctggtggagtcacacgaaaggaaccgaccggccgcctatctataagagcccccgcgcagctcgcagtggcatctggcattcgatcgatcaccttgctgctgctgctgctgctgtcgctggttggccaggagcacaccagctgcttgctgtgtcgccgtcgtagaagcagccgcgcgctgtcgtcgtcgtctcgtccgcgacgcgaccactccggcggctgctgctgcctctcatgctggccacgccaccgacgcttttgtgataccatacgaagcgccgcggcgggcacgttggagatgtcgtcgctgggtgggcaacagcagcacgggcgcggcgacgaggccagggcgcggctcaggtggacgcgccagctgcacggccgcttcgtgctcgccgtggcccagctcggcggcgcggacaaggcgacgcccaagtccgtgatgagggcgatggccgtgtcggggctcacgctgtaccacctcaagagccacctccagaggtaccggctggcggtgagccaaggcaccgcgtccccggtgggcgagggcgacaacggaggtggcgccaacgagcggtcgtcctcctcggagagccagctggacgagtacgacgacggttccgtggccgacctgcatggtgattcttccgggagcatggcggcgcgggtgcagagagaggcgaaaaggaagcggcatgagcagatgcagatcgaggtgcagcggcacctccagctgaggatcgaggcgcaggggaggtacatgcagtccgtgctgcgccgggcgcaggaggccctcgccgaccacatactgggctcgccggccaccggcgcggaggcagagctctcggagctggcctccgcggtggagaccgggaccgggtgcctgtcctccacttcctgctgctccacctcgccttccccgatgcgccaccgctccgccgacagctgcgtgacgtcctcctcctcctcctcctcctcggaggccgagagccaggcccccgccggcgccaacacgtgcgctggtacgcgcgactgctccgtcgagcggccggtgcagggcgaggagagtacattcctgcagaggcacgaggacgaggacgaggcagaggaagccgacgttggagctgcagctgcagctgaggacgaggacggcacttcgtcagagattgatctcaacaggtaggcgacgaagatcctgatcagaagcatctgtgctgcatgtgcccagcatcggatgattggcggggtggccttcaaggttgggacttgcttgggagggggcaggcttttgagcaacgtctgctgctgaaacagctggctacatacactgcaagtctgcagcgaccacactgctcttcattccataatatatgatatacataatattccaatttatgcaaatggttcttctgcttcatgtatgtacccctgtgaaaaatcatggcttgaactagaggcaggcccagctgcagatgatgcatgccgtatgcttgaggtgcaatgcaatgcaaggatgtatgcatagtacagaactgtagtagcagaggcggatctacgaccggggctgcctgggctgcagccccggtcgcggcccaatacaagcaaataggcccagtacaagtcgcgtctccgcctccagcttccagccgccagccgcgtacctgtgtcagcgcgtcgtgtaatcgcatccagccgccagcccgccagcggagcagctcagcaacgccgaggagatgagcaggaagcgcccaagctgaacagcacggagacaagcggagcagcgctgcgtccagtggcagatctggatttcgcttcgtcctggtctccaggaagccaagcaccggccaccagcccagggttttggatctggccgaccgacagactcaagatgttcctgttcgctctataaaggtaggaatatattatatttcactcgagatcagtcactgtaataatacaattcactagctaaaaatatgtttgtagatatttaagatgaaaatattttgaagcatttttaaggcttaagaactcggaaaataaatttatctcgcaacatcaactcatgaatagtatgtattgattattgtatttctaaaattcgtatcgacttatttttaggctatatatttcttaaatatttaaattatatcttgtttctggtgtcatattaaatattaattatatttttttgtttgatttaaaaaattttatagccttagcttattagcccccgtcttggatcaatcctggatccgccactgtgtagtagctattgttagtgagattatatgccatcagcgaggcaatgccgtgagaactggaaaaaaggtttagaatgtaacttaagatcattataattacaaacctggtatgggcactgagcagcaagttctgttacagcatttcggggataaaccagggttaaacttccccggcgaaatccggtaaaattttcgttatctcagtacgggaaaaaaatcaggaaaactcggtaaaattcgttggtaattttaaaaaatgaaaaaacagtggaaaatatgataaaaactacgtttttccgagcattctgaagttggcgtcgttaaaaatttaaacatatttcataggtaaaaaaattaaaaacacttgacccgttaagaaaccgcgcattccgagtggatttcgccgcatcccgaacgcctgaggtgagatttgttactgatttgatgtttttttttgttgatttcgcaagcggatgtaatgtgtagagaatttatagcgtctattcatgtactgatgaatttcttttaactgttcctgcatatggtttagggtttgtgttagtgcatagatgtgtcatttgcataattattcatcagcacgccagccacgataagacagcgcggacaaccaatcaagcggttagtttcaaaaccccatcccggttgaaaaatacaaaatttggtgaaattcgccaaaaaatcctgttttcgatgacctccaaaaaaaaggaaaggttaaccctgggataaaccaagctatcacatcgggagcaacagccaaaagaaaaagaaaaaaggcatcagtgcagtttttcttatagtgaaaaaaaggtgtgaaaatttggcatgatatgcatacgcgatgaagactaaaaattgaaatggtacgcaaggaatatttgtgttgaaaaatggcaactgggagatttgatggtatttcatttacctaacaacaaaagaaaaccgacaaaccaaagaatcttgcacagctagcaagacaaatgacagaaccctaatccatgcatggttttttctctacaactccgcatcctaaatttttcagagaatatttctgtcttgttgcaacttcacctgcccgcattctctagccaaataatcctacaagatcggacactggattccagaaccatctatagcattcaatgcacattgttcatatttgcgtgccgctgatgggaaaaggaatgagaatatgaacggatcatgtagagacggcctaggctggattccctggctagttgctatggatggttgtgcctatcctcagtgaccaaatatccacactaattaaagaaatctgaccacacaaaataatcgcagcccactatcttgatcggctcggctcatcttgtttcaaaaaatttcaacagctgagacctgagagtttcaactcatttttattgtcaatacctaaagtacatctttgattttttagcaagacgacaaagataaaaaaatattgccatgtaaaaaattatctccgttccaaattataattcatttgactttttcctgtcacgtttggccggctcgttctattcgatttttttgcgaaaaaatgaaaaattcgaagccacatttaaagtatattatatgctaaacaatatcactgcaaaaaatataaataattatgaaatttttgaataagacgagccagtcaaacttaaggtaaaaaggttaaacgaattataaattggaacagagtgttgagcatattttatatcatcctgatgactaggggtggatagcgagccagctcggctcggctcgttaaggtaacgagccacagagtcagcttggctcggctcgtttacgagctcgagctggctcgtttagctcgcgagccagagcagaaaaaaataaaatatacataataattatttttagttaattttaaactaatttaacaatagaaaatagtaattatactcagtttcacaaaccacgtcaaaacaacgccaaattagcataattcatcactcgttaatccacaattcgcatacatgttaatcagtttaatccataattatatttgcatagaccaaattaacacatagacatagttcattaatcattagtttaattcataaaccatagacacctcacatatatataacatgttaatcaattattctgtaaatgatctatatagtttcgttttgctggaatatggtagctcgtttagctcgcgagctggctcgttaacgaacctagctaggatgttagctcagctcgtgaaaaaattcaaacgagtcgatccgagccgagccgagctggccatgaaccgagcgagccagcgagccacgagcatttcgtccagccctactgatgaccaaggaggactttgtccgccattccattccatgtcagtctacggcaccagaggcaagcgcgggaacgccaacaaaatcattgttacgaacacaaggttaatttgacctttgtggttcgggttgatgataagtaattgttaacatgagtattgctttgatgtaagtcatggactaaccatagtacgagattatgtgtatatgtatccatgtctctcggcttgtggtgtgcagtatagaaacggtggtcgacgtcgaatgcgaagatcatgtgagttcgtgccgatgggccaggagcgtcgaaggacgagcactgggtcttgatcgaggaattgaagaagctagaagactaaccgtggtgactgacacttgggacacgcaccagcccaaggaccactacgtaaaaaaggctcaaactcaaaggggacgtggccatctgtgacactggttaaaaacacgtcactattttttcgcagtgacatcttttttaaaaatgggtcactaataactatgttcatgtgacatctattacaaaaatgtgtccctatcaaaatatggtaataacttagtgacatattttatt

SEQ ID NO: 208874 - DNA, 1520 bp, Zea Mays
gttggtctcgctgccggctgccgcttcgtcgaccaggcgatcaaagaagatggcagctgtcgacacattcctcttcacctcggagtctgtgaacgagggacaccctgacaagctctgtgaccaggtctcagatgccgttcttgacgcttgccttgctgaggaccctgacagcaaggttgcttgtgagacctgcaccaagaccaacatggtcatggtctttggtgagatcaccaccaaggccaatgttgactacgagaagattgtcagggagacctgccgcaacattggttttgtgtcaaacgatgttgggcttgacgccgaccactgcaaggtgctcgtgaacattgagcagcagtcccctgatattgctcagggtgtgcatggccacttcaccaagcgccccgaggagattggagctggtgaccagggacacatgttcgggtatgcgaccgatgagacccctgagttgatgcccctcagccatgtccttgccaccaagctaggtgctcgtctcaccgaggtccgcaagaacggaacctgcccctggctcaggcctgatgggaagacccaggtgacagtcgagtaccgcaatgagggtggtgccatggtccccatccgtgtccacaccgtcctcatctccacccagcacgacgagacagtgaccaatgatgagatcgctgctgacctgaaggagcatgtcatcaagcctgtcatccctgagcagtaccttgacgagaagaccatcttccaccttaacccatctggccgctttgtcattggtggacctcacggcgatgctggcctcactggccgcaagatcatcattgacacctacggtggctggggagcccatggtggtggcgctttctccggcaaggacccaaccaaggttgaccgcagcggagcctatgtcgcaaggcaggctgccaagagcatcgtcgccagcggccttgctcgccgcgccatcgtccaggtgtcttacgccatcggcgtgcccgagcctctctccgtgttcgtcgacacgtacggcaccggcgcgatccccgacaaggagatcctcaagattgtcaaggagaacttcgatttcaggcctggcatgatcatcatcaaccttgacctcaagaaaggcggcaacgggcgctacctcaagacggcggcctacggccactttggaagggacgaccctgacttcacctgggaggtggtgaagccactcaagtcggagaaaccttctgcctaaggcggcctttttttcagtaagaagcttttggtggtctgctgtgcttaatcatgcttttatatggcttctacatgttgtggttctttcttgatctgcaccgcgcttatcgtttgtgttgtactgccctaataagtggtgcttatgaggactgtttctggttttgctgcttatgttgtaatgctttgaaacaatgaaagaagctacaggccacagctattttgagaagtaatggaacctcgtgccgttttgattatatcgcaatgctgtgcttgtcttctgg

SEQ ID NO: 208875 - DNA, 1521 bp, Zea Mays
ctccggcacgcctctcgcgcgttccttgcaggcgtcgaagatcaaagaagatggcagctgtcgacacattcctcttcacctcggagtctgtgaacgagggacaccctgacaagctctgtgaccaggtctcagatgccgttcttgacgcttgccttgctgaggaccctgacagcaaggttgcttgtgagacctgcaccaagaccaacatggtcatggtctttggtgagatcaccaccaaggccaatgttgactacgagaagattgtcagggagacctgccgcaacattggttttgtgtcaaacgatgttgggcttgacgccgaccactgcaaggtgctcgtgaacattgagcagcagtcccctgatattgctcagggtgtgcatggccacttcaccaagcgccccgaggagattggagctggtgaccagggacacatgttcgggtatgcgaccgatgagacccctgagttgatgcccctcagccatgtccttgccaccaagctaggtgctcgtctcaccgaggtccgcaagaacggaacctgcccctggctcaggcctgatgggaagacccaggtgacagtcgagtaccgcaatgagggtggtgccatggtccccatccgtgtccacaccgtcctcatctccacccagcacgacgagacagtgaccaatgatgagatcgctgctgacctgaaggagcatgtcatcaagcctgtcatccctgagcagtaccttgacgagaagaccatcttccaccttaacccatctggccgctttgtcattggtggacctcacggcgatgctggcctcactggccgcaagatcatcattgacacctacggtggctggggagcccatggtggtggcgctttctccggcaaggacccaaccaaggttgaccgcagcggagcctatgtcgcaaggcaggctgccaagagcatcgtcgccagcggccttgctcgccgcgccatcgtccaggtgtcttacgccatcggcgtgcccgagcctctctccgtgttcgtcgacacgtacggcaccggcgcgatccccgacaaggagatcctcaagattgtcaaggagaacttcgatttcaggcctggcatgatcatcatcaaccttgacctcaagaaaggcggcaacgggcgctacctcaagacggcggcctacggccactttggaagggacgaccctgacttcacctgggaggtggtgaagccactcaagtcggagaaaccttctgcctaaggcggcctttttttcagtaagaagcttttggtggtctgctgtgcttaatcatgcttttatatggcttctacatgttgtggttctttcttgatctgcaccgcgcttatcgtttgtgttgtactgccctaataagtggtgcttatgaggactgtttctggttttgctgcttatgttgtaatgctttgaaacaatgaaagaagctacaggccacagctattttgagaagtaatggaacctcgtgccgttttgattatatcgcaatgctgtgcttgtcttctgg

SEQ ID NO: 208876 - DNA, 1502 bp, Zea Mays
taacattaatccgatagccagatcaaagaagatggcagctgtcgacacattcctcttcacctcggagtctgtgaacgagggacaccctgacaagctctgtgaccaggtctcagatgccgttcttgacgcttgccttgctgaggaccctgacagcaaggttgcttgtgagacctgcaccaagaccaacatggtcatggtctttggtgagatcaccaccaaggccaatgttgactacgagaagattgtcagggagacctgccgcaacattggttttgtgtcaaacgatgttgggcttgacgccgaccactgcaaggtgctcgtgaacattgagcagcagtcccctgatattgctcagggtgtgcatggccacttcaccaagcgccccgaggagattggagctggtgaccagggacacatgttcgggtatgcgaccgatgagacccctgagttgatgcccctcagccatgtccttgccaccaagctaggtgctcgtctcaccgaggtccgcaagaacggaacctgcccctggctcaggcctgatgggaagacccaggtgacagtcgagtaccgcaatgagggtggtgccatggtccccatccgtgtccacaccgtcctcatctccacccagcacgacgagacagtgaccaatgatgagatcgctgctgacctgaaggagcatgtcatcaagcctgtcatccctgagcagtaccttgacgagaagaccatcttccaccttaacccatctggccgctttgtcattggtggacctcacggcgatgctggcctcactggccgcaagatcatcattgacacctacggtggctggggagcccatggtggtggcgctttctccggcaaggacccaaccaaggttgaccgcagcggagcctatgtcgcaaggcaggctgccaagagcatcgtcgccagcggccttgctcgccgcgccatcgtccaggtgtcttacgccatcggcgtgcccgagcctctctccgtgttcgtcgacacgtacggcaccggcgcgatccccgacaaggagatcctcaagattgtcaaggagaacttcgatttcaggcctggcatgatcatcatcaaccttgacctcaagaaaggcggcaacgggcgctacctcaagacggcggcctacggccactttggaagggacgaccctgacttcacctgggaggtggtgaagccactcaagtcggagaaaccttctgcctaaggcggcctttttttcagtaagaagcttttggtggtctgctgtgcttaatcatgcttttatatggcttctacatgttgtggttctttcttgatctgcaccgcgcttatcgtttgtgttgtactgccctaataagtggtgcttatgaggactgtttctggttttgctgcttatgttgtaatgctttgaaacaatgaaagaagctacaggccacagctattttgagaagtaatggaacctcgtgccgttttgattatatcgcaatgctgtgcttgtcttctgg

SEQ ID NO: 208877 - DNA, 1668 bp, Zea Mays
tgcctctcttcaatcggggcttcggcgtcagcgtctcagcgaccagaacaatcaccaccgtccgtccgtcccgttcctcttctcgcaggttggacccgtcagtcacacacctccgaagtcggaacctccctgccccaacacaatggcctcctccctcgccgcgcgccgcctcctctcccgcgcagccgccgtgcgccgtttccccgtccccttcgcctccgccccagcccccgcgatggctccccgcagtttctccgccgacgcgggaccgcctccgccgctcccgccaccgccgccgcagcccgtcgtcgagccgcccacgtcggagggcgcgggtgcctcgtcctcctccaccaccgctggtgccggaggggcccacaggtcgtcgccgggagccgcggcgggggcgcggcgccagggtggtgcgggctacgaggaggagcaggagaaggtcctccgcgcgtcgctgctccacgtgccgcgcatggggtggagcgagtcggccatggtcgcgggggcgagggacgttggcgtgtcccctgccatcgtgggcgcatttccaaggaaggaggccgcccttgtggagtttttcatggatgactgcctccaacaactgatggatcgaattgatgctggagaaggagagcagttgaagaacttgatactgagtgagagactctcaaaacttgttcggatgaggctggaaatgcaggcaccttatatatctaagtggcctcaagcactgagtattcagtctcaaccagcaaacgtctcaacaagcttgaagcagcgagctatcctggtggatgagatatggcatgctgctggagattctgggtcagatattgattggtatgtgaaacgtacagtgcttggtggtatctactcaacctcagaggtgtatatgttgacagacaattctccagcaaggattgaaacgaaagtgtttcactgtttcggagttccgtgatacttggacgtttgtgaaccgcagaataaaggatgctcttgatcttcagaaaaccttccaagaggccgcatacctcgctgaagccgtgggagcaggcatgagcggtaccgtgcagggtgttctcaacagggtcttccagaaccgtagtggatgaactttctttttctcaaacacgtagtgtggatggactaattccgtcttttgcacgctgcacaggataaagcacattttcccgttgaccaactggcgtatgtttataataaagcaaatggtgatgtggttgagatgcatcacgttagggtaggaagtgacgatgtgtatgctggtggtggtgttgaggtgcagatttttcaaatgaatgctttcgtcgcggagtccagtccacacgcatgcgtgcaaagacgtggggcttattataatttgatgccagctgcatgcattacttgcccgggatgccgcgtgatctaagtttagtttgcttgacttgctaaagaaaccaatgaacacgccaagatatcataccaagaaaggagcagccgatggacctcgtacagtcagatcatttcttcagagattttgccgactccattaccagatttttgcagccaattcttcaaagtatccagcatcttctccaacttctggtcttttggcttgagcatcatgtcccacctctgcatataagaaatgaaactgta

SEQ ID NO: 208878 - DNA, 1378 bp, Zea Mays
tgcctctcttcaatcggggcttcggcgtcagcgtctcagcgaccagaacaatcaccaccgtccgtccgtcccgttcctcttctcgcaggttggacccgtcagtcacacacctccgaagtcggaacctccctgccccaacacaatggcctcctccctcgccgcgcgccgcctcctctcccgcgcagccgccgtgcatggggtggagcgagtcggccatggtcgcgggggcgagggacgttggcgtgtcccctgccatcgtgggcgcatttccaaggaaggaggccgcccttgtggagtttttcatggatgactgcctccaacaactgatggatcgaattgatgctggagaaggagagcagttgaagaacttgatactgagtgagagactctcaaaacttgttcggatgaggctggaaatgcaggcaccttatatatctaagtggcctcaagcactgagtattcagtctcaaccagcaaacgtctcaacaagcttgaagcagcgagctatcctggtggatgagatatggcatgctgctggagattctgggtcagatattgattggtatgtgaaacgtacagtgcttggtggtatctactcaacctcagaggtgtatatgttgacagacaattctccagcaaggattgaaacgaaagtgtttcactgtttcggagttccgtgatacttggacgtttgtgaaccgcagaataaaggatgctcttgatcttcagaaaaccttccaagaggccgcatacctcgctgaagccgtgggagcaggcatgagcggtaccgtgcagggtgttctcaacagggtcttccagaaccgtagtggatgaactttctttttctcaaacacgtagtgtggatggactaattccgtcttttgcacgctgcacaggataaagcacattttcccgttgaccaactggcgtatgtttataataaagcaaatggtgatgtggttgagatgcatcacgttagggtaggaagtgacgatgtgtatgctggtggtggtgttgaggtgcagatttttcaaatgaatgctttcgtcgcggagtccagtccacacgcatgcgtgcaaagacgtggggcttattataatttgatgccagctgcatgcattacttgcccgggatgccgcgtgatctaagtttagtttgcttgacttgctaaagaaaccaatgaacacgccaagatatcataccaagaaaggagcagccgatggacctcgtacagtcagatcatttcttcagagattttgccgactccattaccagatttttgcagccaattcttcaaagtatccagcatcttctccaacttctggtcttttggcttgagcatcatgtcccacctctgcatataagaaatgaaactgta

SEQ ID NO: 208879 - DNA, 1274 bp, Zea Mays
tgatgaataagaaagagagaaggaagactgaaaacgggaaagctatatttagttggatggcaacatcatcgagggatgggctaagttttcaagttttaatacttctagtttttcatggatgactgcctccaacaactgatggatcgaattgatgctggagaaggagagcagttgaagaacttgatactgagtgagagactctcaaaacttgttcggatgaggctggaaatgcaggcaccttatatatctaagtggcctcaagcactgagtattcagtctcaaccagcaaacgtctcaacaagcttgaagcagcgagctatcctggtggatgagatatggcatgctgctggagattctgggtcagatattgattggtatgtgaaacgtacagtgcttggtggtatctactcaacctcagaggtgtatatgttgacagacaattctccaggtttgcagttctcaatagctctatgttggtttccatttcttgctacatactgaagttaattttacccctgcaacaacttaacagcaaggattgaaacgaaagtgtttcactgtttcggagttccgtgatacttggacgtttgtgaaccgcagaataaaggatgctcttgatcttcagaaaaccttccaagaggccgcatacctcgctgaagccgtgggagcaggcatgagcggtaccgtgcagggtgttctcaacagggtcttccagaaccgtagtggatgaactttctttttctcaaacacgtagtgtggatggactaattccgtcttttgcacgctgcacaggataaagcacattttcccgttgaccaactggcgtatgtttataataaagcaaatggtgatgtggttgagatgcatcacgttagggtaggaagtgacgatgtgtatgctggtggtggtgttgaggtgcagatttttcaaatgaatgctttcgtcgcggagtccagtccacacgcatgcgtgcaaagacgtggggcttattataatttgatgccagctgcatgcattacttgcccgggatgccgcgtgatctaagtttagtttgcttgacttgctaaagaaaccaatgaacacgccaagatatcataccaagaaaggagcagccgatggacctcgtacagtcagatcatttcttcagagattttgccgactccattaccagatttttgcagccaattcttcaaagtatccagcatcttctccaacttctggtcttttggcttgagcatcatgtcccacctctgcatataagaaatgaaactgta

SEQ ID NO: 208880 - DNA, 1555 bp, Zea Mays
gctatatttagttggatggcaacatcatcgagggatgggctaagttttcaagttttaatacttctagtttttcatggatgactgcctccaacaactgatggatcgaattgatgctggagaaggagagcagttgaagaacttgatactgagtgagagactctcaaaacttgttcggatgaggctggaaatgcaggcaccttatatatctaagtggcctcaagcactgagtattcagtctcaaccagcaaacgtctcaacaagcttgaagcagcgagctatcctggtggatgagatatggcatgctgctggagattctgggtcagatattgattggtatgtgaaacgtacagtgcttggtggtatctactcaacctcagaggtgtatatgttgacagacaattctccaggtttgcagttctcaatagctctatgttggtttccatttcttgctacatactgaagttaattttacccctgcaacaacttaacagcaaggattgaaacgaaagtgtttcactgtttcgggtaaactagctgaactgaaagcctcacttttttgcccgtttattttgttgtttttgttactgtacagcactacagctgaagcatggaacacaagcagtactaaactgaaatacagatatttttgcttgttcagtgttgaaaaagcacaagatataattaatgatatggtttcttgccttgtttgctgtcttctactaaattttagaaaacatgaattcgaagtattatgagatgctagactgtcaagatgtagtgctatttgtatgactgcataccagtgttcacatgttaatgtattgttcctacttatggcacatggcagagttccgtgatacttggacgtttgtgaaccgcagaataaaggatgctcttgatcttcagaaaaccttccaagaggccgcatacctcgctgaagccgtgggagcaggcatgagcggtaccgtgcagggtgttctcaacagggtcttccagaaccgtagtggatgaactttctttttctcaaacacgtagtgtggatggactaattccgtcttttgcacgctgcacaggataaagcacattttcccgttgaccaactggcgtatgtttataataaagcaaatggtgatgtggttgagatgcatcacgttagggtaggaagtgacgatgtgtatgctggtggtggtgttgaggtgcagatttttcaaatgaatgctttcgtcgcggagtccagtccacacgcatgcgtgcaaagacgtggggcttattataatttgatgccagctgcatgcattacttgcccgggatgccgcgtgatctaagtttagtttgcttgacttgctaaagaaaccaatgaacacgccaagatatcataccaagaaaggagcagccgatggacctcgtacagtcagatcatttcttcagagattttgccgactccattaccagatttttgcagccaattcttcaaagtatccagcatcttctccaacttctggtcttttggcttgagcatcatgtcccacctctgcatataagaaatgaaactgta

SEQ ID NO: 208881 - DNA, 3515 bp, Zea Mays
atcttgattgcgtgcttctgaatggctcaggttttagtgggatatgatgaagctaaaaagtggacgacgaccgttctataaggatgttaagcttgtagactgccgttcaggctcaagtcttccacatttggctgctcaagcaaagtttgcagccatgaacatgaagactgaagatgtcaatcctcgtcgaccagttcaagtcagacgaagtagatgggctcttggtgatgtaaccgaggtgttggatcataattcgtggaggcttgggaagattacagaagtactgaagaatgactattttgtcatcaggctagtgggttgcatccaaccaagagaattccacatatcttgcttgaggattccacatgatcgcaagcagttgactgttggaggcaggatcaatgaactgaataagccgacccgatttgctgactgctcctctcaccactcaaaatttgtgatggaacaggaccatcaagcctatgaagaggttgatcactatgctaagaggaaagcagccaatatctgtgcttccaccggtgctagagctgtcaagagaaaactagaagcaagcaggatcccacctaatggtttagtcagaagaacaggcaaggaacagaaagtatctacacatgaatttcgccagttaaccaagaacgagttgcctccaaaggtgtctgctaggaatgccatcgacgaagatgatcattttcataggcctttaagtagcagatacaacgatctgcctgagaaacctctgcgcaccagagaagaggacgagtgctcggtggctagctgcagcgcgaattacacaagtggaacgaaaaggccttcgagcaatacggacactgcttctagtccgccaaagaagaataagaacgcaatggttaggtgcatgaagggtttgcttgatcgattagattctggcagtagcaaagacgtagatacagctacgcagattcaagaaataattgagacaaaaagaaaggagcagcaagctgcagatttcaaggagatagacctgtgtttggcactggcaaaggaatgtggggctactgaggagacagacgagttcttcgtagcttcccaactgtttgcaagctgcaaatttcaaagacatgttttcctaggactgtcttcaaatgcaggaaggatggcttggttgaagaagcactgcaagggctggactttttaaggactttagtttatgtcataggactggcttttctatttgtgtatcatgaagttaagtctatgaactgttagttatatttggtttgtgaactgttatgtacggctgtgatgcataaactttgtgatgcatgaatcttgttgtggttgtgctgcatgattttgcatgatttgtggaggttgtgcatgaatcatttgcatcttagttgtcttgtgaataatttcgaagaagttgtgttgtgacctggtaacaaaaggttttgttgtcaactacttgattttactgggttacagaggtactcatttgaaagattttgttcaaatgtttattactttctttcatgatagattattaaacatcagtatattaaatgtttgtaggatgaagaagcacaggacgcacaagacgcacaatggattacacagtacatattgaagtgtcgaaaatggaaaatgactatttgtattgctgctgcagctatgggtatgtactatcttgacaaatattggaacaaagcagattacagaatacctactgagtctggttaccaatgggtgatgagatcattgggcaataggacttactgctatcaaaattatagaatgcataggaatgtgtttgatcttttgcataatgtcctagttgagtcctatggtttgacttcaactagaagaatgtcatcagttgagaccttagcattctttctgtggatgtgtggaactccccaaggcatgaggcaggcagaggacagactatttaggtccaaggaaaccttgagtaggaagtttgagaaagttttgaattgtcttaacaaactagctgttgacaacataaggcctttagatcctgagttcactacaattcaccctaggctgcagtcacgaagattctctcattactttgataattgcataggtgctatagatggcactcatataccagttgtagttccagcaaatcaggttgtgcaacatactggtaggaaagggtacactagtcaaaatgtgttggcaatctgtgacttcaacatgagattcactttcgtcgtcgcgggttggcatggatctgtacatgatatgagagtctttaaagatgcagttgacaaatatggcaacaagtttccccatccaccccaggcaagttttatcttgtggattcgggatatcccaacaggcagggttatctggcgccgtatagaggtacaaagtaccatcttcctgagtttcagcaaggtcctatgccaagagatgatgattttgatttatgtgatgatgatgagaactatgttcccattacctctgaaggaccatctacgcagggaacaaatgagttgacaaccacaacagttgatgaagacataaatatgaaccattttagagattcgatagctgatgggttgtttgctagacaatagttttttctttaagttgttgtaagagaaatagtttgtttgctgtgctcgacaattggatctgttccaggcaattgtttgttcccattagattgtgatgagaaatcagtttgcgttgtaatacaaactttgattgttgagaaaacaatttgaaataatataaaactgtttttttgaacagatatggaagaatgggtatgttggtctttttgtacagcattaattgcttcactatgtgttttagctagagtatccaaacatggtggactaaattttagcctgtgaactttagccctttggttttagctcagggtaaccaaacaggccctcagagcacagtaccagtgatgatgaccatcaatcagttggaaccggcagttgtttccctgatgatgttatgtctgcatgtgagtatgggcaggagactgaggacgcctatggctctggtttgtttcagaacgtccatgagctggagctgcgagcatatcgatcaaccgtcagagctctccatgctgcaggacccctgacgtgggagcaagagtcgctcctgacgaacctgcgcctctcgctcaacatctcgaacgaggagcacttgcttcagttgaggcatctcctagctctttgaatttttttcaaaaatcaatatgttttttaacacctgtggattacctccaactcgcagagatcaccgcaggcttgtagcgtgcgtaactcgagggtgtaactcgagggtgttgtatatagagaagagtccagagaaattcacctgtagctgttgtacttagccagaactttgttgctaggagtaagtcttgcatttttttagtgtttttacaatttcgaggaaatgtaaagcttcgaaatattagtcatactgataatcaaggtgggatatcagttcctttaaatgaa

SEQ ID NO: 208882 - DNA, 4476 bp, Zea Mays
aacagagtgctgcatatctacaccattgactaaattcttttgttttcaactattttgctgcattcttgtctaagaaatgctgcatttggttccaggatgaaaaacttcagcatgttctaggacattttcagaaggaattcgaaggagaagtttctgcagagaacctcgggtcgaaatttggtggatatggttcatttttacccacatatcagcgttctcccctgctgccccaatctgaaagcccacacattgcattgaacattagcatgtcaggatcaccttaccaaccatctgctgagagaatggatcaaaacccctctactgtagctgtggagcccatttcccgaaataacggttttggagcaccttcagctagtgattcaatcaagaagaaaaaattcctgagtacaaatgatgaggaatcgattgcaggttccgattctttggacacttcacttagtggtagtgactcaaagtcactcaaatttcagaccaaagtttgtctcagcaatgatctgccaagagaaaatgcagttatctatagtggcctgggccttgatatttctccacgttcgtccatggaggagagtcctaatgggcttgggggactatctcctgagtgcagcaatgtgccatttgaatcacctcggactatcctacaggtcatgacatgccttccagttcctggaggtttcttgttgtcacctctgcatgggaatttgctgcaattaagaaataaagttgctccggtgctaaagaatttggaaacacatttagacatggaaaatgtatctagagcattggaaggacgttcacagtcttttcatccccttggacttatcagaggcaatgtgactaagcagatgaggccttgcagtaagaaaaaagtggcagtggatacaaagactagcaagtacaaaggtgatgctagtgcaaccatgaacaatgaagttaacatccaagtgcctgccagccaaaaagagaagatgaacacgaataacaagaatgagtttgaagttggttctgcaaggaaggagatcccagccagtgtaaagcatggagagttgtatatgcagccggccagcagtgtatcaactatgaatgcatatcatgttcctgcaccagttgtgatcgaggaccactgggcctgggatgaataggtgtgatatcagtgaggatgaaacaacaggggctctgaatgcattgtttgccattccagcgactgccacaaccctttcttcaggtagtcctcatactgcagttacaggaggtattatggaaaggaacaaggcttatccaaagttaaagactaaaataaggattgatcaagatgaacagaaatcatataagaaaactaaaattgaggcttggcatcaaattgacagaggccaggaccacaggtgtgattcagatggtgtggaagttcctgatgaacacaaagctttacttgcaaaagcaaaagcaatgaagggttcacatgaaactgatgacatgtctttatgcaagaaaaatatcgcttcagggtatgattcatcggaaaacgtcaataatgttaatgctttggatgtaccctttcacagtgagaagaaagaacatccttctgatgtagacatattagatttgtcttgcaagaagaatgcagtgaagaaattggagattcagcttaactctttacattgtataagcaatgggccccagaagaacttgaaggaaaagaagtctaataaattgaagtctaaagagatggcatccaaggaagatagtagacatggaaaagtgcagcatgcagatgccgtgttgtcttctctggggcacctaaattatgaactaggtgctgacaacaagtttgttactgggaaagaaagtctttcagaacaattagaaactttacctgccaagcaagttttggacttggctgaagcccctggaagggatgtagcctatctgcagtcttctacaactgtgagctcaagctcttcgaagatttcaagctccagaagaaacacaaactcgcaagaagcaaatgactctccaattaaatcagcctcttcattgccactgagagatttcagcattaaaatgatttccggtaacagaaaagatggaacagtggatgcttccttgggcaacacacacaatttagcaaggtaccaaaacagtgaagtcattgcattaaattatggtcagcaagctggaaactttgagggggatcaggttgcaggtgaacccaattttcatggttctttgcaaggaatctcggatagcaatatcaaggaaatacctcagtcagctggtgctcaagtctccaatatcactggttttgggaggagtttggataatagtctgccggaggcatcatgtagagaggaccttactgtaaatgatactgttgtaggtagaggagaccatcaactgtgttctggtgaacaaaaggactttaatatggaggttcgtttaccactacctgatcagcattgttttggcaggattaacactgagtctggttctgttcgacatgaaagtaagaacattgaagttcgccaaggaggtaaacaaaaggtctgccctacttcagtaaaatctgaatcgttgaaaatgaaagcaaagttagtgaggttcaatgttgaaactggagtgcaacatggcagtgttaagcaagtgacatcaagcactttggacacaagtccaatgaggaaggatggtagtatgattacatttgctctcaaggaagctagagatctaaagcataaagcaaatgatttgaagaataaaggacaagaacttgaaagtacaggtctgtacttcgaggcggctttgaagtttctgcatgttgcgtttcttctagaaactcctagttttgacatttcaagacaaggtggtggaggtcggtcaatgaagatgtactctgaaactgcaaaattatgcaatttttgtgcttatgaatatgaacggtgcaaaaaaatggcttctgctgctttagcgtacaagtgtgtagaagttgcttacctcaaggctgcatactacaaacaccgtactgctacaaaagatcaacaggaacttcaggcagctgtacagataacccgaggtgaaccaccatcgccttctgccctagatattgataatttaaatagccatggatcatcaaatgcctcctcattaaagggtgacaattcacctcatgtgccaggcaatcatttgcctctagctattcacaaccaagcccagctgttgagattacttgcctatacaaatgatatgaacttggcattcgatgcaactcgaaaagcagaatctgtgattgcatctgctactgggtgtccggaaagaggtgttgttggtgatggccttgcttcggtaaaagcagtcttggatcttaacttcaacaatgtgaatgaactactaaggcttgttcgggtttcaatggaatcaataagcagctgatgatgtgttcaaaaatcggaattgcacagaatgtcacacagtgaactgctgatattggattaacatgcaatctgtgctccgtgatgctggttgcagctatgtcagtatatttttacagtgcaaaacaaattaacttgaaatcaagcattccctttcctaaattggaaattatgtgaaccaaggttctggaattcgggagcggtactgctgcatcttgtggtagtgtaaccatgcattgatgtgtgtttgtttcaatgggtcagaggagatcgattgcgattacctgcactacctgtcatgtacgggcgctcgtacgccaggcagcgtcgcgcccgtgacaggcgccgcgcacaggagcgcgatctgggagatcagcaggaacctatggaaagcagtggccaggaaggaaattagaagaatggaaagttgagggaaggaaaggagagattgattagtgattgattaagtgattgattagtgattgattagtgttaccatgtttaggcttgcctaaaataaaggctctaggacagcaggccgatggctatatatgcggcacaaggagacaggaataaagggcagcaaacaagttatctcctctccacctctctctaccatctaagcctacggctgtgggggataaccacgccggagaagacgaaccgcggctacaaccccatgctctaaacgcccaggcccttgacaacctggtatcacaagtcaggcgatcttcgtcctctcgatcccacacctccgatcagtccctcgacgtcacccaaccaccacccagccctccaccgtctccgccgtcggcctcctccattatgaccaccaaaaccaacgacgatctggctgcgatgatcgagaagctcacgggcacggtcgctgccctccaaaatgacgtcgagtcgttgaagaaggacaaggggccttcctcctcgccatccgacagcggcggccacgacggctagcaccacatcgatcggccaccaaggttccaaaagatcgacttcccacgttttgacggcaagtcgg

SEQ ID NO: 208883 - DNA, 4595 bp, Zea Mays
aacagagtgctgcatatctacaccattgactaaattcttttgttttcaactattttgctgcattcttgtctaagaaatgctgcatttggttccaggatgaaaaacttcagcatgttctaggacattttcagaaggaattcgaaggagaagtttctgcagagaacctcgggtcgaaatttggtggatatggttcatttttacccacatatcagcgttctcccctgctgccccaatctgaaagcccacacattgcattgaacattagcatgtcaggatcaccttaccaaccatctgctgagagaatggatcaaaacccctctactgtagctgtggagcccatttcccgaaataacggttttggagcaccttcagctagtgattcaatcaagaagaaaaaattcctgagtacaaatgatgaggaatcgattgcaggttccgattctttggacacttcacttagtggtagtgactcaaagtcactcaaatttcagaccaaagtttgtctcagcaatgatctgccaagagaaaatgcagttatctatagtggcctgggccttgatatttctccacgttcgtccatggaggagagtcctaatgggcttgggggactatctcctgagtgcagcaatgtgccatttgaatcacctcggactatcctacaggtcatgacatgccttccagttcctggaggtttcttgttgtcacctctgcatgggaatttgctgcaattaagaaataaagttgctccggtgctaaagaatttggaaacacatttagacatggaaaatgtatctagagcattggaaggacgttcacagtcttttcatccccttggacttatcagaggcaatgtgactaagcagatgaggccttgcagtaagaaaaaagtggcagtggatacaaagactagcaagtacaaaggtgatgctagtgcaaccatgaacaatgaagttaacatccaagtgcctgccagccaaaaagagaagatgaacacgaataacaagaatgagtttgaagttggttctgcaaggaaggagatcccagccagtgtaaagcatggagagttgtatatgcagccggccagcagtgtatcaactatgaatgcatatcatgttcctgcaccagttgtgatcgaggaccactgggcctgggatgaataggtgtgatatcagtgaggatgaaacaacaggggctctgaatgcattgtttgccattccagcgactgccacaaccctttcttcaggtagtcctcatactgcagttacagaggaggtattatggaaaggaacaaggcttatccaaagttaaagactaaaataaggattgatcaagatgaacagaaatcatataagaaaactaaaattgaggcttggcatcaaattgacagaggccaggaccacaggtgtgattcagatggtgtggaagttcctgatgaacacaaagctttacttgcaaaagcaaaagcaatgaagggttcacatgaaactgatgacatgtctttatgcaagaaaaatatcgcttcagggtatgattcatcggaaaacgtcaataatgttaatgctttggatgtaccctttcacagtgagaagaaagaacatccttctgatgtagacatattagatttgtcttgcaagaagaatgcagtgaagaaattggagattcagcttaactctttacattgtataagcaatgggccccagaagaacttgaaggaaaagaagtctaataaattgaagtctaaagagatggcatccaaggaagatagtagacatggaaaagtgcagcatgcagatgccgtgttgtcttctctggggcacctaaattatgaactaggtgctgacaacaagtttgttactgggaaagaaagtctttcagaacaattagaaactttacctgccaagcaagttttggacttggctgaagcccctggaagggatgtagcctatctgcagtcttctacaactgtgagctcaagctcttcgaagatttcaagctccagaagaaacacaaactcgcaagaagcaaatgactctccaattaaatcagcctcttcattgccactgagagatttcagcattaaaatgatttccggtaacagaaaagatggaacagtggatgcttccttgggcaacacacacaatttagcaaggtaccaaaacagtgaagtcattgcattaaattatggtcagcaagctggaaactttgagggggatcaggttgcaggtgaacccaattttcatggttctttgcaaggaatctcggatagcaatatcaaggaaatacctcagtcagctggtgctcaagtctccaatatcactggttttgggaggagtttggataatagtctgccggaggcatcatgtagagaggaccttactgtaaatgatactgttgtaggtagaggagaccatcaactgtgttctggtgaacaaaaggactttaatatggaggttcgtttaccactacctgatcagcattgttttggcaggattaacactgagtctggttctgttcgacatgaaagtaagaacattgaagttcgccaaggtagtggaactgctcagcggctgggcatgttatttaaaaaagaaaaatctcaccttagaatccttaatcgagatattcagaaccatgttaatcaagttgtcaattttcctttgaaaggaggtaaacaaaaggtctgccctacttcagtaaaatctgaatcgttgaaaatgaaagcaaagttagtgaggttcaatgttgaaactggagtgcaacatggcagtgttaagcaagtgacatcaagcactttggacacaagtccaatgaggaaggatggtagtatgattacatttgctctcaaggaagctagagatctaaagcataaagcaaatgatttgaagaataaaggacaagaacttgaaagtacaggtctgtacttcgaggcggctttgaagtttctgcatgttgcgtttcttctagaaactcctagttttgacatttcaagacaaggtggtggaggtcggtcaatgaagatgtactctgaaactgcaaaattatgcaatttttgtgcttatgaatatgaacggtgcaaaaaaatggcttctgctgctttagcgtacaagtgtgtagaagttgcttacctcaaggctgcatactacaaacaccgtactgctacaaaagatcaacaggaacttcaggcagctgtacagataacccgaggtgaaccaccatcgccttctgccctagatattgataatttaaatagccatggatcatcaaatgcctcctcattaaagggtgacaattcacctcatgtgccaggcaatcatttgcctctagctattcacaaccaagcccagctgttgagattacttgcctatacaaatgatatgaacttggcattcgatgcaactcgaaaagcagaatctgtgattgcatctgctactgggtgtccggaaagaggtgttgttggtgatggccttgcttcggtaaaagcagtcttggatcttaacttcaacaatgtgaatgaactactaaggcttgttcgggtttcaatggaatcaataagcagctgatgatgtgttcaaaaatcggaattgcacagaatgtcacacagtgaactgctgatattggattaacatgcaatctgtgctccgtgatgctggttgcagctatgtcagtatatttttacagtgcaaaacaaattaacttgaaatcaagcattccctttcctaaattggaaattatgtgaaccaaggttctggaattcgggagcggtactgctgcatcttgtggtagtgtaaccatgcattgatgtgtgtttgtttcaatgggtcagaggagatcgattgcgattacctgcactacctgtcatgtacgggcgctcgtacgccaggcagcgtcgcgcccgtgacaggcgccgcgcacaggagcgcgatctgggagatcagcaggaacctatggaaagcagtggccaggaaggaaattagaagaatggaaagttgagggaaggaaaggagagattgattagtgattgattaagtgattgattagtgattgattagtgttaccatgtttaggcttgcctaaaataaaggctctaggacagcaggccgatggctatatatgcggcacaaggagacaggaataaagggcagcaaacaagttatctcctctccacctctctctaccatctaagcctacggctgtgggggataaccacgccggagaagacgaaccgcggctacaaccccatgctctaaacgcccaggcccttgacaacctggtatcacaagtcaggcgatcttcgtcctctcgatcccacacctccgatcagtccctcgacgtcacccaaccaccacccagccctccaccgtctccgccgtcggcctcctccattatgaccaccaaaaccaacgacgatctggctgcgatgatcgagaagctcacgggcacggtcgctgccctccaaaatgacgtcgagtcgttgaagaaggacaaggggccttcctcctcgccatccgacagcggcggccacgacggctagcaccacatcgatcggccaccaaggttccaaaagatcgacttcccacgttttgacggcaagtcgg

SEQ ID NO: 208884 - DNA, 4673 bp, Zea Mays
atggcatggctagccgcgacggtggcggctgtggcagggccgccggcgcccatggtcactggggagtgggggggagggctccatgggaaggggaggggtgaggccggcggcaccagctggggggaagacgatggtggcgggtggacgccggggatgttaagcagggcacaatctttgacagggtcgaaatttggtggatatggttcatttttacccacatatcagcgttctcccctgctgccccaatctgaaagcccacacattgcattgaacattagcatagaatggatcaaaacccctctactgtagctgtggagcccatttcccgaaataacggttttggagcaccttcagctagtgattcaatcaagaagaaaaaattcctgagtacaaatgatgaggaatcgattgcaggttccgattctttggacacttcacttagtggtagtgactcaaagtcactcaaatttcagaccaaagtttgtctcagcaatgatctgccaagagaaaatgcagttatctatagtggcctgggccttgatatttctccacgttcgtccatggaggagagtcctaatgggcttgggggactatctcctgagtgcagcaatgtgccatttgaatcacctcggactatcctacaggtcatgacatgccttccagttcctggaggtttcttgttgtcacctctgcatgggaatttgctgcaattaagaaataaagttgctccggtgctaaagaatttggaaacacatttagacatggaaaatgtatctagagcattggaaggacgttcacagtcttttcatccccttggacttatcagaggcaatgtgactaagcagatgaggccttgcagtaagaaaaaagtggcagtggatacaaagactagcaagtacaaaggtgatgctagtgcaaccatgaacaatgaagttaacatccaagtgcctgccagccaaaaagagaagatgaacacgaataacaagaatgagtttgaagttggttctgcaaggaaggagatcccagccagtgtaaagcatggagagttgtatatgcagccggccagcagtgtatcaactatgaatgcatatcatgttcctgcaccagttgtgatcgaggaccactgggtacgctgtgacatatgccataaattgcgtcttctaccctatggaatgaacccttctatgcttccaaaaaaatggaaatgtaccatgcttcactggctgcctgggatgaataggtgtgatatcagtgaggatgaaacaacaggggctctgaatgcattgtttgccattccagcgactgccacaaccctttcttcaggtagtcctcatactgcagttacaggaggtattatggaaaggaacaaggcttatccaaagttaaagactaaaataaggattgatcaagatgaacagaaatcatataagaaaactaaaattgaggcttggcatcaaattgacagaggccaggaccacaggtgtgattcagatggtgtggaagttcctgatgaacacaaagctttacttgcaaaagcaaaagcaatgaagggttcacatgaaactgatgacatgtctttatgcaagaaaaatatcgcttcagggtatgattcatcggaaaacgtcaataatgttaatgctttggatgtaccctttcacagtgagaagaaagaacatccttctgatgtagacatattagatttgtcttgcaagaagaatgcagtgaagaaattggagattcagcttaactctttacattgtataagcaatgggccccagaagaacttgaaggaaaagaagtctaataaattgaagtctaaagagatggcatccaaggaagatagtagacatggaaaagtgcagcatgcagatgccgtgttgtcttctctggggcacctaaattatgaactaggtgctgacaacaagtttgttactgggaaagaaagtctttcagaacaattagaaactttacctgccaagcaagttttggacttggctgaagcccctggaagggatgtagcctatctgcagtcttctacaactgtgagctcaagctcttcgaagatttcaagctccagaagaaacacaaactcgcaagaagcaaatgactctccaattaaatcagcctcttcattgccactgagagatttcagcattaaaatgatttccggtaacagaaaagatggaacagtggatgcttccttgggcaacacacacaatttagcaaggtaccaaaacagtgaagtcattgcattaaattatggtcagcaagctggaaactttgagggggatcaggttgcaggtgaacccaattttcatggttctttgcaaggaatctcggatagcaatatcaaggaaatacctcagtcagctggtgctcaagtctccaatatcactggttttgggaggagtttggataatagtctgccggaggcatcatgtagagaggaccttactgtaaatgatactgttgtaggtagaggagaccatcaactgtgttctggtgaacaaaaggactttaatatggaggttcgtttaccactacctgatcagcattgttttggcaggattaacactgagtctggttctgttcgacatgaaagtaagaacattgaagttcgccaaggtagtggaactgctcagcggctgggcatgttatttaaaaaagaaaaatctcaccttagaatccttaatcgagatattcagaaccatgttaatcaagttgtcaattttcctttgaaaggaggtaaacaaaaggtctgccctacttcagtaaaatctgaatcgttgaaaatgaaagcaaagttagtgaggttcaatgttgaaactggagtgcaacatggcagtgttaagcaagtgacatcaagcactttggacacaagtccaatgaggaaggatggtagtatgattacatttgctctcaaggaagctagagatctaaagcataaagcaaatgatttgaagaataaaggacaagaacttgaaagtacaggtctgtacttcgaggcggctttgaagtttctgcatgttgcgtttcttctagaaactcctagttttgacatttcaagacaaggtggtggaggtcggtcaatgaagatgtactctgaaactgcaaaattatgcaatttttgtgcttatgaatatgaacggtgcaaaaaaatggcttctgctgctttagcgtacaagtgtgtagaagttgcttacctcaaggctgcatactacaaacaccgtactgctacaaaagatcaacaggaacttcaggcagctgtacagataacccgaggtgaaccaccatcgccttctgccctagatattgataatttaaatagccatggatcatcaaatgcctcctcattaaagggtgacaattcacctcatgtgccaggcaatcatttgcctctagctattcacaaccaagcccagctgttgagattacttgcctatacaaatgatatgaacttggcattcgatgcaactcgaaaagcagaatctgtgattgcatctgctactgggtgtccggaaagaggtgttgttggtgatggccttgcttcggtaaaagcagtcttggatcttaacttcaacaatgtgaatgaactactaaggcttgttcgggtttcaatggaatcaataagcagctgatgatgtgttcaaaaatcggaattgcacagaatgtcacacagtgaactgctgatattggattaacatgcaatctgtgctccgtgatgctggttgcagctatgtcagtatatttttacagtgcaaaacaaattaacttgaaatcaagcattccctttcctaaattggaaattatgtgaaccaaggttctggaattcgggagcggtactgctgcatcttgtggtagtgtaaccatgcattgatgtgtgtttgtttcaatgggtcagaggagatcgattgcgattacctgcactacctgtcatgtacgggcgctcgtacgccaggcagcgtcgcgcccgtgacaggcgccgcgcacaggagcgcgatctgggagatcagcaggaacctatggaaagcagtggccaggaaggaaattagaagaatggaaagttgagggaaggaaaggagagattgattagtgattgattaagtgattgattagtgattgattagtgttaccatgtttaggcttgcctaaaataaaggctctaggacagcaggccgatggctatatatgcggcacaaggagacaggaataaagggcagcaaacaagttatctcctctccacctctctctaccatctaagcctacggctgtgggggataaccacgccggagaagacgaaccgcggctacaaccccatgctctaaacgcccaggcccttgacaacctggtatcacaagtcaggcgatcttcgtcctctcgatcccacacctccgatcagtccctcgacgtcacccaaccaccacccagccctccaccgtctccgccgtcggcctcctccattatgaccaccaaaaccaacgacgatctggctgcgatgatcgagaagctcacgggcacggtcgctgccctccaaaatgacgtcgagtcgttgaagaaggacaaggggccttcctcctcgccatccgacagcggcggccacgacggctagcaccacatcgatcggccaccaaggttccaaaagatcgacttcccacgttttgacggcaagtcgg

SEQ ID NO: 208885 - DNA, 1482 bp, Zea Mays
gtcactgcttgttaagacgtactactagtttattactgcaaggtccacatggactatctggaagctggcgcaaacattataatcacagcatcgtatcaggccactattcaagggtttgaatcaaagggtttttcaaaagaacagagtgaaaacttactaacaaagagtgtcgagattgcactggaagctcgtgagatgttcttgaaggaacatctggagaagtccactcctatacagcacccggttctggtcgcagcgtctttagggagttatggagcttatcttgccgatggctccgagtacagtggggattatggtgaagctggtacgaaagagttcctgaaagatttccatcggcggaggctccaggttcttgcggaagcaggccccgatttgattgctttcgaaacgattcccaacaaactggaagctgaggcgtatgtcgaacttctcgaggagtgcaacatcaatatccctgcatggttttccttcaactcaaaagatggagtgcatattgtgagcggtgactcgttaatcgaatgcactactattgctgacaagtgtgcaaaggttggtgcggtcgggataaactgcacacctccaagatttatccatggactgatactctccattcgaaaggtcacggacaagcccattctgatatatcccaacagtggcgaaagatacgatggtgaaaaaaaggagtgggtggaatccactggtgtgtcagatggtgattttgtttcttatgtgaacgagtggtgcaaagacggggctgtgcttatcggtggctgctgcaggacaactccaaacactatcagggccatacacagaactctgaacaaaagccccaacaagcagcagttacctgctgtagaataagagctgtgctctactctgatgcgcccgccttcctcctagcagtacctcgaggctataactccatgattccgtaaccgtacgtgttcgttctcttgcaaacgagatgtttgtaaataacgctgtatttctgggttctgagatatgcaacttggatggaggtacaaccggtgaaggggggtgaggaagcagcaacaatggtaagagttctactactgagtgggggaaaaacaacttgcggctgggttagtgaagcttagtagctaccactattcaagagttaaagggagttcgtatgacagttcctctggagatgttatcttcaaagtcttatatcactgctacttgtgagctgtgttaaaacctatatatataagttttgtttgacgtgactgcattaaagatagtacaccaagcttctccagttctcctagctatgtatgttcttgtccattcctccgcttccacaattctaagcaataaattaagggctagcttctccagttctcctagctatgtatgttcttgtccattcctccgcttccacaattctaagcaataaattaagggctagtttaggagccacaaactggagggaattag

SEQ ID NO: 208886 - DNA, 1175 bp, Zea Mays
ccctctatcagatttttatctgccgcgccttctgattttttttccaccgtcggaggcatacgtcccctgccctcttcccatatcggtgctcatctcctgggttgaagccgccgcacagccttcatctccccgcccagcccctctctctggcgagcttgacccggcgtcgagctctggcggtcctcctccgctgccactcgttggaccttgcccctgctgcgccgtcgatagctcaccacaccctctcctccctggctcccgagcttcaaccatggagcttgtcccctctctgctcgtcggtgacctacgtcttctccagccaagccgcagccaagctcatctccatagccgacgcccctgccctcctgctcgccatggctggccatcggacgacgcacagcaacctcgccgtttctgagcccgaccccgccatggagctcacggcgcctactgctgctcagccttgggtgccgtcgctgagctcgccctgctccctggtgcttcctgctcgccgtctctggcgagctggctgtcctgcccgtcatggtggcgcgcgctccatctcccatggcgcccggccgcccctctttgctcatcttcgccgtcgggctgggatattccttggtgctacaactgggaggtgctcgccgagccctgtatcactggttaagcgtgcctgcccacaccgtcgtctttgatctctcgctccggtctccttgttcttcatcgcttgccaggtgttcggtaaaatgggtgaaccggtgaacgtcgttaattttatgttttcgagtcaaattactatctggtgcttatgggtgtttttgtgtgtgagattggagaaaggagatcctcggattttgtggatgatgaagtaagatccatgtgacgttcgccaagtattcggtggattgctcgaactaggattcgttgtcgttttcgtgaattcgtgttgttttgatcatgtgtataagttatacaggtgccagaggttcacacttagcaaataaaaagacaaagtattgggttcaacaaaagagcaaagggacaaccgaaggcacctctggtctggcgcaccggactgtccggtgcatcaccggacagtgtccggtgcaccagaggactccaattcaaactcgtcaccttcgggaaaatccagaggcgctccgctataattc

SEQ ID NO: 208887 - DNA, 1973 bp, Zea Mays
caaatccgtcagaaataccatcaagaaaatactagctagactggaaccaatcgagaacatggcgtctcatccagcacatcgttccagcaaggcagctgatgaggagctgccaaaggcttcttcgacctttcacccaagtctgtggggcagtttcttcctgacctaccagccgccaactgcacctcagcgagcaaacatgaaagaacgagctgaggttttaagagaacgtgttaggaaggttttgaagggctcgacgactgatcaactaccagaaacagtgaatcttatattaacattgcaaagacttggactgggttactactacgagaacgagatagacaagttgctgcaccaaatttacagcaactccgattacaatgtgaaagatcttaacttggtttcgcagcggttctaccttcttcgaaagaacggctacgatgtgccatcagatgtatttctgagcttcaaaacagaagaaggcggcttcgcctgtgctgctgctgacacgagaagcttgttaagcttatataacgcagcatatctgaggaagcatggagaggaggtactagacgaagcgatttcatcgactagactccgcctccaagatctccttggacgacttcttccagaatcgccatttgcaaaggaggtgtcttcttcccttcgtacccctctcttcagaagggttgggatactagaagcgagaaactacatacccatttacgaaacggaggcgacgcgaaacgaagccgtattggagcttgcgaaactgaattttaaccttcagcaacttgatttctgtgaagagctaaagcattgctcagcgtggtggaacgagatgatagccaaatcaaagctgacctttgttagagatagaattgtagaggagtatttctggatgaatggagcatgctatgatccgccgtactccctttcccgaattatactgacaaagatcacgggacttattacaataatcgatgatatgtttgatacacatggtaccactgaagattgcatgaaattcgctgaagcgtttggcagatgggacgaaagtgcaatacatctccttccagagtacatgaaggatttctacatattgatgttggagacatttcagtcatttgaggatgctttagggccagagaagagctaccgtgtgctttacctaaaacaggcggcaaatggagcgtttagttgagctatactccaaggaaataaaatggcgtgatgatgattatgtgccgacaatgagtgaacacctccaggtttcagcagagaccatcgcaaccattgctctaacatgttctgcatatgctgggatgggtgatatgtcgataagaaaggagaccttcgagtgggctttgagctttcctcaatttataagaacttttggttcatttgtacggctctccaacgatgtcgtatcgaccaagcgtgagcaaacaaaagaccatagtccctccactgtccattgttacatgaaggagcatggaacgaccatggacgatgcatgtgaaaagataaaggagcttatcgaagattcatggaaggatatgctagagcaatcccttgcgctgaaagggctcccaaaggttgtgccacagctagtgtttgacttctcaagaaccacggataatatgtacagggatcgtgacgcattgacctcttcggaagcactcaaggaaatgatacagctactgtttgtggagccaatacccgaatgacgaggctcgaagcttaattataagcaattattagatatattatgtgcttttggaaaaatatatagccacagtcttcttgaaggtcaggtcatgacgatgctagcttgatggaactctgtatataagcattattgtcataaaaataaaaatgaatgtacgactattgttgctccggtgcatagaacggcaaatagccatgtacgacgatagatgttcctcttgggttgtactgatactctaaaatgg

SEQ ID NO: 208888 - DNA, 1977 bp, Zea Mays
caaatccgtcagaaataccatcaagaaaatactagctagactggaaccaatcgagaacatggcgtctcatccagcacatcgttccagcaaggcagctgatgaggagctgccaaaggcttcttcgacctttcacccaagtctgtggggcagtttcttcctgacctaccagccgccaactgcacctcagcgagcaaacatgaaagaacgagctgaggttttaagagaacgtgttaggaaggttttgaagggctcgacgactgatcaactaccagaaacagtgaatcttatattaacattgcaaagacttggactgggttactactacgagaacgagatagacaagttgctgcaccaaatttacagcaactccgattacaatgtgaaagatcttaacttggtttcgcagcggttctaccttcttcgaaagaacggctacgatgtgccatcagatgtatttctgagcttcaaaacagaagaaggcggcttcgcctgtgctgctgctgacacgagaagcttgttaagcttatataacgcagcatatctgaggaagcatggagaggaggtactagacgaagcgatttcatcgactagactccgcctccaagatctccttggacgacttcttccagaatcgccatttgcaaaggaggtgtcttcttcccttcgtacccctctcttcagaagggttgggatactagaagcgagaaactacatacccatttacgaaacggaggcgacgcgaaacgaagccgtattggagcttgcgaaactgaattttaaccttcagcaacttgatttctgtgaagagctaaagcattgctcagcgtggtggaacgagatgatagccaaatcaaagctgacctttgttagagatagaattgtagaggagtatttctggatgaatggagcatgctatgatccgccgtactccctttcccgaattatactgacaaagatcacgggacttattacaataatcgatgatatgtttgatacacatggtaccactgaagattgcatgaaattcgctgaagcgtttggcagatgggacgaaagtgcaatacatctccttccagagtacatgaaggatttctacatattgatgttggagacatttcagtcatttgaggatgctttagggccagagaagagctaccgtgtgctttacctaaaacaggcggcaagtagatggagcgtttagttgagctatactccaaggaaataaaatggcgtgatgatgattatgtgccgacaatgagtgaacacctccaggtttcagcagagaccatcgcaaccattgctctaacatgttctgcatatgctgggatgggtgatatgtcgataagaaaggagaccttcgagtgggctttgagctttcctcaatttataagaacttttggttcatttgtacggctctccaacgatgtcgtatcgaccaagcgtgagcaaacaaaagaccatagtccctccactgtccattgttacatgaaggagcatggaacgaccatggacgatgcatgtgaaaagataaaggagcttatcgaagattcatggaaggatatgctagagcaatcccttgcgctgaaagggctcccaaaggttgtgccacagctagtgtttgacttctcaagaaccacggataatatgtacagggatcgtgacgcattgacctcttcggaagcactcaaggaaatgatacagctactgtttgtggagccaatacccgaatgacgaggctcgaagcttaattataagcaattattagatatattatgtgcttttggaaaaatatatagccacagtcttcttgaaggtcaggtcatgacgatgctagcttgatggaactctgtatataagcattattgtcataaaaataaaaatgaatgtacgactattgttgctccggtgcatagaacggcaaatagccatgtacgacgatagatgttcctcttgggttgtactgatactctaaaatgg

SEQ ID NO: 208889 - DNA, 1144 bp, Zea Mays
cccacctcgttttttactggcgcgcgataacccgaaaccgccagtgataatttataggtgccgcagtctatgagctcttttctactgtgccgtccggacgtacacagaggagagtcgctcctgtaccaggtcgcggtagagagccccaccggccatgtccgattatttaaacaagcactcgcccaagatatatagtacgagtagggcattcctacaggacctcgaactgatgtcaatactccagcgcgcgccagctgctcgtcaacgccggcggctttttagagaggaccttcttcccgcgccagtctacggaagatggaacttcaccgagcagaggaatggccgttccagatccgtcgagcccgtacaaggtgctgctgctgctgatggaggactacccgtacgcgtcggacgggctggccgtctggcacgccatcgagcagtgcgtgacggagtacctggccatctactaccccaacgacggcgcgctgcaggccgacgtggagctgcaggcgtggtggaaggaggcacgcgaggtcgccacgccgacctcaagcctcaaggacgaaccctggtggcccaagatgcgcaccacggcggagctggccaaggcctgcgccaccatcgtctggatcgctgaaaacatcagctcatttacaaattgagtaattccatctttcattgacaagccctgaaaccgtgaggaaccaaactgaggacgtgtgccaaggacggcggcggcgggaaggagggaggtagggatgtacggcataccagttaaggtcccctgtgatcggcacgaggtcggggttgaccatggccatcgccgggccgacataccgccggaagtcgtaggcgcgctccgcatggtgcacgctgaagtggagatccgtgagctggggctgggccacccgcacaaccccgtccggcacaccgccgcaccggacacctccatcacctctctctcgtcacgggacatggcggacggagccgcggcagcggcgatgagaaccagtagaacggggaagaggagccgcttgccgcgcgtctccatggcgaagccgcgggcggggcctccaggagcagaacgggactgcaattctgatttctgtcgtctcgtcgcccgtcaggagattcggggtcc

SEQ ID NO: 208890 - DNA, 1124 bp, Zea Mays
caacaatctgttgtccatgaagccaacgatcattccaaaacaagtatgtaaacaaagaattcttacggaaccgtagcatggatgagaatcagctagctcagcagatgtggaatagtgtagctgcaaatgacaagaaagcagcatacagtctcattgtgagatcacgcgccaatgtaaatttagttcatggagagatacattctagcccatttttgactctcggaaaagcacttcagcaagagcaaccggcttcaccacctgttggaagtcctagatttttcgattgcaactcgcatgacaagatttctcgagagcccctttcccctgctagcacgagttcatgcagagatggcatggaggacggttgcgaaggtctctccttgctccatcttgcatgccgtgttgcagatgttgggatggttgaattacttttgcagtatggtgctagtgtaaacatgaatgattctatgggtcggacaccccttcatcactgcattctgaaaggaagacatcggcatgcaaagcttctcctctccagaggtgctgattcacaagccatggatcgagatggtaggacagcattacagtatgcaatcaatggcggaacaagtgacgaagacattcttgcgttattacaggatcatagtagataatcttgcaaccaataccttcagtaaatcgaggcactcttggtgtggtcgactcaactaacaaggcaccagccccgccaggccccagcttgtcgtgcagacaatcctaaatttatggcatgaaagcaacctatgtacatgtcgttatagggcttcagtatcatgacgcgcctgttgtttcttcccccaccttgtgcttgtttaggataagtcatccatatttagtcatctggcaaacggtttggttttgtttgctgcaggtgatgcatagtaagcctgtaaatggagttatttctctttattttctagtcatcttccgtcacgaagtagatttggcattctgatgaaagatgattgtacatatcgagatgtgtgatgttggggacttgttctcaaatgctatgaattaagaacgaggcaacataaaatgttaaatgattttgtccttcgtccgtgaagcattataccttttgg

SEQ ID NO: 208891 - DNA, 1185 bp, Zea Mays
atatatcaaagtgctgatggatcagacacatcacagtacctctctgttagcaagcctaaacacaaagatgtattctctgccaaggagaagtttattcatgccaagtatgtaaacaaagaattcttacggaaccgtagcatggatgagaatcagctagctcagcagatgtggaatagtgtagctgcaaatgacaagaaagcagcatacagtctcattgtgagatcacgcgccaatgtaaatttagttcatggagagatacattctagcccatttttgactctcggaaaagcacttcagcaagagcaaccggcttcaccacctgttggaagtcctagatttttcgattgcaactcgcatgacaagatttctcgagagcccctttcccctgctagcacgagttcatgcagagatggcatggaggacggttgcgaaggtctctccttgctccatcttgcatgccgtgttgcagatgttgggatggttgaattacttttgcagtatggtgctagtgtaaacatgaatgattctatgggtcggacaccccttcatcactgcattctgaaaggaagacatcggcatgcaaagcttctcctctccagaggtgctgattcacaagccatggatcgagatggtaggacagcattacagtatgcaatcaatggcggaacaagtgacgaagacattcttgcgttattacaggatcatagtagataatcttgcaaccaataccttcagtaaatcgaggcactcttggtgtggtcgactcaactaacaaggcaccagccccgccaggccccagcttgtcgtgcagacaatcctaaatttatggcatgaaagcaacctatgtacatgtcgttatagggcttcagtatcatgacgcgcctgttgtttcttcccccaccttgtgcttgtttaggataagtcatccatatttagtcatctggcaaacggtttggttttgtttgctgcaggtgatgcatagtaagcctgtaaatggagttatttctctttattttctagtcatcttccgtcacgaagtagatttggcattctgatgaaagatgattgtacatatcgagatgtgtgatgttggggacttgttctcaaatgctatgaattaagaacgaggcaacataaaatgttaaatgattttgtccttcgtccgtgaagcattataccttttgg

SEQ ID NO: 208892 - DNA, 1406 bp, Zea Mays
atgtgtgctgactgtggtgcttcagaacctgattgggcatcattaaaccttggcgcacttctatgcatagagtgttctggggtgcacagaaatcttggagtgcatatatcaaagatctctgacacttgatgtcagagtttggggagccatctgtaatcaatctctttcagtcattaggcaacatgtttgtcaacagtatttgggaagagacgctgccagatgataattcaagtgctgatggatcagacacatcacagtacctctctgttagcaagcctaaacacaaagatgtattctctgccaaggagaagtttattcatgccaagtatgtaaacaaagaattcttacggaaccgtagcatggatgagaatcagctagctcagcagatgtggaatagtgtagctgcaaatgacaagaaagcagcatacagtctcattgtgagatcacgcgccaatgtaaatttagttcatggagagatacattctagcccatttttgactctcggaaaagcacttcagcaagagcaaccggcttcaccacctgttggaagtcctagatttttcgattgcaactcgcatgacaagatttctcgagagcccctttcccctgctagcacgagttcatgcagagatggcatggaggacggttgcgaaggtctctccttgctccatcttgcatgccgtgttgcagatgttgggatggttgaattacttttgcagtatggtgctagtgtaaacatgaatgattctatgggtcggacaccccttcatcactgcattctgaaaggaagacatcggcatgcaaagcttctcctctccagaggtgctgattcacaagccatggatcgagatggtaggacagcattacagtatgcaatcaatggcggaacaagtgacgaagacattcttgcgttattacaggatcatagtagataatcttgcaaccaataccttcagtaaatcgaggcactcttggtgtggtcgactcaactaacaaggcaccagccccgccaggccccagcttgtcgtgcagacaatcctaaatttatggcatgaaagcaacctatgtacatgtcgttatagggcttcagtatcatgacgcgcctgttgtttcttcccccaccttgtgcttgtttaggataagtcatccatatttagtcatctggcaaacggtttggttttgtttgctgcaggtgatgcatagtaagcctgtaaatggagttatttctctttattttctagtcatcttccgtcacgaagtagatttggcattctgatgaaagatgattgtacatatcgagatgtgtgatgttggggacttgttctcaaatgctatgaattaagaacgaggcaacataaaatgttaaatgattttgtccttcgtccgtgaagcattataccttttgg

SEQ ID NO: 208893 - DNA, 4374 bp, Zea Mays
ccgcagtcccgctagctagtccccttcccttctccaatctcgcatcgcaattcgcatcttccatttcgtccaccaaaccaaaccaaaccaaaccctactcgcccccgcccgcgccaccgccatggactcgatcgacgcggatctagcgcgcacgcaggaggagcggcgcaagatggaggaggcgctggcggccggcgcgcccatggccgtgtcctccgtcaccttcgacaccgacctctacggtggcgggggcgccgaccccaaccgcttcgcgggctacgacacctccatcccggcctccgaggatgacgccgcggaggacgacacggagttggccaaccccgcaccgcgccgcctcgcggcctacacgggccacgccatcgccgccgccgacctcccgcggtcagccgacgacgacgacgggctgcccaagaggtcccagcgcatcatcgaccgcgaggacgactaccgccgccgccgcctcaaccagatcatctcgccggagcgccatgacccgttcgctgccggggaggccaccccggatccctctgtgcggacctacgccgacgtcatgcgcgacgcggcgctgcagaagaagaaggaggacctgctcagggagattgccaagaagaagaaggaagaggaggagaaggagaaggagaggaaggctgccgcgcctgagcagccggctgctgcgacgaagcggcgtaacaggtgggatcagtcgcaggatggcgatgctgctgccggtggcaagaaggcaaagacatcctcggactgggatgcccccgatgcgactcctgggattgggcgttgggatgccacccctggacgtgttggagacgccacaccctccgtgagaaggaacagatgggatgagacaccgactccaggtaggatggctgatgctgatgcgacgcctgcagctggcggtgccacccctggggcaactccttctggggcttgggatgcgactccaaagcttcctggtggtgtcacgccaacacctggtaagaagcagaggtcaaggtgggatgagacgccagcgagtatggggagtgcaacccctggtggtcttggtgctgcaacacctgttggttatactcctggtccaacgccatttggtgcagagaaccttgccacaccaactcctagccagattgcccgtggaccgattactccggagcagtaccagctcatgcggtgggagcgggacattgaggagaggaacaggcctctcactgatgaggagctcgatgccatgttcccgcaggaaggatacaagattcttgagcccccggcttcctaccagcccatcaggaccccagcaaggaagctccttgcgacaccaacacctctggggacaccactttatgctattccagaggagaatcgtgggcagcattttgatgtgcctaaggagctgcctggtggattgcctctcatgaagccagaggattaccaatactttggaactttgctgaatgaagaagaggaggaggagctatcgccagaggagcagaaggagaggaaaatcatgaaactgttactcaaagtgaagaatggtacacctccacagcgtaaaacagcacttcggcaattgacagacaaagcccgggagttcggtgctggaccactgttcaacaaaatcctgcccttactcatgcagccaacactggaggaccaggagaggcatcttctggtgaaggtcattgatagggtactgtataagctggatgagctggtccgaccttttgtgcacaagattcttgtggttattgaaccactgttgattgatgaggactactatgctcgtgttgaaggcagggagatcatctcaaatcttagtaaagcagctgggcttgctactatgattgctgccatgcgaccggatattgataacattgatgagtatgtgagaaacaccactgctagggcattcagtgtagtggcttctgctttgggcatccctgcccttttaccattcctgaaggctgtctgtcagagtaagaagtcttggcaagctaggcacactggtatcaaaatcgtgcagcagattgctattctcatgggttgtgctgttttgccacatctcaagtcattagtcgagatcattgagcatggtctgagcgatgaaaaccagaaagtccggacaattactgccctttctcttgctgcacttgctgaggctgctgcaccatatggtatagaaagttttgataccgtattgaagcctttgtggaagggtatcagatctcaccgagggaaagtccttgctgccttcctcaaggccattggtttcatcatccctcttatggatgctctgtatgctagttactacacaaaggaggtgatgcaggtcctcattagggagttccaatctccagatgaagaaatgaagaagattgttctcaaggttgtgaaacagtgtgtcagtacagagggtgtggaggctgattatatccgaaatgacatccttccagatttcttcaagcacttctgggtgaggagaatggctctagatcggaggaactataagcagcttgtggaaactacagtggagatagcaaacaaggttggagttgctgatattgtggggaggattgttgaggatctgaaagatgagagcgagccttacagaagaatggtgatggaaacaattgagaaggtagtggccaacttgggtgcttcagatatcgatgctcgtcttgaggagctgcttattgatggtatcttgtatgctttccaagagcagactagtgatgatgcaaatgttatgcttaatggttttggagctgtggttaatgcacttggacaaagagttaagccttaccttcctcagatttgtggtaccatcaagtggcgattgaacaataagagtgcaaaagttaggcagcaagctgctgatctgatctccaggatagccattgtcatgaagcagtgccaggaggagcaactcatgggtcacttgggtgttgtgctgtatgagtacttaggagaagagtatcctgaggtgttgggttcaattcttggagccttgaaggctatcgtcaatgtcatcggtatgactaaaatgactcctccaatcaaggatcttcttcctcgtctaacccccatcttgaagaacaggcatgagaaggtccaagagaactgcattgatcttgttggtaggattgctgatcgtggagcagaatttgtgccagcaagggaatggatgaggatttgttttgagctgctcgagatgttgaaggctcataagaaaggtattaggagagccactgtgaatacatttggttatattgcaaaggctatagggccacaggatgtgctggccaccctgttgaataatttgaaggtgcaggagcggcagaaccgtgtctgcacaactgtagcaattgccatagttgctgaaacttgctcacctttcacagttttacctgcccttatgaatgagtaccgggtcccagagctcaatgtccaaaatggtgttctgaagtcactctctttcctctttgagtatattggtgagatgggtaaagattacatatatgctgtcactcccttacttgaagatgctttaatggatagagatctggttcaccggcagactgctgcatctgctgttaagcacatggctctaggtgttgctggcttgggttgtgaggatgctcttgttcatctgcttaactatgtttggcccaacatatttgagacatctccccacgttataaatgctgtcatggaggcaattgagggtatgagggttgcgctaggtgcagctgtgattttgaattattgcctgcaaggtctcttccatccagcaaggaaagtacgtgaagtttattggaagatatacaactctctgtacattggtgcacaggattcacttgttgcttcttatcctgccctggaagacgatggggataacatatttagtcgcccagagttggcaatgttcgtctgattaacgctggatgtccatgtatcttcatccatattgttgtgaagcttgaactgggatagtccgtgttgaagctgctgaagagttccactggattgaggaccgatttcgaggctgcagaggaccctttaattaatccatcatgatcctatgttttgaaggagaaatgacgatcctagcgtgttgtcttaatattagacgttggcaccttctgtgttcttgaactttttgtgatagccgtggatgttgttgttatatataggtgtggacagtggaacattgcaaacccctctgtgaccttgattcctcgctgtattcctgagatggctgttattagcgtgccttgatcaaatagcttgtgtatctcggtttgcaaaggctactggtgataatccatctgttactcctatgtt

SEQ ID NO: 208894 - DNA, 4516 bp, Zea Mays
ggcgtctcccgtctccccgcagtcccgctagctagtccccttcccttctccaatctcgcatcgcaattcgcatcttccatttcgtccaccaaaccaaaccaaaccaaaccctactcgcccccgcccgcgccaccgccatggactcgatcgacgcggatctagcgcgcacgcaggaggagcggcgcaagatggaggaggcgctggcggccggcgcgcccatggccgtgtcctccgtcaccttcgacaccgacctctacggtggcgggggcgccgaccccaaccgcttcgcgggctacgacacctccatcccggcctccgaggatgacgccgcggaggacgacacggagttggccaaccccgcaccgcgccgcctcgcggcctacacgggccacgccatcgccgccgccgacctcccgcggtcagccgacgacgacgacgggctgcccaagaggtcccagcgcatcatcgaccgcgaggacgactaccgccgccgccgcctcaaccagatcatctcgccggagcgccatgacccgttcgctgccggggaggccaccccggatccctctgtgcggacctacgccgacgtcatgcgcgacgcggcgctgcagaagaagaaggaggacctgctcagggagattgccaagaagaagaaggaagaggaggagaaggagaaggagaggaaggctgccgcgcctgagcagccggctgctgcgacgaagcggcgtaacaggtgggatcagtcgcaggatggcgatgctgctgccggtggcaagaaggcaaagacatcctcggactgggatgcccccgatgcgactcctgggattgggcgttgggatgccacccctggacgtgttggagacgccacaccctccgtgagaaggaacagatgggatgagacaccgactccaggtaggatggctgatgctgatgcgacgcctgcagctggcggtgccacccctggggcaactccttctggggcttgggatgcgactccaaagcttcctggtggtgtcacgccaacacctggtaagaagcagaggtcaaggtgggatgagacgccagcgagtatggggagtgcaacccctggtggtcttggtgctgcaacacctgttggttatactcctggtccaacgccatttggtgcagagaaccttgccacaccaactcctagccagattgcccgtggaccgattactccggagcagtaccagctcatgcggtgggagcgggacattgaggagaggaacaggcctctcactgatgaggagctcgatgccatgttcccgcaggaaggatacaagattcttgagcccccggcttcctaccagcccatcaggaccccagcaaggaagctccttgcgacaccaacacctctggggacaccactttatgctattccagaggagaatcgtgggcagcattttgatgtgcctaaggagctgcctggtggattgcctctcatgaagccagaggattaccaatactttggaactttgctgaatgaagaagaggaggaggagctatcgccagaggagcagaaggagaggaaaatcatgaaactgttactcaaagtgaagaatggtacacctccacagcgtaaaacagcacttcggcaattgacagacaaagcccgggagttcggtgctggaccactgttcaacaaaatcctgcccttactcatgcagccaacactggaggaccaggagaggcatcttctggtgaaggtcattgatagggtactgtataagctggatgagctggtccgaccttttgtgcacaagattcttgtggttattgaaccactgttgattgatgaggactactatgctcgtgttgaaggcagggagatcatctcaaatcttagtaaagcagctgggcttgctactatgattgctgccatgcgaccggatattgataacattgatgagtatgtgagaaacaccactgctagggcattcagtgtagtggcttctgctttgggcatccctgcccttttaccattcctgaaggctgtctgtcagagtaagaagtcttggcaagctaggcacactggtatcaaaatcgtgcagcagattgctattctcatgggttgtgctgttttgccacatctcaagtcattagtcgagatcattgagcatggtctgagcgatgaaaaccagaaagtccggacaattactgccctttctcttgctgcacttgctgaggctgctgcaccatatggtatagaaagttttgataccgtattgaagcctttgtggaagggtatcagatctcaccgagggaaagtccttgctgccttcctcaaggccattggtttcatcatccctcttatggatgctctgtatgctagttactacacaaaggaggtgatgcaggtcctcattagggagttccaatctccagatgaagaaatgaagaagattgttctcaaggttgtgaaacagtgtgtcagtacagagggtgtggaggctgattatatccgaaatgacatccttccagatttcttcaagcacttctgggtgaggagaatggctctagatcggaggaactataagcagcttgtggaaactacagtggagatagcaaacaaggttggagttgctgatattgtggggaggattgttgaggatctgaaagatgagagcgagccttacagaagaatggtgatggaaacaattgagaaggtagtggccaacttgggtgcttcagatatcgatgctcgtcttgaggagctgcttattgatggtatcttgtatgctttccaagagcagactagtgatgatgcaaatgttatgcttaatggttttggagctgtggttaatgcacttggacaaagagttaagccttaccttcctcagatttgtggtaccatcaagtggcgattgaacaataagagtgcaaaagttaggcagcaagctgctgatctgatctccaggatagccattgtcatgaagcagtgccaggaggagcaactcatgggtcacttgggtgttgtgctgtatgagtacttaggagaagagtatcctgaggtgttgggttcaattcttggagccttgaaggctatcgtcaatgtcatcggtatgactaaaatgactcctccaatcaaggatcttcttcctcgtctaacccccatcttgaagaacaggcatgagaaggtccaagagaactgcattgatcttgttggtaggattgctgatcgtggagcagaatttgtgccagcaagggaatggatgaggatttgttttgagctgctcgagatgttgaaggctcataagaaaggtattaggagagccactgtgaatacatttggttatattgcaaaggctatagggccacaggatgtgctggccaccctgttgaataatttgaaggtgcaggagcggcagaaccgtgtctgcacaactgtagcaattgccatagttgctgaaacttgctcacctttcacagttttacctgcccttatgaatgagtaccgggtcccagagctcaatgtccaaaatggtgttctgaagtcactctctttcctctttgagtatattggtgagatgggtaaagattacatatatgctgtcactcccttacttgaagatgctttaatggatagagatctggttcaccggcagactgctgcatctgctgttaagcacatggctctaggtgttgctggcttgggttgtgaggatgctcttgttcatctgcttaactatgtttggcccaacatatttgagacatctccccacgttataaatgctgtcatggaggcaattgagggtatgagggttgcgctaggtgcagctgtgattttgaattattgcctgcaaggtctcttccatccagcaaggaaagtacgtgaagtttattggaagatatacaactctctgtacattggtgcacaggattcacttgttgcttcttatcctgccctggaagacgatggggataacatatttagtcgcccagagttggcaatgttcgtctgattaacgctggatgtccatgtatcttcatccatattgttgtgaagcttgaactgggtggattgttccttccgaagggggtgcacaatgtttaggaatttttattatggtttactgtaatgcaactctaaatcactgtcgtaatctgatctactaaccatttgggaaatgttctgttttcaggatagtccgtgttgaagctgctgaagagttccactggattgaggaccgatttcgaggctgcagaggaccctttaattaatccatcatgatcctatgttttgaaggagaaatgacgatcctagcgtgttgtcttaatattagacgttggcaccttctgtgttcttgaactttttgtgatagccgtggatgttgttgttatatataggtgtggacagtggaacattgcaaacccctctgtgaccttgattcctcgctgtattcctgagatggctgttattagcgtgccttgatcaaatagcttgtgtatctcggtttgcaaaggctactggtgataatccatctgttactcctatgtt

SEQ ID NO: 208895 - DNA, 1712 bp, Zea Mays
aactgctgcgtctcagtactcagtagtcagaaagacgcaagccggcaaagttcatctgcggctgcttactgttcccaagcagttggcattggcaatccgccagacgcaagcgtccccctccgctcctctcaaccggcacggcgccaggtccgcggcgaaatcggtggacggcatgccgcggcgcgaggcggcgaggcttctccgccgcctgggcccgatcgctgtccagtcgccgaagcgaggcttttcaggcatgcctcataatcaatatgaatccacaaaccacgctgtgaattcttatagaagattccactggattcccagtgtacagcaccctctgtgtggacctacaagtagtgggggaatatatgaaggtcaacgcagtgctaacaaggcttgtgaagttcagaagcgcacatttggttctgctgcaacacagtttcagaggaatccagcctattcagtgctgaactctgatgacattgcttacttcaagagcatcttgggagaaaatggtgtagttcaggatgaagacagagttgcagttgcaaatgtagattggatgggtaaatacagaggtgcaagtcagctagtacttttaccaaaaactactactgaggtatctaagattctttcatattgcaacaccaaacgattggctgtggttccacaaggtggcaacacaggtcttgtaggtggaagtgtgcctgttttcgatgaggtgattgttggccttgcaggcatgaataaaattatttcctttgataacgtttattatgccacttgacttgggagcgaaaggtagttgccacatcggtggaaacatttcaactaatgctggcggcctgcgttttatacgctatggttcacttcatggaaatgttcttggtcttgaagttgtcctggctgatgggactatccttgatatgcttactactttaaggaaagacaatactgggtatgatctgaagcacttatttataggaagtgaaggctcgctaggagtagtcaccaaaatatcagtacttacacctgcaaagctatcttcaaccaatgttgcatttctttcctgcaatgattacacaagctgccagaaattactactggcagctaggaggagcttgggtgagatcttgtctgcatttgaattcatggatcatcactgtattgatctggctatgcaacatttggaaggagttcaaaatcctttacctgcatcaccgtacaaattttacgttctagttgaaacaacaggaagtgatgaatcatctgacaagacaaaactggaagcttttttgttgcgttcaatggaagatggtttagtagctgatggagttatcgcacaggatatcagccaagcatcaaacttttggaggatccgtgagggtatatcagaagcatccgtcaaagttggagctgtgtacaaatatgacttgtccataactgtagagaagctctatgatattgttgaagaaatgcgctgccgtcttggtgataatgcagaggtattgggctatggccaccttggagatgggaatctgcatttgaacattgtatcaagcaaatatgacgacaatattctcgcacaaattgaaccattcgtctatgagtggacatcagcacaaagaggaagcatcagcgcagagcatggtttggggctaatgaaagctgagaagattcactacagtaaatcacctgaagcagtgagtgtt

SEQ ID NO: 208896 - DNA, 1688 bp, Zea Mays
gtactcagtagtcagaaagacgcaagccggcaaagttcatctgcggctgcttactgttcccaagcagttggcattggcaatccgccagacgcaagcgtccccctccgctcctctcaaccggcacggcgccaggtccgcggcgaaatcggtggacggcatgccgcggcgcgaggcggcgaggcttctccgccgcctgggcccgatcgctgtccagtcgccgaagcgaggcatgcctcataatcaatatgaatccacaaaccacgctgtgaattcttatagaagattccactggattcccagtgtacagcaccctctgtgtggacctacaagtagtgggggaatatatgaaggtcaacgcagtgctaacaaggcttgtgaagttcagaagcgcacatttggttctgctgcaacacagtttcagaggaatccagcctattcagtgctgaactctgatgacattgcttacttcaagagcatcttgggagaaaatggtgtagttcaggatgaagacagagttgcagttgcaaatgtagattggatgggtaaatacagaggtgcaagtcagctagtacttttaccaaaaactactactgaggtatctaagattctttcatattgcaacaccaaacgattggctgtggttccacaaggtggcaacacaggtcttgtaggtggaagtgtgcctgttttcgatgaggtgattgttggccttgcaggcatgaataaaattatttcctttgataacgtttattatgccacttgacttgggagcgaaaggtagttgccacatcggtggaaacatttcaactaatgctggcggcctgcgttttatacgctatggttcacttcatggaaatgttcttggtcttgaagttgtcctggctgatgggactatccttgatatgcttactactttaaggaaagacaatactgggtatgatctgaagcacttatttataggaagtgaaggctcgctaggagtagtcaccaaaatatcagtacttacacctgcaaagctatcttcaaccaatgttgcatttctttcctgcaatgattacacaagctgccagaaattactactggcagctaggaggagcttgggtgagatcttgtctgcatttgaattcatggatcatcactgtattgatctggctatgcaacatttggaaggagttcaaaatcctttacctgcatcaccgtacaaattttacgttctagttgaaacaacaggaagtgatgaatcatctgacaagacaaaactggaagcttttttgttgcgttcaatggaagatggtttagtagctgatggagttatcgcacaggatatcagccaagcatcaaacttttggaggatccgtgagggtatatcagaagcatccgtcaaagttggagctgtgtacaaatatgacttgtccataactgtagagaagctctatgatattgttgaagaaatgcgctgccgtcttggtgataatgcagaggtattgggctatggccaccttggagatgggaatctgcatttgaacattgtatcaagcaaatatgacgacaatattctcgcacaaattgaaccattcgtctatgagtggacatcagcacaaagaggaagcatcagcgcagagcatggtttggggctaatgaaagctgagaagattcactacagtaaatcacctgaagcagtgagtgtt

SEQ ID NO: 208897 - DNA, 2197 bp, Zea Mays
gtactcagtagtcagaaagacgcaagccggcaaagttcatctgcggctgcttactgttcccaagcagttggcattggcaatccgccagacgcaagcgtccccctccgctcctctcaaccggcacggcgccaggtccgcggcgaaatcggtggacggcatgccgcggcgcgaggcggcgaggcttctccgccgcctgggcccgatcgctgtccagtcgccgaagcgaggcttttcaggcatgcctcataatcaatatgaatccacaaaccacgctgtgaattcttatagaagattccactggattcccagtgtacagcaccctctgtgtggacctacaagtagtgggggaatatatgaaggtcaacgcagtgctaacaaggcttgtgaagttcagaagcgcacatttggttctgctgcaacacagtttcagaggaatccagcctattcagtgctgaactctgatgacattgcttacttcaagagcatcttgggagaaaatggtgtagttcaggatgaagacagagttgcagttgcaaatgtagattggatgggtaaatacagaggtgcaagtcagctagtacttttaccaaaaactactactgaggtatctaagattctttcatattgcaacaccaaacgattggctgtggttccacaaggtggcaacacaggtcttgtaggtggaagtgtgcctgttttcgatgaggtgattgttggccttgcaggcatgaataaaattatttcctttgataacgtaaatggaattcttacttgtgaagctggttgtgtgttggagaatttaagtaccttcgtggaaaatgaagggtttattatgccacttgacttgggagcgaaaggtagttgccacatcggtggaaacatttcaactaatgctggcggcctgcgttttatacgctatggttcacttcatggaaatgttcttggtcttgaagttgtcctggctgatgggactatccttgatatgcttactactttaaggaaagacaatactgggtatgatctgaagcacttatttataggaagtgaaggctcgctaggagtagtcaccaaaatatcagtacttacacctgcaaagctatcttcaaccaatgttgcatttctttcctgcaatgattacacaagctgccagaaattactactggcagctaggaggagcttgggtgagatcttgtctgcatttgaattcatggatcatcactgtattgatctggtacttgcataagaaattctgtttgaaataattttcacattctagagagaattaagacacaaaattgttacttgagttgattaggtgctctgagtagcgctcctcagatcatgagttcgactccctatggtaacaaatttcagactgagttaaaaaaatcccctcggctctctcatgatgtctaagttccggttgtggtcacggtcgcagtcattctcacaaggactatggtgccgctgtgtatgggtggaacaggggttcaggggttttctcgacttgtgtgagaagagcttcttaatacaatacctggtggatttgctcaataagcccttaaaacaaacttgactaaggggttccttatccaaagttaatggaatatttcttttttactgttagattggtttttgatagattgcttttgttttggaggctatgcaacatttggaaggagttcaaaatcctttacctgcatcaccgtacaaattttacgttctagttgaaacaacaggaagtgatgaatcatctgacaagacaaaactggaagcttttttgttgcgttcaatggaagatggtttagtagctgatggagttatcgcacaggatatcagccaagcatcaaacttttggaggatccgtgagggtatatcagaagcatccgtcaaagttggagctgtgtacaaatatgacttgtccataactgtagagaagctctatgatattgttgaagaaatgcgctgccgtcttggtgataatgcagaggtattgggctatggccaccttggagatgggaatctgcatttgaacattgtatcaagcaaatatgacgacaatattctcgcacaaattgaaccattcgtctatgagtggacatcagcacaaagaggaagcatcagcgcagagcatggtttggggctaatgaaagctgagaagattcactacagtaaatcacctgaagcagtgagtgtt

SEQ ID NO: 208898 - DNA, 1562 bp, Zea Mays
aaatcggcagtggaccaatcgccgctcaccaaggccacctcatcacccagccacgttacatgaccaatcgcctgcgccgtagcgcgcacacctacgtgtcgagccgtcttcatccctccgaccggaaatcaacggtgcgtttgcttctctcctccggaaggttctcggcttctcgcaggcgcggcgaccggcttcaaccccaactcttcttcttcttcctcgcaaacttcgaacgggacgagaaggaagcggacgcgagaggagactaaccgacctcggatccatcgacgcgtgaagatgtcttcgcccgccgagtactacaaatcacttccacctataagcaaggcatatgggacattgtgtttctttaccaccgtgctagttcagctccagattttgcacccattatttctttacttagattaccccttggtgttcaagaagtttgagatatggaggctattgacaagtttctttttcctggcaccattttccatgaaatttggtattcgccttctgatgatagcaaggtatggtgtcatgttggaaaagggtgcatttgataagcggactgcagatttcttatggatgatgatatttggtgccatctcactattgtccttttatcttccatgggctatgctcttattggatgtgatatttgggtcatcattaatgcctggacttctgggtatcatggttggacatctctactacttctttgcagtgttgcaccctcttgccaccgggaagagctacctcaagactcctaaatgggtacataagattgttgctcgattcaggataggcatgcaagcgaactcacccgtccgtccaccagccaatggcaacagcgggtctggtgtgtttagaggaagaagctataggctcaatcaatagattcacccacctcgtaatgtgatccatggtcggagtggcaatgtagaagcaaagaccagaacgcatagtagggtcaatcaaaattaagggttacccgtcagagattttcttaaaaaacctggacggacggaatggagaacccttccatttgctcatttagttgctaacaatgttcatcgtccatgtttacacatgaatataattctgtaatgacaatttgtgtacacttatgctggacttattgtcgcctctttttagctaggataagaacaaaagatgatgagtttgctcatgctggtgcttttggtccttactgggtggatttgtgcatgctgaacagcagaaggctagatctcgggttattgtcatctggcccaaaaaatgacatcaacaggtttccgtcacacaagatcggagtttgctgataatattgtagagacaatttagactttgcttgatggttgtcatacgtcaatgacgtcgaaagaaaatctgagaacaatacggctgtaaatttcacctttgtgtaattgtatcatagatatcgtcgagaaatcccaaatgcagtaatggctcgttgagcagaacttcaacactttttgcgctaggttctgggcattcatcatcatgttaacatacttcaagaaacaaagatgacaacg

SEQ ID NO: 208899 - DNA, 2412 bp, Zea Mays
aaatcggcagtggaccaatcgccgctcaccaaggccacctcatcacccagccacgttacatgaccaatcgcctgcgccgtagcgcgcacacctacgtgtcgagccgtcttcatccctccgaccggaaatcaacggaagcggacgcgagaggagactaaccgacctcggatccatcgacgcgtgaagatgtcttcgcccgccgagtactacaaatcacttccacctataagcaaggcatatgggacattgtgtttctttaccaccgtgctagttcagctccagattttgcacccattatttctttacttagattaccccttggtgttcaagaagtttgaggttagcttctatttctgttttcccttacgccacgtttggattattggaattgaattccattctaataatagtaatttaggcatatatcaattaagctaattcagttttatgcaaaatatatcggtatattattattagcaagatgtcggagatatttatgtgctatatttttactgtagatgagtgaatcgaggagcgtcctgtaagttacaaagtagatacaaattctactaatacataaaatcatttctcatcctccactccatgaatttgagatagacttatatctgaactttggaaagtagtggaatgtcaaattccaagctaaataggttattttataagcaaattccaattcctataaaatgtagggatccaaacgccccgttatcctaattgcatcacatcgatacagtttaacattattattgcttagttttgactgcacaacattgtaagcctctattgggaaggatgttgtaacatgccacattatctttcctgataattaaggggaatttgtgttgctaaagtttgttttgggaagtcttgcattccacccttctatatttgatgtttttgaatggatcagagtacttatgttttgatttaatatattcggcagtcagtcatgtaattatgccttggatcttgtacattacattttttgcactctgcgccacacattccaatgtttttaaaacgatggaccttgcagatatggaggctattgacaagtttctttttcctggcaccattttccatgaaatttggtattcgccttctgatgatgtaggttaaagttttgctgactactgattataaaatagtgacagttatgaactatctataattgtaaattagctttggttgtttggatttgctttatcgtgttttggcatgcagagcaaggtatggtgtcatgttggaaaagggtgcatttgataagcggactgcagatttcttatggatgatgatatttggtgccatctcactattggtgttgtctattattcccctattcaattcttttttcttaggaatacctatggtcagcatgctcctttatgtctggagccgagagaatccaaatgctcagataaatatatacggcctcgtccaattgaggtccttttatcttccatgggctatgctcttattggatgtgatatttgggtcatcattaatgcctggacttctgggtatcatggttggacatctctactacttctttgcagtgttgcaccctcttgccaccgggaagagctacctcaagactcctaaatgggtacataagattgttgctcgattcaggataggcatgcaagcgaactcacccgtccgtccaccagccaatggcaacagcgggtctggtgtgtttagaggaagaagctataggctcaatcaatagattcacccacctcgtaatgtgatccatggtcggagtggcaatgtagaagcaaagaccagaacgcatagtagggtcaatcaaaattaagggttacccgtcagagattttcttaaaaaacctggacggacggaatggagaacccttccatttgctcatttagttgctaacaatgttcatcgtccatgtttacacatgaatataattctgtaatgacaatttgtgtacacttatgctggacttattgtcgcctctttttagctaggataagaacaaaagatgatgagtttgctcatgctggtgcttttggtccttactgggtggatttgtgcatgctgaacagcagaaggctagatctcgggttattgtcatctggcccaaaaaatgacatcaacaggtttccgtcacacaagatcggagtttgctgataatattgtagagacaatttagactttgcttgatggttgtcatacgtcaatgacgtcgaaagaaaatctgagaacaatacggctgtaaatttcacctttgtgtaattgtatcatagatatcgtcgagaaatcccaaatgcagtaatggctcgttgagcagaacttcaacactttttgcgctaggttctgggcattcatcatcatgttaacatacttcaagaaacaaagatgacaacg

SEQ ID NO: 208900 - DNA, 1651 bp, Zea Mays
aaatcggcagtggaccaatcgccgctcaccaaggccacctcatcacccagccacgttacatgaccaatcgcctgcgccgtagcgcgcacacctacgtgtcgagccgtcttcatccctccgaccggaaatcaacggtgcgtttgcttctctcctccggaaggttctcggcttctcgcaggcgcggcgaccggcttcaaccccaactcttcttcttcttcctcgcaaacttcgaacgggacgagaaggaagcggacgcgagaggagactaaccgacctcggatccatcgacgcgtgaagatgtcttcgcccgccgagtactacaaatcacttccacctataagcaaggcatatgggacattgtgtttctttaccaccgtgctagttcagctccagattttgcacccattatttctttacttagattaccccttggtgttcaagaagtttgagatatggaggctattgacaagtttctttttcctggcaccattttccatgaaatttggtattcgccttctgatgatagcaaggtatggtgtcatgttggaaaagggtgcatttgataagcggactgcagatttcttatggatgatgatatttggtgccatctcactattggaatacctatggtcagcatgctcctttatgtctggagccgagagaatccaaatgctcagataaatatatacggcctcgtccaattgaggtccttttatcttccatgggctatgctcttattggatgtgatatttgggtcatcattaatgcctggacttctgggtatcatggttggacatctctactacttctttgcagtgttgcaccctcttgccaccgggaagagctacctcaagactcctaaatgggtacataagattgttgctcgattcaggataggcatgcaagcgaactcacccgtccgtccaccagccaatggcaacagcgggtctggtgtgtttagaggaagaagctataggctcaatcaatagattcacccacctcgtaatgtgatccatggtcggagtggcaatgtagaagcaaagaccagaacgcatagtagggtcaatcaaaattaagggttacccgtcagagattttcttaaaaaacctggacggacggaatggagaacccttccatttgctcatttagttgctaacaatgttcatcgtccatgtttacacatgaatataattctgtaatgacaatttgtgtacacttatgctggacttattgtcgcctctttttagctaggataagaacaaaagatgatgagtttgctcatgctggtgcttttggtccttactgggtggatttgtgcatgctgaacagcagaaggctagatctcgggttattgtcatctggcccaaaaaatgacatcaacaggtttccgtcacacaagatcggagtttgctgataatattgtagagacaatttagactttgcttgatggttgtcatacgtcaatgacgtcgaaagaaaatctgagaacaatacggctgtaaatttcacctttgtgtaattgtatcatagatatcgtcgagaaatcccaaatgcagtaatggctcgttgagcagaacttcaacactttttgcgctaggttctgggcattcatcatcatgttaacatacttcaagaaacaaagatgacaacg

SEQ ID NO: 208901 - DNA, 1617 bp, Zea Mays
aaatcggcagtggaccaatcgccgctcaccaaggccacctcatcacccagccacgttacatgaccaatcgcctgcgccgtagcgcgcacacctacgtgtcgagccgtcttcatccctccgaccggaaatcaacggtgcgtttgcttctctcctccggaaggttctcggcttctcgcaggcgcggcgaccggcttcaaccccaactcttcttcttcttcctcgcaaacttcgaacgggacgagaaggaagcggacgcgagaggagactaaccgacctcggatccatcgacgcgtgaagatgtcttcgcccgccgagtactacaaatcacttccacctataagcaaggcatatgggacattgtgtttctttaccaccgtgctagttcagctccagattttgcacccattatttctttacttagattaccccttggtgttcaagaagtttgagagcaaggtatggtgtcatgttggaaaagggtgcatttgataagcggactgcagatttcttatggatgatgatatttggtgccatctcactattggtgttgtctattattcccctattcaattcttttttcttaggaatacctatggtcagcatgctcctttatgtctggagccgagagaatccaaatgctcagataaatatatacggcctcgtccaattgaggtccttttatcttccatgggctatgctcttattggatgtgatatttgggtcatcattaatgcctggacttctgggtatcatggttggacatctctactacttctttgcagtgttgcaccctcttgccaccgggaagagctacctcaagactcctaaatgggtacataagattgttgctcgattcaggataggcatgcaagcgaactcacccgtccgtccaccagccaatggcaacagcgggtctggtgtgtttagaggaagaagctataggctcaatcaatagattcacccacctcgtaatgtgatccatggtcggagtggcaatgtagaagcaaagaccagaacgcatagtagggtcaatcaaaattaagggttacccgtcagagattttcttaaaaaacctggacggacggaatggagaacccttccatttgctcatttagttgctaacaatgttcatcgtccatgtttacacatgaatataattctgtaatgacaatttgtgtacacttatgctggacttattgtcgcctctttttagctaggataagaacaaaagatgatgagtttgctcatgctggtgcttttggtccttactgggtggatttgtgcatgctgaacagcagaaggctagatctcgggttattgtcatctggcccaaaaaatgacatcaacaggtttccgtcacacaagatcggagtttgctgataatattgtagagacaatttagactttgcttgatggttgtcatacgtcaatgacgtcgaaagaaaatctgagaacaatacggctgtaaatttcacctttgtgtaattgtatcatagatatcgtcgagaaatcccaaatgcagtaatggctcgttgagcagaacttcaacactttttgcgctaggttctgggcattcatcatcatgttaacatacttcaagaaacaaagatgacaacg

SEQ ID NO: 208902 - DNA, 2453 bp, Zea Mays
cgccgcgtctcttctgtcttcgcttcaagtccccaacgattttttttgtacatctaagatgtacagggcctcgaatttcatacctgatcctaatcaggtgctcctagatgccaaaccattaagatcgttagctccaatgttccctgcccccatgggagtcaatgttaatcagtcaagtacaccaccattggtctgtgtcactccggttggtcaattttcagcagggtttggtgcaggcaccagtgctaatggtgccattgatgccacccctatctctgcatacaaaacaaggtcaaacatatcacttgatggtgatgatgatccttactcgggtaaccaaactgaacggaagcctaggagaggccgacctcccggttctggtcgtgatggctcaaatggtaagttaaagcgccctaagcccacttacaagaattttgttgctggcaaagagcttgcctttctggcagcttcatccgatcccagggatatcgtggaagcagttcacatgacctttgaggcactccggcgaagacatctgcagatggatgaaacacaggacgctagcaggcgtgcagacctgaaggctggtgccatcatgatggcaagtaacatcagggcaaattcgggcaagagggtaggaactgtccctggagttgaaataggagatattttctatttcaggatggagctgtgtgtcattggattgcatgcacctagtatgggaggcattgattacatgactagtaaatttggaaacgatgaggattctgtagccatatgtatcgtttccgcaggaggttatgagaatgatgatgatgacacagatgtgctggtatacagtggtcaagggggaaatagtaggaatactgaggagaggcaagaccagaagcttgagaggggtaacctagctcttgagaggagtttgcataggaagaatgagataagggttgtacgtggcttcaaggatccattttgcctaactgggaaaatttacatatatgatggcctgtacaaaattcatgagtcctggaaggagaaaacaaggtctggtatcaattgcttcaagtacaagctgctgcgtgaacctggacagcgtgatggagctgcattatggaagatgactcagaaatggatagatgatcctgctaccagaggcagggttctactagctgatctgtcatctaaggctgaaactattccagtttctcttgtcaatgaggttgaccatgagaaaggacctgcacatttcacctatactaaccaggtcaaatacgtgaggcctctcagttctatgaaaaagctgcagggctgtggatgccagagtgtttgcctgcccggtgatgccagttgtgcttgtggacaacataatggaggtgatttaccctacagttcattaggattattgtcatgccgcaaaccgatgatctatgaatgtggtgaatcttgcaactgttctacaaattgccggaacagagtgacccaaaaagggcccaggctacattttgaggtcttcaggaccaccaatcgaggctggggtcttcgttgctgggaacctgttcgtgctggttcatttatatgtgagtatgctggtgaggtcattgatgaactcaaagttaatttgaatgacaccgaagatgattacatttttcaaactgtatgccctggtgagaagactttaaaatggaattgtggacctgaactattaggtgaagctagcacatatgtatcggctgatgaatttgagccactgcctatcaagataagtgcaaaaaacatgggaaatgtctcccgtttcatgaaccacagttgctcacccaatgtcttctggcaacctgttcaatatgatcatggagatgatggacacccacatataatgttctttgcactgaaacatattccacccatgacagaactgacttatgactatggtgttgctggagctgaatctagtggttcaggctctcgtagaacgaagaactgcatgtgtggatcacaaaactgccgtggactattttgatgggttaagatccttgctctttgtggttaatcatacaaaccactttcagctagatcctttcttagtctccggatgatatgagtatgactgatgattccaattgctgccatgtgtactgtgaagacagcaagttgttgtcaaactgtagaatttctgttgccctgcacggcatggtggccgttctcccaccatttgttcaaatatttatgggggtgtggattgatgtatttcttctgctaatcttgtccaccagctgcaccggtctgtgtaaacttgttatgatccctgtttgctctggacgcctggttgtttaaccgtgactccttggatctggtcatgtaaattatcctggtttaggattatgttgcttttgactcgaattttctgcctcccttgctcgtttcatgtgatgcatcgtggccgatattttcagcaa

SEQ ID NO: 208903 - DNA, 1430 bp, Zea Mays
cttggactccttgcatatcggtcagtttgccgtcagaacaaggagaaaaaaaggttccggtcttcatcccttccatttccaaaggacgacgctctcaccattcacgaacggcgactgcggatcgatcgtgcgtcgtctcctgcgccggcctcccttccagtcagtttcagatagtgtcttcagtgccatggcgccgctacgccagggagcaagtcggtccgccatggctgggtggggcatgtaccacggactgaaacataaaccaacgcaaatccaatgattgttcaaacaagggacgatacgcatcggacaagaaatggacatcaaatcctccgagaactaaagtttcactcagatcttcgtcgaccttttgagttgcacaatgtctattttgcaacatatgtcgatgtctgagcacagagctcggaagatgtgcgtatcaaccaataggctgtggctgtgcctgcaagatgccctgaaggacgcgcttcttgaaaagtcagaactgcaaaggtgcgcaaaccaaacctctgattgaatgcttccatggctcatagtccctagattcttgtctctatctgatagcccattgtttaccattgtccgttcatgtgtcagctttgctgcatctgatcacaatgatctctcagcttgttgtaacatcgtcttgaccattgtccattgcgctcatatcagctacatacatggttgaaaaacttgttataaaaatgtgccatttcaaacacggattcgattgtaatttgaaaagttaatttatactgtattatctgatgcatcattcactggagaatgggggataacaggattcgggctaagaacatccattcttttcaccgtgtatctctttgcaatctcagccattcgatctactatactatccatagaacatattccaaaggagataagcagccggtgcacgccccttgggagccaaaggaatatatctgtgtgggtatatgtagcttttcatctccaatgatcctggaaagggaattgactacattccaatcttttcccctgcttgttcatgaaattcacgatgtcacatgatttaccgccacttagatctgtcaaaaggctgccatttcttcgttcaggtgtatgggcgtggaaggtttgcatccatcggatgtgttggaccagcatgttgtagttttgattcgtgctgcgtgcatcgagccatcaggagatctctgcatcggaatcatatctgcacaaagccgtcggaaagatgcaggattcccactgatattttgaaccatcatccaggaggctaggtattagattttatatatacgtggtctgtattttgattaattaaatcaaatcaatcttatacctggtctgtgttttgtttaattaaatcaaataaatcttaagtttatattaaatgtgatggtgttattacc

SEQ ID NO: 208904 - DNA, 1754 bp, Zea Mays
cggctcctccctctcggattcccaaacgccaaaatctcgttgtcacgcccacgcaccgcatcgttcgcttcctttcgtcaactccacttctcttctccgcgtcacctcctcttcgccgccgccgacgcttcacccggcagccagccatggatgaggagtacgacgtgatcgtactaggcacggggctcaaggagtgcatcctcagcggtctcctctctgtagacggcctcaaggttttgcatatggacagaaatgactactatggaggagattccacctcactcaaccttaatcagctctggaagaggtttagaggggaagacaagcccccagcacatctaggtgcaagcagagactacaatgtggacatggtgccaaagtttatgatggcaaatgggacattggttcgaaccctcattcacaccgacgtgacaaagtacttgtcattcaaagctgttgatgggagctatgttttcagcaaagggaagatttacaaggtccctgccactgatatggaggctctgaagtcccctttgatgggcctattcgagaagcgcagagcaaggaacttcttcatttatgtccaagattacaatgaagctgatccaaggacacatcaaggattggaccttactagggtgacaactagagaacttatagcaaaatatggtttaagtgatgatacagtggatttcgttggacatgcacttgctcttcatagagatgatcgttatctcgatgaaccggcacttgatacagtgaaaaggatgaaactatatgcagactctcttgcacgctttcaaggaggctcaccttatatctatccactatatgggttgggtgagctaccacagggttttgcacgactgagtgctgtttatggtggtacttacatgttaaacaagccagattgcaaggttgaattcgatatggaggggaaagtgtgtggtgtcacatctgaaggtgaaactgcaaagtgcaagaaggtggtgtgtgatccttcgtatttacaaaacaaggtcaggaagattggtagagttgttcgtgcaattgctatcatgagccacccaatccctaatacaaacgagtcacactcggttcaaattattttgcctcagaagcaacttggacgcagatcagacatagctatgatgccaccacacattttgagacaactgtaacagatgttctgaacatgtatacaatgatcaccggaaagactgtagaccttagtgtggatttgagtgctgctagtgctgccgaagaatactgatttcagtcatagtgtcatgtttatcaaagatcacatcgttggcgacagcacatgacccacattaatgaatggctggaatgcgtttattcggttccagattatatcatgccacatgtactgttctgcgtaatgtctactgggctggcagaactatgcacaatgttgattcaagttgatggatggtggtggttctgttatttactagttagtcgaatggtgcacaacattaaacagtgaccatcatggctgtgtgatgtatcataataactgttcagtaaatttgtgctctgcctgagttctgctcgatgctattgacggcgccctaggtgcttgttccactgtgaatgaaccaagtctgtcacccatcatgttcttcaaagatttttaccaaagatctttttggtctgatgtgtcagaccggctcttgtgatggacgtattgtttgccaaattatgcgattatttttggcagatggagtctg

SEQ ID NO: 208905 - DNA, 1981 bp, Zea Mays
cggctcctccctctcggattcccaaacgccaaaatctcgttgtcacgcccacgcaccgcatcgttcgcttcctttcgtcaactccacttctcttctccgcgtcacctcctcttcgccgccgccgacgcttcacccggcagccagccatggatgaggagtacgacgtgatcgtactaggcacggggctcaaggagtgcatcctcagcggtctcctctctgtagacggcctcaaggttttgcatatggacagaaatgactactatggaggagattccacctcactcaaccttaatcagctctggaagaggtttagaggggaagacaagcccccagcacatctaggtgcaagcagagactacaatgtggacatggtgccaaaggactttctattatcagtttatgatggcaaatgggacattggttcgaaccctcattcacaccgacgtgacaaagtacttgtcattcaaagctgttgatgggagctatgttttcagcaaagggaagatttacaaggtccctgccactgatatggaggctctgaagtcccctttgatgggcctattcgagaagcgcagagcaaggaacttcttcatttatgtccaagattacaatgaagctgatccaaggacacatcaaggattggaccttactagggtgacaactagagaacttatagcaaaatatggtttaagtgatgatacagtggatttcgttggacatgcacttgctcttcatagagatgatcgttatctcgatgaaccggcacttgatacagtgaaaaggatgaaactatatgcagactctcttgcacgctttcaaggaggctcaccttatatctatccactatatgggttgggtgagctaccacagggttttgcacgactgagtgctgtttatggtggtacttacatgttaaacaagccagattgcaaggttgaattcgatatggaggggaaagtgtgtggtgtcacatctgaaggtgaaactgcaaagtgcaagaaggtggtgtgtgatccttcgtatttacaaaacaaggtcaggaagattggtagagttgttcgtgcaattgctatcatgagccacccaatccctaatacaaacgagtcacactcggttcaaattattttgcctcagaagcaacttggacgcagatcagacatgtatgttttctgttgctcatacacgcacaatgttgcaccaagagggaagttcattgcatttgtgtctgcagaagcagagactgataatccccagtctgagctaaagcctggaattgatctacttggttctgtagatgagattttctatgatatctatgacagatatgaaccagtgaatgaaccatctcttgataattgctttgtctcgacaagctatgatgccaccacacattttgagacaactgtaacagatgttctgaacatgtatacaatgatcaccggaaagactgtagaccttagtgtggatttgagtgctgctagtgctgccgaagaatactgatttcagtcatagtgtcatgtttatcaaagatcacatcgttggcgacagcacatgacccacattaatgaatggctggaatgcgtttattcggttccagattatatcatgccacatgtactgttctgcgtaatgtctactgggctggcagaactatgcacaatgttgattcaagttgatggatggtggtggttctgttatttactagttagtcgaatggtgcacaacattaaacagtgaccatcatggctgtgtgatgtatcataataactgttcagtaaatttgtgctctgcctgagttctgctcgatgctattgacggcgccctaggtgcttgttccactgtgaatgaaccaagtctgtcacccatcatgttcttcaaagatttttaccaaagatctttttggtctgatgtgtcagaccggctcttgtgatggacgtattgtttgccaaattatgcgattatttttggcagatggagtctg

SEQ ID NO: 208906 - DNA, 2044 bp, Zea Mays
ccggctcctccctctcggattcccaaacgccaaaatctcgttgtcacgcccacgcaccgcatcgttcgcttcctttcgtcaactccacttctcttctccgcgtcacctcctcttcgccgccgccgacgcttcacccggcagccagccatggatgaggagtacgacgtgatcgtactaggcacggggctcaaggagtgcatcctcagcggtctcctctctgtagacggcctcaaggttttgcatatggacagaaatgactactatggaggagattccacctcactcaaccttaatcagctctggaagaggtttagaggggaagacaagcccccagcacatctaggtgcaagcagagactacaatgtggacatggtgccaaagtttatgatggcaaatgggacattggttcgaaccctcattcacaccgacgtgacaaagtacttgtcattcaaagctgttgatgggagctatgttttcagcaaagggaagatttacaaggtccctgccactgatatggaggctctgaagtcccctttgatgggcctattcgagaagcgcagagcaaggaacttcttcatttatgtccaagattacaatgaagctgatccaaggacacatcaaggattggaccttactagggtgacaactagagaacttatagcggttgtgctcctacaggatccattgtgaacattgctgcctcgcagattatacatgaatagcattttattccatatgcgaaaatatggtttaagtgatgatacagtggatttcgttggacatgcacttgctcttcatagagatgatcgttatctcgatgaaccggcacttgatacagtgaaaaggatgaaactatatgcagactctcttgcacgctttcaaggaggctcaccttatatctatccactatatgggttgggtgagctaccacagggttttgcacgactgagtgctgtttatggtggtacttacatgttaaacaagccagattgcaaggttgaattcgatatggaggggaaagtgtgtggtgtcacatctgaaggtgaaactgcaaagtgcaagaaggtggtgtgtgatccttcgtatttacaaaacaaggtcaggaagattggtagagttgttcgtgcaattgctatcatgagccacccaatccctaatacaaacgagtcacactcggttcaaattattttgcctcagaagcaacttggacgcagatcagacatgtatgttttctgttgctcatacacgcacaatgttgcaccaagagggaagttcattgcatttgtgtctgcagaagcagagactgataatccccagtctgagctaaagcctggaattgatctacttggttctgtagatgagattttctatgatatctatgacagatatgaaccagtgaatgaaccatctcttgataattgctttgtctcgacaagctatgatgccaccacacattttgagacaactgtaacagatgttctgaacatgtatacaatgatcaccggaaagactgtagaccttagtgtggatttgagtgctgctagtgctgccgaagaatactgatttcagtcatagtgtcatgtttatcaaagatcacatcgttggcgacagcacatgacccacattaatgaatggctggaatgcgtttattcggttccagattatatcatgccacatgtactgttctgcgtaatgtctactgggctggcagaactatgcacaatgttgattcaagttgatggatggtggtggttctgttatttactagttagtcgaatggtgcacaacattaaacagtgaccatcatggctgtgtgatgtatcataataactgttcagtaaatttgtgctctgcctgagttctgctcgatgctattgacggcgccctaggtgcttgttccactgtgaatgaaccaagtctgtcacccatcatgttcttcaaagatttttaccaaagatctttttggtctgatgtgtcagaccggctcttgtgatggacgtattgtttgccaaattatgcgattatttttggcagatggagtctg

SEQ ID NO: 208907 - DNA, 977 bp, Zea Mays
aaatcgaggactaaggagagggagaaaggttttgcatatggacagaaatgactactatggaggagattccacctcactcaaccttaatcagctctggaagaggtttagaggggaagacaagcccccagcacatctaggtgcaagcagagactacaatgtggacatggtgccaaagtttatgatggcaaatgggacattggttcgaaccctcattcacaccgacgtgacaaagtacttgtcattcaaagctgttgatgggagctatgttttcagcaaagggaagatttacaaggtccctgccactgatatggaggctctgaagtcccctttgatgggcctattcgagaagcgcagagcaaggaacttcttcatttatgtccaagattacaatgaagctgatccaaggacacatcaaggattggaccttactagggtgacaactagagaacttatagcaaaatatggtttaagtgatgatacagtggatttcgttggacatgcacttgctcttcatagagatgatcgttatctcgatgaaccggcacttgatacagtgaaaaggatgaaactatatgcagactctcttgcacgctttcaaggaggctcaccttatatctatccactatatgggttgggtgagctaccacagggttttgcacgactgagtgctgtttatggtggtacttacatgttaaacaagccagattgcaaggttgaattcgatatggaggggaaagtgtgtggtgtcacatctgaaggtgaaactgcaaagtgcaagaaggtggtgtgtgatccttcgtatttacaaaacaaggtcaggaagattggtagagttgttcgtgcaattgctatcatgagccacccaatccctaatacaaacgagtcacactcggttcaaattattttgcctcagaagcaacttggacgcagatcagacatatcactatgcttgacacagttatgatatttctatcggt

SEQ ID NO: 208908 - DNA, 1189 bp, Zea Mays
cggcatccggctcctccctctcggattcccaaacgccaaaatctcgttgtcacgcccacgcaccgcatcgttcgcttcctttcgtcaactccacttctcttctccgcgtcacctcctcttcgccgccgccgacgcttcacccggcagccagccatggatgaggagtacgacgtgatcgtactaggcacggggctcaaggagtgcatcctcagcggtctcctctctgtagacggcctcaaggttttgcatatggacagaaatgactactatggaggagattccacctcactcaaccttaatcagctctggaagaggtttagaggggaagacaagcccccagcacatctaggtgcaagcagagactacaatgtggacatggtgccaaagtttatgatggcaaatgggacattggttcgaaccctcattcacaccgacgtgacaaagtacttgtcattcaaagctgttgatgggagctatgttttcagcaaagggaagatttacaaggtccctgccactgatatggaggctctgaagtcccctttgatgggcctattcgagaagcgcagagcaaggaacttcttcatttatgtccaagattacaatgaagctgatccaaggacacatcaaggattggaccttactagggtgacaactagagaacttatagcaaaatatggtttaagtgatgatacagtggatttcgttggacatgcacttgctcttcatagagatgatcgttatctcgatgaaccggcacttgatacagtgaaaaggatgaaactatatgcagactctcttgcacgctttcaaggaggctcaccttatatctatccactatatgggttgggtgagctaccacagggttttgcacgactgagtgctgtttatggtggtacttacatgttaaacaagccagattgcaaggttgaattcgatatggaggggaaagtgtgtggtgtcacatctgaaggtgaaactgcaaagtgcaagaaggtggtgtgtgatccttcgtatttacaaaacaaggtcaggaagattggtagagttgttcgtgcaattgctatcatgagccacccaatccctaatacaaacgagtcacactcggttcaaattattttgcctcagaagcaacttggacgcagatcagacatatcactatgcttgacacagttatgatatttctatcggt

SEQ ID NO: 208909 - DNA, 850 bp, Zea Mays
aaaaggactaggatccataagggctggtgtatgtgaacccttttattttatatttttactccatccaggtgctggtacaattgaatcttatagatgatgaagtggctaatattaaaattactgttagaagaagacgatgtgctgttgcagttgattgaaatatgtaatgatggttaattgtcttttgctatattagaattagttgctatattggtaatcctttacatggatataatgttgttgcttcatatttacaatttgtgttcttctgtctagttcgatgttggtaatactacttttctcttggtatcaggtaatgagtgctcttgagaagatgacaaggggagttgcttggggggaccttgatattcttgttgttgatatgcccccaggcactggtgatgctcaactatcaatgtcccaaaggcttcggttatctggtgctttaattgtttcaactcctcaagatattgctcttatcgatgctagaagaggagccaacatgttccgcaaagttcaagttccagtacctcttgaaatcagtatcagaacaggttcagatgaaggcaaccctattgttgtatcatcacccaactcagcatctgcgcaagcgtacgtaaatgttgcggagaaggtgactcaaaggctcaaggagttagcagaggagcgacggatgggcccagaaatcttactttgagaaattcaggctgcttttctcacacctttccctgtttgacgctacggcgccaaaacaatgtactgataagtagattgctgttggaagtaaactttaaatttcgtcactctgtctgaaaatttactcaaacaaacttctgctgcttctatggtc

SEQ ID NO: 208910 - DNA, 1022 bp, Zea Mays
gtcctagccactcacgaacgcgggccgagtcaccgcccgcccacctcctatccacttccccatctgccagccgtccgagtccgaccacctctcgtatcgattctccaagcgccgcgccgcgccgggcgaagaagctcgtctcgtctccatggcggccgcagcggtggccatctccacctccgtgtgcacgtcctcaaggcgtagcacgggctgtccgaacgtgaggccccaggcccgtccgctcctaggcatgccgtcgctgcgccggaggctgcagacggccttggccgcgacgggcaagacgccgggcgaggcggaggagcaggtccccgcgtgggccaagcccggcgcggacgagccgccaccctgggagcgcgagggcggggccgcgcgtggacaggaggcccggcaggtccccttctacgcgtacctgctcgcgtctacgatcaccgccatcgccgcgatcggctccatcttcgagtacaccaaccagcggccggtgttcgggatcgtcggccccgacagcgccctgtacgcgccgctcctgggcttcttcgtcttcaccggcgtttctgtggttcaaggccgtgcagacggcgaacagagaggccgaggagcaagaccgcagagacggattcctgtgagaggctgtgggtgactccggcgcactcgccggtgccgtcgccgtgcagaagaacgcgcaccgcaccaccgtggtgttcgcagcgacgggtgacgggtcatgtactcaagttatgtatgtcagtgtactgtattctagaattggagagagcagatggatttgcggcacaaatcagagaaaatatcataatcatcattcgtatgagtggaaaatatttgtatttatttggttgaaaatggtatagcgtttttttgcacttgaatagttagatagattgcttattgcttctagcatatttttggcactcgtgcgtattgctctttattttaactagaataggaagtgctctctcaggcgttctaccattcatgtaatataa

SEQ ID NO: 208911 - DNA, 1572 bp, Zea Mays
gtttctccgatccgcctccagcgtgcgcaccgcactaccgctcgctgattctttcctcgtcctccgcgtgctgattgatcggtggtctggttcctctcccgaccgcgcgcgcgcgcaatgacgaagcacacggccttcgccggcgcggacggcggcacgaccgccgccgccgccgtcacgctgtgcgcgccgccgagggcgcgcggcgcacgcagggtggccgcggggtccttgccggagctcgttcggcgccacgcggatctcgacgactggatggagaagcacccgtcggcattggccgggttcgagtcggtgctggcggccgccgaggggaagcaggtcgtgatgttcctggactacgacggcacgctgtcgccgatcgtcaaggaccccgacagcgccgtcatgtcggaggagatgcgagacgcggtgagaggcgtggccgagcacttcccgacggcgatcgtgagcgggaggtgtagagacaaggtgttcaacttcgtgaagctggcggagctgtactacgccgggagccacggcatggacatcaagggacccacggcgcagtccaagcacaccaaggcaaaggccgaagctgttctgtgccaaccagcgagcgcgttcctgcccgtcatcgacgaggcgtaccgcgcgctgacggcgaggacggcgccgatccccggcgcgacggtggagaacaacaagttctgcctctccgtccacttccgctgcgtccaggaggagaaatggcgcgctctggaggagcaggtgcggtcggtgctcaaggagtacccggacctccggctcaccaagggcaggaaggtcttggaggtccggccgtccatcaagtgggacaagggcaacgccattcagttcttgctcgagtgtctcggttttgctgacagtaacaatgtcttcccgatatatattggagacgatcgcaccgacgaggacgcgttcaaggtgaaggagttcctgcacatgttggtcaggtccaagcagcggcgggactagtcatggtccaggcagcaggtggtgaaaagctagaagcaaccgaggtcggtcgaggtagtccaagcacatgcatgtccatggtcgacaagcgaagctgtttttgcccatggtctctgtgaatatatcagctgactgtatctgactggatccggattttaactgttgcgctaggaaggaaaagttttttttttggttccttcattagagaagaaaaaagagagtgctgtctccgcgcctcgccgccggcgccgacacgcagccacgggggtggacgcaggcgccgacgggctgcatggtggttttgcctgctataaggtgggctgggccggcgtgtgaggctgtgagccccaggagtccagtacacctcagcctacctacgaaagagaacagaaccgaatacgctcgcacccatgctttgtgcccattggggccttagggcgtgcacaaaggcattaaaaacatcgtgttttactgggtgttagggtgctaattgtaaaaatattggagagccaatctcttggtcaataaacacctcgggcgctcagctcaatgtcgaag

SEQ ID NO: 208912 - DNA, 641 bp, Zea Mays
accgcccactgctactactagacactgtacatgtgaaggagttcctgcacatgttggtcaggtccaagcagcggcgggactagtcatggtccaggcagcaggtggtgaaaagctagaagcaaccgaggtcggtcgaggtagtccaagcacatgcatgtccatggtcgacaagcgaagctgtttttgcccatggtctctgtgaatatatcagctgactgtatctgactggatccggattttaactgttgcgctaggaaggaaaagttttttttttggttccttcattagagaagaaaaaagagagtgctgtctccgcgcctcgccgccggcgccgacacgcagccacgggggtggacgcaggcgccgacgggctgcatggtggttttgcctgctataaggtgggctgggccggcgtgtgaggctgtgagccccaggagtccagtacacctcagcctacctacgaaagagaacagaaccgaatacgctcgcacccatgctttgtgcccattggggccttagggcgtgcacaaaggcattaaaaacatcgtgttttactgggtgttagggtgctaattgtaaaaatattggagagccaatctcttggtcaataaacacctcgggcgctcagctcaatgtcgaag

SEQ ID NO: 208913 - DNA, 2162 bp, Zea Mays
tccggtggcgtttcgacggacccgcgcggcggcataaaaggaaacgaaggaaacggcagaagcgccgagcgcgcgctcctggagtggcagcgaatcttggaaggaaagcagggtcgagaacaggtgtacggacaatggcggaggccgacgagacggcggcgctgcagtacacaccgacgtggatcgtggcggcggtctgctccatcatcgtgctcatctccctcgccgccgagcggggcctccatcacctcggcaagacgctcaagaagaaccatcagaggccgctctacgaggcgctcctcaaggtcaaagaagagctgatgcttctggggttcatctccctgctgctcacggtgttgcaggggacgatccagaggacatgcattcctcccagctggacagactacatgctgccgtgccaaagaccggggcacgacgaggctcctgctgcggccgcctccatggcggcgcgttttgtcgccgccgacatcctcggtgggatcagttgggcacgcgtgctcagcgagggcgagggtgcggcggcccaagccgggctgtgcgagaaggaggggaaagttccactgctgtcccttgaagccctgcatcagctgcacatcttcatatttgttctggctgtctcgcacgtatttttctgtgcttcaactatgttgccaggatgtgcaaagatacgcaaatggaagaagtgggaggaggaaattcagaaaatcgctgcagaaaatggacccaagaaggtgttacctatgcatcaagtttcatttatcagagaacgttacaagggtattggcacagattccaagacgttgtgttggctgcattcatttcgtaagcagttttatggttcggtagctaaatcagactacgccgcaatgcgtcttggttttatcatgactcactgtcgcgggaacctgaaatttgatttccacagatacatgctggcacttgtggatcttcgtggtgatatttctgctgctcaatgtcaacgcctcaacggtttgcacgcatacttttggatagctttccttcccctggttgtaagtgcagactctgaagtcctttatcgtctgaagttctgaacaaatccaattcagttctttcctcaaaatgcgggacactatatatgttactctcaacactggaaatcaaagatatgtgcttgagcgctgtgtaagcattgaggattactaggcgcttaagggcgtttaattacttgtttgcagcttctgctagccgttggcacaaagctggagcacgtaatagcacagctagcctacgacgtagccgagaagcagacggcgatcgagggcgatctggtcgtgacgccatcggaccagcacttctggttcgggcggccgcgtatcatcctgcacctcatccacttcatcctcttccagaacgcgttcgagctcgccttcttcttctggatactgatgacctatggattggagtcctgcttcatggaccatatcggtttcctggtgcccaggctcgttctcggggtcgtcattcagcttctctgcagctacagcacgctgccgctttatgcaattgttacccagatggggagctactacaagaaggagatcttcaacgagcatgtgcagcagggcgtgctgggctgggcacagaaggccaagaagagatcgggggtgaaggaggtcagctcgccgtccgaacccatgcacggcgaagatgcggcctaggattgggatgccgagggtaacgggtagctggcgaggacaatgatgcagcagttgtaaagcacagactagctgtaatttttttgcagatagaaccgtaaaacactgctcgtaatctttactattataaatcacaccagttttgacagtactcaataacaagtagcagcgagtttccatctaagtagaatgaaatattaaagaagatcggcaagagctttgagaggatatttcaaactaaattattcgaagacacgaaaagatctcataaactaggcttcaaaaagttgacaaaacaaattaaattagagtaggaagaagcaacaaaaaatgtggaagagaaagatgagaaagagaagtagtggtttattagttatatttcttaatcatgtaatttttaattttacatttaagttatgtgtttttagcttttttataaattat

SEQ ID NO: 208914 - DNA, 1166 bp, Zea Mays
cttctcgtttacttatttgtgcggtctgtcgggtggggtggattaagaatgtccatgaaggaactactagaagccaagcatccaacggcttggtcagaatttgagaaaggactgattgatgagaatgagctggccaaaaagttcttcaaggatggcagatcgtttgatttgcaaggtctaaaagagtgcatggtgagagcatatgaatacattgatggcgtcgaagatattctttgctgtttgaagaaaaataattatgaaatgcatgcttttacaaattatccagtatggtaccaattaattgaggataagctaaagctctcaaagtatttatcttggacattttgttcttgtagaactggaaagcgcaaaccttcgcccgagttttatcttcaagctgcagatcaactcaacgttgatccagcaagctgcgtttttattgatgataggatgataaacattgaagcagctcttagtgtaggaatggttgggttgcagtttaaaagtgctgaggcactacagaaggacttgtgtgctctgggagttgaattatctcctcttgtttgtgaaggtgaagcacaagtacaataaggtcgtgtgtgccctatcttatcttatgctcaaccaaactacaatacgaatgtacataatgtatggtgcccttgctttgtgagctatgtcaataaattattgtgctaatctgaatcgtctatcaaatataactgatatgttaactgcacatattctctcctatgaagagctttttgttgtcagttagtagaggtgaatttgttttatcacaaacatgtgctgtcaagcctcagccaataggccctgtaacttcaattcaggttaatgttcgtcgagtttgaggagtttttatcaaaagttataattacctatctattttttgcggggagcttaggaaaaactcaacctttgttttgaaagaaacggcaaagcaattttaaaacttaaaatcaaagtgtatgtatgatttagaaatcagagctgctattctgattaagcaaacacatttacttgattctattgatctggctttgatccttatataatacatatacgtggtgacattaaaagatgtctagtcatctagtgtatttacgggcttgattctgtttcttacatccctttcctctgttcct

SEQ ID NO: 208915 - DNA, 2119 bp, Zea Mays
tggatccacttccctccccacgtgttttttgattgttcctccccatgttcctcgcgttcccgtgaggccgtgacgcccccctcggcctcgcctcgccatcgctcgcggcatcgccgcctgccccctttcccccacgcgaataaagcgccggaagcgcgccccccaagcaaagtcctccggcgctcaggatcgggagccaccccctagggttagggctccgttttgcctcgttccggcgtcgaccgatgcgcggcgcatggcgacggtgaactgcctctacgtcgcggccgcctccacggcggtaagcaccgctgctctgcagtggtgggcgtcctcgctcctcgacggcgacgctggggccggcggggatggagactggcttggagccgtgctgcggtcaagggtcaccgtcgcgctcctggcgaatctggcggcccacgtgttcgtcgttgtcatcctcgcgctcaagactatattttttgttcagctaacttctgtagagaccagaaaagtgttggagcacatcattaactatgtacttcacaagggaacttttctcccgctggctgtgcctccaacttctcagcaaattatcctttggtcaacttggttggtcattctttgttcactgaagatgtttcaatcattggccagagaacgtctagagcagctcaatgcttctccctcagcgactccttcaaaatattttcgtgtgtactctgcattgcttctggttttatcagctgatctactttggatgtggctcagtgtagggttctgcagatcctgtaattccaagttgttttggctcctgttctttgagccacttagtattgcctttgatacgctgcagttatttgacatctggcaacgacatctaatggaaagtggtgcggactttcttgatttccagaaatcttataagcaagcagcaggatctttttctgaatggaggggcaagcttactagggactttggttttgctattgatttgataagcatgttgatgtcatttggtcattactcgatgatcttttggcttcgtggtatggcgtttcatctggttgatgcagttctcttatggaacttgcgtgctcttatagtttcctttttgaagaggattaaaacttacatcaaattacggaaggcacttagttcactcgacggagcacttccagatgctacttatgatgaaatttgtgcatatgatgatgagtgtgccatctgcaggggaccgatgggtcgagctaaaaagttgtcctgcaaccatctatttcatctagcttgtttacgatcatggttggatcaaggattaatggaaggttactcctgcccaacttgtcggagaccgctcgtattgtcatctgaagggcaaacaaggtctccgattgtggaggcagcaaatgttcagcgaatcgcagaacagcttactatggggatgaatcagcagagagtttctggtaatgaacatcctgttgaacagcagaacccttcagatgctgtttggaggggtgctggtctggatgctagctggattccaccgtggtcaagccctgtgatagataatcccagttcctctagtgcagtgaggtcagtaggtctttctggagttcagatgatgatgaggcagttggcttctgtgaccgacagttatgggcatgctgatggtacctggaacctatggcccgagcccatggcagggtcctctcttgttccatccacttcctcgatggtgcctggtagtgcatctgcttccggattgcggctccgtggtagtgcaggcacaggcaatggaagtctttcagaggtactcactatggtagatagggtgcgggaagttctacctcatattcctgacgagctaattatagaggatttgatgaggacaaacaacataaacgcgactgtgaataatcttctgctgatgcaatagtagatacgtcaatacaacatataagtatgacgtttactggctgtaaaagcttataagaaaagtatgtgtatagttaaaggcgagcctgggtgtaacaacactcttcgatcctgtaataaaatccttttctctctctttattttttaacttgacaataacctgttgcttaaaatagtttttttctat

SEQ ID NO: 208916 - DNA, 2215 bp, Zea Mays
tggatccacttccctccccacgtgttttttgattgttcctccccatgttcctcgcgttcccgtgaggccgtgacgcccccctcggcctcgcctcgccatcgctcgcggcatcgccgcctgccccctttcccccacgcgaataaagcgccggaagcgcgccccccaagcaaagtcctccggcgctcaggatcgggagccaccccctagggttagggctccgttttgcctcgttccggcgtcgaccgatgcgcggcgcatggcgacggtgaactgcctctacgtcgcggccgcctccacggcggtaagcaccgctgctctgcagtggtgggcgtcctcgctcctcgacggcgacgctggggccggcggggatggagactggcttggagccgtgctgcggtcaagggtcaccgtcgcgctcctggcgaatctggcggcccacgtgttcgtcgttgtcatcctcgcgctcaagactatattttttgttcagctaacttctgtagagaccagaaaagtgttggagcacatcattaactatgtacttcacaagggaacttttctcccgctggctgtgcctccaacttctcagcaaattatcctttggtcaacttggttggtcattctttgttcactgaagatgtttcaatcattggccagagaacgtctagagcagctcaatgcttctccctcagcgactccttcaaaatattttcgtgtgtactctgcattgcttctggttttatcagctgatctactttggatgtggctcagtgtagggttctgcagatcctgtaattccaagttgttttggctcctgttctttgagccacttagtattgcctttgatacgctgcagtctatcatggtgcatgggtttcagttatttgacatctggcaacgacatctaatggaaagtggtgcggactttcttgatttccagaaatcttataagcaagcagcaggatctttttctgaatggaggggcaagcttactagggactttggttttgctattgatttgataagcatgttgatgtcatttggtcattactcgatgatcttttggcttcgtggtatggcgtttcatctggttgatgcagttctcttatggaacttgcgtgctcttatagtttcctttttgaagaggattaaaacttacatcaaattacggaaggcacttagttcactcgacggagcacttccagatgctacttatgatgaaatttgtgcatatgatgatgagtgtgccatctgcaggggaccgatgggtcgagctaaaaagttgtcctgcaaccatctatttcatctagcttgtttacgatcatggttggatcaaggattaatggaaggttactcctgcccaacttgtcggagaccgctcgtattgtcatctgaagggcaaacaaggtctccgattgtggaggcagcaaatgttcagcgaatcgcagaacagcttactatggggatgaatcagcagagagtttctggtaatgaacatcctgttgaacagcagaacccttcagatgctgtttggaggggtgctggtctggatgctagctggattccaccgtggtcaagccctgtgatagataatcccagttcctctagtgcagtgaggtcagtaggtctttctggagttcagatgatgatgaggcagttggcttctgtgaccgacagttatgggcatgctgatggtacctggaacctatggcccgagcccatggcagggtcctctcttgttccatccacttcctcgatggtgcctggtagtgcatctgcttccggattgcggctccgtggtagtgcaggcacaggcaatggaagtctttcagaggtactcactatggtagatagggtgcgggaagttctacctcatattcctgacgagctaattatagaggatttgatgaggacaaacaacataaacgcgactgtgaataatcttctgctgatgcaatagtagatacgtcaatacaacatataagtatgacgtttactggctgtaaaagcttataagaaaagtatgtgtatagttaaaggcgagcctgggtgtaacaacactcttcgatcctgtaataaaatccttttctctctctttatttttgtccgcagggatttgtttgtatagtaaccatagctgtataattatcatactcggtatgctataggttagtgtatttagaaaagatcggaataaaatttgttttgggactaaata

SEQ ID NO: 208917 - DNA, 2420 bp, Zea Mays
cctccacggaccacggccaagcggcagcagctgcagctctgagccccgggccctgcccctgcccctgccgcttcctcccctcagcagcatcaggggacgcggacggaggaggaggagaaggcggcgtcatcaggatcaggactgccgctgtcgccaggtccgccatggcatggccatcaaaatgtaaatggttgcccttacagaacagtgggaggtgtctttcgtatactcatgtttgcaaataccacaagatttggaaggacacgaagccatttatttctgcaaaagatgccctgaagaaagaaccaattagcgatgtgattgctttaaaggattccatgaagtactttgatgctgagttcttcaatgattcaaaactacgtgagatggaagatggtgcaaaggaattcaatgtacccgcattcagagaaaatcggaaattggttgcgacggagaatggtgggttgcacaacccttctgttttactcttcaaatcatcatggagtagtggcagtatgacaagtgagactagaagtttcgagtaccctcgtgcgtcttctgtacatcgtccaactaatgatgaagatattgcatttatgtcggtaatcgagcttggagagcttattaggacaaagcaaataacatcacgtgaacttacagatatatttctgaggagattaaagaggtacaatcctgttctagaagctgttattacatatactgaagatttagcatacaaacaagccaaggaggcagatgacttgctggcacaaggaaaatatcttggtcctttgcatggcattccatatggcctcaaagatataattgcggtaccacactataagaccacttggggctcaaggacgtttaaaaaccaagtccttgatagtgaagcttatgtgtacagaagattgaagtccgctggagcagtcctggtagcaaagcttgtcacgggctcacttgcctatgatgacatatggtttgggggaaggacacgaaacccctggaacatcgaggaattctctactggctcatcggcaggtccagcggctagcacctctgcaggaatggttccatttgcaattggttcagaaactgcaggatccatagcatacccagccgctagatgtggagtaactgcattgcgcccaacatttggaacagttgcacgaaccgatgtcatgagcatttctgagagtttggataagcttggtcctttctgtagaagcgcagtagattgtgctgttgtattagacacaattcgcggaacggatgccggtgatccatcatcgcgtgaggttgctttgggtgatccatttcatgttgacatcaccaaactcactgtaggctacctcgatgacgctgagatggaggttgtcgatgttctttcctctaaaggtgtcaagctggtccccttcaagctgaactacactgtggaatcagtccagtccatcctgaacataacgatggacactgatatgcttgcgcacttcgataactggcagcgggaaggacatgatgatgactatgaggcgcaagaccagtggccggtagagcttcgtcgtgcacggttaatcccagcggtagattatatacaggcgcagcgagcacggggcaagttgatcagagaaatcaaagatagcttcactgttgatgcgtttgttggcaacgtgactgactgggagcgtgtctgtctcgggaaccttgttgggatgcctgtggtcgtggtgccgacaggcttgaagagcatcgagaacccgcctaaaggcggtacgaagagaagaacaacagtgacgacaggcatctacgctcctcctgaccacgaccatattgctctggcgctggcaatggcgtaccagtccgtcactgatcacaacaaacagcggccgccgatcgatgatctggggccgaatgatgtcatacaaagatagttcaacctgctcatggaccgcgatgatccggtgatggtagcacgagggtcgttatggttatggaagctgaagttgaagacgatcagtgagccagaatggctggccacctggcagaagacatcagctgtggaagtatcaagtaccaatccacatatgggcttcttcatcagctcaaataactcagcactttttttttctgaagcaggcagcattgtatcaccttaacatacgttacaaaggaggttctggatttcatctggggcctcatcagaccaaaccgagccaaagaactgatcagctagcctagtcattacatgagctgcaacttctctgggagggtatttggtttctatggactagtccatctattttattctaaaaatttttattctattttagttaataaattgtaaaatacgatgagttttcgtatttaataatttagggactaaaaccgaataaataaaagaattaaaaattactctctag

SEQ ID NO: 208918 - DNA, 960 bp, Zea Mays
caaacttcttgactactacgaaacatcgaactgttctcacagatcactctcaaactttttcccattttctctcaaaaagaagaaacagcgaaatttgtaattctcagtgacgccaaccctgactccgtttgacgcggctccgatggtcaccgccggcgacctcgccgctgccgccaactcctgagacctcgtcgcgcctaggccctaggaggtgagatggtatattctagcatggagggctcgatgaaccctccggcaaacaacgatgctctacatggtatcccagatggttatagccttgcaatttcagattaccttggtgctgatatgtcatgctaccaatcaatacaaacagaacttcaaggtgggatgaacctaaatggttcagagggcataactgttatggatgattcaatatacagttctcttggtgacataggttttatggaggtttgggaccagcaacctcaagactatgagaagttcttctgaggcgctcgtatccctgaaactgttctggagttcgactgataaatagaccagttacacttgcataggcagaaataaaacacctgatcgtgcctataaactggaaacccgtatacttgtgcgccagcagcagctctttcacttgtatgttccaggccatgcatattggggcttttgtacgggtgcatcctacgcgaagcactttcccttctgtaataccagggtctgcgtcggcagctcaaagagcagatattcgtatgaaacagttctttgactccctgccttgcccgacagcggtgtaaaaagttgtcgtatagctgccacgtaattcaaaggaattgacctaagcacgacatagtattcgtctgaaacatgtcttcatttataaacagttctatattccgaaatagaattgtttatttgttatatctatgttcttgttgcgctgtaagttgtgtggtttgtggcttc

SEQ ID NO: 208919 - DNA, 548 bp, Zea Mays
tcttgattctttaatgctgcttacatgtgaggttatgaaaaacatgggcgagatattgaaagctagtggtgctaactattcttcagttgtgaagacaacgatcatgatttcaataaagtaaacgagatctatggcaaatatttcccggtgccagcacctgcacgatcaacctaccaagtggcggcgctgccactgaatgcccggattgagattgagtgcatcgctgctctctaatcagatcatccaaccactcattaaatcatcaataagcacccaggaatttgtggtagaggtacctgtaccagttcagtgtctgaaaactgcgggtaacaaacctttgtgtcccggataagtgatgtgtgtgtgtgtgtgagtgaacagtgcatctagtaggagaattgttgcgtggtttgttacttggattcttcgctctttagacaagaagtaccatggcatcaacatcaatagcctactgttttcttcccaataagaatgaattggcttccccaacagatcatggatatagtcgtgcgtaatattgttttata

SEQ ID NO: 208920 - DNA, 2658 bp, Zea Mays
cggatggaagcaccggaactgacggccccgccgggcgccggtcactgagagtggcaaagtagcaattttttcgactgcgagacgacaccgggaagagagaggagccgcccgccgccgcctcaggcctcagtccagacccctcgtctcactcgctccgccgctggcgattggtgaagagagctccgaggtgggctctactcgtcgcggttctcgcgagggtgtggtatggcacgaaacttgactgagaacaggaccagaaatacactaattgtgattgtggtttttggcctctgttccttcttctatctcttgggtgcttggcagaaaagtggttctggaggaggagacagaatacagaattgggtcaatgagcagaccaaatgtgcacaacttccaaatctgagttttgagacccatcatagtgcatccaaccttccaaatgatactggtagttccaaaatcgaacctttcaaaccatgtgatgagcagtacactgattacactccttgtgaggagcaaaagcgtgcgatgaccttccctagagataacatgatctatcgggagaggcattgtccaccggataaggagaagctttattgcctgatcccagcaccaaagggttatgttgctccttttcgatggccaaagggccgtgattttgttccttatgccaatgtaccacacaagagccttactgttgagaaggctatccagaactgggtgcactatgagggcaatgttttcaggtttcctggtggtggaacacagtttcctcagggtgcagataaatatatagagcagcttgcttctgtcatcccgatagctgaagggaaagtgagaactgcactggatactggttgtggggttgcgagtttgggtgcttacctgttgaataaaaatgttttgaccatgtcatttgcaccacgggataatcatgaggcacaagtacagtttgcattggagagaggtgtccctgcatatattggtgtcctcggatcaataaagctgccatttccatctcgtgtttttgacatggcccattgctcgagatgtttaattccatggagtggaaatgatggtatgtacatgatggaagttgacagagtactaaggcctggtggattttgggtgctatcaggcccacccattggctggaagattcactataaagggtggcaacgttcaaaggaagatcttcggaatgagcaaagaaaaatagaacacttcgcacaacttctttgttggaagaaggtatctgagaaggatggtatcgccatatggacaaagaggttaaatgacaagtcttgctccatgaaacaagataatccaaatggtggtaaatgtgatttgacaagcgacagtgatgtgtggtacaagaagatggaagtttgtatgacccccctacccgaggttaatagtgtagatgaggttgccggtggtcaactagagccttttcccaagaggctttatgcagtacctcctcgtataaccgatggctctgtgcctggtttctcagttgagtcatatgaagaggacaataacctttggcggaaacatgttaaggcttacaagaaaatcaataacttgcttgatactggaagatatcgcaatataatggatatgaatgctggtctcggtagctttgctgctgcactagaatctccaaaagtatgggtcatgaatgtcattccaacaattgcaaatacttccactttaggtgtaatctacgagcgtggattaataggaatgtatcatgactggtgtgaaggattttctacttatccaaggacatatgacctcatacattctaatgatatcttcagcttgtaccaaaacaagtgccaatttgaagatatactcctggaaatggacagaatcttacgcccagagggtgcaatcataattcgtgacaaggttgatgttcttgtaaaagtggagaagatagccaatgccatgaggtggaagacaagattggctgatcatgagggtggccctcatgtacctgagaagatactcttcgcggtcaagcaatactggactgctgaaaaaacaagcagctaacgttgttcattttcatttttttctccagtcacagctaacttgccccctggctgtgtttattggaaaaatttctgtcgattatacagcccatgtttgttactgaaaatataaaacaacccccttgagggggagtaaattatgtgggatttagctgtgaacttgggatttgattattccactggtgccgagacgcagaagacatgccaaaaggatcaattggcattgtactagtgactcatatctgatcagacagatgcaactgcttatagttggaaccctgcagcagtccgtcaggaagttatgaactagcagtgaacttatagttttgtataggactcctttgcccctccactcactttttttttgttgtatctcagaatttcatcaactggattgtatctcaacccataaggtcttcctatcctattttattttaattgacaaacattttgggcccaaggatgcaacttgtgaccttggttactaatgagatgataatgttttcttttttgttgtggatgtaagttggttactaatgagatgatatgttttctttttatgtaagttggagcgaaaggggctgagttggttaggtga

SEQ ID NO: 208921 - DNA, 2660 bp, Zea Mays
ggcaaagtagcaattttttcgactgcgagacgacaccgggaagagagaggagccgcccgccgccgcctcaggcctcagtccagacccctcgtctcactcgctccgccgctggcgattggtgaagagagctccgaggtgggctctactcgtcgcggttctcgcgaggtccgccgatccgcgccccgctctggatctctggctgatttgttgttctgcaagggtgtggtatggcacgaaacttgactgagaacaggaccagaaatacactaattgtgattgtggtttttggcctctgttccttcttctatctcttgggtgcttggcagaaaagtggttctggaggaggagacagaatacagaattgggtcaatgagcagaccaaatgtgcacaacttccaaatctgagttttgagacccatcatagtgcatccaaccttccaaatgatactggtagttccaaaatcgaacctttcaaaccatgtgatgagcagtacactgattacactccttgtgaggagcaaaagcgtgcgatgaccttccctagagataacatgatctatcgggagaggcattgtccaccggataaggagaagctttattgcctgatcccagcaccaaagggttatgttgctccttttcgatggccaaagggccgtgattttgttccttatgccaatgtaccacacaagagccttactgttgagaaggctatccagaactgggtgcactatgagggcaatgttttcaggtttcctggtggtggaacacagtttcctcagggtgcagataaatatatagagcagcttgcttctgtcatcccgatagctgaagggaaagtgagaactgcactggatactggttgtggggttgcgagtttgggtgcttacctgttgaataaaaatgttttgaccatgtcatttgcaccacgggataatcatgaggcacaagtacagtttgcattggagagaggtgtccctgcatatattggtgtcctcggatcaataaagctgccatttccatctcgtgtttttgacatggcccattgctcgagatgtttaattccatggagtggaaatgatggtatgtacatgatggaagttgacagagtactaaggcctggtggattttgggtgctatcaggcccacccattggctggaagattcactataaagggtggcaacgttcaaaggaagatcttcggaatgagcaaagaaaaatagaacacttcgcacaacttctttgttggaagaaggtatctgagaaggatggtatcgccatatggacaaagaggttaaatgacaagtcttgctccatgaaacaagataatccaaatggtggtaaatgtgatttgacaagcgacagtgatgtgtggtacaagaagatggaagtttgtatgacccccctacccgaggttaatagtgtagatgaggttgccggtggtcaactagagccttttcccaagaggctttatgcagtacctcctcgtataaccgatggctctgtgcctggtttctcagttgagtcatatgaagaggacaataacctttggcggaaacatgttaaggcttacaagaaaatcaataacttgcttgatactggaagatatcgcaatataatggatatgaatgctggtctcggtagctttgctgctgcactagaatctccaaaagtatgggtcatgaatgtcattccaacaattgcaaatacttccactttaggtgtaatctacgagcgtggattaataggaatgtatcatgactggtgtgaaggattttctacttatccaaggacatatgacctcatacattctaatgatatcttcagcttgtaccaaaacaagtgccaatttgaagatatactcctggaaatggacagaatcttacgcccagagggtgcaatcataattcgtgacaaggttgatgttcttgtaaaagtggagaagatagccaatgccatgaggtggaagacaagattggctgatcatgagggtggccctcatgtacctgagaagatactcttcgcggtcaagcaatactggactgctgaaaaaacaagcagctaacgttgttcattttcatttttttctccagtcacagctaacttgccccctggctgtgtttattggaaaaatttctgtcgattatacagcccatgtttgttactgaaaatataaaacaacccccttgagggggagtaaattatgtgggatttagctgtgaacttgggatttgattattccactggtgccgagacgcagaagacatgccaaaaggatcaattggcattgtactagtgactcatatctgatcagacagatgcaactgcttatagttggaaccctgcagcagtccgtcaggaagttatgaactagcagtgaacttatagttttgtataggactcctttgcccctccactcactttttttttgttgtatctcagaatttcatcaactggattgtatctcaacccataaggtcttcctatcctattttattttaattgacaaacattttgggcccaaggatgcaacttgtgaccttggttactaatgagatgataatgttttcttttttgttgtggatgtaagttggttactaatgagatgatatgttttctttttatgtaagttggagcgaaaggggctgagttggttaggtga

SEQ ID NO: 208922 - DNA, 1444 bp, Zea Mays
ctatcgtctcgtctcctatcgccacccctccgtggctccgtcatcgcgcacggctaccaacccctcctccgcccgccaataagtaccgccccgctcgccacctccatctcagaggagagagtcgctcagcactgcacgactcctcccccatctaccactacctgtctacctacccagcccatcgatcacccctcgcaacgcaatggcgctggccaccaactccgccgctgccgcagcagctgccgtatccggcggcgcggcatcccagccgcaccgcgcggccacgttcctcccgctgaagaggcgcaccatctccgccatccacgccgccgacccgtctaagaacaacgggcccgccgtccccgcggccgccgccgctaagtcatctgcctctgcggtggccacgccggagaagaatccggcggcgccggtaaagtgggcggtcgacagctggaagtcgaagaaggcactgcagctcccagagtacccgaaccaggaggagctggacacggtgctcaagaccatcgagacgttcccgccggtggtgttcgccggagaggcgcgccaccttgaggagcgcatggccgaggccgccatgggccgcgccttcatcctccagggcggcgactgcgccgagagcttcaaggagttccacgccaacaacatccgtgacaccttccgtatcctgctccagatgggcgccgtgctcatgttcggtggtcaggtgccggtcgtcaaggtggggaggatggctggccagtttgccaagccaaggtccgaaccgttggaggagagggacggcgtcaagctgccaagctacaggggcgacaacgtcaacggcgacgacttcaccgagaagagccgcgtgccagacccgcagaggatgatccgcgcctactcgcagtcggtggcgacgctcaacctgctccgcgcgttggcgaccggagggtacgctgccatgcagcgcgtcacacagtggaacctcgatttcatggatcacagcgagcaaggtgataggtaccgtgaattggcccatagggtggatgaggctcttgggttcatgactgcagcagggcttacagttgaccacccgataatgacgactactgacttctggacctcgcacgagtgccttctcttaccctacgagcagtctcttacccgtaaagactccaccagtggccttttctacgattgttcggcccacatgttgtgggttggtgagcgcactcgtcaactcgatggagcgcatgttgaattccttcgtggtgttgccaatcctcttggcataaaggtgagcgacaaaatgaaccccagtgacttggtgaagctgattgagattctgaacccttcaaacaaacctggaaggatcaccataattacaaggatgggggcagagaacatgagagtgaagttgcctcatctcatccgtgctgccgtcgtc

SEQ ID NO: 208923 - DNA, 2260 bp, Zea Mays
atcgtctcgtctcctatcgccacccctccgtggctccgtcatcgcgcacggctaccaacccctcctccgcccgccaataagtaccgccccgctcgccacctccatctcagaggagagagtcgctcagcactgcacgactcctcccccatctaccactacctgtctacctacccagcccatcgatcacccctcgcaacgcaatggcgctggccaccaactccgccgctgccgcagcagctgccgtatccggcggcgcggcatcccagccgcaccgcgcggccacgttcctcccgctgaagaggcgcaccatctccgccatccacgccgccgacccgtctaagaacaacgggcccgccgtccccgcggccgccgccgctaagtcatctgcctctgcggtggccacgccggagaagaatccggcggcgccggtaaagtgggcggtcgacagctggaagtcgaagaaggcactgcagctcccagagtacccgaaccaggaggagctggacacggtgctcaagaccatcgagacgttcccgccggtggtgttcgccggagaggcgcgccaccttgaggagcgcatggccgaggccgccatgggccgcgccttcatcctccagggcggcgactgcgccgagagcttcaaggagttccacgccaacaacatccgtgacaccttccgtatcctgctccagatgggcgccgtgctcatgttcggtggtcaggtgccggtcgtcaaggtggggaggatggctggccagtttgccaagccaaggtccgaaccgttggaggagagggacggcgtcaagctgccaagctacaggggcgacaacgtcaacggcgacgacttcaccgagaagagccgcgtgccagacccgcagaggatgatccgcgcctactcgcagtcggtggcgacgctcaacctgctccgcgcgttggcgaccggagggtacgctgccatgcagcgcgtcacacagtggaacctcgatttcatggatcacagcgagcaaggtgataggtaccgtgaattggcccatagggtggatgaggctcttgggttcatgactgcagcagggcttacagttgaccacccgataatgacgactactgacttctggacctcgcacgagtgccttctcttaccctacgagcagtctcttacccgtaaagactccaccagtggccttttctacgattgttcggcccacatgttgtgggttggtgagcgcactcgtcaactcgatggagcgcatgttgaattccttcgtggtgttgccaatcctcttggcataaaggtgagcgacaaaatgaaccccagtgacttggtgaagctgattgagattctgaacccttcaaacaaacctggaaggatcaccataattacaaggatgggggcagagaacatgagagtgaagttgcctcatctcatccgtgctgttcgcaatgctggattaattgtcacatggattactgatcctatgcatggaaacaccatcaaggccccttgtggcctgaagactcgtccattcgactcaattctggctgaagtgcgcgcattcttcgacgtgcatgatcaagaaggaagtcacccaggaggcatccaccttgaaatgactgggcagaacgtgaccgagtgcattggtggatcacggactgtgaccttcgatgacctgagcgaccgctaccacacccactgtgacccaaggctgaacgcctcccagtccctggagctcgccttcatcattgcagagaggctcaggaagaggaggatgcggtcggggctcaacaacagcctgcctctgccaccactggctttctaagtagccgaagctgaacagagaaggataatctattacaggaaacttcgtcttcaagatacaagctcttctcctttatgacgaaggcatacaagataaagacagatcaaagaggataaaagtaaacgctgaagctatcaccagatagacagcttcggctcgcaatgaagatgatgaataatgatgatgatcgaaagaggaaaagactatttagtccttaataaattgtattacgatcatgtgtaaatgttgagagcataaatgtacttttgtccgggctgcgtcccgtgcctataaatagatgaacaataacactgtactgttcacgctgaattgtattcactttctcgcatccacacatttgagcaagccgaatgtattaatgtaatattaacattattgatattcatttatgttctatggaattgaagaataagtgagctaat

SEQ ID NO: 208924 - DNA, 1935 bp, Zea Mays
ccatctcctatcgtctcgtctcctatcgccacccctccgtggctccgtcatcgcgcacggctaccaacccctcctccgcccgccaataagtaccgccccgctcgccacctccatctcagaggagagagtcgctcagcactgcacgactcctcccccatctaccactacctgtctacctacccagcccatcgatcacccctcgcaacgcaatggcgctggccaccaactccgccgctgccgcagcagctgccgtatccggcggcgcggcatcccagccgcaccgcgcggccacgttcctcccgctgaagaggcgcaccatctccgccatccacgccgccgacccgtctaagaacaacgggcccgccgtccccgcggccgccgccgctaagtcatctgcctctgcggtggccacgccggagaagaatccggcggcgccggtaaagtgggcggtcgacagctggaagtcgaagaaggcactgcagctcccagagtacccgaaccaggaggagctggacacggtgctcaagaccatcgagacgttcccgccggtggtgttcgccggagaggcgcgccaccttgaggagcgcatggccgaggccgccatgggccgcgccttcatcctccagggcggcgactgcgccgagagcttcaaggagttccacgccaacaacatccgtgacaccttccgtatcctgctccagatgggcgccgtgctcatgttcggtggtcaggtgccggtcgtcaaggtggggaggatggctggccagtttgccaagccaaggtccgaaccgttggaggagagggacggcgtcaagctgccaagctacaggggcgacaacgtcaacggcgacgacttcaccgagaagagccgcgtgccagacccgcagaggatgatccgcgcctactcgcagtcggtggcgacgctcaacctgctccgcgcgttggcgaccggagggtacgctgccatgcagcgcgtcacacagtggaacctcgatttcatggatcacagcgagcaaggtgataggtaccgtgaattggcccatagggtggatgaggctcttgggttcatgactgcagcagggcttacagttgaccacccgataatgacgactactgacttctggacctcgcacgagtgccttctcttaccctacgagcagtctcttacccgtaaagactcgaaagattacgcctgtttatttgttgatgcttggtgtggaggcctggtgggtgctcttggcacaagttacatgctggggagctataggagggtacctgttgcgttgtggaagacagtagctagtattatgtgttgtaattgtatgccttcgtttcatgttctgggtgcgtgacttgtcgactttgctgcttctggggttctgaccttggtaaggagagaataaagagataatatgagtgcgagatgcttgctgaactggtgctcagtaaattgatcccttgattgaatggttctgttctgttatcttttgccgcacttctccgaaaaagtttcaggataatctattacaggaaacttcgtcttcaagatacaagctcttctcctttatgacgaaggcatacaagataaagacagatcaaagaggataaaagtaaacgctgaagctatcaccagatagacagcttcggctcgcaatgaagatgatgaataatgatgatgatcgaaagaggaaaagactatttagtccttaataaattgtattacgatcatgtgtaaatgttgagagcataaatgtacttttgtccgggctgcgtcccgtgcctataaatagatgaacaataacactgtactgttcacgctgaattgtattcactttctcgcatccacacatttgagcaagccgaatgtattaatgtaatattaacattattgatattcatttatgttctatggaattgaagaataagtgagctaat

SEQ ID NO: 208925 - DNA, 2658 bp, Zea Mays
aactacccttccccctccgttccacttccaccatctcctatcgtctcgtctcctatcgccacccctccgtggctccgtcatcgcgcacggctaccaacccctcctccgcccgccaataagtaccgccccgctcgccacctccatctcagaggagagagtcgctcagcactgcacgactcctcccccatctaccactacctgtctacctacccagcccatcgatcacccctcgcaacgcaatggcgctggccaccaactccgccgctgccgcagcagctgccgtatccggcggcgcggcatcccagccgcaccgcgcggccacgttcctcccgctgaagaggcgcaccatctccgccatccacgccgccgacccgtctaagaacaacgggcccgccgtccccgcggccgccgccgctaagtcatctgcctctgcggtggccacgccggagaagaatccggcggcgccggtaaagtgggcggtcgacagctggaagtcgaagaaggcactgcagctcccagagtacccgaaccaggaggagctggacacggtgctcaagaccatcgagacgttcccgccggtggtgttcgccggagaggcgcgccaccttgaggagcgcatggccgaggccgccatgggccgcgccttcatcctccagggcggcgactgcgccgagagcttcaaggagttccacgccaacaacatccgtgacaccttccgtatcctgctccagatgggcgccgtgctcatgttcggtggtcaggtgccggtcgtcaaggtggggaggatggctggccagtttgccaagccaaggtccgaaccgttggaggagagggacggcgtcaagctgccaagctacaggggcgacaacgtcaacggcgacgacttcaccgagaagagccgcgtgccagacccgcagaggatgatccgcgcctactcgcagtcggtggcgacgctcaacctgctccgcgcgttggcgaccggagggtacgctgccatgcagcgcgtcacacagtggaacctcgatttcatggatcacagcgagcaaggtgataggtaccgtgaattggcccatagggtggatgaggctcttgggttcatgactgcagcagggcttacagttgaccacccgataatgacgactactgacttctggacctcgcacgagtgccttctcttaccctacgagcagtctcttacccgtaaagactccaccagtggccttttctacgattgttcggcccacatgttgtgggttggtgagcgcactcgtcaactcgatggagcgcatgttgaattccttcgtggtgttgccaatcctcttggcataaaggtgagcgacaaaatgaaccccagtgacttggtgaagctgattgagattctgaacccttcaaacaaacctggaaggatcaccataattacaaggatgggggcagagaacatgagagtgaagttgcctcatctcatccgtgctgttcgcaatgctggattaattgtcacatggattactgatcctatgcatggaaacaccatcaaggccccttgtggcctgaagactcgtccattcgactcaattctggctgaagtgcgcgcattcttcgacgtgcatgatcaagaaggaagtcacccaggaggcatccaccttgaaatgactgggcagaacgtgaccgagtgcattggtggatcacggactgtgaccttcgatgacctgagcgaccgctaccacacccactgtgacccaaggctgaacgcctcccagtccctggagctcgccttcatcattgcagagaggctcaggaagaggaggatgcggtcggggctcaacaacagcctgcctctgccaccactggctttctaagtagccgaagctgaacagagaaggtagagggatagttgcggcgactcgaaagattacgcctgtttatttgttgatgcttggtgtggaggcctggtgggtgctcttggcacaagttacatgctggggagctataggagggtacctgttgcgttgtggaagacagtagctagtattatgtgttgtaattgtatgccttcgtttcatgttctgggtgcgtgacttgtcgactttgctgcttctggggttctgaccttggtaaggagagaataaagagataatatgagtgcgagatgcttgctgaactggtgctcagtaaattgatcccttgattgaatggttctgttctgttatcttttgccgcacttctccgaaaaagtttcaggataatctattacaggaaacttcgtcttcaagatacaagctcttctcctttatgacgaaggcatacaagataaagacagatcaaagaggataaaagtaaacgctgaagctatcaccagatagacagcttcggctcgcaatgaagatgatgaataatgatgatgatcgaaagaggaaaagactatttagtccttaataaattgtattacgatcatgtgtaaatgttgagagcataaatgtacttttgtccgggctgcgtcccgtgcctataaatagatgaacaataacactgtactgttcacgctgaattgtattcactttctcgcatccacacatttgagcaagccgaatgtattaatgtaatattaacattattgatattcatttatgttctatggaattgaagaataagtgagctaat

SEQ ID NO: 208926 - DNA, 1375 bp, Zea Mays
tttgtctacaaggacactgcattgaaaataattttgtggtgagagacatgcttggtgatggtcgactaataaaacgacgtgtatttgatggaaaaggtgaatttccaatggactgccctcttcatgatagcctattaagagtgcattataagggcatgctccttgatgaaccaaagtcagttttttatgatacacgtgccgataatgatggtgaaccgttggaattctgttctggagaaggcttggtaccagagggttttgaaatgtgtgttcggctaatgcttcctggtgaaaaatctattgtcacctgcccaccagattttgcatatgataagttcccaaggccagcaaatgttcctgaaggagctcatgttcagtgggaaattgaactacttggattcgaaatgcccaaggattggactggcttaacttttgaagaaatcatggatgaggcggacaaaataaagaacacgggtaacagactgtttaaagaaggaaaattcgaacttgcaaaggcgaaatatgataaggtgcttagggaatataaccacgtgcatcctcatgatgatgaagagggaaaaatctttgctaattcaagaagttccctacatctaaatgtagccttttgctaccagaagatgggcgaatacagaaaatccattgaaacatgcaataaggtgctggacgcaaatcccgtgcatgtgaaagctctttaccgccgaggaacgtccttcatgttacttggggacttcaacgatgcaaggaatgattttgagaagatgattaccattgacaagtcatcagaacaggacgctacagctgccctccttaaacttaagcagaaggaacaggaagccgaaaagaaggcgaggaagcagttcaaaggactctttgacaagaagccaggagagatatccgaagttggtgtagaatcagacggtggaaaggatgcaggtgatgcaagagtcaatggtggtgaggcaacgagtgctgatagaggtgtaaacacaaatgacagtccgaccagcgaatcagagtacgccttcgaggaagagaggcccgggcttcttggcagcttgtggccctctgcgaggatgatcttctcgtctcttggcatgaacaggtgcgcgatactctgaggtgtccagtgtgtactgcggagacatccaaaatcatggcagtgaagaggaactgccccgaggtttctggtatttattagagtaagtttggatgtatggaaaatgaacagtgtgcaagatgtaaatgagaaacaatatgcagggaattttaatagctatctaggattcattatcttccacggcataaaataatttcccaggtttcttctagaatctcttggttgacatgccgccgc

SEQ ID NO: 208927 - DNA, 1692 bp, Zea Mays
atctcattaaatgatgactagagttgtggcagatgatttaggggttgtaaagaagatagttgaagaagggaagggatgggaaacacctagagagccatatgaaataacagcacggataactgcaagaacagcagatggaaaagaaattattccgagtaaagaagaggcatatttcttcactattggtaaatctgaggtacctaaagggcttgagatgggcatcggaacaatgtcacacaaggaaaaggcaattatttttgtcagtagtacttatttgacgaagtcctcactaatgccacagcttgaaggccttgaagaagttcatttttacattgaactggttcagtttatccaggtgagagacatgcttggtgatggtcgactaataaaacgacgtgtatttgatggaaaaggtgaatttccaatggactgccctcttcatgatagcctattaagagtgcattataagggcatgctccttgatgaaccaaagtcagttttttatgatacacgtgccgataatgatggtgaaccgttggaattctgttctggagaaggcttggtaccagagggttttgaaatgtgtgttcggctaatgcttcctggtgaaaaatctattgtcacctgcccaccagattttgcatatgataagttcccaaggccagcaaatgttcctgaaggagctcatgttcagtgggaaattgaactacttggattcgaaatgcccaaggattggactggcttaacttttgaagaaatcatggatgaggcggacaaaataaagaacacgggtaacagactgtttaaagaaggaaaattcgaacttgcaaaggcgaaatatgataaggtgcttagggaatataaccacgtgcatcctcatgatgatgaagagggaaaaatctttgctaattcaagaagttccctacatctaaatgtagccttttgctaccagaagatgggcgaatacagaaaatccattgaaacatgcaataaggtgctggacgcaaatcccgtgcatgtgaaagctctttaccgccgaggaacgtccttcatgttacttggggacttcaacgatgcaaggaatgattttgagaagatgattaccattgacaagtcatcagaacaggacgctacagctgccctccttaaacttaagcagaaggaacaggaagccgaaaagaaggcgaggaagcagttcaaaggactctttgacaagaagccaggagagatatccgaagttggtgtagaatcagacggtggaaaggatgcaggtgatgcaagagtcaatggtggtgaggcaacgagtgctgatagaggtgtaaacacaaatgacagtccgaccagcgaatcagagtacgccttcgaggaagagaggcccgggcttcttggcagcttgtggccctctgcgaggatgatcttctcgtctcttggcatgaacaggtgcgcgatactctgaggtgtccagtgtgtactgcggagacatccaaaatcatggcagtgaagaggaactgccccgaggtttctggtatttattagagtaagtttggatgtatggaaaatgaacagtgtgcaagatgtaaatgagaaacaatatgcagggaattttaatagctatctaggattcattatcttccacggcataaaataatttcccaggtttcttctagaatctcttggttgacatgccgccgc

SEQ ID NO: 208928 - DNA, 1690 bp, Zea Mays
gttgcaactccagatggctttccgaaggatgatgaacttcaatttgagattgaaatgttggatttctttaaagccaaggttgtggcagatgatttaggggttgtaaagaagatagttgaagaagggaagggatgggaaacacctagagagccatatgaaataacagcacggataactgcaagaacagcagatggaaaagaaattattccgagtaaagaagaggcatatttcttcactattggtaaatctgaggtacctaaagggcttgagatgggcatcggaacaatgtcacacaaggaaaaggcaattatttttgtcagtagtacttatttgacgaagtcctcactaatgccacagcttgaaggccttgaagaagttcatttttacattgaactggttcagtttatccaggtgaatttccaatggactgccctcttcatgatagcctattaagagtgcattataagggcatgctccttgatgaaccaaagtcagttttttatgatacacgtgccgataatgatggtgaaccgttggaattctgttctggagaaggcttggtaccagagggttttgaaatgtgtgttcggctaatgcttcctggtgaaaaatctattgtcacctgcccaccagattttgcatatgataagttcccaaggccagcaaatgttcctgaaggagctcatgttcagtgggaaattgaactacttggattcgaaatgcccaaggattggactggcttaacttttgaagaaatcatggatgaggcggacaaaataaagaacacgggtaacagactgtttaaagaaggaaaattcgaacttgcaaaggcgaaatatgataaggtgcttagggaatataaccacgtgcatcctcatgatgatgaagagggaaaaatctttgctaattcaagaagttccctacatctaaatgtagccttttgctaccagaagatgggcgaatacagaaaatccattgaaacatgcaataaggtgctggacgcaaatcccgtgcatgtgaaagctctttaccgccgaggaacgtccttcatgttacttggggacttcaacgatgcaaggaatgattttgagaagatgattaccattgacaagtcatcagaacaggacgctacagctgccctccttaaacttaagcagaaggaacaggaagccgaaaagaaggcgaggaagcagttcaaaggactctttgacaagaagccaggagagatatccgaagttggtgtagaatcagacggtggaaaggatgcaggtgatgcaagagtcaatggtggtgaggcaacgagtgctgatagaggtgtaaacacaaatgacagtccgaccagcgaatcagagtacgccttcgaggaagagaggcccgggcttcttggcagcttgtggccctctgcgaggatgatcttctcgtctcttggcatgaacaggtgcgcgatactctgaggtgtccagtgtgtactgcggagacatccaaaatcatggcagtgaagaggaactgccccgaggtttctggtatttattagagtaagtttggatgtatggaaaatgaacagtgtgcaagatgtaaatgagaaacaatatgcagggaattttaatagctatctaggattcattatcttccacggcataaaataatttcccaggtttcttctagaatctcttggttgacatgccgccgc

SEQ ID NO: 208929 - DNA, 1904 bp, Zea Mays
tctctgagcacatttcaccactatgtaaaggaatcccactcagatttgttttagggaagagcaagatgatcctaggctttgctgaaggcttcccaacaatgctgaagggtgaaattgctatgttcaaaatgcagcctaaaattcactacgctgaggacgattgtccagttgcaactccagatggctttccgaaggatgatgaacttcaatttgagattgaaatgttggatttctttaaagccaaggttgtggcagatgatttaggggttgtaaagaagatagttgaagaagggaagggatgggaaacacctagagagccatatgaaataacagcacggataactgcaagaacagcagatggaaaagaaattattccgagtaaagaagaggcatatttcttcactattggtacctaaagggcttgagatgggcatcggaacaatgtcacacaaggaaaaggcaattatttttgtcagtagtacttatttgacgaagtcctcactaatgccacagcttgaaggccttgaagaagttcatttttacattgaactggttcagtttatccaggtgagagacatgcttggtgatggtcgactaataaaacgacgtgtatttgatggaaaaggtgaatttccaatggactgccctcttcatgatagcctattaagagtgcattataagggcatgctccttgatgaaccaaagtcagttttttatgatacacgtgccgataatgatggtgaaccgttggaattctgttctggagaaggcttggtaccagagggttttgaaatgtgtgttcggctaatgcttcctggtgaaaaatctattgtcacctgcccaccagattttgcatatgataagttcccaaggccagcaaatgttcctgaaggagctcatgttcagtgggaaattgaactacttggattcgaaatgcccaaggattggactggcttaacttttgaagaaatcatggatgaggcggacaaaataaagaacacgggtaacagactgtttaaagaaggaaaattcgaacttgcaaaggcgaaatatgataaggtgcttagggaatataaccacgtgcatcctcatgatgatgaagagggaaaaatctttgctaattcaagaagttccctacatctaaatgtagccttttgctaccagaagatgggcgaatacagaaaatccattgaaacatgcaataaggtgctggacgcaaatcccgtgcatgtgaaagctctttaccgccgaggaacgtccttcatgttacttggggacttcaacgatgcaaggaatgattttgagaagatgattaccattgacaagtcatcagaacaggacgctacagctgccctccttaaacttaagcagaaggaacaggaagccgaaaagaaggcgaggaagcagttcaaaggactctttgacaagaagccaggagagatatccgaagttggtgtagaatcagacggtggaaaggatgcaggtgatgcaagagtcaatggtggtgaggcaacgagtgctgatagaggtgtaaacacaaatgacagtccgaccagcgaatcagagtacgccttcgaggaagagaggcccgggcttcttggcagcttgtggccctctgcgaggatgatcttctcgtctcttggcatgaacaggtgcgcgatactctgaggtgtccagtgtgtactgcggagacatccaaaatcatggcagtgaagaggaactgccccgaggtttctggtatttattagagtaagtttggatgtatggaaaatgaacagtgtgcaagatgtaaatgagaaacaatatgcagggaattttaatagctatctaggattcattatcttccacggcataaaataatttcccaggtttcttctagaatctcttggttgacatgccgccgc

SEQ ID NO: 208930 - DNA, 1861 bp, Zea Mays
atcatctctgagcacatttcaccactatgtaaaggaatcccactcagatttgttttagggaagagcaagatgatcctaggctttgctgaaggcttcccaacaatgctgaagggtgaaattgctatgttcaaaatgcagcctaaaattcactacgctgaggacgattgtccagttgcaactccagatggctttccgaaggatgatgaacttcaatttgagattgaaatgttggatttctttaaagccaaggttgtggcagatgatttaggggttgtaaagaagatagttgaagaagggaagggatgggaaacacctagagagccatatgaaataacagcacggataactgcaagaacagcagatggaaaagaaattattccgagtaaagaagaggcatatttcttcactattggtaaatctgaggtacctaaagggcttgagatgggcatcggaacaatgtcacacaaggaaaaggcaattatttttgtcagtagtacttatttgacgaagtcctcactaatgccacagcttgaaggccttgaagaagttcatttttacattgaactggttcagtttatccaggtgaatttccaatggactgccctcttcatgatagcctattaagagtgcattataagggcatgctccttgatgaaccaaagtcagttttttatgatacacgtgccgataatgatggtgaaccgttggaattctgttctggagaaggcttggtaccagagggttttgaaatgtgtgttcggctaatgcttcctggtgaaaaatctattgtcacctgcccaccagattttgcatatgataagttcccaaggccagcaaatgttcctgaaggagctcatgttcagtgggaaattgaactacttggattcgaaatgcccaaggattggactggcttaacttttgaagaaatcatggatgaggcggacaaaataaagaacacgggtaacagactgtttaaagaaggaaaattcgaacttgcaaaggcgaaatatgataaggtgcttagggaatataaccacgtgcatcctcatgatgatgaagagggaaaaatctttgctaattcaagaagttccctacatctaaatgtagccttttgctaccagaagatgggcgaatacagaaaatccattgaaacatgcaataaggtgctggacgcaaatcccgtgcatgtgaaagctctttaccgccgaggaacgtccttcatgttacttggggacttcaacgatgcaaggaatgattttgagaagatgattaccattgacaagtcatcagaacaggacgctacagctgccctccttaaacttaagcagaaggaacaggaagccgaaaagaaggcgaggaagcagttcaaaggactctttgacaagaagccaggagagatatccgaagttggtgtagaatcagacggtggaaaggatgcaggtgatgcaagagtcaatggtggtgaggcaacgagtgctgatagaggtgtaaacacaaatgacagtccgaccagcgaatcagagtacgccttcgaggaagagaggcccgggcttcttggcagcttgtggccctctgcgaggatgatcttctcgtctcttggcatgaacaggtgcgcgatactctgaggtgtccagtgtgtactgcggagacatccaaaatcatggcagtgaagaggaactgccccgaggtttctggtatttattagagtaagtttggatgtatggaaaatgaacagtgtgcaagatgtaaatgagaaacaatatgcagggaattttaatagctatctaggattcattatcttccacggcataaaataatttcccaggtttcttctagaatctcttggttgacatgccgccgc

SEQ ID NO: 208931 - DNA, 2319 bp, Zea Mays
tttcgttggactctccgccgggcgccggagaggcggggaccggcgagtccaccatcccattcccgtaccacccgcttcttccaactccaactctccaaggcgctgtgctggctgctggcctgctgctaccgactgccgcaactgctccgcatcccggccttgattagcagcagttacgcccgcgcaggacagcggccttgattagcgaagtattcctttgccctacctctctccctaccccgttccgacgcggcggccgttgagcacctgcccggaagctatagcttcggccatggcccaagatgccggcgacggcggtggggaactcccgccgcccgtaaagaagaagtcaccggcggaggaggaggccgagaagaggaggaagaagcttacacctgggagcttaatgaagggcattatacggtctgggagcggtgatgccacccctgcagagggcgatcaggttatacttcattgcactactcggacaattgatggtatcgttgtaaattctacaagaagggagcatggaggtaaaggaatcccactcagatttgttttagggaagagcaagatgatcctaggctttgctgaaggcttcccaacaatgctgaagggtgaaattgctatgttcaaaatgcagcctaaaattcactacgctgaggacgattgtccagttgcaactccagatggctttccgaaggatgatgaacttcaatttgagattgaaatgttggatttctttaaagccaaggttgtggcagatgatttaggggttgtaaagaagatagttgaagaagggaagggatgggaaacacctagagagccatatgaaataacagcacggataactgcaagaacagcagatggaaaagaaattattccgagtaaagaagaggcatatttcttcactattggtaaatctgagcttgaaggccttgaagaagttcatttttacattgaactggttcagtttatccaggtgagagacatgcttggtgatggtcgactaataaaacgacgtgtatttgatggaaaaggtgaatttccaatggactgccctcttcatgatagcctattaagagtgcattataagggcatgctccttgatgaaccaaagtcagttttttatgatacacgtgccgataatgatggtgaaccgttggaattctgttctggagaaggcttggtaccagagggttttgaaatgtgtgttcggctaatgcttcctggtgaaaaatctattgtcacctgcccaccagattttgcatatgataagttcccaaggccagcaaatgttcctgaaggagctcatgttcagtgggaaattgaactacttggattcgaaatgcccaaggattggactggcttaacttttgaagaaatcatggatgaggcggacaaaataaagaacacgggtaacagactgtttaaagaaggaaaattcgaacttgcaaaggcgaaatatgataaggtgcttagggaatataaccacgtgcatcctcatgatgatgaagagggaaaaatctttgctaattcaagaagttccctacatctaaatgtagccttttgctaccagaagatgggcgaatacagaaaatccattgaaacatgcaataaggtgctggacgcaaatcccgtgcatgtgaaagctctttaccgccgaggaacgtccttcatgttacttggggacttcaacgatgcaaggaatgattttgagaagatgattaccattgacaagtcatcagaacaggacgctacagctgccctccttaaacttaagcagaaggaacaggaagccgaaaagaaggcgaggaagcagttcaaaggactctttgacaagaagccaggagagatatccgaagttggtgtagaatcagacggtggaaaggatgcaggtgatgcaagagtcaatggtggtgaggcaacgagtgctgatagaggtgtaaacacaaatgacagtccgaccagcgaatcagagtacgccttcgaggaagagaggcccgggcttcttggcagcttgtggccctctgcgaggatgatcttctcgtctcttggcatgaacaggtgcgcgatactctgaggtgtccagtgtgtactgcggagacatccaaaatcatggcagtgaagaggaactgccccgaggtttctggtatttattagagtaagtttggatgtatggaaaatgaacagtgtgcaagatgtaaatgagaaacaatatgcagggaattttaatagctatctaggattcattatcttccacggcataaaataatttcccaggtttcttctagaatctcttggttgacatgccgccgc

SEQ ID NO: 208932 - DNA, 2429 bp, Zea Mays
tttcgttggactctccgccgggcgccggagaggcggggaccggcgagtccaccatcccattcccgtaccacccgcttcttccaactccaactctccaaggcgctgtgctggctgctggcctgctgctaccgactgccgcaactgctccgcatcccggccttgattagcagcagttacgcccgcgcaggacagcggccttgattagcgaagtattcctttgccctacctctctccctaccccgttccgacgcggcggccgttgagcacctgcccggaagctatagcttcggccatggcccaagatgccggcgacggcggtggggaactcccgccgcccgtaaagaagaagtcaccggcggaggaggaggccgagaagaggaggaagaagcttacacctgggagcttaatgaagggcattatacggtctgggagcggtgatgccacccctgcagagggcgatcaggttatacttcattgcactactcggacaattgatggtatcgttgtaaattctacaagaagggagcatggaggtaaaggaatcccactcagatttgttttagggaagagcaagatgatcctaggctttgctgaaggcttcccaacaatgctgaagggtgaaattgctatgttcaaaatgcagcctaaaattcactacgctgaggacgattgtccagttgcaactccagatggctttccgaaggatgatgaacttcaatttgagattgaaatgttggatttctttaaagccaaggttgtggcagatgatttaggggttgtaaagaagatagttgaagaagggaagggatgggaaacacctagagagccatatgaaataacagcacggataactgcaagaacagcagatggaaaagaaattattccgagtaaagaagaggcatatttcttcactattggtaaatctgagtttaggtacctaaagggcttgagatgggcatcggaacaatgtcacacaaggaaaaggcaattatttttgtcagtagtacttatttgacgaagtcctcactaatgccacagcttgaaggccttgaagaagttcatttttacattgaactggttcagtttatccaggtgagagacatgcttggtgatggtcgactaataaaacgacgtgtatttgatggaaaaggtgaatttccaatggactgccctcttcatgatagcctattaagagtgcattataagggcatgctccttgatgaaccaaagtcagttttttatgatacacgtgccgataatgatggtgaaccgttggaattctgttctggagaaggcttggtaccagagggttttgaaatgtgtgttcggctaatgcttcctggtgaaaaatctattgtcacctgcccaccagattttgcatatgataagttcccaaggccagcaaatgttcctgaaggagctcatgttcagtgggaaattgaactacttggattcgaaatgcccaaggattggactggcttaacttttgaagaaatcatggatgaggcggacaaaataaagaacacgggtaacagactgtttaaagaaggaaaattcgaacttgcaaaggcgaaatatgataaggtgcttagggaatataaccacgtgcatcctcatgatgatgaagagggaaaaatctttgctaattcaagaagttccctacatctaaatgtagccttttgctaccagaagatgggcgaatacagaaaatccattgaaacatgcaataaggtgctggacgcaaatcccgtgcatgtgaaagctctttaccgccgaggaacgtccttcatgttacttggggacttcaacgatgcaaggaatgattttgagaagatgattaccattgacaagtcatcagaacaggacgctacagctgccctccttaaacttaagcagaaggaacaggaagccgaaaagaaggcgaggaagcagttcaaaggactctttgacaagaagccaggagagatatccgaagttggtgtagaatcagacggtggaaaggatgcaggtgatgcaagagtcaatggtggtgaggcaacgagtgctgatagaggtgtaaacacaaatgacagtccgaccagcgaatcagagtacgccttcgaggaagagaggcccgggcttcttggcagcttgtggccctctgcgaggatgatcttctcgtctcttggcatgaacaggtgcgcgatactctgaggtgtccagtgtgtactgcggagacatccaaaatcatggcagtgaagaggaactgccccgaggtttctggtatttattagagtaagtttggatgtatggaaaatgaacagtgtgcaagatgtaaatgagaaacaatatgcagggaattttaatagctatctaggattcattatcttccacggcataaaataatttcccaggtttcttctagaatctcttggttgacatgccgccgc

SEQ ID NO: 208933 - DNA, 2459 bp, Zea Mays
tttcgttggactctccgccgggcgccggagaggcggggaccggcgagtccaccatcccattcccgtaccacccgcttcttccaactccaactctccaaggcgctgtgctggctgctggcctgctgctaccgactgccgcaactgctccgcatcccggccttgattagcagcagttacgcccgcgcaggacagcggccttgattagcgaagtattcctttgccctacctctctccctaccccgttccgacgcggcggccgttgagcacctgcccggaagctatagcttcggccatggcccaagatgccggcgacggcggtggggaactcccgccgcccgtaaagaagaagtcaccggcggaggaggaggccgagaagaggaggaagaagcttacacctgggagcttaatgaagggcattatacggtctgggagcggtgatgccacccctgcagagggcgatcaggttatacttcattgcactactcggacaattgatggtatcgttgtaaattctacaagaagggagcatggaggtgttgcatcatctctgagcacatttcaccactatgtaaaggaatcccactcagatttgttttagggaagagcaagatgatcctaggctttgctgaaggcttcccaacaatgctgaagggtgaaattgctatgttcaaaatgcagcctaaaattcactacgctgaggacgattgtccagttgcaactccagatggctttccgaaggatgatgaacttcaatttgagattgaaatgttggatttctttaaagccaaggttgtggcagatgatttaggggttgtaaagaagatagttgaagaagggaagggatgggaaacacctagagagccatatgaaataacagcacggataactgcaagaacagcagatggaaaagaaattattccgagtaaagaagaggcatatttcttcactattggtaaatctgaggtacctaaagggcttgagatgggcatcggaacaatgtcacacaaggaaaaggcaattatttttgtcagtagtacttatttgacgaagtcctcactaatgccacagcttgaaggccttgaagaagttcatttttacattgaactggttcagtttatccaggtgagagacatgcttggtgatggtcgactaataaaacgacgtgtatttgatggaaaaggtgaatttccaatggactgccctcttcatgatagcctattaagagtgcattataagggcatgctccttgatgaaccaaagtcagttttttatgatacacgtgccgataatgatggtgaaccgttggaattctgttctggagaaggcttggtaccagagggttttgaaatgtgtgttcggctaatgcttcctggtgaaaaatctattgtcacctgcccaccagattttgcatatgataagttcccaaggccagcaaatgttcctgaaggagctcatgttcagtgggaaattgaactacttggattcgaaatgcccaaggattggactggcttaacttttgaagaaatcatggatgaggcggacaaaataaagaacacgggtaacagactgtttaaagaaggaaaattcgaacttgcaaaggcgaaatatgataaggtgcttagggaatataaccacgtgcatcctcatgatgatgaagagggaaaaatctttgctaattcaagaagttccctacatctaaatgtagccttttgctaccagaagatgggcgaatacagaaaatccattgaaacatgcaataaggtgctggacgcaaatcccgtgcatgtgaaagctctttaccgccgaggaacgtccttcatgttacttggggacttcaacgatgcaaggaatgattttgagaagatgattaccattgacaagtcatcagaacaggacgctacagctgccctccttaaacttaagcagaaggaacaggaagccgaaaagaaggcgaggaagcagttcaaaggactctttgacaagaagccaggagagatatccgaagttggtgtagaatcagacggtggaaaggatgcaggtgatgcaagagtcaatggtggtgaggcaacgagtgctgatagaggtgtaaacacaaatgacagtccgaccagcgaatcagagtacgccttcgaggaagagaggcccgggcttcttggcagcttgtggccctctgcgaggatgatcttctcgtctcttggcatgaacaggtgcgcgatactctgaggtgtccagtgtgtactgcggagacatccaaaatcatggcagtgaagaggaactgccccgaggtttctggtatttattagagtaagtttggatgtatggaaaatgaacagtgtgcaagatgtaaatgagaaacaatatgcagggaattttaatagctatctaggattcattatcttccacggcataaaataatttcccaggtttcttctagaatctcttggttgacatgccgccgc

SEQ ID NO: 208934 - DNA, 2413 bp, Zea Mays
tttcgttggactctccgccgggcgccggagaggcggggaccggcgagtccaccatcccattcccgtaccacccgcttcttccaactccaactctccaaggcgctgtgctggctgctggcctgctgctaccgactgccgcaactgctccgcatcccggccttgattagcagcagttacgcccgcgcaggacagcggccttgattagcgaagtattcctttgccctacctctctccctaccccgttccgacgcggcggccgttgagcacctgcccggaagctatagcttcggccatggcccaagatgccggcgacggcggtggggaactcccgccgcccgtaaagaagaagtcaccggcggaggaggaggccgagaagaggaggaagaagcttacacctgggagcttaatgaagggcattatacggtctgggagcggtgatgccacccctgcagagggcgatcaggttatacttcattgcactactcggacaattgatggtatcgttgtaaattctacaagaagggagcatggaggtaaaggaatcccactcagatttgttttagggaagagcaagatgatcctaggctttgctgaaggcttcccaacaatgctgaagggtgaaattgctatgttcaaaatgcagcctaaaattcactacgctgaggacgattgtccagttgcaactccagatggctttccgaaggatgatgaacttcaatttgagattgaaatgttggatttctttaaagccaaggttgtggcagatgatttaggggttgtaaagaagatagttgaagaagggaagggatgggaaacacctagagagccatatgaaataacagcacggataactgcaagaacagcagatggaaaagaaattattccgagtaaagaagaggcatatttcttcactattggtacctaaagggcttgagatgggcatcggaacaatgtcacacaaggaaaaggcaattatttttgtcagtagtacttatttgacgaagtcctcactaatgccacagcttgaaggccttgaagaagttcatttttacattgaactggttcagtttatccaggtgagagacatgcttggtgatggtcgactaataaaacgacgtgtatttgatggaaaaggtgaatttccaatggactgccctcttcatgatagcctattaagagtgcattataagggcatgctccttgatgaaccaaagtcagttttttatgatacacgtgccgataatgatggtgaaccgttggaattctgttctggagaaggcttggtaccagagggttttgaaatgtgtgttcggctaatgcttcctggtgaaaaatctattgtcacctgcccaccagattttgcatatgataagttcccaaggccagcaaatgttcctgaaggagctcatgttcagtgggaaattgaactacttggattcgaaatgcccaaggattggactggcttaacttttgaagaaatcatggatgaggcggacaaaataaagaacacgggtaacagactgtttaaagaaggaaaattcgaacttgcaaaggcgaaatatgataaggtgcttagggaatataaccacgtgcatcctcatgatgatgaagagggaaaaatctttgctaattcaagaagttccctacatctaaatgtagccttttgctaccagaagatgggcgaatacagaaaatccattgaaacatgcaataaggtgctggacgcaaatcccgtgcatgtgaaagctctttaccgccgaggaacgtccttcatgttacttggggacttcaacgatgcaaggaatgattttgagaagatgattaccattgacaagtcatcagaacaggacgctacagctgccctccttaaacttaagcagaaggaacaggaagccgaaaagaaggcgaggaagcagttcaaaggactctttgacaagaagccaggagagatatccgaagttggtgtagaatcagacggtggaaaggatgcaggtgatgcaagagtcaatggtggtgaggcaacgagtgctgatagaggtgtaaacacaaatgacagtccgaccagcgaatcagagtacgccttcgaggaagagaggcccgggcttcttggcagcttgtggccctctgcgaggatgatcttctcgtctcttggcatgaacaggtgcgcgatactctgaggtgtccagtgtgtactgcggagacatccaaaatcatggcagtgaagaggaactgccccgaggtttctggtatttattagagtaagtttggatgtatggaaaatgaacagtgtgcaagatgtaaatgagaaacaatatgcagggaattttaatagctatctaggattcattatcttccacggcataaaataatttcccaggtttcttctagaatctcttggttgacatgccgccgc

SEQ ID NO: 208935 - DNA, 2343 bp, Zea Mays
tttcgttggactctccgccgggcgccggagaggcggggaccggcgagtccaccatcccattcccgtaccacccgcttcttccaactccaactctccaaggcgctgtgctggctgctggcctgctgctaccgactgccgcaactgctccgcatcccggccttgattagcagcagttacgcccgcgcaggacagcggccttgattagcgaagtattcctttgccctacctctctccctaccccgttccgacgcggcggccgttgagcacctgcccggaagctatagcttcggccatggcccaagatgccggcgacggcggtggggaactcccgccgcccgtaaagaagaagtcaccggcggaggaggaggccgagaagaggaggaagaagcttacacctgggagcttaatgaagggcattatacggtctgggagcggtgatgccacccctgcagagggcgatcaggttatacttcattgcactactcggacaattgatggtatcgttgtaaattctacaagaagggagcatggaggtaaaggaatcccactcagatttgttttagggaagagcaagatgatcctaggctttgctgaaggcttcccaacaatgctgaagggtgaaattgctatgttcaaaatgcagcctaaaattcactacgctgaggacgattgtccagttgcaactccagatggctttccgaaggatgatgaacttcaatttgagattgaaatgttggatttctttaaagccaaggttgtggcagatgatttaggggttgtaaagaagatagttgaagaagggaagggatgggaaacacctagagagccatatgaaataacagcacggataactgcaagaacagcagatggaaaagaaattattccgagtaaagaagaggcaattatttttgtcagtagtacttatttgacgaagtcctcactaatgccacagcttgaaggccttgaagaagttcatttttacattgaactggttcagtttatccaggtgagagacatgcttggtgatggtcgactaataaaacgacgtgtatttgatggaaaaggtgaatttccaatggactgccctcttcatgatagcctattaagagtgcattataagggcatgctccttgatgaaccaaagtcagttttttatgatacacgtgccgataatgatggtgaaccgttggaattctgttctggagaaggcttggtaccagagggttttgaaatgtgtgttcggctaatgcttcctggtgaaaaatctattgtcacctgcccaccagattttgcatatgataagttcccaaggccagcaaatgttcctgaaggagctcatgttcagtgggaaattgaactacttggattcgaaatgcccaaggattggactggcttaacttttgaagaaatcatggatgaggcggacaaaataaagaacacgggtaacagactgtttaaagaaggaaaattcgaacttgcaaaggcgaaatatgataaggtgcttagggaatataaccacgtgcatcctcatgatgatgaagagggaaaaatctttgctaattcaagaagttccctacatctaaatgtagccttttgctaccagaagatgggcgaatacagaaaatccattgaaacatgcaataaggtgctggacgcaaatcccgtgcatgtgaaagctctttaccgccgaggaacgtccttcatgttacttggggacttcaacgatgcaaggaatgattttgagaagatgattaccattgacaagtcatcagaacaggacgctacagctgccctccttaaacttaagcagaaggaacaggaagccgaaaagaaggcgaggaagcagttcaaaggactctttgacaagaagccaggagagatatccgaagttggtgtagaatcagacggtggaaaggatgcaggtgatgcaagagtcaatggtggtgaggcaacgagtgctgatagaggtgtaaacacaaatgacagtccgaccagcgaatcagagtacgccttcgaggaagagaggcccgggcttcttggcagcttgtggccctctgcgaggatgatcttctcgtctcttggcatgaacaggtgcgcgatactctgaggtgtccagtgtgtactgcggagacatccaaaatcatggcagtgaagaggaactgccccgaggtttctggtatttattagagtaagtttggatgtatggaaaatgaacagtgtgcaagatgtaaatgagaaacaatatgcagggaattttaatagctatctaggattcattatcttccacggcataaaataatttcccaggtttcttctagaatctcttggttgacatgccgccgc

SEQ ID NO: 208936 - DNA, 2364 bp, Zea Mays
tttcgttggactctccgccgggcgccggagaggcggggaccggcgagtccaccatcccattcccgtaccacccgcttcttccaactccaactctccaaggcgctgtgctggctgctggcctgctgctaccgactgccgcaactgctccgcatcccggccttgattagcagcagttacgcccgcgcaggacagcggccttgattagcgaagtattcctttgccctacctctctccctaccccgttccgacgcggcggccgttgagcacctgcccggaagctatagcttcggccatggcccaagatgccggcgacggcggtggggaactcccgccgcccgtaaagaagaagtcaccggcggaggaggaggccgagaagaggaggaagaagcttacacctgggagcttaatgaagggcattatacggtctgggagcggtgatgccacccctgcagagggcgatcaggttatacttcattgcactactcggacaattgatggtatcgttgtaaattctacaagaagggagcatggaggtaaaggaatcccactcagatttgttttagggaagagcaagatgatcctaggctttgctgaaggcttcccaacaatgctgaagggtgaaattgctatgttcaaaatgcagcctaaaattcactacgctgaggacgattgtccagttgcaactccagatggctttccgaaggatgatgaacttcaatttgagattgaaatgttggatttctttaaagccaaggttgtggcagatgatttaggggttgtaaagaagatagttgaagaagggaagggatgggaaacacctagagagccatatgaaataacagcacggataactgcaagaacagcagatggaaaagaaattattccgagtaaagaagaggcatatttcttcactattggtaaatctgagtttaggtacctaaagggcttgagatgggcatcggaacaatgtcacacaaggaaaaggcaattatttttgtcagtagtacttatttgacgaagtcctcactaatgccacagcttgaaggccttgaagaagttcatttttacattgaactggttcagtttatccaggtgaatttccaatggactgccctcttcatgatagcctattaagagtgcattataagggcatgctccttgatgaaccaaagtcagttttttatgatacacgtgccgataatgatggtgaaccgttggaattctgttctggagaaggcttgagggttttgaaatgtgtgttcggctaatgcttcctggtgaaaaatctattgtcacctgcccaccagattttgcatatgataagttcccaaggccagcaaatgttcctgaaggagctcatgttcagtgggaaattgaactacttggattcgaaatgcccaaggattggactggcttaacttttgaagaaatcatggatgaggcggacaaaataaagaacacgggtaacagactgtttaaagaaggaaaattcgaacttgcaaaggcgaaatatgataaggtgcttagggaatataaccacgtgcatcctcatgatgatgaagagggaaaaatctttgctaattcaagaagttccctacatctaaatgtagccttttgctaccagaagatgggcgaatacagaaaatccattgaaacatgcaataaggtgctggacgcaaatcccgtgcatgtgaaagctctttaccgccgaggaacgtccttcatgttacttggggacttcaacgatgcaaggaatgattttgagaagatgattaccattgacaagtcatcagaacaggacgctacagctgccctccttaaacttaagcagaaggaacaggaagccgaaaagaaggcgaggaagcagttcaaaggactctttgacaagaagccaggagagatatccgaagttggtgtagaatcagacggtggaaaggatgcaggtgatgcaagagtcaatggtggtgaggcaacgagtgctgatagaggtgtaaacacaaatgacagtccgaccagcgaatcagagtacgccttcgaggaagagaggcccgggcttcttggcagcttgtggccctctgcgaggatgatcttctcgtctcttggcatgaacaggtgcgcgatactctgaggtgtccagtgtgtactgcggagacatccaaaatcatggcagtgaagaggaactgccccgaggtttctggtatttattagagtaagtttggatgtatggaaaatgaacagtgtgcaagatgtaaatgagaaacaatatgcagggaattttaatagctatctaggattcattatcttccacggcataaaataatttcccaggtttcttctagaatctcttggttgacatgccgccgc

SEQ ID NO: 208937 - DNA, 2394 bp, Zea Mays
tttcgttggactctccgccgggcgccggagaggcggggaccggcgagtccaccatcccattcccgtaccacccgcttcttccaactccaactctccaaggcgctgtgctggctgctggcctgctgctaccgactgccgcaactgctccgcatcccggccttgattagcagcagttacgcccgcgcaggacagcggccttgattagcgaagtattcctttgccctacctctctccctaccccgttccgacgcggcggccgttgagcacctgcccggaagctatagcttcggccatggcccaagatgccggcgacggcggtggggaactcccgccgcccgtaaagaagaagtcaccggcggaggaggaggccgagaagaggaggaagaagcttacacctgggagcttaatgaagggcattatacggtctgggagcggtgatgccacccctgcagagggcgatcaggttatacttcattgcactactcggacaattgatggtatcgttgtaaattctacaagaagggagcatggaggtaaaggaatcccactcagatttgttttagggaagagcaagatgatcctaggctttgctgaaggcttcccaacaatgctgaagggtgaaattgctatgttcaaaatgcagcctaaaattcactacgctgaggacgattgtccagttgcaactccagatggctttccgaaggatgatgaacttcaatttgagattgaaatgttggatttctttaaagccaaggttgtggcagatgatttaggggttgtaaagaagatagttgaagaagggaagggatgggaaacacctagagagccatatgaaataacagcacggataactgcaagaacagcagatggaaaagaaattattccgagtaaagaagaggcatatttcttcactattggtaaatctgaggtacctaaagggcttgagatgggcatcggaacaatgtcacacaaggaaaaggcaattatttttgtcagtagtacttatttgacgaagtcctcactaatgccacagcttgaaggccttgaagaagttcatttttacattgaactggttcagtttatccaggtgagagacatgcttggtgatggtcgactaataaaacgacgtgtatttgatggaaaaggtgaatttccaatggactgccctcttcatgatagcctattaagagtgcattataagggcatgctccttgatgaaccaaagtcagttttttatgatacacgtgccgataatgatggtgaaccgttggaattctgttctggagaaggcttggtaccagagggttttgaaatgtgtgttcggctaatgcttcctggtgaaaaatctattgtcacctgcccaccagattttgcatatgataagttcccaaggccagcaaatgttcctgaaggagctcatgttcagtgggaaattgaactacttggattcgaaatgcccaaggattggactggcttaacttttgaagaaatcatggatgaggcggacaaaataaagaacacgggtaacagactgtttaaagaaggaaaattcgaacttgcaaaggcgaaatatgataaggtgcttagggaatataaccacgtgcatcctcatgatgatgaagagggaaaaatctttgctaattcaagaagttccctacatctaaatgtagccttttgctaccagaagatgggcgaatacagaaaatccattgaaacatgcaataaggtgctggacgcaaatcccgtgcatgtgaaagctctttaccgccgaggaacgtccttcatgttacttggggacttcaacgatgcaaggaatgattttgagaaggacgctacagctgccctccttaaacttaagcagaaggaacaggaagccgaaaagaaggcgaggaagcagttcaaaggactctttgacaagaagccaggagagatatccgaagttggtgtagaatcagacggtggaaaggatgcaggtgatgcaagagtcaatggtggtgaggcaacgagtgctgatagaggtgtaaacacaaatgacagtccgaccagcgaatcagagtacgccttcgaggaagagaggcccgggcttcttggcagcttgtggccctctgcgaggatgatcttctcgtctcttggcatgaacaggtgcgcgatactctgaggtgtccagtgtgtactgcggagacatccaaaatcatggcagtgaagaggaactgccccgaggtttctggtatttattagagtaagtttggatgtatggaaaatgaacagtgtgcaagatgtaaatgagaaacaatatgcagggaattttaatagctatctaggattcattatcttccacggcataaaataatttcccaggtttcttctagaatctcttggttgacatgccgccgc

SEQ ID NO: 208938 - DNA, 2403 bp, Zea Mays
acgaggcccaagtcaaaggaaggtaccagcgacatgctttcgttggactctccgccgggcgccggagaggcggggaccggcgagtccaccatcccattcccgtaccacccgcttcttccaactccaactctccaaggcgctgtgctggctgctggcctgctgctaccgactgccgcaactgctccgcatcccggccttgattagcagcagttacgcccgcgcaggacagcggccttgattagcgaagtattcctttgccctacctctctccctaccccgttccgacgcggcggccgttgagcacctgcccggaagctatagcttcggccatggcccaagatgccggcgacggcggtggggaactcccgccgcccgtaaagaagaagtcaccggcggaggaggaggccgagaagaggaggaagaagcttacacctgggagcttaatgaagggcattatacggtctgggagcggtgatgccacccctgcagagggcgatcaggttatacttcattgcactactcggacaattgatggtatcgttgtaaattctacaagaagggagcatggaggtaaaggaatcccactcagatttgttttagggaagagcaagatgatcctaggctttgctgaaggcttcccaacaatgctgaagggtgaaattgctatgttcaaaatgcagcctaaaattcactacgctgaggacgattgtccagttgcaactccagatggctttccgaaggatgatgaacttcaatttgagattgaaatgttggatttctttaaagccaaggttgtggcagatgatttaggggttgtaaagaagatagttgaagaagggaagggatgggaaacacctagagagccatatgaaataacagcacggataactgcaagaacagcagatggaaaagaaattattccgagtaaagaagaggcatatttcttcactattggtaaatctgaggtacctaaagggcttgagatgggcatcggaacaatgtcacacaaggaaaaggcaattatttttgtcagtagtacttatttgacgaagtcctcactaatgccacagcttgaaggccttgaagaagttcatttttacattgaactggttcagtttatccaggtgaatttccaatggactgccctcttcatgatagcctattaagagtgcattataagggcatgctccttgatgaaccaaagtcagttttttatgatacacgtgccgataatgatggtgaaccgttggaattctgttctggagaaggcttggtaccagagggttttgaaatgtgtgttcggctaatgcttcctggtgaaaaatctattgtcacctgcccaccagattttgcatatgataagttcccaaggccagcaaatgttcctgaaggagctcatgttcagtgggaaattgaactacttggattcgaaatgcccaaggattggactggcttaacttttgaagaaatcatggatgaggcggacaaaataaagaacacgggtaacagactgtttaaagaaggaaaattcgaacttgcaaaggcgaaatatgataaggtgcttagggaatataaccacgtgcatcctcatgatgatgaagagggaaaaatctttgctaattcaagaagttccctacatctaaatgtagccttttgctaccagaagatgggcgaatacagaaaatccattgaaacatgcaataaggtgctggacgcaaatcccgtgcatgtgaaagctctttaccgccgaggaacgtccttcatgttacttggggacttcaacgatgcaaggaatgattttgagaagatgattaccattgacaagtcatcagaacaggacgctacagctgccctccttaaacttaagcagaaggaacaggaagccgaaaagaaggcgaggaagcagttcaaaggactctttgacaagaagccaggagagatatccgaagttggtgtagaatcagacggtggaaaggatgcaggtgatgcaagagtcaatggtggtgaggcaacgagtgctgatagaggtgtaaacacaaatgacagtccgaccagcgaatcagagtacgccttcgaggaagagaggcccgggcttcttggcagcttgtggccctctgcgaggatgatcttctcgtctcttggcatgaacaggtgcgcgatactctgaggtgtccagtgtgtactgcggagacatccaaaatcatggcagtgaagaggaactgccccgaggtttctggtatttattagagtaagtttggatgtatggaaaatgaacagtgtgcaagatgtaaatgagaaacaatatgcagggaattttaatagctatctaggattcattatcttccacggcataaaataatttcccaggtttcttctagaatctcttggttgacatgccgccgc

SEQ ID NO: 208939 - DNA, 1214 bp, Zea Mays
gatttattaaccccccacgttctcttgcgtctccacttgtctttacaaatcgactatatgtactgcgcctctattcccgtaagaccaagaaagacctgaacctgatacaccttgcctctccccactaagcttgtttaccacgcttataagacatgggtcaagcactcggcttgattcaagtggatcaatcgacagtagccatcaaggaaacttttgggaagtttgacgaggtcctagagcctggatgccacttcttgccatggtgcatagggaagcaaattgctgggtatctgtcactgcgtgtgcagcagcttgatgtccgctgcgaaacaaagacaaaggataatgtcttcgtcaatgttgtggcatctgtgcaatatcgtgcccttgccgataaggcatctgatgcattttacaggcttagtaacaccagggagcaaatccagtcatatgtttttgatgtcatcagggcaagtgttccgaagatgaacttggatgatgcctttgagcagaagaatgaaatcgccaaagctgtagaaaatgaacttgaaaaggcaatgtctatgtatggatacgagattgtgcagactctgattgttgatattgagcctgatgagcatgtgaagagagctatgaatgagatcaatgcagctgctaggctgaggttggctgccagcgagaaagctgaggcagagaagatactgcagatcaagagagccgaaggtgatgcagaatccaagtacttggcgggtctgggtatcgcaagacagcgccaggctatagtggatgggctcagagacagtgttcttgctttctctgagaatgtgcctgggacctctgcaaaggatgtcatggacatggttctggttacccagtacttcgacaccatgaaggagattggggcctcgtccaagtcctcgtcggttttcatccctcatggaccaggtgctgtcagagacatcgcagcgcagataagggatggtcagctccaggccagtctgctgtgagcacgttggaaaaggcatgcttttgacattcccatcagtaaagaagtacatatacatcatgaggagtaaaaaaaaacttactagcgataatattaagaggaaattctgggatttgattactgacgtggatgcatcctgtgagatttttgaggcaataatcaaaagtgcccacttacgtttaactgctcattgttgaatagcgtgcgc

SEQ ID NO: 208940 - DNA, 1218 bp, Zea Mays
gatttattaaccccccacgttctcttgcgtctccacttgtctttacaaatcgactatatgtactgcgcctctattcccgtaagaccaagaaagacctgaacctgatacaccttgcctctccccactaagcttgtttaccacgcttgtagataagacatgggtcaagcactcggcttgattcaagtggatcaatcgacagtagccatcaaggaaacttttgggaagtttgacgaggtcctagagcctggatgccacttcttgccatggtgcatagggaagcaaattgctgggtatctgtcactgcgtgtgcagcagcttgatgtccgctgcgaaacaaagacaaaggataatgtcttcgtcaatgttgtggcatctgtgcaatatcgtgcccttgccgataaggcatctgatgcattttacaggcttagtaacaccagggagcaaatccagtcatatgtttttgatgtcatcagggcaagtgttccgaagatgaacttggatgatgcctttgagcagaagaatgaaatcgccaaagctgtagaaaatgaacttgaaaaggcaatgtctatgtatggatacgagattgtgcagactctgattgttgatattgagcctgatgagcatgtgaagagagctatgaatgagatcaatgcagctgctaggctgaggttggctgccagcgagaaagctgaggcagagaagatactgcagatcaagagagccgaaggtgatgcagaatccaagtacttggcgggtctgggtatcgcaagacagcgccaggctatagtggatgggctcagagacagtgttcttgctttctctgagaatgtgcctgggacctctgcaaaggatgtcatggacatggttctggttacccagtacttcgacaccatgaaggagattggggcctcgtccaagtcctcgtcggttttcatccctcatggaccaggtgctgtcagagacatcgcagcgcagataagggatggtcagctccaggccagtctgctgtgagcacgttggaaaaggcatgcttttgacattcccatcagtaaagaagtacatatacatcatgaggagtaaaaaaaaacttactagcgataatattaagaggaaattctgggatttgattactgacgtggatgcatcctgtgagatttttgaggcaataatcaaaagtgcccacttacgtttaactgctcattgttgaatagcgtgcgc

SEQ ID NO: 208941 - DNA, 1025 bp, Zea Mays
caccacgtgcatggatgttaatcatcatcagggcaagtgttccgaagatgaacttggatgatgcctttgagcagaagaatgaaatcgccaaagctgtagaaaatgaacttgaaaaggcaatgtctatgtatggatacgagattgtgcagactctgattgttgatattgagcctgatgagcatgtgaagagagctatgaatgagatcaatgcagctgctaggctgaggttggctgccagcgagaaagctgaggcagagaagatactgcagatcaagagagccgaaggtgatgcagaatccaagtacttggcgggtctgggtatcgcaagacagcgccaggctatagtggatgggctcagagacagtgttcttgctttctctgagaatgtgcctgggacctctgcaaaggatgtcatggacatggttctggttacccagtacttcgacaccatgaaggagattggggcctcgtccaagtcctcgtcggttttcatccctcatggaccaggtgctgtcagagacatcgcagcgcagataagggatggtcagctccaggccagtctgctgtgagcacgttggaaaaggcatgcttttgacattcccatcagtaaagaagtacatatacatcatgaggagtaaaaaaaaacttactagcgataatgtgagtacagcttgttcgttctatctatatggtgcatgtgattattattatggagattaatgttaaataggttcgcatgtattgtgccagaacaaggctaaggaccagtttgcgtaaaaaaatgtatgtttggaacttatctaagttttggagcctgaggaaacccctccatcctgtgcaaactattttgtggtaccctgcttctctgttatcgtgaatgagaatctcatgttcattttctgtgcccagattaagaggaaattctgggatttgattactgacgtggatgcatcctgtgagatttttgaggcaataatcaaaagtgcccacttacgtttaactgctcattgttgaatagcgtgcgc

SEQ ID NO: 208942 - DNA, 2840 bp, Zea Mays
ctacgaccgattctttccatctacccccacctactgcttgtaaatacaagcaacaccctggctggcacggttcaaaccaagctttctctacccaagtcctgcgccggccgccgcttcttctccttgcatccggttcaggatttccagcggcctcgactcccgatccggtctccgtaggagcgtcggtatcctcgtgtctccggcagtctttcgaacctcggttggtcccgattggcgagaaacccccgcgtcgaattggcggccaaggggcgcgggacgcatcattcgattcttggcggctgcttgcctgcttgtgcttgagcgcttaacagaacttcgcgagctgggctttctctaggtggaaagacaatttgatttggagatggggccggaaatgatagagcaggatggatggtaggaaaaggaaggggaaattcaggaattctctcaggcgtatggctatggagtgcctgtgctctggtgagcagttgaaggcgtcagatgagaccatgcggtcatctgattctacgatcacaaaggatttctcggccagtgggtactcttctcggaatggagagattgagcagtaccttgataatggcaacatagaggaagccgagttgtcgctccgggagggcatttgcctaaattatgagaagctgcacaagaatgtagaatgatattggatattgtggaagcagctgtacctgagggcttgccagcaggctttgggaaaggctgtaaattgaacgaaataatatgcaaggctgtagagttgctccctgagctgtggaaatcaggggggttttcacttgaaaccatttcttcatataggaggtcacttcttaataattggaatcttgatggagagacaatagcaaggatacaaaagaaatttgctgtttttctcctatatagtggttgtgaagcacgccctccaaatcttcattctcagttggacggttcatttgtacctcgcaacaatattgaagaggctatccttcttttgatgattcttttgaggaagtccaatctcaagaggattgagcaagatccctctgtgatgcatcaccttacttttgcactgtccatgtcaggacagctaattccactggctggacagtttgaagaattgttacctggtgtgttagacaaaaaagaatggttgtacagcgttgcattgtgttatttagcagaagaagatgatctgagtgccctgaatctactcaaaattatactaaaatctggagaggactccgttcaactcatagaactgcttctagcttcaaaggcttgcattgagatgagtattcatactgaaggtgctttttatgcaaggagagccattgcaaatatgcagggaggatgcaaaccaatggcaggacttgcaaacctattgcttggtgttgcactttctaatcaggctagaagtgcaatatctgatacagatagagcttcttggcagtgcgaagcactggaagcccttgggaatgctgaaaaaaatatacatgggaaagattctagggcattatacagtctcagccttgaaaatgctgtgcagaggaaattagaattagctgccttttatgcaaagaggctggtgaaacttgaggctggatcagagttgaggagttggctccttttagctcgaatacttagtgctcaaaagctgtttgctgatgctgaaacagttgttgatgctgctctagatcaaactgggaaatggtgtcaaggagatttattgcgaaccaaagccagaattcaggctgcacaggggcaatttagagaagcggttgaaacatacacccaacttcttgctatcattcaacttagaacgaaaagtttaactgctggagtttgcttgccaaagggcaacaaggatgataaaggcctggaaacagagacctggtatgatctagctctcttatacctaggtatggcacaatggagggatgcagaggtttgtgtattgaagataagatccatcagtccttattctgcattggcttggcatgctacaggaaaaatatatgaagcaaaaggtcttagaaaagaagctttgggagcttttttcagagccttagatcttgatcctaaacatgtcccaagtttaatatcaactgccactgttctacaacaacttggtgacaggccattgccttctatacggtgcttcctgactgatgcattacaactggatagaactaatcatgttgcgtggttcaatcttggccttctttacaaagaggaaggtggcaggtcagcagctgaggctgctgaatgcttccaagctgctgcttttcttaaagaaactgcaccttcagaacctttcagatgacatctacaggggctatagatgtaagctgctgtatgtatttttgatatatttcactgatgaaatagtggattacagagttctaaaaatgatcttcttgggagatcacagcattggaaactgttggaaaaaatgtttaacaattcaatctatagttccaattgttgcctgtatagcaacaagaaagacgatgatcttcgccttgtgtaggaacagtgcttactgtgatatatatatatagatagatgaccagtacattgtgtatcttgagtaaaatggtttcacatataaggtatcagactactctctccgtttgttaagaatttagtcaagatataaaatatgttctggggtccttcagaattcagttcagtatttactatcaactgtaaccttcatgcatatcaatcatggattacaagttattgatggattgcctatttcctgacatctgatgaaaaaaactgaccctaattgaccttgtgatcggacatggtagagtgaa

SEQ ID NO: 208943 - DNA, 3090 bp, Zea Mays
ctacgaccgattctttccatctacccccacctactgcttgtaaatacaagcaacaccctggctggcacggttcaaaccaagctttctctacccaagtcctgcgccggccgccgcttcttctccttgcatccggttcaggatttccagcggcctcgactcccgatccggtctccgtaggagcgtcggtatcctcgtgtctccggcagtctttcgaacctcggttggtcccgattggcgagaaacccccgcgtcgaattggcggccaaggggcgcgggacgcatcattcgattcttggcggctgcttgcctgcttgtgcttgagcgcttaacagaacttcgcgagctgggctttctctaggtggaaagacaatttgatttggagatggggccggaaatgatagagcaggatggatggtaggaaaaggaaggggaaattcaggaattctctcaggcgtatggctatggagtgcctgtgctctggtgagcagttgaaggcgtcagatgagaccatgcggtcatctgattctacgatcacaaaggatttctcggccagtgggtactcttctcggaatggagagattgagcagtaccttgataatggcaacatagaggaagccgagttgtcgctccgggagggcatttgcctaaattatgaggaagcaagggcattgctaggaaggctagaatatcaacggggtcatgtagaggcagcactccgtgtctttgatgggatagacatatctgcattagttcctaagatgaaaatctcaattgctagaaaaacagaccgtcggaagactcattcacagtgggattccccaccaatgcccttgcatgctgtcagccttctcatggaggccatatatcttaaagcaagagcacttcatgatcttgggaaagataaagaagctgcacaagaatgtagaatgatattggatattgtggaagcagctgtacctgagggcttgccagcaggctttgggaaaggctgtaaattgaacgaaataatatgcaaggctgtagagttgctccctgagctgtggaaatcaggggggttttcacttgaaaccatttcttcatataggaggtcacttcttaataattggaatcttgatggagagacaatagcaaggatacaaaagaaatttgctgtttttctcctatatagtggttgtgaagcacgccctccaaatcttcattctcagttggacggttcatttgtacctcgcaacaatattgaagaggctatccttcttttgatgattcttttgaggaagtccaatctcaagaggattgagcaagatccctctgtgatgcatcaccttacttttgcactgtccatgtcaggacagctaattccactggctggacagtttgaagaattgttacctggtgtgttagacaaaaaagaatggttgtacagcgttgcattgtgttatttagcagaagaagatgatctgagtgccctgaatctactcaaaattatactaaaatctggagaggactccgttcaactcatagaactgcttctagcttcaaaggcttgcattgagatgagtattcatactgaaggtgctttttatgcaaggagagccattgcaaatatgcagggaggatgcaaaccaatggcaggacttgcaaacctattgcttggtgttgcactttctaatcaggctagaagtgcaatatctgatacagatagagcttcttggcagtgcgaagcactggaagcccttgggaatgctgaaaaaaatatacatgggaaagattctagggcattatacagtctcagccttgaaaatgctgtgcagaggaaattagaattagctgccttttatgcaaagaggctggtgaaacttgaggctggatcagagttgaggagttggctccttttagctcgaatacttagtgctcaaaagctgtttgctgatgctgaaacagttgttgatgctgctctagatcaaactgggaaatggtgtcaaggagatttattgcgaaccaaagccagaattcaggctgcacaggggcaatttagagaagcggttgaaacatacacccaacttcttgctatcattcaacttagaacgaaaagtttaactgctggagtttgcttgccaaagggcaacaaggatgataaaggcctggaaacagagacctggtatgatctagctctcttatacctaggtatggcacaatggagggatgcagaggtttgtgtattgaagataagatccatcagtccttattctgcattggcttggcatgctacaggaaaaatatatgaagcaaaaggtcttagaaaagaagctttgggagcttttttcagagccttagatcttgatcctaaacatgtcccaagtttaatatcaactgccactgttctacaacaacttggtgacaggccattgccttctatacggtgcttcctgactgatgcattacaactggatagaactaatcatgttgcgtggttcaatcttggccttctttacaaagaggaaggtggcaggtcagcagctgaggctgctgaatgcttccaagctgctgcttttcttaaagaaactgcaccttcagaacctttcagatgacatctacaggggctatagatgtaagctgctgtatgtatttttgatatatttcactgatgaaatagtggattacagagttctaaaaatgatcttcttgggagatcacagcattggaaactgttggaaaaaatgtttaacaattcaatctatagttccaattgttgcctgtatagcaacaagaaagacgatgatcttcgccttgtgtaggaacagtgcttactgtgatatatatatatagatagatgaccagtacattgtgtatcttgagtaaaatggtttcacatataaggtatcagactactctctccgtttgttaagaatttagtcaagatataaaatatgttctggggtccttcagaattcagttcagtatttactatcaactgtaaccttcatgcatatcaatcatggattacaagttattgatggattgcctatttcctgacatctgatgaaaaaaactgaccctaattgaccttgtgatcggacatggtagagtgaa

SEQ ID NO: 208944 - DNA, 2420 bp, Zea Mays
ctacgaccgattctttccatctacccccacctactgcttgtaaatacaagcaacaccctggctggcacggttcaaaccaagctttctctacccaagtcctgcgccggccgccgcttcttctccttgcatccggttcaggatttccagcggcctcgactcccgatccggtctccgtaggagcgtcggtatcctcgtgtctccggcagtctttcgaacctcggttggtcccgattggcgagaaacccccgcgtcgaattggcggccaaggggcgcgggacgcatcattcgattcttggcggctgcttgcctgcttgtgcttgagcgcttaacagaacttcgcgagctgggctttctctaggtggaaagacaatttgatttggagatggggccggaaatgatagagcaggatggatggtaggaaaaggaaggggaaattcaggaattctctcaggcgtatggctatggagtgcctgtgctctggtgagcagttgaaggcgtcagatgagaccatgcggtcatctgattctacgatcacaaaggatttctcggccagtgggtactcttctcggaatggagagattgagcagtaccttgataatggcaacatagaggaagccgagttgtcgctccgggagggcatttgcctaaattatgagaagctgcacaagaatgtagaatgatattggatattgtggaagcagctgtacctgagggcttgccagcaggctttgggaaaggctgtaaattgaacgaaataatatgcaaggctgtagagttgctccctgagctgtggaaatcaggggggttttcacttgaaaccatttcttcatataggaggtcacttcttaataattggaatcttgatggagagacaatagcaaggatacaaaagaaatttgctgtttttctcctatatagtggttgtgaagcacgccctccaaatcttcattctcagttggacggttcatttgtacctcgcaacaatattgaagaggctatccttcttttgatgattcttttgaggaagtccaatctcaagaggattgagcaagatccctctgtgatgcatcaccttacttttgcactgtccatgtcaggacagctaattccactggctggacagtttgaagaattgttacctggtgtgttagacaaaaaagaatggttgtacagcgttgcattgtgttatttagcagaagaagatgatctgagtgccctgaatctactcaaaattatactaaaatctggagaggactccgttcaactcatagaactgcttctagcttcaaaggcttgcattgagatgagtattcatactgaaggtgctttttatgcaaggagagccattgcaaatatgcagggaggatgcaaaccaatggcaggacttgcaaacctattgcttggtgttgcactttctaatcaggctagaagtgcaatatctgatacagatagagcttcttggcagtgcgaagcactggaagcccttgggaatgctgaaaaaaatatacatgggaaagattctagggcattatacagtctcagccttgaaaatgctgtgcagaggaaattagaattagctgccttttatgcaaagaggctggtgaaacttgaggctggatcagagttgaggagttggctccttttagctcgaatacttagtgctcaaaagctgtttgctgatgctgaaacagttgttgatgctgctctagatcaaactgggaaatggtgtcaaggagatttattgcgaaccaaagccagaattcaggctgcacaggggcaatttagagaagcggttgaaacatacacccaacttcttgctatcattcaacttagaacgaaaagtttaactgctggagtttgcttgccaaagggcaacaaggatgataaaggcctggaaacagagacctggtatgatctagctctcttatacctaggtatggcacaatggagggatgcagaggtttgtgtattgaagataagatccatcagtccttattctgcattggcttggcatgctacaggaaaaatatatgaagcaaaaggtcttagaaaagaagctttgggagcttttttcagagccttagatcttgatcctaaacatgtcccaagtttaatatcaactgccactgttctacaacaacttggtgacaggccattgccttctatacggtgcttcctgactgatgcattacaactggatagaactaatcatgttgcgtggttcaatcttggccttctttacaaagaggaaggtggcaggtcagcagctgaggctgctgaatgcttccaagctgctgcttttcttaaagaaactgcaccttcagaacctttcagatgacatctacaggggctatagatcttagctagttgcatcaattaatggtgcagatattggtctctatccagcactaatgaaatgg

SEQ ID NO: 208945 - DNA, 2974 bp, Zea Mays
ctacgaccgattctttccatctacccccacctactgcttgtaaatacaagcaacaccctggctggcacggttcaaaccaagctttctctacccaagtcctgcgccggccgccgcttcttctccttgcatccggttcaggatttccagcggcctcgactcccgatccggtctccgtaggagcgtcggtatcctcgtgtctccggcagtctttcgaacctcggttggtcccgattggcgagaaacccccgcgtcgaattggcggccaaggggcgcgggacgcatcattcgattcttggcggctgcttgcctgcttgtgcttgagcgcttaacagaacttcgcgagctgggctttctctaggtggaaagacaatttgatttggagatggggccggaaatgatagagcaggatggatggtaggaaaaggaaggggaaattcaggaattctctcaggcgtatggctatggagtgcctgtgctctggtgagcagttgaaggcgtcagatgagaccatgcggtcatctgattctacgatcacaaaggatttctcggccagtgggtactcttctcggaatggagagattgagcagtaccttgataatggcaacatagaggaagccgagttgtcgctccgggagggcatttgcctaaattatgaggaagcaagggcattgctaggaaggctagaatatcaacggggtcatgtagaggcagcactccgtgtctttgatgggatagacatatctgcattagttcctaagatgaaaatctcaattgctagaaaaacagaccgtcggaagactcattcacagtgggattccccaccaatgcccttgcatgctgtcagccttctcatggaggccatatatcttaaagcaagagcacttcatgatcttgggaaagataaagaagctgcacaagaatgtagaatgatattggatattgtggaagcagctgtacctgagggcttgccagcaggctttgggaaaggctgtaaattgaacgaaataatatgcaaggctgtagagttgctccctgagctgtggaaatcaggggggttttcacttgaaaccatttcttcatataggaggtcacttcttaataattggaatcttgatggagagacaatagcaaggatacaaaagaaatttgctgtttttctcctatatagtggttgtgaagcacgccctccaaatcttcattctcagttggacggttcatttgtacctcgcaacaatattgaagaggctatccttcttttgatgattcttttgaggaagtccaatctcaagaggattgagcaagatccctctgtgatgcatcaccttacttttgcactgtccatgtcaggacagctaattccactggctggacagtttgaagaattgttacctggtgtgttagacaaaaaagaatggttgtacagcgttgcattgtgttatttagcagaagaagatgatctgagtgccctgaatctactcaaaattatactaaaatctggagaggactccgttcaactcatagaactgcttctagcttcaaaggcttgcattgagatgagtattcatactgaaggtgctttttatgcaaggagagccattgcaaatatgcagggaggatgcaaaccaatggcaggacttgcaaacctattgcttggtgttgcactttctaatcaggctagaagtgcaatatctgatacagatagagcttcttggcagtgcgaagcactggaagcccttgggaatgctgaaaaaaatatacatgggaaagattctagggcattatacagtctcagccttgaaaatgctgtgcagaggaaattagaattagctgccttttatgcaaagaggctggtgaaacttgaggctggatcagagttgaggagttggctccttttagctcgaatacttagtgctcaaaagctgtttgctgatgctgaaacagttgttgatgctgctctagatcaaactgggaaatggtgtcaaggagatttattgcgaaccaaagccagaattcaggctgcacaggggcaatttagagaagcggttgaaacatacacccaacttcttgctatcattcaacttagaacgaaaagtttaactgctggagtttgcttgccaaagggcaacaaggatgataaaggcctggaaacagagacctggtatgatctagctctcttatacctaggtatggcacaatggagggatgcagaggtttgtgtattgaagataagatccatcagtccttattctgcattggcttggcatgctacaggaaaaatatatgaagcaaaaggtcttagaaaagaagctttgggagcttttttcagagccttagatcttgatcctaaacatgtcccaagtttaatatcaactgccactgttctacaacaacttggtgacaggccattgccttctatacggtgcttcctgactgatgcattacaactggatagaactaatcatgttgcgtggttcaatcttggccttctttacaaagaggaaggtggcaggtcagcagctgaggctgctgaatgcttccaagctgctgcttttcttaaagaaactgcaccttcagaacctttcagatgacatctacaggggctatagatcttagctagttgcatcaattaatggtgcagatattggtctctatccagcactaatgaaatggtacaccagataaccagcaaccgattgaattatatcagtcttcttgtctggatatgcccaagtatgaagggcaattgctggtaaacatctggaaagttcaaccatggatatattgagttgtaatgtatgtagctatatggaacatggagtcagtaagtaggatactagaaatgtatacgtataccattgttctcaatgacatctactagggttttatgtgtttttttttgacatctctgcaaataaggcaagatacccagctttgttccttggatttttggtagatgcattgttatcttgtgttt

SEQ ID NO: 208946 - DNA, 2833 bp, Zea Mays
ctacgaccgattctttccatctacccccacctactgcttgtaaatacaagcaacaccctggctggcacggttcaaaccaagctttctctacccaagtcctgcgccggccgccgcttcttctccttgcatccggttcaggatttccagcggcctcgactcccgatccggtctccgtaggagcgtcggtatcctcgtgtctccggcagtctttcgaacctcggttggtcccgattggcgagaaacccccgcgtcgaattggcggccaaggggcgcgggacgcatcattcgattcttggcggctgcttgcctgcttgtgcttgagcgcttaacagaacttcgcgagctgggctttctctaggtggaaagacaatttgatttggagatggggccggaaatgatagagcaggatggatggtaggaaaaggaaggggaaattcaggaattctctcaggcgtatggctatggagtgcctgtgctctggtgagcagttgaaggcgtcagatgagaccatgcggtcatctgattctacgatcacaaaggatttctcggccagtgggtactcttctcggaatggagagattgagcagtaccttgataatggcaacatagaggaagccgagttgtcgctccgggagggcatttgcctaaattatgaggaagcaagggcattgctaggaaggctagaatatcaacggggtcatgtagaggcagcactccgtgtctttgatgggatagacatatctgcattagttcctaagatgaaaatctcaattgctagaaaaacagaccgtcggaagactcattcacagtgggattccccaccaatgcccttgcatgctgtcagccttctcatggaggccatatatcttaaagcaagagcacttcatgatcttgggaaagataaagaagctgcacaagaatgtagaatgatattggatattgtggaagcagctgtacctgagggcttgccagcaggctttgggaaaggctgtaaattgaacgaaataatatgcaaggctgtagagttgctccctgagctgtggaaatcaggggggttttcacttgaaaccatttcttcatataggaggtcacttcttaataattggaatcttgatggagagacaatagcaaggatacaaaagaaatttgctgtttttctcctatatagtggttgtgaagcacgccctccaaatcttcattctcagttggacggttcatttgtacctcgcaacaatattgaagaggctatccttcttttgatgattcttttgaggaagtccaatctcaagaggattgagcaagatccctctgtgatgcatcaccttacttttgcactgtccatgtcaggacagctaattccactggctggacagtttgaagaattgttacctggtgtgttagacaaaaaagaatggttgtacagcgttgcattgtgttatttagcagaagaagatgatctgagtgccctgaatctactcaaaattatactaaaatctggagaggactccgttcaactcatagaactgcttctagcttcaaaggcttgcattgagatgagtattcatactgaaggtgctttttatgcaaggagagccattgcaaatatgcagggaggatgcaaaccaatggcaggacttgcaaacctattgcttggtgttgcactttctaatcaggctagaagtgcaatatctgatacagatagagcttcttggcagtgcgaagcactggaagcccttgggaatgctgaaaaaaatatacatgggaaagattctagggcattatacagtctcagccttgaaaatgctgtgcagaggaaattagaattagctgccttttatgcaaagaggctggtgaaacttgaggctggatcagagttgaggagttggctccttttagctcgaatacttagtgctcaaaagctgtttgctgatgctgaaacagttgttgatgctgctctagatcaaactgggaaatggtgtcaaggagatttattgcgaaccaaagccagaattcaggctgcacaggggcaatttagagaagcggttgaaacatacacccaacttcttgctatcattcaacttagaacgaaaagtttaactgctggagtttgcttgccaaagggcaacaaggatgataaaggcctggaaacagagacctggtatgatctagctctcttatacctaggtatggcacaatggagggatgcagaggtttgtgtattgaagataagatccatcagtccttattctgcattggcttggcatgctacaggaaaaatatatgaagcaaaaggtcttagaaaagaagctttgggagcttttttcagagccttagatcttgatcctaaacatgtcccaagtttaatatcaactgccactgttctacaacaacttggtgacaggccattgccttctatacggtgcttcctgactgatgcattacaactggatagaactaatcatgttgcgtggttcaatcttggccttctttacaaagaggaaggtggcaggtcagcagctgaggctgctgaatgcttccaagctgctgcttttcttaaagaaactgcaccttcagaacctttcagatgacatctacaggggctatagatgtaaacatctggaaagttcaaccatggatatattgagttgtaatgtatgtagctatatggaacatggagtcagtaagtaggatactagaaatgtatacgtataccattgttctcaatgacatctactagggttttatgtgtttttttttgacatctctgcaaataaggcaagatacccagctttgttccttggatttttggtagatgcattgttatcttgtgttt

SEQ ID NO: 208947 - DNA, 2944 bp, Zea Mays
ctacgaccgattctttccatctacccccacctactgcttgtaaatacaagcaacaccctggctggcacggttcaaaccaagctttctctacccaagtcctgcgccggccgccgcttcttctccttgcatccggttcaggatttccagcggcctcgactcccgatccggtctccgtaggagcgtcggtatcctcgtgtctccggcagtctttcgaacctcggttggtcccgattggcgagaaacccccgcgtcgaattggcggccaaggggcgcgggacgcatcattcgattcttggcggctgcttgcctgcttgtgcttgagcgcttaacagaacttcgcgagctgggctttctctaggtggaaagacaatttgatttggagatggggccggaaatgatagagcaggatggatggtaggaaaaggaaggggaaattcaggaattctctcaggcgtatggctatggagtgcctgtgctctggtgagcagttgaaggcgtcagatgagaccatgcggtcatctgattctacgatcacaaaggatttctcggccagtgggtactcttctcggaatggagagattgagcagtaccttgataatggcaacatagaggaagccgagttgtcgctccgggagggcatttgcctaaattatgaggaagcaagggcattgctaggaaggctagaatatcaacggggtcatgtagaggcagcactccgtgtctttgatgggatagacatatctgcattagttcctaagatgaaaatctcaattgctagaaaaacagaccgtcggaagactcattcacagtgggattccccaccaatgcccttgcatgctgtcagccttctcatggaggccatatatcttaaagcaagagcacttcatgatcttgggaaagataaagaagctgcacaagaatgtagaatgatattggatattgtggaagcagctgtacctgagggcttgccagcaggctttgggaaaggctgtaaattgaacgaaataatatgcaaggctgtagagttgctccctgagctgtggaaatcaggggggttttcacttgaaaccatttcttcatataggaggtcacttcttaataattggaatcttgatggagagacaatagcaaggatacaaaagaaatttgctgtttttctcctatatagtggttgtgaagcacgccctccaaatcttcattctcagttggacggttcatttgtacctcgcaacaatattgaagaggctatccttcttttgatgattcttttgaggaagtccaatctcaagaggattgagcaagatccctctgtgatgcatcaccttacttttgcactgtccatgtcaggacagctaattccactggctggacagtttgaagaattgttacctggtgtgttagacaaaaaagaatggttgtacagcgttgcattgtgttatttagcagaagaagatgatctgagtgccctgaatctactcaaaattatactaaaatctggagaggactccgttcaactcatagaactgcttctagcttcaaaggcttgcattgagatgagtattcatactgaaggtgctttttatgcaaggagagccattgcaaatatgcagggaggatgcaaaccaatggcaggacttgcaaacctattgcttggtgttgcactttctaatcaggctagaagtgcaatatctgatacagatagagcttcttggcagtgcgaagcactggaagcccttgggaatgctgaaaaaaatatacatgggaaagattctagggcattatacagtctcagccttgaaaatgctgtgcagaggaaattagaattagctgccttttatgcaaagaggctggtgaaacttgaggctggatcagagttgaggagttggctccttttagctcgaatacttagtgctcaaaagctgtttgctgatgctgaaacagttgttgatgctgctctagatcaaactgggaaatggtgtcaaggagatttattgcgaaccaaagccagaattcaggctgcacaggggcaatttagagaagcggttgaaacatacacccaacttcttgctatcattcaacttagaacgaaaagtttaactgctggagtttgcttgccaaagggcaacaaggatgataaaggcctggaaacagagacctggtatgatctagctctcttatacctaggtatggcacaatggagggatgcagaggtttgtgtattgaagataagatccatcagtccttattctgcattggcttggcatgctacaggaaaaatatatgaagcaaaaggtcttagaaaagaagctttgggagcttttttcagagccttagatcttgatcctaaacatgtcccaagtttaatatcaactgccactgttctacaacaacttggtgacaggccattgccttctatacggtgcttcctgactgatgcattacaactggatagaactaatcatgttgcgtggttcaatcttggccttctttacaaagaggaaggtggcaggtcagcagctgaggctgctgaatgcttccaagctgctgcttttcttaaagaaactgcaccttcagaacctttcagatgacatctacaggggctatagatatattggtctctatccagcactaatgaaatggtacaccagataaccagcaaccgattgaattatatcagtcttcttgtctggatatgcccaagtatgaagggcaattgctggtaaacatctggaaagttcaaccatggatatattgagttgtaatgtatgtagctatatggaacatggagtcagtaagtaggatactagaaatgtatacgtataccattgttctcaatgacatctactagggttttatgtgtttttttttgacatctctgcaaataaggcaagatacccagctttgttccttggatttttggtagatgcattgttatcttgtgttt

SEQ ID NO: 208948 - DNA, 2511 bp, Zea Mays
ccctctccctgtccggttttaaagacgcggagagattgtaaagtctaaatcttgcattcacttggggaattggataggtagggagtggataggctttgtcggtaggtcctttttccggggagaattcgcctgagttccttggaataaaagaagatttgcgatccttaagcctcacgttccttgatctgctggtgtggaagttgatcttgatcatgttcccgttcgtcgtcttcatggacaatttgatttggagatggggccggaaatgatagagcaggatggatggtaggaaaaggaaggggaaattcaggaattctctcaggcgtatggctatggagtgcctgtgctctggtgagcagttgaaggcgtcagatgagaccatgcggtcatctgattctacgatcacaaaggatttctcggccagtgggtactcttctcggaatggagagattgagcagtaccttgataatggcaacatagaggaagccgagttgtcgctccgggagggcatttgcctaaattatgaggaagcaagggcattgctaggaaggctagaatatcaacggggtcatgtagaggcagcactccgtgtctttgatgggatagacatatctgcattagttcctaagatgaaaatctcaattgctagaaaaacagaccgtcggaagactcattcacagtgggattccccaccaatgcccttgcatgctgtcagccttctcatggaggccatatatcttaaagcaagagcacttcatgatcttgggaaagataaagaagctgcacaagaatgtagaatgatattggatattgtggaagcagctgtacctgagggcttgccagcaggctttgggaaaggctgtaaattgaacgaaataatatgcaaggctgtagagttgctccctgagctgtggaaatcaggggggttttcacttgaaaccatttcttcatataggaggtcacttcttaataattggaatcttgatggagagacaatagcaaggatacaaaagaaatttgctgtttttctcctatatagtggttgtgaagcacgccctccaaatcttcattctcagttggacggttcatttgtacctcgcaacaatattgaagaggctatccttcttttgatgattcttttgaggaagtccaatctcaagaggattgagcaagatccctctgtgatgcatcaccttacttttgcactgtccatgtcaggacagctaattccactggctggacagtttgaagaattgttacctggtgtgttagacaaaaaagaatggttgtacagcgttgcattgtgttatttagcagaagaagatgatctgagtgccctgaatctactcaaaattatactaaaatctggagaggactccgttcaactcatagaactgcttctagcttcaaaggcttgcattgagatgagtattcatactgaaggtgctttttatgcaaggagagccattgcaaatatgcagggaggatgcaaaccaatggcaggacttgcaaacctattgcttggtgttgcactttctaatcaggctagaagtgcaatatctgatacagatagagcttcttggcagtgcgaagcactggaagcccttgggaatgctgaaaaaaatatacatgggaaagattctagggcattatacagtctcagccttgaaaatgctgtgcagaggaaattagaattagctgccttttatgcaaagaggctggtgaaacttgaggctggatcagagttgaggagttggctccttttagctcgaatacttagtgctcaaaagctgtttgctgatgctgaaacagttgttgatgctgctctagatcaaactgggaaatggtgtcaaggagatttattgcgaaccaaagccagaattcaggctgcacaggggcaatttagagaagcggttgaaacatacacccaacttcttgctatcattcaacttagaacgaaaagtttaactgctggagtttgcttgccaaagggcaacaaggatgataaaggcctggaaacagagacctggtatgatctagctctcttatacctaggtatggcacaatggagggatgcagaggtttgtgtattgaagataagatccatcagtccttattctgcattggcttggcatgctacaggaaaaatatatgaagcaaaaggtcttagaaaagaagctttgggagcttttttcagagccttagatcttgatcctaaacatgtcccaagtttaatatcaactgccactgttctacaacaacttggtgacaggccattgccttctatacggtgcttcctgactgatgcattacaactggatagaactaatcatgttgcgtggttcaatcttggccttctttacaaagaggaaggtggcaggtcagcagctgaggctgctgaatgcttccaagctgctgcttttcttaaagaaactgcaccttcagaacctttcagatgacatctacaggggctatagatatattggtctctatccagcactaatgaaatgg

SEQ ID NO: 208949 - DNA, 899 bp, Zea Mays
cctcgtcccgtagtgcttggactatagtatagatatagattaaccattaaaccccatcatcggttagcttgtttcggcgtttcgttggatcagcagagcgttaaaccctatccgttggatgtagcactacaggcgtcgagcactggtaatcctgcaaccttcgtcatggcgcatgcggcggcggccgccgccgtgccgttacgtcgtccgctcctcttcctcaaggaggctcgactcctgtccacactcgcgacccccttacctgggctccgccacccgcgcgccctccgacccacaggccccttgccctccgatgccgaggacaccgacgatccagacgccggcgacggcgccgccgtgtccttcaagaagagccgcaacgaactgaagcgggaggcccgccgcgccgtgaagtggggaatggacctcgccaagttctccccacctcagatcaagcgcatcctcagtgccgcgtcgctggagcgcgaggtgttcgacgcgctaatgctcgtgaagaagtttgggccggatgtgcgggaaggaaggaggagacagttcaattacatcggaagtcttttgcgcgatgcacaaccagaattgatggatactctaatacaagcttctaaggatggagatgagaggaagttatataccttacttagtgaaggtaaactgttggtggaagaagaggaagaggaggaagaggacctacctgatggagaagaggagaatcaagagtatatgaaaattgcagatagatggtttgacggcctcctctgcaaagacatttcagttactaatgaagtttactctgtccatagtgttgaatttgatcgtcaggcatgattatccatggtggaaagaaaaagtgattgactcagacttgaaaagaaaagatg

SEQ ID NO: 208950 - DNA, 757 bp, Zea Mays
tgtgttcttcaagtcggtgtttgttcagtaattcttttgcgcgatgcacaaccagaattgatggatactctaatacaagcttctaaggatggagatgagaggaagttatataccttacttagtgaaggtaaactgttggtggaagaagaggaagaggaggaagaggacctacctgatggagaagaggagaatcaagagtatatgaaaattgcagatagatggtttgacggcctcctctgcaaagacatttcagttactaatgaagtttactctgtccatagtgttgaatttgatcgtcagcttgtgaagagagcccacatgttccaagaaagcacacaaaataaagatggggaagaatctaatgcgaagctttctggagcaaagaaaccacttatgaggttccttcgttcccttgcaaaggaggcttatgctccataggcgagctacaagctatcctgttaacttcttgtatccttatgtatgaaattgtaaaaattatcactatatttagggttgaaacaggaccggaaagtcttgtcctggtccgaatactgttttttcccgttcacttcagttatttttcggtttcggaacgaaaacaagtaggcagtgtttgaaaacgttttaactgatttttcgtttgttcttgcggttcctgttttttcggtgcagagactgttgccgcggcaagtgtgacatgtgtgtagtgtaatataatttctaactcaaataatgtcactatgtgttaatgtttgac

SEQ ID NO: 208951 - DNA, 2116 bp, Zea Mays
taaactttataatttaatcatacagtttaagctaacatactgagttattgacatctttaggaaactggcataatattatgtagctttaatgcccattctgcccctcgttaaatcgaacctacatgttttatgtggggtgcgttactatctatatgtgcgattagtaggatgaaatggactcatgggcggacgtagtcacaaagttcctgggacgattaggtcgtggaacaggggatgaggaacatgatatgctccttaaaaaaggtttttcacttcggggatgatattgttcctggaacggaaacggcgttcccggtgacgaacatgtgatggtgctcatgggattgagtatgcataatgaaagattttgaggaaccatcatgtggatgtgctggactatggcaacattctcggtttaatgtccaatcacatgtctaaagcatgctggtgatttttataagaattcagacataaacattggcgcccaaaggtttgagcattggtctttgttgtgaactgcattctatcctgtggcgagatcagatggtgatgcagtttgaatggagttctgcattgcagtctttcaggtatatttgtacaatatggctgaaaggaagtaaaagtaacagcattgttctgttgatgaaaaaatagcttcagaattcagaatgttgtgccatgagttagttgggttgtcggatcttcttgttgataatgtttgacaccaaagacgaccgtgtcctgtgaagtcagctagctacattggcaaactgctctttctccatggtaacatggagtgaacactcggcaggccacatgtgcaaatttggagaccattaacatgtgcaaatttggagaccattgtgcaagtttggcaatttctttgtaggaataacattatggcaattttatcgagccctcaagcatgtttacttctttaggtcgtacctagcctaccagtaccagcgtattagaattttgctagcacagtttgaaaaccatgcgtgtgcaggtttgccaaatcaagattgcaaaggctgctgcttacatatacggtctggagaggtagagcagcctgagctatgcatgggctgtatggtggcatgctgctacttatttcttgcaagaatcttgtagcgaggaaatttctggaccttgatgcattgctatcacatgcttatgatacatgcaaggccggtttgaagacaaaacacttggggtttcacaaagcactgtgtgttctgatggggtggaattggcatgttgctccagacacatctaaatcacatcactccattccatctgaggaagtaaatgccatgaggggagacctcatgctgtggcctccagttgttgtgatacataacagctcgactggtcatgaggcaaaggatactgatgcaaagattgtgtccatagaagaaatcgaaggtgtattggcagatattggggtagcgcatgagaaggctagggttagccatggaagatcagccaatcagagcgtgttcctggtgaagttccagccaacaatatctgggttccaagaagccatgagagtgcatacccatttctccaccagaaaccatggcaaggaagagttccagctgatgaaaggcagcaaaggtaagaaggctgcctccactgatagcctggaagagctgctgtatgcgcatattggggtcgtggaagacctggggctgctggatgagggaacaaagaagagatgcaaggtcatgaggaagaaggaaattgaggcaaatgcagaggcaacactgaatttagaagtttattaggtctagtactaggatccgaaccatttgaagtggtcctcttttgcttcatcttgcagctgcttgcttgtccttgcggctgtaacgtcaaaagaagaaaagaagtgtaaattctgcttttgccattaaagagtgacgaaactcagttggcttctgtctgctggggaaggcctgcctcggtttgcatggcatggcaaggacataattttgtggctagatggggacaccttaacggcaaaagcagaattacctggtcgaagaaccgagtttaatctttatattatggaatcccttctttttttaagtcttttgctgcgtgaagttat

SEQ ID NO: 208952 - DNA, 1227 bp, Zea Mays
ccgccctccgcacgccgcctccgaaccccatcgcccatcctcactacggcgacggctattgccacagccgccgccatcttgacgcgtacgagattctgaggccttgatctgaaacccgcctcgatcccacagccattcacccaccgttccaccggtcacggtagcggcgatccctactctcaggccgtagctacgacctagccggcgccatgcgacacggaggcggaggcaggggaggtggagtgtagcgaggaaatttctggaccttgatgcattgctatcacatgcttatgatacatgcaaggccggtttgaagacaaaacacttggggtttcacaaagcactgtgtgttctgatggggtggaattggcatgttgctccagacacatctaaatcacatcactccattccatctgaggaagtaaatgccatgaggggagacctcatgctgtggcctccagttgttgtgatacataacagctcgactggtcatgaggcaaaggatactgatgcaaagattgtgtccatagaagaaatcgaaggtgtattggcagatattggggtagcgcatgagaaggctagggttagccatggaagatcagccaatcagagcgtgttcctggtgaagttccagccaacaatatctgggttccaagaagccatgagagtgcatacccatttctccaccagaaaccatggcaaggaagagttccagctgatgaaaggcagcaaaggtaagaaggctgcctccactgatagcctggaagagctgctgtatgcgcatattggggtcgtggaagacctggggctgctggatgagggaacaaagaagagatgcaaggtcatgaggaagaaggaaattgaggcaaatgcagaggcaacactgaatttagaagtttattaggtctagtactaggatccgaaccatttgaagtggtcctcttttgcttcatcttgcagctgcttgcttgtccttgcggctgtaacgtcaaaagaagaaaagaagtgtaaattctgcttttgccattaaagagtgacgaaactcagttggcttctgtctgctggggaaggcctgcctcggtttgcatggcatggcaaggacataattttgtggctagatggggacaccttaacggcaaaagcagaattacctggtcgaagaaccgagtttaatctttatattatggaatcccttctttttttaagtcttttgctgcgtgaagttat

SEQ ID NO: 208953 - DNA, 1318 bp, Zea Mays
cccctcccctccgccctccgcacgccgcctccgaaccccatcgcccatcctcactacggcgacggctattgccacagccgccgccatcttgacgcgtacgagattctgaggccttgatctgaaacccgcctcgatcccacagccattcacccaccgttccaccggtcacggtagcggcgatccctactctcaggccgtagctacgacctagccggcgccatgcgacacggaggcggaggcaggggaggtggaggtaaaagaggtcgaggaagaggagcgggctccggacgcagagacgcgcgccccggcaacgattcgtaccgcggcgaccgtgtgtagcgaggaaatttctggaccttgatgcattgctatcacatgcttatgatacatgcaaggccggtttgaagacaaaacacttggggtttcacaaagcactgtgtgttctgatggggtggaattggcatgttgctccagacacatctaaatcacatcactccattccatctgaggaagtaaatgccatgaggggagacctcatgctgtggcctccagttgttgtgatacataacagctcgactggtcatgaggcaaaggatactgatgcaaagattgtgtccatagaagaaatcgaaggtgtattggcagatattggggtagcgcatgagaaggctagggttagccatggaagatcagccaatcagagcgtgttcctggtgaagttccagccaacaatatctgggttccaagaagccatgagagtgcatacccatttctccaccagaaaccatggcaaggaagagttccagctgatgaaaggcagcaaaggtaagaaggctgcctccactgatagcctggaagagctgctgtatgcgcatattggggtcgtggaagacctggggctgctggatgagggaacaaagaagagatgcaaggtcatgaggaagaaggaaattgaggcaaatgcagaggcaacactgaatttagaagtttattaggtctagtactaggatccgaaccatttgaagtggtcctcttttgcttcatcttgcagctgcttgcttgtccttgcggctgtaacgtcaaaagaagaaaagaagtgtaaattctgcttttgccattaaagagtgacgaaactcagttggcttctgtctgctggggaaggcctgcctcggtttgcatggcatggcaaggacataattttgtggctagatggggacaccttaacggcaaaagcagaattacctggtcgaagaaccgagtttaatctttatattatggaatcccttctttttttaagtcttttgctgcgtgaagttat

SEQ ID NO: 208954 - DNA, 237 bp, Zea Mays
ccaggccgttatctcagatgggccgttgcacttgcacgtctcgctcaggcgctccttattagcggccgccaactcgccggcgctgcgtccgcgtgctgcgtcttcaccaagctcccggtcgccaccgcgcctctcgtgcgcgcggcggtccggcgtcgatgctaagcccttcccgctccatcgcttccgcctctcgtgtaattctgagatgcaaacatacatgatgtgtttgtcccc

SEQ ID NO: 208955 - DNA, 1161 bp, Zea Mays
aagttgtgtgtattgttatcaaacgtggcttcctgtggagaattcagaagttaggaaggatggaataaaaggaacatacagagtggatgttgacattcctgctaatgattggataaacgtcaccaagttctatgatgttctaattttcaacactggacactggtgggatagatataaattcccaaaagacactccccttgttttctacaaagggggaaagccgattgaacctccacttgacatgcacaacggactgaaagtagtcctgaaaagtattgcttcttacatcgaaagggaggttcctaggaaaacactgaagctgtggcgcacgcagtcacctaggcacttctatggaggttatgcatttcaaagctgtgaattgtttattcctcttcacaaatcttgtgcagctcaattcttggtttgatccccagtttgggggagtgaacaaagaagcgagaaccgtgaatttagcaattcaggaagccctggctggcacggaaatccagttgctcaacctcacttacatgagcgagttccgtgctgacgcccatccagctatctggctcggcaagaaggacgcggtggctgtctatggacaggactgcatgcattggtgcctgcctggcgtgccggacacttgggtcgacatcttggctgcacagatcatgcatcacttcaagcaggagaaaggctgatcacaatttctttaaatctgtagttttgcgataactacagcaactgtgctagaactttttagatttgtattttagggataacataacaaacattaaatagttttgcaaatattcattaggttaggtctcccataatgctatagtgatgcacaaaactaatgggcaccacaccgaacatcggaacatcccagtgctggagttttcaaataaggtcctctttaaatctgtagtgtttaaataagggtttggtagagtttctcttaattctgattcaccaaactaccaaagcatgttcttgccctgctataagttttacaggcatgaattagtgtcacataaaagcatgttcttgccctgctataagttttgcaggcatgaactagtgtcacttgccataggctgtatgcatgttatgttgtgcatggcctttaatatccttacaagcacataatgtggagttctt

SEQ ID NO: 208956 - DNA, 665 bp, Zea Mays
ctgccgccgaggtccgagcaaactgtcgtacagactgagacgcttgcgcgattagcgaacggaacggaaggaagaccgtggaagcaaaggcgcgcaggcgcaagggagcagagcacacggcacaccacaagagaacaaatacacctcaggtggccttcctaagatcgccgactgaatctacctcgcttcgcgcctccagttccgcaccgggactgccgaatctgtgctcgggatcgtctcttccagcggcaatgggggccgattctgaggacgccgtcaagcagctcagcctcctcatggagcaagtggaggccccgctgaagagatcatttcagaatatgcaccagggctatcccaaagaaacactggtgcgtttccttaaggctagagagtggaacgtaccaaaggctcataaaatgattgttgattctttggattggaggattgaaaatgaaattgatagtgtgctagagagacctatagtcccagtagatttatacagatcaatacgtgattcacaacttattggcctgtcaggatacacaaaggagtggcaatatcgtcggctctgcccgcgcgtcagcgcagcacacgcccagcgaaattcatagcaaaaaagcggcagaatggggcttcaaacccgcgaccagtgactagaagagttg

SEQ ID NO: 208957 - DNA, 1387 bp, Zea Mays
cccgtctccaaagtccaaactccaaagtccgaactccaaaccaaacgctccagccccgccgcacgcatacggcatacgcatccctcatctccctctcctcgccttcccgccgcggcgccgcctctcctttccgaattccgactcccgcctccccggggtgagtgtttccgcatccggctcgtccgccgatcctcgcgaggcctcctcgaccccgacccgacccggcgcggccaccggttcaagtcattcacaaaaaaacatgggtcatgatgaagctgtagttactcagaattcagtaaaagcaccatcaccacccaaggatcagccagctatttatccatgctttgattggtcgactgtgcaggcatattatggcccaggggtcttgccaccagctttctttaaccctggaatagcgcctggtcatgcccctccaccatatgtgtggggtccgcagactatgccaccggctgcctttggaaaatcatatgctgcaatatacccacatgctggtggtttcctgcatccactcatgcccctagtggtaaacccattgagtgcggagccagctaagtctgggaacagcaaggataatagtttaaacaagaaactaaaggaaattgatggatctgctgtgtcaagtggcaacagtgagaaaacaaggacgacaaggaatcgaagcgtgaaaggaggaagcagtcaaacagggaatctgcccggcgctcaaggctgaggaagcaggctgagactgaagaactggctagaagagtagagctactgaccgcggagaacacgtccctccgaagcgagatcagcaggctaacggaaagctcccagaagctaaggatggagaactcggctctgatggagaaactagcggacggtacatcagaccaagcacaagaagcttccgccggccaccagacgacaccaacggcgccatcgtcggctcgcgtcgtcaagaacttcctctggatgatggatggcgaaggcgcgtcaagaggcggcagcggcagcagcagccggcgcagggatcacggtgcgcccatgctccgccagctcctgagctcgggtcctctggcggctgacgccgtggccgctagctgatcagtgccgtgcttcccttgtgccgagcgcgtgtggactggcgatttttttaaaagagcgcacaagccgccacgcacggacgacctgtaaattacagtagctatgcctatgtatggggcatcgttccggccgctctgctgagagccgatatacggatcccatcactgagctttggtaactctctgtcgactgtcgttagagtggttgtgccaaactgaatcaactgacacgattcagcagtactaataataaccatcaggaggtttgcctctgaactcca

SEQ ID NO: 208958 - DNA, 1570 bp, Zea Mays
cccgtctccaaagtccaaactccaaagtccgaactccaaaccaaacgctccagccccgccgcacgcatacggcatacgcatccctcatctccctctcctcgccttcccgccgcggcgccgcctctcctttccgaattccgactcccgcctccccggggtgagtgtttccgcatccggctcgtccgccgatcctcgcgaggcctcctcgaccccgacccgacccggcgcggccaccggttcaagtcattcacaaaaaaacatgggtcatgatgaagctgtagttactcagaattcagtaaaagcaccatcaccacccaaggatcagccagctatttatccatgctttgattggtcgactgtgcaggcatattatggcccaggggtcttgccaccagctttctttaaccctggaatagcgcctggtcatgcccctccaccatatgtgtggggtccgcagactatgccaccggctgcctttggaaaatcatatgctgcaatatacccacatgctggtggtttcctgcatccactcatgcccctagtggtaaacccattgagtgcggagccagctaagtctgggaacagcaaggataatagtttaaacaagaaactaaaggaaattgatggatctgctgtgtcaagtggcaacagtgagaaaacaaggtcagcggaactccaaagaagaggagcttagatgataggactacatcagaaacatgtggggaatcaggaagattgccagctttgtccagtgtgcgcattccagacacaatgatgaaaccatgtgtgagcaccggtagtgacttcaaagttagtggtgcgacatcaaccgaatggccagctaaggacgacaaggaatcgaagcgtgaaaggaggaagcagtcaaacagggaatctgcccggcgctcaaggctgaggaagcaggctgagactgaagaactggctagaagagtagagctactgaccgcggagaacacgtccctccgaagcgagatcagcaggctaacggaaagctcccagaagctaaggatggagaactcggctctgatggagaaactagcggacggtacatcagaccaagcacaagaagcttccgccggccaccagacgacaccaacggcgccatcgtcggctcgcgtcgtcaagaacttcctctggatgatggatggcgaaggcgcgtcaagaggcggcagcggcagcagcagccggcgcagggatcacggtgcgcccatgctccgccagctcctgagctcgggtcctctggcggctgacgccgtggccgctagctgatcagtgccgtgcttcccttgtgccgagcgcgtgtggactggcgatttttttaaaagagcgcacaagccgccacgcacggacgacctgtaaattacagtagctatgcctatgtatggggcatcgttccggccgctctgctgagagccgatatacggatcccatcactgagctttggtaactctctgtcgactgtcgttagagtggttgtgccaaactgaatcaactgacacgattcagcagtactaataataaccatcaggaggtttgcctctgaactcca

SEQ ID NO: 208959 - DNA, 1604 bp, Zea Mays
cccgtctccaaagtccaaactccaaagtccgaactccaaaccaaacgctccagccccgccgcacgcatacggcatacgcatccctcatctccctctcctcgccttcccgccgcggcgccgcctctcctttccgaattccgactcccgcctccccggggtgagtgtttccgcatccggctcgtccgccgatcctcgcgaggcctcctcgaccccgacccgacccggcgcggccaccggttcaagtcattcacaaaaaaacatgggtcatgatgaagctgtagttactcagaattcagtaaaagcaccatcaccacccaaggatcagccagctatttatccatgctttgattggtcgactgtgcaggcatattatggcccaggggtcttgccaccagctttctttaaccctggaatagcgcctggtcatgcccctccaccatatgtgtggggtccgcagactatgccaccggctgcctttggaaaatcatatgctgcaatatacccacatgctggtggtttcctgcatccactcatgcccctagtggtaaacccattgagtgcggagccagctaagtctgggaacagcaaggataatagtttaaacaagaaactaaaggaaattgatggatctgctgtgtcaagtggcaacagtgagaaaacaagcctagaaggatccagcgatggaaacaacccaaaggtcagcggaactccaaagaagaggagcttagatgataggactacatcagaaacatgtggggaatcaggaagattgccagctttgtccagtgtgcgcattccagacacaatgatgaaaccatgtgtgagcaccggtagtgacttcaaagttagtggtgcgacatcaaccgaatggccagctaaggacgacaaggaatcgaagcgtgaaaggaggaagcagtcaaacagggaatctgcccggcgctcaaggctgaggaagcaggctgagactgaagaactggctagaagagtagagctactgaccgcggagaacacgtccctccgaagcgagatcagcaggctaacggaaagctcccagaagctaaggatggagaactcggctctgatggagaaactagcggacggtacatcagaccaagcacaagaagcttccgccggccaccagacgacaccaacggcgccatcgtcggctcgcgtcgtcaagaacttcctctggatgatggatggcgaaggcgcgtcaagaggcggcagcggcagcagcagccggcgcagggatcacggtgcgcccatgctccgccagctcctgagctcgggtcctctggcggctgacgccgtggccgctagctgatcagtgccgtgcttcccttgtgccgagcgcgtgtggactggcgatttttttaaaagagcgcacaagccgccacgcacggacgacctgtaaattacagtagctatgcctatgtatggggcatcgttccggccgctctgctgagagccgatatacggatcccatcactgagctttggtaactctctgtcgactgtcgttagagtggttgtgccaaactgaatcaactgacacgattcagcagtactaataataaccatcaggaggtttgcctctgaactcca

SEQ ID NO: 208960 - DNA, 1492 bp, Zea Mays
cgtctccaaagtccaaactccaaagtccgaactccaaaccaaacgctccagccccgccgcacgcatacggcatacgcatccctcatctccctctcctcgccttcccgccgcggcgccgcctctcctttccgaattccgactcccgcctccccggggtgagtgtttccgcatccggctcgtccgccgatcctcgcgaggcctcctcgaccccgacccgacccggcgcggccaccggttcaaggatcagccagctatttatccatgctttgattggtcgactgtgcaggcatattatggcccaggggtcttgccaccagctttctttaaccctggaatagcgcctggtcatgcccctccaccatatgtgtggggtccgcagactatgccaccggctgcctttggaaaatcatatgctgcaatatacccacatgctggtggtttcctgcatccactcatgcccctagtggtaaacccattgagtgcggagccagctaagtctgggaacagcaaggataatagtttaaacaagaaactaaaggaaattgatggatctgctgtgtcaagtggcaacagtgagaaaacaaggtcagcggaactccaaagaagaggagcttagatgataggactacatcagaaacatgtggggaatcaggaagattgccagctttgtccagtgtgcgcattccagacacaatgatgaaaccatgtgtgagcaccggtagtgacttcaaagttagtggtgcgacatcaaccgaatggccagctaaggacgacaaggaatcgaagcgtgaaaggaggaagcagtcaaacagggaatctgcccggcgctcaaggctgaggaagcaggctgagactgaagaactggctagaagagtagagctactgaccgcggagaacacgtccctccgaagcgagatcagcaggctaacggaaagctcccagaagctaaggatggagaactcggctctgatggagaaactagcggacggtacatcagaccaagcacaagaagcttccgccggccaccagacgacaccaacggcgccatcgtcggctcgcgtcgtcaagaacttcctctggatgatggatggcgaaggcgcgtcaagaggcggcagcggcagcagcagccggcgcagggatcacggtgcgcccatgctccgccagctcctgagctcgggtcctctggcggctgacgccgtggccgctagctgatcagtgccgtgcttcccttgtgccgagcgcgtgtggactggcgatttttttaaaagagcgcacaagccgccacgcacggacgacctgtaaattacagtagctatgcctatgtatggggcatcgttccggccgctctgctgagagccgatatacggatcccatcactgagctttggtaactctctgtcgactgtcgttagagtggttgtgccaaactgaatcaactgacacgattcagcagtactaataataaccatcaggaggtttgcctctgaactcca

SEQ ID NO: 208961 - DNA, 960 bp, Zea Mays
gttaatattgttgtggccttcaagttccaaggacgaaaagaaagattcgagtgattccctctcgaacacggattcggcaccaggattgcaaatcaatgaggcactaaagatgcaaatggaggttcagaagcgactacatgagcaactcgaggttcaaagacaactgcaactaagaattgaagcacaaggaagatacttgcagatgatcattgaggagcaacaaaagcttggtggatcaattaaggcttctgaggatcagaagctttctgattcacctccaagcttagatgactacccagagagcatgcaaccttctcccaagaaaccaaggatagacgcattatcaccagattcagagcgcgatacaacacaacctgaattcgaatcccatttgatcggtccgtgggatcacggcattgcattcccagtggaggagttcaaagcaggccctgctatgagcaagtcataaggcaaacttcaccttgacagaaaattttcagagttgacctctccacgagatgagcattctcatgtgaatatatattatcttaacaacagaatgtacgggtttttgaccctgcacctgatcccttcagccacgtccagttattcttatcactgtagtatccatcaacaagtcctgtaattatgaggatggtgttacagagtttctagcaagcatttccatcgagggaatggccctgagttgatccatgtagcaagaaagagaacatgcttacaagcaatatatttgctgtgaaaagggcacgcccctggatcttcctgaagttatgttgataaaaaaaagattatggcatatttctgaattatttctgaactcggcattatttatagtcttcgtttcatgtaatccacaatgcagccagctaggcaacatgttacgtcctgtctccagcttctgcagagtagttcgtttagtatggtagtgtttgtttccag

SEQ ID NO: 208962 - DNA, 1307 bp, Zea Mays
cggacttccggttacagcctgcttacatttctcagcattcacatgatgtatcatgcgaagaatttttctgtgccctttgctccgcagagggcacaggataatgagcatgcaagtaatattggaggtattggtggacccaacataagcaaccctgctaatcctgtaggaagtgggaaacaacggctacggtggacatcggatcttcataatcgctttgtggatgccatcgcccagcttggtggaccagacagagctacacctaaaggggttctcactgtgatgggtgtaccagggatcacaatttatcatgtgaagagccatctgcagaagtatcgccttgcaaagtatatacccgactctcctgctgaaggttccaaggacgaaaagaaagattcgagtgattccctctcgaacacggattcggcaccaggattgcaaatcaatgaggcactaaagatgcaaatggaggttcagaagcgactacatgagcaactcgaggttcaaagacaactgcaactaagaattgaagcacaaggaagatacttgcagatgatcattgaggagcaacaaaagcttggtggatcaattaaggcttctgaggatcagaagctttctgattcacctccaagcttagatgactacccagagagcatgcaaccttctcccaagaaaccaaggatagacgcattatcaccagattcagagcgcgatacaacacaacctgaattcgaatcccatttgatcggtccgtgggatcacggcattgcattcccagtggaggagttcaaagcaggccctgctatgagcaagtcataaggcaaacttcaccttgacagaaaattttcagagttgacctctccacgagatgagcattctcatgtgaatatatattatcttaacaacagaatgtacgggtttttgaccctgcacctgatcccttcagccacgtccagttattcttatcactgtagtatccatcaacaagtcctgtaattatgaggatggtgttacagagtttctagcaagcatttccatcgagggaatggccctgagttgatccatgtagcaagaaagagaacatgcttacaagcaatatatttgctgtgaaaagggcacgcccctggatcttcctgaagttatgttgataaaaaaaagattatggcatatttctgaattatttctgaactcggcattatttatagtcttcgtttcatgtaatccacaatgcagccagctaggcaacatgttacgtcctgtctccagcttctgcagagtagttcgtttagtatggtagtgtttgtttccag

SEQ ID NO: 208963 - DNA, 1315 bp, Zea Mays
gggtcttgtaccttggtggtactatctggttttccgagcttggcattcacatgatgtatcatgcgaagaatttttctgtgccctttgctccgcagagggcacaggataatgagcatgcaagtaatattggaggtattggtggacccaacataagcaaccctgctaatcctgtaggaagtgggaaacaacggctacggtggacatcggatcttcataatcgctttgtggatgccatcgcccagcttggtggaccagacagagctacacctaaaggggttctcactgtgatgggtgtaccagggatcacaatttatcatgtgaagagccatctgcagaagtatcgccttgcaaagtatatacccgactctcctgctgaaggttccaaggacgaaaagaaagattcgagtgattccctctcgaacacggattcggcaccaggattgcaaatcaatgaggcactaaagatgcaaatggaggttcagaagcgactacatgagcaactcgaggttcaaagacaactgcaactaagaattgaagcacaaggaagatacttgcagatgatcattgaggagcaacaaaagcttggtggatcaattaaggcttctgaggatcagaagctttctgattcacctccaagcttagatgactacccagagagcatgcaaccttctcccaagaaaccaaggatagacgcattatcaccagattcagagcgcgatacaacacaacctgaattcgaatcccatttgatcggtccgtgggatcacggcattgcattcccagtggaggagttcaaagcaggccctgctatgagcaagtcataaggcaaacttcaccttgacagaaaattttcagagttgacctctccacgagatgagcattctcatgtgaatatatattatcttaacaacagaatgtacgggtttttgaccctgcacctgatcccttcagccacgtccagttattcttatcactgtagtatccatcaacaagtcctgtaattatgaggatggtgttacagagtttctagcaagcatttccatcgagggaatggccctgagttgatccatgtagcaagaaagagaacatgcttacaagcaatatatttgctgtgaaaagggcacgcccctggatcttcctgaagttatgttgataaaaaaaagattatggcatatttctgaattatttctgaactcggcattatttatagtcttcgtttcatgtaatccacaatgcagccagctaggcaacatgttacgtcctgtctccagcttctgcagagtagttcgtttagtatggtagtgtttgtttccag

SEQ ID NO: 208964 - DNA, 3814 bp, Zea Mays
caatccccttgcaactccacacaaggcgaaaaaacacccacagaaccctaccctcccgagtcccgaccccgtcctgctcgctccgccgtcctccgcccgccacccgccggactgccaaagcccggaggcctgaggcccgagttacgcgaggagcagcagaaccagcggcccggcgcctcatccctcagcggccacgcgagtgcgcggtcggcgcggagtgagcaggagcaacccgtggctggcggtcagtcgctggctagctggagcctggagttgcgacttgcgagcggcaggcacagagaagcgccaatccgccggcttgatctgaagcatggacaagcaatctgatgggcagggggtggagagggttgctgaggagaagcaacttgatgagaaagagttagaaaggaagctgaaaaaagatcaaaaggcaaaagagaaagaagagaagaaacttaaggcaaaacaaaaggaggcggctaggctccaggcacaagcaacatcagatggaacaaagaagactgagaagaaactaaggaagaaagctgtggaggacgaaaatccagaggatttcatagacccagacactcctaatggacagaaaaaattgctcgcacctcagatggccaagcaatacagtccaagtgcagttgagagatcatggtatgcctggtgggaatcttcaggatattttggggcagattcggcaagcacaaaaccaccatttgttatagttctgccacctccaaatgtgactggagctcttcacatcggtcatgcacttacagtggctatagaggatgctatgatacgatggcgtcggatgtcaggctacaatgctctgtgggtccctggagtggaccatgctggcattgctacacaggttgttgtagagaagaagcttatgcgtgaaaggaagttgacaaggcatgacatagggcgtgaaaaatttgtttctgaagtactcaaatggaaagatcaatatggtggtaccatattgaatcaattgcgccggcttggggcttcacttgattggtcccgtgaggcttttacaatggatgagcaaagatcaaaagccgtaactgaagcttttgtcaggttacataaggaaggcctgatatatcgagattatcgccttgtgaattgggattgcacgcttcgaactgcaatttctgacattgaggttgatcatattgatcttaaagaagaaacaatgttaaaggtccctggttatgccaatcctgtacagtttggtgtattgatatcttttgcctatccgctcgaggaaggacttggtgagattgttgtagcaaccaccagaatagaaacaatgctgggtgatacagcaatagccgttcaccctgaggatgaaaggtataaacatctgcatggaagatacgcagtccaccccttcaatggccgaagactcaaaataatctgtgatgctgagttagttgatcccacttttggtactggggctgtcaagattacccctgcccatgatccaaatgactttgaagttggaaagcggcataaccttgaattcatcaatatcttcacagacgatggaaaaataaatagcaatggaggtgcaaaatttgatggaatgccaaggttcaccgctcgagttgctgttattgaggcgctgaaggaaaaggggttgtataaggacacaaagaagaatgaaatgagcttgggtgtttgttcaagaactaatgatgtagtggaacctatgataaaaccacagtggtttgttaattgcaaccacatggccaaggcgggccttgacgctgtaaggtcgaaaaagattgaaattattccccagcagtatgagcaagactggtacagatggcttgaaaatatacgtgattggtgtgtctcaaggcaactttggtggggacatcgtgtacctgcatggtatgtgacactagaggatgacctggataaaaaccttggttctgcaaatgatcgctggatagtcgcaagaaacgaaagcgatgcaaaccttgaagcgcagaaaaagtatgcaggaaagaaattacgtctagatcaagaccctgatgtgctggatacttggttttcatctggtcttttccccttaacagtacttggttggccatctgataccgctgacctccgtgctttctaccctacatcggtactagaaactggacttgatattctcttcttttgggtagcaaggatggtgatgatgggaatgcaacttggtggtgatgtgccatttcagaaggtttatttacatcctatgattcgggatgcacatggccgaaagatgtcaaaatcacttggtaacgttgttgatcctcttgaggtgataaatggcatgtcgctggatggtcttctgaaacgtttggaagaaggcaatctggatccaaatgaattaaacattgcaagagatgggaagaagaaggattttcctgatggcatagcagaatgtggtaccgatgctctacgctttgcactgatatcgtacacttcccagtctgacaggataaatcttgatattaagagggtggttggatacagacagtggtgcaacaaattatggaatgccatccgttttgcgatgggcaaactgggtgaccattacattccgccggcaactgttgatgtgtctcttatgccaccaatctgcaagtggatactctcggtgcttagcaaggccgttgggaaaaccgtttcctctttagaagcatataagttgtctgacgcaacatctgctatatactcatggtggcagtatcagctatgtgatgtatttatagaagctatcaaaccttacttcttcaacgattctcaagagcttgaatcagcaagagctgcctccagagataccctgtggatttgcctggatactgggctgcgcttgctccacccattcatgccctttgtaacagaagagctctggcagcgtcttccacagcccaaagattcttgtaggaaaggttcgattatgatttcacagtatccatctcttgttgaggaatggagtaatggcagacttgaaaatgaaatggacatcgtcttggatgctgtgaacaaaataaggtctctgaagccaccaacagattcaaatgaaagacgtcctgcttttgcactttgccgaggccaagagatcgctgccacaatccagtgctatcaatctctaatcgtgtatctttcttccatatcacatctcaagatcctgacagagaatgatgaaactccagccgattgtgcaactgctgttgtcaacaaagacttgtctgtgtaccttcagctccaaggagctttaaatgcagacgctgaacgtgaaaagctaaagaagaaaaaagatgagattcaaaagctacagaatgcactggcgcagaaaatggacgcctctggctatcgcgagaaggctccacagagcgtacaggaggaggacatgaggaagctcaccgctttgttggagcaactagaggtcatcagtgaagctgagaagaaattagacgcgaactgagtttgacctctgtttcgaagaggccttgcttgtaccgaagctgaccccatatttttcttgtttgcaaaaaagctcagttatgtgcctgtacgctcgggctcaggtttacagttgatggttcaaatggaagccacatttttgcagcttgtcaagggtgcactggctaatacagaagcatatttattttgtcaagtgaggaacttttgatgatgaatgatgatgcatatggaatctgtcagaaaatgcagtagcggtgctattaaggtttcaggtttgcaagccttacgcatatgcgccagcgtgtcacttgtg

SEQ ID NO: 208965 - DNA, 3309 bp, Zea Mays
gaatgctgctggtttggagctacaaaatgacctgacgagatgttcagcaacttgatgagaaagagttagaaaggaagctgaaaaaagatcaaaaggcaaaagagaaagaagagaagaaacttaaggcaaaacaaaaggaggcggctaggctccaggcacaagcaacatcagatggaacaaagaagactgagaagaaactaaggaagaaagctgtggaggacgaaaatccagaggatttcatagacccagacactcctaatggacagaaaaaattgctcgcacctcagatggccaagcaatacagtccaagtgcagttgagagatcatggtatgcctggtgggaatcttcaggatattttggggcagattcggcaagcacaaaaccaccatttgttatagttctgccacctccaaatgtgactggagctcttcacatcggtcatgcacttacagtggctatagaggatgctatgatacgatggcgtcggatgtcaggctacaatgctctgtgggtccctggagtggaccatgctggcattgctacacaggttgttgtagagaagaagcttatgcgtgaaaggaagttgacaaggcatgacatagggcgtgaaaaatttgtttctgaagtactcaaatggaaagatcaatatggtggtaccatattgaatcaattgcgccggcttggggcttcacttgattggtcccgtgaggcttttacaatggatgagcaaagatcaaaagccgtaactgaagcttttgtcaggttacataaggaaggcctgatatatcgagattatcgccttgtgaattgggattgcacgcttcgaactgcaatttctgacattgaggttgatcatattgatcttaaagaagaaacaatgttaaaggtccctggttatgccaatcctgtacagtttggtgtattgatatcttttgcctatccgctcgaggaaggacttggtgagattgttgtagcaaccaccagaatagaaacaatgctgggtgatacagcaatagccgttcaccctgaggatgaaaggtataaacatctgcatggaagatacgcagtccaccccttcaatggccgaagactcaaaataatctgtgatgctgagttagttgatcccacttttggtactggggctgtcaagattacccctgcccatgatccaaatgactttgaagttggaaagcggcataaccttgaattcatcaatatcttcacagacgatggaaaaataaatagcaatggaggtgcaaaatttgatggaatgccaaggttcaccgctcgagttgctgttattgaggcgctgaaggaaaaggggttgtataaggacacaaagaagaatgaaatgagcttgggtgtttgttcaagaactaatgatgtagtggaacctatgataaaaccacagtggtttgttaattgcaaccacatggccaaggcgggccttgacgctgtaaggtcgaaaaagattgaaattattccccagcagtatgagcaagactggtacagatggcttgaaaatatacgtgattggtgtgtctcaaggcaactttggtggggacatcgtgtacctgcatggtatgtgacactagaggatgacctggataaaaaccttggttctgcaaatgatcgctggatagtcgcaagaaacgaaagcgatgcaaaccttgaagcgcagaaaaatacttgcaaggatggtgatgatgggaatgcaacttggtggtgatgtgccatttcagaaggtttatttacatcctatgattcgggatgcacatggccgaaagatgtcaaaatcacttggtaacgttgttgatcctcttgaggtgataaatggcatgtcgctggatggtcttctgaaacgtttggaagaaggcaatctggatccaaatgaattaaacattgcaagagatgggaagaagaaggattttcctgatggcatagcagaatgtggtaccgatgctctacgctttgcactgatatcgtacacttcccagtctgacaggataaatcttgatattaagagggtggttggatacagacagtggtgcaacaaattatggaatgccatccgttttgcgatgggcaaactgggtgaccattacattccgccggcaactgttgatgtgtctcttatgccaccaatctgcaagtggatactctcggtgcttagcaaggccgttgggaaaaccgtttcctctttagaagcatataagttgtctgacgcaacatctgctatatactcatggtggcagtatcagctatgtgatgtatttatagaagctatcaaaccttacttcttcaacgattctcaagagcttgaatcagcaagagctgcctccagagataccctgtggatttgcctggatactgggctgcgcttgctccacccattcatgccctttgtaacagaagagctctggcagcgtcttccacagcccaaagattcttgtaggaaaggttcgattatgatttcacagtatccatctcttgttgaggaatggagtaatggcagacttgaaaatgaaatggacatcgtcttggatgctgtgaacaaaataaggtctctgaagccaccaacagattcaaatgaaagacgtcctgcttttgcactttgccgaggccaagagatcgctgccacaatccagtgctatcaatctctaatcgtgtatctttcttccatatcacatctcaagatcctgacagagaatgatgaaactccagccgattgtgcaactgctgttgtcaacaaagacttgtctgtgtaccttcagctccaaggagctttaaatgcagacgctgaacgtgaaaagctaaagaagaaaaaagatgagattcaaaagctacagaatgcactggcgcagaaaatggacgcctctggctatcgcgagaaggctccacagagcgtacaggaggaggacatgaggaagctcaccgctttgttggagcaactagaggtcatcagtgaagctgagaagaaattagacgcgaactgagtttgacctctgtttcgaagaggccttgcttgtaccgaagctgaccccatatttttcttgtttgcaaaaaagctcagttatgtgcctgtacgctcgggctcaggtttacagttgatggttcaaatggaagccacatttttgcagcttgtcaagggtgcactggctaatacagaagcatatttattttgtcaagtgaggaacttttgatgatgaatgatgatgcatatggaatctgtcagaaaatgcagtagcggtgctattaaggtttcaggtttgcaagccttacgcatatgcgccagcgtgtcacttgtg

SEQ ID NO: 208966 - DNA, 1674 bp, Zea Mays
cccgtgaggtttatttacatcctatgattcgggatgcacatggccgaaagatgtcaaaatcacttggtaacgttgttgatcctcttgaggtgataaatggcatgtcgctggatggtcttctgaaacgtttggaagaaggcaatctggatccaaatgaattaaacattgcaagagatgggaagaagaaggattttcctgatggcatagcagaatgtggtaccgatgctctacgctttgcactgatatcgtacacttcccagtctgacaggataaatcttgatattaagagggtggttggatacagacagtggtgcaacaaattatggaatgccatccgttttgcgatgggcaaactgggtgaccattacattccgccggcaactgttgatgtgtctcttatgccaccaatctgcaagtggatactctcggtgcttagcaaggccgttgggaaaaccgtttcctctttagaagcatataagttgtctgacgcaacatctgctatatactcatggtggcagtatcagctatgtgatgtatttatagaagctatcaaaccttacttcttcaacgattctcaagagcttgaatcagcaagagctgcctccagagataccctgtggatttgcctggatactgggctgcgcttgctccacccattcatgccctttgtaacagaagagctctggcagcgtcttccacagcccaaagattcttgtaggaaaggttcgattatgatttcacagtatccatctcttgttgaggtaatacctatgtcctaaagaagattcttgtaaaatattcaattatgatttgaggaaagagtaaaacttattacccatgggaacatatggctttttatgataggaatggagtaatggcagacttgaaaatgaaatggacatcgtcttggatgctgtgaacaaaataaggtctctgaagccaccaacagattcaaatgaaagacgtcctgcttttgcactttgccgaggccaagagatcgctgccacaatccagtgctatcaatctctaatcgtgtatctttcttccatatcacatctcaagatcctgacagagaatgatgaaactccagccgattgtgcaactgctgttgtcaacaaagacttgtctgtgtaccttcagctccaaggagctttaaatgcagacgctgaacgtgaaaagctaaagaagaaaaaagatgagattcaaaagctacagaatgcactggcgcagaaaatggacgcctctggctatcgcgagaaggctccacagagcgtacaggaggaggacatgaggaagctcaccgctttgttggagcaactagaggtcatcagtgaagctgagaagaaattagacgcgaactgagtttgacctctgtttcgaagaggccttgcttgtaccgaagctgaccccatatttttcttgtttgcaaaaaagctcagttatgtgcctgtacgctcgggctcaggtttacagttgatggttcaaatggaagccacatttttgcagcttgtcaagggtgcactggctaatacagaagcatatttattttgtcaagtgaggaacttttgatgatgaatgatgatgcatatggaatctgtcagaaaatgcagtagcggtgctattaaggtttcaggtttgcaagccttacgcatatgcgccagcgtgtcacttgtg

SEQ ID NO: 208967 - DNA, 453 bp, Zea Mays
aaacagcctgcacgcgtcatcatctgtggttttgctcttggttggcccccagctgtcataccatcaggcgcagcaaggtgggagaagaaactggcttccaagatgggcgagcatggaggtggtggtggtggcaatgggaacccgagctgctccttgttccgagttactttgtttcgaaacgatgccgcttatatatagcaagcaagcacttctctccactggccaatggtgaaaaactaagctagtgcttgctctgtggggatctttacaagttccgttgttatatcctttgttgctactcgtgaagttcctacattatttgccatgccaagttcttttgctcgctagcttcctgtgaagactgtaccatgagttgtacctttgttataagctataatgtttgtaatttgcttcatattatgtggttgatgagaagaggaatcctgagtttac

SEQ ID NO: 208968 - DNA, 1172 bp, Zea Mays
ctttcccgtcgccaggttcggttgctcagccaccagtccggctcccctccatcaggaacccatccctgctgctaccggtggcgagcgtgtgcatcaagatcacggcgctgtgcccgatcgcgctgctggagaaggcgagcgacctgctgcggtggcagaagaggcacccgtcgctgaacctgccgtggaagacgcacgacttcccgatcctgtcggactcgagcccgctgcacctcacggcgtcggagccgccggcgctgtcggcggaggaggagagggagctggagctggcgcacgagcgggtgctggcggtgtgcgcgcggtgcgcggagcgcggcgtgccgctgctggtggacgcggagtacgcggcggtgcagccggcgatcgactacctcacgctcgccggcgcgctggcgtgcaacgccgagcgctccatcgtgcacggcacggtccaggcgtacctacgcgacgcgcgggagcggctggagaccatggcgcgcggcgtggagcgcgcgcgcgtgcgcctgggggtcaagctggtgcgcggcgcgtacctggcccgcgaggcccgggtcgcggccgccctcggcgtgccgtcgcccgtccacggcagcatccgggagacccacgactgctacaacggatgcgccgccttcctcctcgaccgcgtccgccgcgggtccgcctccgtcgtgctcgccacccacaatgtggagtcaggccaactcgcggcggcgcgtgctgaggagctggggatccccaggggagaccgcaacctgcagttcgcgcagctgatgggcatggcggacgggctgtcgctgggcctccgcaacgccgggttccaggtcagcaagtacctgccgtacgggccggtggagcagatcgtcccctacctcatcaggcgcgccgaggagaacaggggcctcctctccgcctcctccttcgacaggcagctgctccgggaggagttggtgaggaggttcaaggctgcggtgctgggacgtgagtgaagtgaacctgctgaggctactctgctgtgaagctgggacaagggccagttgaaggctagaagctgtaaatacacccttcaacagtcttcagacattgatgtatccggggctttcttgaataaatcgattgaatggaataatgaggcttatcgagcttaaaca

SEQ ID NO: 208969 - DNA, 1030 bp, Zea Mays
aggagactgcaggaggttccaagccagttcaaaccggattgcagctttctggctggaaatagacggcgaccaccgcctcaacggcgacggcagcgacggccaccattcccttccaatctgccgcacaacatggcgtcgtgcgtggccgcgatggcgctggtcggcgcccgacctccgtctcacgccgctggccctgcggcggccagctgcagtggccgcgcgcagcttagcttccaccgcctcggcgctcgcgctcgcgctcgggtcatccgcgcctaccgccgccgcccacaccatccctcttatgtgcctgaggatggggtcgttctggagtggctgaggagcgcggccgccgcgctcgccatagtaacccagatttccgtctcgctgccggcgaacgcggtgctttactcgcctgacactaaggtgccgaggaccggggagctggccctgaggagggcgatccccgctaacccgaacatgaaggccatacaggaatcgctggaggatatttcgtacttgttgaggataccgcagaggaagccgtacggttccatggagggcgatgtgaagaagtccatgaaaatagcaatggacaacaaggaggcaatcctggcaagcattcctgaagagcataaggaggagggtgccaagctatatacctcattactcgaagagaagggtggtttgcagactctcttgaaatatattaaggagaataaccctgacaaactttctatagcacttgcttcatcacttgacactgttgctgaattggagctgttacaggctcctggtctgtcctttctcctgcctcaacagtatatagaatatccaaggctgacaggaagaggagttgttgaattcacagttgaaaaaggtgatggttcaacattctttccaactggtggtggtgaaccgaaaagtgttgctacaattcaggtcgttattgatgggtactctgccccactgactgctggaaactttgcaaaattggaaaaaaagtcaaagacatgctttgaagacgatg

SEQ ID NO: 208970 - DNA, 765 bp, Zea Mays
cacgccataaaaatagaccgagtccagtccatgtcgcggcgccagaagcctacgcgcagtcgcagagagaccatcccgccacggcagcaagcgaagcgagcctagccagccaaaccggggccaggccaggccgccagggggacgggacgggaaggaaaccgaggcaggcggcggcagcggcagcggcagcggtagcagcagcgcagggcgcacgcgcttctcgtttcgtgtcgccaggggaaggaggaggagcgagtgggttgggggatcggctggcggccgagggtccgggagctgcgggcggcatggggagggacgagcgggagcacgacgtctggaaattcaagccgtatcctctccgggtggccatgctgacgacgatctacgggttcggtctttacaagtggtggatgtacgtatctagctagtgtgggtcgtccactcgtcctctccccccttgccgttcctcattgtgagcagatgcgatagatggagtatattgcctggctaatatgctgctgatagcctgatatgaagaaccaccctcaagacaggttgatgtatgtaatgtaacgagcgggtttttgtgatgcgcaaacgccacgccaatcattcttatctggaaacatgaatctaggttttattctttctccccctttgtcactccttcggtcttccttgttccatcatcatagcttcccaagggctacatgaacatgaatcttacagtttgcacatctatttttttttcttgttgtcggtcag

SEQ ID NO: 208971 - DNA, 2265 bp, Zea Mays
ctcgggtgggcgcgcgcaccgccggggtccccaccacacagagatgcccctcgattcaccgcaccgacacgcgacactactcattgatgaggcgacgtgaccagcaacaaataggacacgccggctagtactgcgccagcccactccagcgctgaaggcctgcagcgccagcgcagcgcctctctgctactgtgctggctgacgccggtggggtgtgagcgaactgcgagctgctgccacccctgctgccgcggtcgaccgccggccccggaccgagatggacgctcggtgggcggtgctgctcgcgctgctggtcgccagcggcggcgtccgtgtctgcgccgccgctggggccaagggcgccaactggctgggcgggctgagccgcgcgtcgttccccaaggggttcgtgttcgggacggcgacgtcggcgtaccaggtcgagggcgccgcgtccaccaacggccggggcccctccatctgggattcattcgcgcacgtcccaggaaatattgcagggaatcaaaatggagacgttgcagtggatcaataccatcgctacaaggaagacgtcgatctcatgaaaagtttgaactttgatgcctaccggttctcaatctcatggtccaggatcttcccggatggcgaagggaaagtcaatccagaaggtgtagcgtattacaataatttgataaactatctgcttcagcaaggcatgactccttacatcaacctttaccactatgatcttcctcttgcgcttgagaagaaatatggagggtggttaagcgcgaagatggcggacttgtttacagactatgctgacttctgttttaagacctacggcgatcgcgtaaagcactggtttacattcaatgagccaaggatagtagcgctacttggctatgacacagggtcaaatcctcctcaaaggtgcaccagatgcgctgctggtgggaattcagcaaccgaaccttacatagttgctcataattttctcttggcacatgctactgcagttgcaagataccgtacgaaatatcaggctgctcagaagggtaaggtcggaatagtcctggacttcaactggtacgaggctcttacaaactcacctgatgaccaagcagcagcccaaagagccagggacttccacattggctggtttgttgatccattgataaacggacactatccacagataatgcaagatctcgtgaaggagaggctgcccaggttcactcctgagcaggctaaactggtgaagggctcggcagactacatcggtatcaacgagtacacatccagctacatgaaggggcagaagctggtccagctggcgcccagtagctactctgccgattggcagttgcacgcaatggcaaaccgattggaccacaggcgaattctaagtggctctacatcgccccgacggggatgtacgggtgcgtgaactacctcaaggagaagtatgggaatccaacgatctacataacggagaacggaatggaccagcctggaaacttgacccgagaccagtacctgcgcgacgccacgagggtgcggttctacaggagctacatcggccagctgaagaaggccatagaccagggagcgaacgtggctggctacttcgcctggtctctcctcgacaacttcgagtggctggcagggtactcgtccaagttcggcatcgtctacgtggacttcaacacgctcgaacgccacccgaaggcgtcggcctactggttcagggacatgcttcagaagcattgagatctccagagccgagcctgagcacggaaggtaccattttgttcagcttcgcctagtgtttgggatggcccaatggttcaaatccggctcagtgcctggctaccaaaatgggaacaaaggacagctaccccgatcaattgtgatgttgtgtgtttgtgggtatgttctctctggagtttgagctgtggttattttatcgtgttggttgatcgtgtttgaaatgcttaattcaggactgtgacatctcgagttgttttaactaaatcttataagaactaccctgatcgagcgctgggtaattggataaaatgaaaccaagagcccacaagtagagtttgaaataaaaatttcaaaaaatgtgatgagtaacgttatagtagagtttgaaataaaaaatgtgatgaagatagtcttaagaacttatttggatagtcttgcatcatctcattgttggaacttgctctcccgagcaagatgatccaacggggaagt

SEQ ID NO: 208972 - DNA, 2133 bp, Zea Mays
gaaggagacaagcgtggcccaccgggcgggcggccacgcgaggaaatattgcagggaatcaaaatggagacgttgcagtggatcaataccatcgctacaaggaagacgtcgatctcatgaaaagtttgaactttgatgcctaccggttctcaatctcatggtccaggatcttcccggatggcgaagggaaagtcaatccagaaggtgtagcgtattacaataatttgataaactatctgcttcagcaaggcatgactccttacatcaacctttaccactatgatcttcctcttgcgcttgagaagaaatatggagggtggttaagcgcgaagatggcggacttgtttacagactatgctgacttctgttttaagacctacggcgatcgcgtaaagcactggtttacattcaatgagccaaggatagtagcgctacttggctatgacacagggtcaaatcctcctcaaaggtgcaccagatgcgctgctggtgggaattcagcaaccgaaccttacatagttgctcataattttctcttggcacatgctactgcagttgcaagataccgtacgaaatatcaggtatttccatcttgagaacctcagaagttcctctgaaaaataacatcactctagcactcctaggagtggtaaactgatgttattttattcaatgaagtgtgtggtccaagattttatttttaaatgaaatgtgggcagggtctatatatgcttggaagttggaacaatggtcagcatactttcacattaataactctactgttcatgaaatgcattagcttgttctcctaaacgattggacatgtgcctgtcgaatttcattagtttcttggactgaaaactgctgatggaagagtgacatgatgttttaaaaacataggctgctcagaagggtaaggtcggaatagtcctggacttcaactggtacgaggctcttacaaactcacctgatgaccaagcagcagcccaaagagccagggacttccacattggctggtttgttgatccattgataaacggacactatccacagataatgcaagatctcgtgaaggagaggctgcccaggttcactcctgagcaggctaaactggtgaagggctcggcagactacatcggtatcaacgagtacacatccagctacatgaaggggcagaagctggtccagctggcgcccagtagctactctgccgattggcaggttcaatatgtttttgcacgcaatggcaaaccgattggaccacaggcgaattctaagtggctctacatcgccccgacggggatgtacgggtgcgtgaactacctcaaggagaagtatgggaatccaacgatctacataacggagaacggaatggaccagcctggaaacttgacccgagaccagtacctgcgcgacgccacgagggtgcggttctacaggagctacatcggccagctgaagaaggccatagaccagggagcgaacgtggctggctacttcgcctggtctctcctcgacaacttcgagtggctggcagggtactcgtccaagttcggcatcgtctacgtggacttcaacacgctcgaacgccacccgaaggcgtcggcctactggttcagggacatgcttcagaagcattgagatctccagagccgagcctgagcacggaaggtaccattttgttcagcttcgcctagtgtttgggatggcccaatggttcaaatccggctcagtgcctggctaccaaaatgggaacaaaggacagctaccccgatcaattgtgatgttgtgtgtttgtgggtatgttctctctggagtttgagctgtggttattttatcgtgttggttgatcgtgtttgaaatgcttaattcaggactgtgacatctcgagttgttttaactaaatcttataagaactaccctgatcgagcgctgggtaattggataaaatgaaaccaagagcccacaagtagagtttgaaataaaaatttcaaaaaatgtgatgagtaacgttatagtagagtttgaaataaaaaatgtgatgaagatagtcttaagaacttatttggatagtcttgcatcatctcattgttggaacttgctctcccgagcaagatgatccaacggggaagt

SEQ ID NO: 208973 - DNA, 2400 bp, Zea Mays
atacatactgcgcgttgcaagctcccacttcctgaggaacaggaactccatgagatccgcggcatccgccgtcccgttcatctgcacaaaaagaccgtaatccttctttttcctctcctccccatccgcggagtgtaaatcgtctctcgctagcgcgttcagtagaaaccctaaaccccgcctcctcccctcgccggggtaggggctacgggtgtcaacgcccgccatggacgcattccggaagcaactggatgtgctcatgggcgctaaccgcaacggcgacgtcgaggaggtgagccgcaactactacgaccgcgacgtctgccggctcttcctcgccggcctttgcccccacgacctcttccagctcacgaaaatggatcttggtccttgttctaagattcactcgcttcaactgcggaaagattatgaagaagcgaaagcaaagggaacagagaattttgacagagaactcgaggatatgatagaaaggctcattgtggagtgcgacaggaaaattcagagggccctgaaacgacttgcggatgacgatgccaaggctgctattgcgatatccgtctcggaggttactctgacggatgacatactgcagctgtcaaaacagatcaaggaaaaaatggtagaagttgatgcctttgattttgaagggagaactgatgataaaataaaggcccaggaagtagtggaagaactcagaactaaaagagctgatatgcaggctaccctcttgcttgatgcttttaacaaggacagagcttcattaactcagcctgctcaacctcctcaagtggcggcagcgccaccaccagctccacccgatgctcgtactcaagaaatgatcaatgaaaagcttaagaaagctgaagagcttggggaacaaggcatggttgatgaagctcagaaagctttggaagaggcagaagctctgaaaaagctggcgcgacgtccggagccaccttcagacccttctaaatatactgccgctgatgtttggattaccgatcaaaagttgcgcctctgtgatatatgtggagcatttctgagtgtatatgacaatgatcgacgtcttgctgaccattttggagggaaactgcatctaggctacatgctgattcgtgacaaacagaaagaacttcaggtgctgagtgtaatgtaccgttttctgctttaaagagttactctgttttgggccttttggcatctgtgagttttcttatctcaagagcctcaaggttctcaccttccctctatatattatttgattctcacattgccgggcactatggttattacgatagtcattacaggaattagtccatgtcgcgtgattggaatctcatgcgatgatcttcatacctatggctacaacagtcactgtctgttgacaaatgtaagcataggagcgtgcggaccatggagcagagaaacaaaaggaggacaggcaaaactgaagatgataggcgatctagagagcagagcaaggatcgaaacggcccgccgtccagggatagagattcagaaaggagagacagggttgagtctcgagatggaagaagagattatgatagggaacgcgataggcgtcacgatagggaccgtcgccatgaccgcgaccgggatagggattatgaccgctcccgcggatatgactcaaggagaagagagcgttcacgctccagggagcgcagcaggcgccatgagagatactaaatgttactccatggctgacagattttggattgctggcgtctgttctggtttgtgttgtgctttgtgtcttatcttccgaagtttcctgttcctgctcgagaaatccgaaagccaatctgcgttctgcatcatgtcatgtcctagtgtcgtactgtttagttatatgccgagaacatctctttcatcaaatgaatatttggaaacaccaacgcacttgacgctaaatgggaatgaagtgtggagtatttaaacgcctctgaaatcaaatgaaagttgtacttgtacgaatctcttccacaaattgcactgtatatgcttgtactgttgcagatttacgatgggtttggactgttctccatccccggagcgcgctcaggctcgacgctacctagctacggacctttatttttggtacctgatgaaacatgatggttttaggaggcgcggtgtttctctggcgaacgatggccggacgtccattttcgagaaccacaagacaagaaacatattcaaaaaaaaaaaactcaacaatcatggcaaaggtggattcttgtacagcagatttcttgtagtatggtatgtgaacaaaacagtgttcagggcctgaaggcggaggaggcaacccgtctaactagacggccttccgctggcggaccttgaagctggtgg

SEQ ID NO: 208974 - DNA, 2466 bp, Zea Mays
cttttgtgtaccgccgtaacgcacgagcattatactgccataaatttcttagagctgataaaatacatactgcgcgttgcaagctcccacttcctgaggaacaggaactccatgagatccgcggcatccgccgtcccgttcatctgcacaaaaagaccgtaatccttctttttcctctcctccccatccgcggagtgtaaatcgtctctcgctagcgcgttcagtagaaaccctaaaccccgcctcctcccctcgccggggtaggggctacgggtgtcaacgcccgccatggacgcattccggaagcaactggatgtgctcatgggcgctaaccgcaacggcgacgtcgaggaggtgagccgcaactactacgaccgcgacgtctgccggctcttcctcgccggcctttgcccccacgacctcttccagctcacgaaaatggatcttggtccttgttctaagattcactcgcttcaactgcggaaagattatgaagaagcgaaagcaaagggaacagagaattttgacagagaactcgaggatatgatagaaaggctcattgtggagtgcgacaggaaaattcagagggccctgaaacgacttgcggatgacgatgccaaggctgctattgcgatatccgtctcggaggttactctgacggatgacatactgcagctgtcaaaacagatcaaggaaaaaatggtagaagttgatgcctttgattttgaagggagaactgatgataaaataaaggcccaggaagtagtggaagaactcagaactaaaagagctgatatgcaggctaccctcttgcttgatgcttttaacaaggacagagcttcattaactcagcctgctcaacctcctcaagtggcggcagcgccaccaccagctccacccgatgctcgtactcaagaaatgatcaatgaaaagcttaagaaagctgaagagcttggggaacaaggcatggttgatgaagctcagaaagctttggaagaggcagaagctctgaaaaagctggcgcgacgtccggagccaccttcagacccttctaaatatactgccgctgatgtttggattaccgatcaaaagttgcgcctctgtgatatatgtggagcatttctgagtgtatatgacaatgatcgacgtcttgctgaccattttggagggaaactgcatctaggctacatgctgattcgtgacaaacagaaagaacttcaggtgctgagtgtaatgtaccgttttctgctttaaagagttactctgttttgggccttttggcatctgtgagttttcttatctcaagagcctcaaggaattagtccatgtcgcgtgattggaatctcatgcgatgatcttcatacctatggctacaacagtcactgtctgttgacaaattatcgattgttgggcagaagctggaggttgcctttttactgcctgagccatattatgtagaccaggtgacaaataatactggttaagttatcctgaaagcacacttcttttgccaacattttgctgtaagtgacaacttgttctgttttctatctgctacctcctccataagtttgcaagttacattttgctgaagcaaccttgcctgtaaagtatcgcccgccctatcttttggaacgttgtctctgattttaaatatgccaaaatatcattatctgtactgtcaataaacaaaatacactgtggcatcttgcaggagcagagaaacaaaaggaggacaggcaaaactgaagatgataggcgatctagagagcagagcaaggatcgaaacggcccgccgtccagggatagagattcagaaaggagagacagggttgagtctcgagatggaagaagagattatgatagggaacgcgataggcgtcacgatagggaccgtcgccatgaccgcgaccgggatagggattatgaccgctcccgcggatatgactcaaggagaagagagcgttcacgctccagggagcgcagcaggcgccatgagagatactaaatgttactccatggctgacagattttggattgctggcgtctgttctggtttgtgttgtgctttgtgtcttatcttccgaagtttcctgttcctgctcgagaaatccgaaagccaatctgcgttctgcatcatgtcatgtcctagtgtcgtactgtttagttatatgccgagaacatctctttcatcaaatgaatatttggaaacaccaacgcacttgacgctaaatgggaatgaagtgtggagtatttaaacgcctctgaaatcaaatgaaagttgtacttgtacgaaagaaacatattcaaaaaaaaaaaactcaacaatcatggcaaaggtggattcttgtacagcagatttcttgtagtatggtatgtgaacaaaacagtgttcagggcctgaaggcggaggaggcaacccgtctaactagacggccttccgctggcggaccttgaagctggtgg

SEQ ID NO: 208975 - DNA, 2759 bp, Zea Mays
cttttgtgtaccgccgtaacgcacgagcattatactgccataaatttcttagagctgataaaatacatactgcgcgttgcaagctcccacttcctgaggaacaggaactccatgagatccgcggcatccgccgtcccgttcatctgcacaaaaagaccgtaatccttctttttcctctcctccccatccgcggagtgtaaatcgtctctcgctagcgcgttcagtagaaaccctaaaccccgcctcctcccctcgccggggtaggggctacgggtgtcaacgcccgccatggacgcattccggaagcaactggatgtgctcatgggcgctaaccgcaacggcgacgtcgaggaggtgagccgcaactactacgaccgcgacgtctgccggctcttcctcgccggcctttgcccccacgacctcttccagctcacgaaaatggatcttggtccttgttctaagattcactcgcttcaactgcggaaagattatgaagaagcgaaagcaaagggaacagagaattttgacagagaactcgaggatatgatagaaaggctcattgtggagtgcgacaggaaaattcagagggccctgaaacgacttgcggatgacgatgccaaggctgctattgcgatatccgtctcggaggttactctgacggatgacatactgcagctgtcaaaacagatcaaggaaaaaatggtagaagttgatgcctttgattttgaagggagaactgatgataaaataaaggcccaggaagtagtggaagaactcagaactaaaagagctgatatgcaggctaccctcttgcttgatgcttttaacaaggacagagcttcattaactcagcctgctcaacctcctcaagtggcggcagcgccaccaccagctccacccgatgctcgtactcaagaaatgatcaatgaaaagcttaagaaagctgaagagcttggggaacaaggcatggttgatgaagctcagaaagctttggaagaggcagaagctctgaaaaagctggcgcgacgtccggagccaccttcagacccttctaaatatactgccgctgatgtttggattaccgatcaaaagttgcgcctctgtgatatatgtggagcatttctgagtgtatatgacaatgatcgacgtcttgctgaccattttggagggaaactgcatctaggctacatgctgattcgtgacaaacagaaagaacttcaggtgctgagtgtaatgtaccgttttctgctttaaagagttactctgttttgggccttttggcatctgtgagttttcttatctcaagagcctcaaggaattagtccatgtcgcgtgattggaatctcatgcgatgatcttcatacctatggctacaacagtcactgtctgttgacaaatgtaagcataggagcgtgcggaccatggtatgaaaaaaatcatgtttacttaattgtgacaaactgctcatgtgtctgcttagtatcgattgttgggcagaagctggaggttgcctttttactgcctgagccatattatgtagaccaggtgacaaataatactggttaagttatcctgaaagcacacttcttttgccaacattttgctgtaagtgacaacttgttctgttttctatctgctacctcctccataagtttgcaagttacattttgctgaagcaaccttgcctgtaaagtatcgcccgccctatcttttggaacgttgtctctgattttaaatatgccaaaatatcattatctgtactgtcaataaacaaaatacactgtggcatcttgcaggagcagagaaacaaaaggaggacaggcaaaactgaagatgataggcgatctagagagcagagcaaggatcgaaacggcccgccgtccagggatagagattcagaaaggagagacagggttgagtctcgagatggaagaagagattatgatagggaacgcgataggcgtcacgatagggaccgtcgccatgaccgcgaccgggatagggattatgaccgctcccgcggatatgactcaaggagaagagagcgttcacgctccagggagcgcagcaggcgccatgagagatactaaatgttactccatggctgacagattttggattgctggcgtctgttctggtttgtgttgtgctttgtgtcttatcttccgaagtttcctgttcctgctcgagaaatccgaaagccaatctgcgttctgcatcatgtcatgtcctagtgtcgtactgtttagttatatgccgagaacatctctttcatcaaatgaatatttggaaacaccaacgcacttgacgctaaatgggaatgaagtgtggagtatttaaacgcctctgaaatcaaatgaaagttgtacttgtacgaatctcttccacaaattgcactgtatatgcttgtactgttgcagatttacgatgggtttggactgttctccatccccggagcgcgctcaggctcgacgctacctagctacggacctttatttttggtacctgatgaaacatgatggttttaggaggcgcggtgtttctctggcgaacgatggccggacgtccattttcgagaaccacaagacaagaaacatattcaaaaaaaaaaaactcaacaatcatggcaaaggtggattcttgtacagcagatttcttgtagtatggtatgtgaacaaaacagtgttcagggcctgaaggcggaggaggcaacccgtctaactagacggccttccgctggcggaccttgaagctggtgg

SEQ ID NO: 208976 - DNA, 2450 bp, Zea Mays
attatctcttcgtcttttgtgtaccgccgtaacgcacgagcattatactgccataaatttcttagagctgataaaatacatactgcgcgttgcaagctcccacttcctgaggaacaggaactccatgagatccgcggcatccgccgtcccgttcatctgcacaaaaagaccgtaatccttctttttcctctcctccccatccgcggagtgtaaatcgtctctcgctagcgcgttcagtagaaaccctaaaccccgcctcctcccctcgccggggtaggggctacgggtgtcaacgcccgccatggacgcattccggaagcaactggatgtgctcatgggcgctaaccgcaacggcgacgtcgaggaggtgagccgcaactactacgaccgcgacgtctgccggctcttcctcgccggcctttgcccccacgacctcttccagctcacgaaaatggatcttggtccttgttctaagattcactcgcttcaactgcggaaagattatgaagaagcgaaagcaaagggaacagagaattttgacagagaactcgaggatatgatagaaaggctcattgtggagtgcgacaggaaaattcagagggccctgaaacgacttgcggatgacgatgccaaggctgctattgcgatatccgtctcggaggttactctgacggatgacatactgcagctgtcaaaacagatcaaggaaaaaatggtagaagttgatgcctttgattttgaagggagaactgatgataaaataaaggcccaggaagtagtggaagaactcagaactaaaagagctgatatgcaggctaccctcttgcttgatgcttttaacaaggacagagcttcattaactcagcctgctcaacctcctcaagtggcggcagcgccaccaccagctccacccgatgctcgtactcaagaaatgatcaatgaaaagcttaagaaagctgaagagcttggggaacaaggcatggttgatgaagctcagaaagctttggaagaggcagaagctctgaaaaagctggcgcgacgtccggagccaccttcagacccttctaaatatactgccgctgatgtttggattaccgatcaaaagttgcgcctctgtgatatatgtggagcatttctgagtgtatatgacaatgatcgacgtcttgctgaccattttggagggaaactgcatctaggctacatgctgattcgtgacaaacagaaagaacttcaggtgctgagtgtaatgtaccgttttctgctttaaagagttactctgttttgggccttttggcatctgaattagtccatgtcgcgtgattggaatctcatgcgatgatcttcatacctatggctacaacagtcactgtctgttgacaaattatcgattgttgggcagaagctggaggttgcctttttactgcctgagccatattatgtagaccaggtgacaaataatactggttaagttatcctgaaagcacacttcttttgccaacattttgctgtaagtgacaacttgttctgttttctatctgctacctcctccataagtttgcaagttacattttgctgaagcaaccttgcctgtaaagtatcgcccgccctatcttttggaacgttgtctctgattttaaatatgccaaaatatcattatctgtactgtcaataaacaaaatacactgtggcatcttgcaggagcagagaaacaaaaggaggacaggcaaaactgaagatgataggcgatctagagagcagagcaaggatcgaaacggcccgccgtccagggatagagattcagaaaggagagacagggttgagtctcgagatggaagaagagattatgatagggaacgcgataggcgtcacgatagggaccgtcgccatgaccgcgaccgggatagggattatgaccgctcccgcggatatgactcaaggagaagagagcgttcacgctccagggagcgcagcaggcgccatgagagatactaaatgttactccatggctgacagattttggattgctggcgtctgttctggtttgtgttgtgctttgtgtcttatcttccgaagtttcctgttcctgctcgagaaatccgaaagccaatctgcgttctgcatcatgtcatgtcctagtgtcgtactgtttagttatatgccgagaacatctctttcatcaaatgaatatttggaaacaccaacgcacttgacgctaaatgggaatgaagtgtggagtatttaaacgcctctgaaatcaaatgaaagttgtacttgtacgaaagaaacatattcaaaaaaaaaaaactcaacaatcatggcaaaggtggattcttgtacagcagatttcttgtagtatggtatgtgaacaaaacagtgttcagggcctgaaggcggaggaggcaacccgtctaactagacggccttccgctggcggaccttgaagctggtgg

SEQ ID NO: 208977 - DNA, 2535 bp, Zea Mays
cttccactataattatctcttcgtcttttgtgtaccgccgtaacgcacgagcattatactgccataaatttcttagagctgataaaatacatactgcgcgttgcaagctcccacttcctgaggaacaggaactccatgagatccgcggcatccgccgtcccgttcatctgcacaaaaagaccgtaatccttctttttcctctcctccccatccgcggagtgtaaatcgtctctcgctagcgcgttcagtagaaaccctaaaccccgcctcctcccctcgccggggtaggggctacgggtgtcaacgcccgccatggacgcattccggaagcaactggatgtgctcatgggcgctaaccgcaacggcgacgtcgaggaggtgagccgcaactactacgaccgcgacgtctgccggctcttcctcgccggcctttgcccccacgacctcttccagctcacgaaaatggatcttggtccttgttctaagattcactcgcttcaactgcggaaagaaagcgaaagcaaagggaacagagaattttgacagagaactcgaggatatgatagaaaggctcattgtggagtgcgacaggaaaattcagagggccctgaaacgacttgcggatgacgatgccaaggctgctattgcgatatccgtctcggaggttactctgacggatgacatactgcagctgtcaaaacagatcaaggaaaaaatggtagaagttgatgcctttgattttgaagggagaactgatgataaaataaaggcccaggaagtagtggaagaactcagaactaaaagagctgatatgcaggctaccctcttgcttgatgcttttaacaaggacagagcttcattaactcagcctgctcaacctcctcaagtggcggcagcgccaccaccagctccacccgatgctcgtactcaagaaatgatcaatgaaaagcttaagaaagctgaagagcttggggaacaaggcatggttgatgaagctcagaaagctttggaagaggcagaagctctgaaaaagctggcgcgacgtccggagccaccttcagacccttctaaatatactgccgctgatgtttggattaccgatcaaaagttgcgcctctgtgatatatgtggagcatttctgagtgtatatgacaatgatcgacgtcttgctgaccattttggagggaaactgcatctaggctacatgctgattcgtgacaaacagaaagaacttcaggtgctgagtgtaatgtaccgttttctgctttaaagagttactctgttttgggccttttggcatctgaattagtccatgtcgcgtgattggaatctcatgcgatgatcttcatacctatggctacaacagtcactgtctgttgacaaatgtaagcataggagcgtgcggaccatggtatgaaaaaaatcatgtttacttaattgtgacaaactgctcatgtgtctgcttagtatcgattgttgggcagaagctggaggttgcctttttactgcctgagccatattatgtagaccaggtgacaaataatactggttaagttatcctgaaagcacacttcttttgccaacattttgctgtaagtgacaacttgttctgttttctatctgctacctcctccataagtttgcaagttacattttgctgaagcaaccttgcctgtaaagtatcgcccgccctatcttttggaacgttgtctctgattttaaatatgccaaaatatcattatctgtactgtcaataaacaaaatacactgtggcatcttgcaggagcagagaaacaaaaggaggacaggcaaaactgaagatgataggcgatctagagagcagagcaaggatcgaaacggcccgccgtccagggatagagattcagaaaggagagacagggttgagtctcgagatggaagaagagattatgatagggaacgcgataggcgtcacgatagggaccgtcgccatgaccgcgaccgggatagggattatgaccgctcccgcggatatgactcaaggagaagagagcgttcacgctccagggagcgcagcaggcgccatgagagatactaaatgttactccatggctgacagattttggattgctggcgtctgttctggtttgtgttgtgctttgtgtcttatcttccgaagtttcctgttcctgctcgagaaatccgaaagccaatctgcgttctgcatcatgtcatgtcctagtgtcgtactgtttagttatatgccgagaacatctctttcatcaaatgaatatttggaaacaccaacgcacttgacgctaaatgggaatgaagtgtggagtatttaaacgcctctgaaatcaaatgaaagttgtacttgtacgaaagaaacatattcaaaaaaaaaaaactcaacaatcatggcaaaggtggattcttgtacagcagatttcttgtagtatggtatgtgaacaaaacagtgttcagggcctgaaggcggaggaggcaacccgtctaactagacggccttccgctggcggaccttgaagctggtgg

SEQ ID NO: 208978 - DNA, 3832 bp, Zea Mays
gattccttccttcccctgatcccctcccctcctcgccgaaagggagggagaaggatggacagctcagggctgcgggctccggcgccgattcacatggccgggggatgctgtgaggactgaggaccttggatgggcgttcgtcccgccggccgagcgcccgcgcgagagagaaggggacagaaacgagtcagaaaggccggccggtgaagctccgtccgtgattgctcaggtaggcttttttccttgcttcgaaggtatttctgctggctttctttcttggtgtcgcactgtagctactatttgtattagtgtgacgaatctgagctttcttctccgtgccaatacactgactgagcggctgattgataacgtgttgggggatttcgttttttttttgctttttagaaaataggtttaacgtttcgatatgcttccatcaattttttctgtctgtatctggaagtgttcagattgtttgaacgtcctttgctatcgcctgtcggaacctggctgacgaactattttcattcaaactgcggtgttcatcatcaggtccaactgctgctgatctccctcatgaactgagcaatcaacagaagaaacaaaagggccgtttccgctacagagagaacgaataaatcaccggaaatgggaaggcgaggccacggggggtcagcgtcacaagacgacgacggtgtgggctgtgcatggggcctcatgcgcatgctctacttccgccgagaccccaagctcttgctggatgcaaagcagttgagtgggaggcatgcgttccgtgaggtcagtgagagggggcattcagcaaagaggtccaaggattttgacgagatagaagaagatggtaacatagaagaatgcacttcgcagaaaccaacagtcaaaaaccttatggaggatgaattgggaaaagtaaagctgctgaagaaaaatccaaatgatgagattcagagaagattagtggacctgggaaatgatgtctctcttggtaggagttcagagcatacaaataaatcaatagatagatcatatcaccaggcaggaatctctacaccttcaattccaccaatggattctggggttttgaattatgctgaagaatatgatcttgaatctgtcctgatgaatttcctaggtgaaatttatagttgtcacgatgaatgcccacacagtgattgcaagaataagaatgaattgtgtccttcactgaagtccctaatccataaaaaggtcaatgaattgaataatcttcctcgcaatattggctgcgcgcaatctcaagagggtaatgatgctaagctatctgaccagaataatctttctaacaccatggcagcccgatccaaacaattcaaggatgcattggaaatactgggttcaaacaatgaacttttcatgaagctgcttcagaagccaaaccaacatatagttgacagtatccaaaagcatgaaaacagtaaggtggctgccggattagagcccaataaaattcatggacagaccaattttctggtaggaagaggaggctcaagacagcatcctttggctacaaaggagcaggctaaagagagaaaatatatgttcttctggaggaagggtaaatcaaatagaaggcagatgcttgaggcaactgacacagatcagactgttaccaaaattgttattctgaagccaaatccagaaagagggtttaatcagaaagcagctactgcaagaactttacatcaacagccatgtacatcgcatgctcctgaatgtggtggaattgataactcaaagttttcaattaaggaagttaagacaagattcagatttgtgaatagtgagagtagaagagaaagcaatttagcacctgcagaggaccttcaaggatacccacggaagttcaaagattcttttgttgcaattaataaagattttagacatttcccagaagggagcttggcaaacaagtctggatcagacatcaagaatgcaatcaaacctttcatcagcagtaagcaaaatgggagcataagcggaaacagtggtcatatagtagcaccaaaaggtgcatctatcttctatgaagaggccaggaggcatttatcagagatgctaaaggataatgactgttctgtaaactatccagcagttcaaatctcaaaatccttggaaggcatactttctctgcctcatggcaatgtgtcaacccctaggagtagcctgtggggaaaggattaccttggcccctcacctggagaaacagatgtttttgttgcatgtgaggttcagagagaagaatgcacacaagagagaagccaatcacaagaggattttggaagcattgctcgatgtactagtgcagcagttgatgatcaggtgacagttcgagatggatattacacgaatgaagcacaagaaggatcaaggcatgctcagaatgagccaggccttctgtatactgaaggaattcacaaattcatttgcggcaaaaacatttgcgacgaacagtccgttccagcagaacaaagtagacacgatgaaatactagaagaaataaaacaaggaaaagaacatatcaaaatgtccccaacctctgctgaggggatagttgaaacgttggggcagcaagagccagaaacaccagaaccaagagcatcaaccgaactaatctcagatggttctcccgagcaaagcgatgaaaagcaagagaggcccagtccagtatctgttcttgagtcattctttgaagatattgacaatccagactgcataaacaagaaagaatgtgagctgcatggtctccaaaggaccctgtattttccagataatgaaccagatgttagcctccttggggaggacaggagtgtcagagtggattacataaagttggtgctagaactctcggagttgtgtgcagaacaaaatttagaggtatggtacctagaggacgaattaatcagcccctgcttgtttgaagaactacagagtcagggcgatcaaacggatgatctaaagctcctatttgactgtatctgtgaggctctaacagagatccaagagagatattttagactctcttggctaactttcctaaagcaagacataaggacacctccgattggagaaaacctcatcacagaagttgatagatatgtttacgggtatatccaacatagtcttccaatcactctagagcagataatcaagagggacctggaagttcagacgtggatgaacattagatcgaaaactgaagggattattatggagatgtgggagtttgtattggatgagttgatagatgagactgtctttgatttgtggatttgaagttctgattagatctcgtccatggtgccttgtggcgagtatagtgagtaggatacgtgagttttcgtgctgacaataaccagttgtatgcggcagaataacatgatgggctactactagtcaagtgtgtaactacagtggaaatggttctcgtggatgaaaacaaaagtttaggttcagcaaatctccagaattgtgcagtttgtgtggatgaagttggttggggacggtctgtcaccagaactctcagccatgcctctcaacagcgaattgtacagcagatttgagagtttgtctgtgcatgtgtgatgcgtacacttttcagcgtgatcagatcacgcttatcgtataggtttgttttgtgtgtaaatgtgcaaaaaagtaatcatacatgttaatcaaatggcatgttttgagtatgcttgagcattatttgaaggaccaaattcgttaatcagaggaagggaaatggtataggtttgtttttgtgtctaaatgtgca

SEQ ID NO: 208979 - DNA, 3654 bp, Zea Mays
cacaagcaggcaaagcagagcgaagcaagagggagaagaagagaagaggagaaaagaagaaagaaaagcgaaagcaaaggtgaccggcacctggattagtttgtctagctaaccgcggaagaacaaagggtaacatccgattccttccttcccctgatcccctcccctcctcgccgaaagggagggagaaggatggacagctcagggctgcgggctccggcgccgattcacatggccgggggatgctgtgaggactgaggaccttggatgggcgttcgtcccgccggccgagcgcccgcgcgagagagaaggggacagaaacgagtcagaaaggccggccggtgaagctccgtccgtgattgctcaggtccaactgctgctgatctccctcatgaactgagcaatcaacagaagaaacaaaagggccgtttccgctacagagagaacgaataaatcaccggaaatgggaaggcgaggccacggggggtcagcgtcacaagacgacgacggtgtgggctgtgcatggggcctcatgcgcatgctctacttccgccgagaccccaagctcttgctggatgcaaagcagttgagtgggaggcatgcgttccgtgaggtcagtgagagggggcattcagcaaagaggtccaaggattttgacgagatagaagaagatgaacatagaagaatgcacttcgcagaaaccaacagtcaaaaaccttatggaggatgaattgggaaaagtaaagctgctgaagaaaaatccaaatgatgagattcagagaagattagtggacctgggaaatgatgtctctcttggtaggagttcagagcatacaaataaatcaatagatagatcatatcaccaggcaggaatctctacaccttcaattccaccaatggattctggggttttgaattatgctgaagaatatgatcttgaatctgtcctgatgaatttcctaggtgaaatttatagttgtcacgatgaatgcccacacagtgattgcaagaataagaatgaattgtgtccttcactgaagtccctaatccataaaaaggtcaatgaattgaataatcttcctcgcaatattggctgcgcgcaatctcaagagggtaatgatgctaagctatctgaccagaataatctttctaacaccatggcagcccgatccaaacaattcaaggatgcattggaaatactgggttcaaacaatgaacttttcatgaagctgcttcagaagccaaaccaacatatagttgacagtatccaaaagcatgaaaacagtaaggtggctgccggattagagcccaataaaattcatggacagaccaattttctggtaggaagaggaggctcaagacagcatcctttggctacaaaggagcaggctaaagagagaaaatatatgttcttctggaggaagggtaaatcaaatagaaggcagatgcttgaggcaactgacacagatcagactgttaccaaaattgttattctgaagccaaatccagaaagagggtttaatcagaaagcagctactgcaagaactttacatcaacagccatgtacatcgcatgctcctgaatgtggtggaattgataactcaaagttttcaattaaggaagttaagacaagattcagatttgtgaatagtgagagtagaagagaaagcaatttagcacctgcagaggaccttcaaggatacccacggaagttcaaagattcttttgttgcaattaataaagattttagacatttcccagaagggagcttggcaaacaagtctggatcagacatcaagaatgcaatcaaacctttcatcagcagtaagcaaaatgggagcataagcggaaacagtggtcatatagtagcaccaaaaggtgcatctatcttctatgaagaggccaggaggcatttatcagagatgctaaaggataatgactgttctgtaaactatccagcagttcaaatctcaaaatccttggaaggcatactttctctgcctcatggcaatgtgtcaacccctaggagtagcctgtggggaaaggattaccttggcccctcacctggagaaacagatgtttttgttgcatgtgaggttcagagagaagaatgcacacaagagagaagccaatcacaagaggattttggaagcattgctcgatgtactagtgcagcagttgatgatcaggtgacagttcgagatggatattacacgaatgaagcacaagaaggatcaaggcatgctcagaatgagccaggccttctgtatactgaaggaattcacaaattcatttgcggcaaaaacatttgcgacgaacagtccgttccagcagaacaaagtagacacgatgtatgtcaggaaatactagaagaaataaaacaaggaaaagaacatatcaaaatgtccccaacctctgctgaggggatagttgaaacgttggggcagcaagagccagaaacaccagaaccaagagcatcaaccgaactaatctcagatggttctcccgagcaaagcgatgaaaagcaagagaggcccagtccagtatctgttcttgagtcattctttgaagatattgacaatccagactgcataaacaagaaagaatgtgagctgcatggtctccaaaggaccctgtattttccagataatgaaccagatgttagcctccttggggaggacaggagtgtcagagtggattacataaagttggtgctagaactctcggagttgtgtgcagaacaaaatttagaggtatggtacctagaggacgaattaatcagcccctgcttgtttgaagaactacagagtcagggcgatcaaacggatgatctaaagctcctatttgactgtatctgtgaggctctaacagagatccaagagagatattttagactctcttggctaactttcctaaagcaagacataaggacacctccgattggagaaaacctcatcacagaagttgatagatatgtttacgggtatatccaacatagtcttccaatcactctagagcagataatcaagagggacctggaagttcagacgtggatgaacattagatcgaaaactgaagggattattatggagatgtgggagtttgtattggatgagttgatagatgagactgtctttgatttgtggatttgaagttctgattagatctcgtccatggtgccttgtggcgagtatagtgagtaggatacgtgagttttcgtgctgacaataaccagttgtatgcggcagaataacatgatgggctactactagtcaagtgtgtaactacagtggaaatggttctcgtggatgaaaacaaaagtttaggttcagcaaatctccagaattgtgcagtttgtgtggatgaagttggttggggacggtctgtcaccagaactctcagccatgcctctcaacagcgaattgtacagcagatttgagagtttgtctgtgcatgtgtgatgcgtacacttttcagcgtgatcagatcacgcttatcgtataggtttgttttgtgtgtaaatgtgcaaaaaagtaatcatacatgttaatcaaatggcatgttttgagtatgcttgagcattatttgaaggaccaaattcgttaatcagaggaagggaaatggtataggtttgtttttgtgtctaaatgtgca

SEQ ID NO: 208980 - DNA, 3695 bp, Zea Mays
ccgtaacactgtagccctgctgcgctccgctcgtcgcattccattccacaagcaggcaaagcagagcgaagcaagagggagaagaagagaagaggagaaaagaagaaagaaaagcgaaagcaaaggtgaccggcacctggattagtttgtctagctaaccgcggaagaacaaagggtaacatccgattccttccttcccctgatcccctcccctcctcgccgaaagggagggagaaggatggacagctcagggctgcgggctccggcgccgattcacatggccgggggatgctgtgaggactgaggaccttggatgggcgttcgtcccgccggccgagcgcccgcgcgagagagaaggggacagaaacgagtcagaaaggccggccggtgaagctccgtccgtgattgctcaggtccaactgctgctgatctccctcatgaactgagcaatcaacagaagaaacaaaagggccgtttccgctacagagagaacgaataaatcaccggaaatgggaaggcgaggccacggggggtcagcgtcacaagacgacgacggtgtgggctgtgcatggggcctcatgcgcatgctctacttccgccgagaccccaagctcttgctggatgcaaagcagttgagtgggaggcatgcgttccgtgagagagggggcattcagcaaagaggtccaaggattttgacgagatagaagaagatggtaacatagaagaatgcacttcgcagaaaccaacagtcaaaaaccttatggaggatgaattgggaaaagtaaagctgctgaagaaaaatccaaatgatgagattcagagaagattagtggacctgggaaatgatgtctctcttggtaggagttcagagcatacaaataaatcaatagatagatcatatcaccaggcaggaatctctacaccttcaattccaccaatggattctggggttttgaattatgctgaagaatatgatcttgaatctgtcctgatgaatttcctaggtgaaatttatagttgtcacgatgaatgcccacacagtgattgcaagaataagaatgaattgtgtccttcactgaagtccctaatccataaaaaggtcaatgaattgaataatcttcctcgcaatattggctgcgcgcaatctcaagagggtaatgatgctaagctatctgaccagaataatctttctaacaccatggcagcccgatccaaacaattcaaggatgcattggaaatactgggttcaaacaatgaacttttcatgaagctgcttcagaagccaaaccaacatatagttgacagtatccaaaagcatgaaaacagtaaggtggctgccggattagagcccaataaaattcatggacagaccaattttctggtaggaagaggaggctcaagacagcatcctttggctacaaaggagcaggctaaagagagaaaatatatgttcttctggaggaagggtaaatcaaatagaaggcagatgcttgaggcaactgacacagatcagactgttaccaaaattgttattctgaagccaaatccagaaagagggtttaatcagaaagcagctactgcaagaactttacatcaacagccatgtacatcgcatgctcctgaatgtggtggaattgataactcaaagttttcaattaaggaagttaagacaagattcagatttgtgaatagtgagagtagaagagaaagcaatttagcacctgcagaggaccttcaaggatacccacggaagttcaaagattcttttgttgcaattaataaagattttagacatttcccagaagggagcttggcaaacaagtctggatcagacatcaagaatgcaatcaaacctttcatcagcagtaagcaaaatgggagcataagcggaaacagtggtcatatagtagcaccaaaaggtgcatctatcttctatgaagaggccaggaggcatttatcagagatgctaaaggataatgactgttctgtaaactatccagcagttcaaatctcaaaatccttggaaggcatactttctctgcctcatggcaatgtgtcaacccctaggagtagcctgtggggaaaggattaccttggcccctcacctggagaaacagatgtttttgttgcatgtgaggttcagagagaagaatgcacacaagagagaagccaatcacaagaggattttggaagcattgctcgatgtactagtgcagcagttgatgatcaggtgacagttcgagatggatattacacgaatgaagcacaagaaggatcaaggcatgctcagaatgagccaggccttctgtatactgaaggaattcacaaattcatttgcggcaaaaacatttgcgacgaacagtccgttccagcagaacaaagtagacacgatgtatgtcaggaaatactagaagaaataaaacaaggaaaagaacatatcaaaatgtccccaacctctgctgaggggatagttgaaacgttggggcagcaagagccagaaacaccagaaccaagagcatcaaccgaactaatctcagatggttctcccgagcaaagcgatgaaaagcaagagaggcccagtccagtatctgttcttgagtcattctttgaagatattgacaatccagactgcataaacaagaaagaatgtgagctgcatggtctccaaaggaccctgtattttccagataatgaaccagatgttagcctccttggggaggacaggagtgtcagagtggattacataaagttggtgctagaactctcggagttgtgtgcagaacaaaatttagaggtatggtacctagaggacgaattaatcagcccctgcttgtttgaagaactacagagtcagggcgatcaaacggatgatctaaagctcctatttgactgtatctgtgaggctctaacagagatccaagagagatattttagactctcttggctaactttcctaaagcaagacataaggacacctccgattggagaaaacctcatcacagaagttgatagatatgtttacgggtatatccaacatagtcttccaatcactctagagcagataatcaagagggacctggaagttcagacgtggatgaacattagatcgaaaactgaagggattattatggagatgtgggagtttgtattggatgagttgatagatgagactgtctttgatttgtggatttgaagttctgattagatctcgtccatggtgccttgtggcgagtatagtgagtaggatacgtgagttttcgtgctgacaataaccagttgtatgcggcagaataacatgatgggctactactagtcaagtgtgtaactacagtggaaatggttctcgtggatgaaaacaaaagtttaggttcagcaaatctccagaattgtgcagtttgtgtggatgaagttggttggggacggtctgtcaccagaactctcagccatgcctctcaacagcgaattgtacagcagatttgagagtttgtctgtgcatgtgtgatgcgtacacttttcagcgtgatcagatcacgcttatcgtataggtttgttttgtgtgtaaatgtgcaaaaaagtaatcatacatgttaatcaaatggcatgttttgagtatgcttgagcattatttgaaggaccaaattcgttaatcagaggaagggaaatggtataggtttgtttttgtgtctaaatgtgca

SEQ ID NO: 208981 - DNA, 3737 bp, Zea Mays
ggtaggtttcaatgtcctgattgcagccatcgccttacgattaccgatttttcctgcggttggaaaaatgctggcgcacttgcgaaagtccaataatctactggtgcgacgcaatggccggccatgtggtgggctgccgtaacactgtagccctgctgcgctccgctcgtcgcattccattccacaagcaggcaaagcagagcgaagcaagagggagaagaagagaagaggagaaaagaagaaagaaaagcgaaagcaaagggagggagaaggatggacagctcagggctgcgggctccggcgccgattcacatggccgggggatgctgtgaggactgaggaccttggatgggcgttcgtcccgccggccgagcgcccgcgcgagagagaaggggacagaaacgagtcagaaaggccggccggtgaagctccgtccgtgattgctcaggtccaactgctgctgatctccctcatgaactgagcaatcaacagaagaaacaaaagggccgtttccgctacagagagaacgaataaatcaccggaaatgggaaggcgaggccacggggggtcagcgtcacaagacgacgacggtgtgggctgtgcatggggcctcatgcgcatgctctacttccgccgagaccccaagctcttgctggatgcaaagcagttgagtgggaggcatgcgttccgtgaggtcagtgagagggggcattcagcaaagaggtccaaggattttgacgagatagaagaagatggtaacatagaagaatgcacttcgcagaaaccaacagtcaaaaaccttatggaggatgaattgggaaaagtaaagctgctgaagaaaaatccaaatgatgagattcagagaagattagtggacctgggaaatgatgtctctcttggtaggagttcagagcatacaaataaatcaatagatagatcatatcaccaggcaggaatctctacaccttcaattccaccaatggattctggggttttgaattatgctgaagaatatgatcttgaatctgtcctgatgaatttcctaggtgaaatttatagttgtcacgatgaatgcccacacagtgattgcaagaataagaatgaattgtgtccttcactgaagtccctaatccataaaaaggtcaatgaattgaataatcttcctcgcaatattggctgcgcgcaatctcaagagggtaatgatgctaagctatctgaccagaataatctttctaacaccatggcagcccgatccaaacaattcaaggatgcattggaaatactgggttcaaacaatgaacttttcatgaagctgcttcagaagccaaaccaacatatagttgacagtatccaaaagcatgaaaacagtaaggtggctgccggattagagcccaataaaattcatggacagaccaattttctggtaggaagaggaggctcaagacagcatcctttggctacaaaggagcaggctaaagagagaaaatatatgttcttctggaggaagggtaaatcaaatagaaggcagatgcttgaggcaactgacacagatcagactgttaccaaaattgttattctgaagccaaatccagaaagagggtttaatcagaaagcagctactgcaagaactttacatcaacagccatgtacatcgcatgctcctgaatgtggtggaattgataactcaaagttttcaattaaggaagttaagacaagattcagatttgtgaatagtgagagtagaagagaaagcaatttagcacctgcagaggaccttcaaggatacccacggaagttcaaagattcttttgttgcaattaataaagattttagacatttcccagaagggagcttggcaaacaagtctggatcagacatcaagaatgcaatcaaacctttcatcagcagtaagcaaaatgggagcataagcggaaacagtggtcatatagtagcaccaaaaggtgcatctatcttctatgaagaggccaggaggcatttatcagagatgctaaaggataatgactgttctgtaaactatccagcagttcaaatctcaaaatccttggaaggcatactttctctgcctcatggcaatgtgtcaacccctaggagtagcctgtggggaaaggattaccttggcccctcacctggagaaacagatgtttttgttgcatgtgaggttcagagagaagaatgcacacaagagagaagccaatcacaagaggattttggaagcattgctcgatgtactagtgcagcagttgatgatcaggtgacagttcgagatggatattacacgaatgaagcacaagaaggatcaaggcatgctcagaatgagccaggccttctgtatactgaaggaattcacaaattcatttgcggcaaaaacatttgcgacgaacagtccgttccagcagaacaaagtagacacgatgtatgtcaggaaatactagaagaaataaaacaaggaaaagaacatatcaaaatgtccccaacctctgctgaggggatagttgaaacgttggggcagcaagagccagaaacaccagaaccaagagcatcaaccgaactaatctcagatggttctcccgagcaaagcgatgaaaagcaagagaggcccagtccagtatctgttcttgagtcattctttgaagatattgacaatccagactgcataaacaagaaagaatgtgagctgcatggtctccaaaggaccctgtattttccagataatgaaccagatgttagcctccttggggaggacaggagtgtcagagtggattacataaagttggtgctagaactctcggagttgtgtgcagaacaaaatttagaggtatggtacctagaggacgaattaatcagcccctgcttgtttgaagaactacagagtcagggcgatcaaacggatgatctaaagctcctatttgactgtatctgtgaggctctaacagagatccaagagagatattttagactctcttggctaactttcctaaagcaagacataaggacacctccgattggagaaaacctcatcacagaagttgatagatatgtttacgggtatatccaacatagtcttccaatcactctagagcagataatcaagagggacctggaagttcagacgtggatgaacattagatcgaaaactgaagggattattatggagatgtgggagtttgtattggatgagttgatagatgagactgtctttgatttgtggatttgaagttctgattagatctcgtccatggtgccttgtggcgagtatagtgagtaggatacgtgagttttcgtgctgacaataaccagttgtatgcggcagaataacatgatgggctactactagtcaagtgtgtaactacagtggaaatggttctcgtggatgaaaacaaaagtttaggttcagcaaatctccagaattgtgcagtttgtgtggatgaagttggttggggacggtctgtcaccagaactctcagccatgcctctcaacagcgaattgtacagcagatttgagagtttgtctgtgcatgtgtgatgcgtacacttttcagcgtgatcagatcacgcttatcgtataggtttgttttgtgtgtaaatgtgcaaaaaagtaatcatacatgttaatcaaatggcatgttttgagtatgcttgagcattatttgaaggaccaaattcgttaatcagaggaagggaaatggtataggtttgtttttgtgtctaaatgtgca

SEQ ID NO: 208982 - DNA, 1059 bp, Zea Mays
cggattggtccagggccgtcgacgcttcacggtcgggtgggtttcggggccacctcagccgccagcagctagacggccctatcctcgctcccgcggccgccgtctccctatcctgccgcggcggcgagcacgtgcggagctgcgggcgccaccagacaaacccgctcattcgttcagcccccctgcccggagcaatggaggcgctgcgggcgtggagggcctcctccaatctcatcggcttcgcggcctcccgcgccgccgcctccgcttcaaggccccttggcctccgtatccgctgctgctccgcggccgccgccaccacgaacccgccggcgcagcctcaggaccgccgacgccgtagtgcctcctcatccgcctccacctccgaccgcgactccatccgcgccatccgcctcaaaaaagttgatgagctcagagggaagggttatgagccgtacgcgtacaggtgggacaggactcacacgaccaaggcgcttcaggaacagtacactcatcttatgaacggtgaagtctgcgaggacgtgtcggtgtccgttgctggccggattgttgcccgaagagcatttggaaagcttgtttttatgactgtaagagatgatgcggggactgtgcagctttattgtgagaaagacagccttacggaggaccaatttgagcaactaaaggcgtttattgatattggtgatatattaggtgcaagtggatccattaaaaagacagagaaaggggagctatctgtttatgtgaaaaatttcgaaattctcacaaaatcattactcccactaccagataagtatcatggattaactgatgtggacaaacgttatcgtcaaaggtatgttgacatgattgcaaaccctaaggtcgctgatgtattccgaactagggcaaaggtattgactacatgtgatgctaaatctgtattttgaaactgttgggcaattaactacacctattactaatttactattatagtttagtttggaaactcttatatcattttaagggcccgtttggcaaagctccagctcctgcttc

SEQ ID NO: 208983 - DNA, 875 bp, Zea Mays
acggccctatcctcgctcccgcggccgccgtctccctatcctgccgcggcggcgagcacgtgcggagctgcgggcgccaccagacaaacccgctcattcgttcagcccccctgcccggagcaatggaggcgctgcgggcgtggagggcctcctccaatctcatcggcttcgcggcctcccgcgccgccgcctccgcttcaaggccccttggcctccgtatccgctgctgctccgcggccgccgccaccacgaacccgccggcgcagcctcaggaccgccgacgccgtagtgcctcctcatccgcctccacctccgaccgcgactccatccgcgccatccgcctcaaaaaagttgatgagctcagagggaagggttatgagccgtacgcgtacaggtgggacaggactcacacgaccaaggcgcttcaggaacagtacactcatcttatgaacggtgaagtctgcgaggacgtgtcggtgtccgttgctggccggattgttgcccgaagagcatttggaaagcttgtttttatgactgtaagagatgatgcggggactgtgcaggggagctatctgtttatgtgaaaaatttcgaaattctcacaaaatcattactcccactaccagataagtatcatggattaactgatgtggacaaacgttatcgtcaaaggtatgttgacatgattgcaaaccctaaggtcgctgatgtattccgaactagggcaaaggtattgactacatgtgatgctaaatctgtattttgaaactgttgggcaattaactacacctattactaatttactattatagtttagtttggaaactcttatatcattttaagggcccgtttggcaaagctccagctcctgcttc

SEQ ID NO: 208984 - DNA, 3878 bp, Zea Mays
gtcgcacccgctctccccgtgctgctggtggattcgttcaaggcgggggccgcctgcctgcccgcccgcttttccgtaccctggtccccggttgggttgggttggatttggttgcgaggtgttgttgggggtgggcgctcgggtggcggagtggttacttccccgcttggcctcttgctgcgccccgctgggccgtgtcgtgccattaaagccggcgcctttggtttctctctccacctctctctatccgcccccgccccggctctctctctagctgcagattggtgcctcacccctagcggtcggtggttggggccgggttccgacggctgctcgggagctcgactggggcttggaagtccaaagccgccgcctcctcgtggcgcgccgctccggaattcttgccttcttgggctccgaatctcgccgcccggtgtttgatttgcggcgttcctagcgaattcggggctgatttgcccccctatggcgaggatttgagtggactcgagaggaacaagtagaggggagtcctgatttgggcccctgccgtggtatgtgccatgaggaagctcttcttctccgagtcggcctgcaaggagaccaagctccactgcgcgccccactcatggctgcccctcgagagggggaagctctccaagttctccggccatgccgccgccggctcctccatagaggcattgatgaagatgccggagccggcagtgcttccgtacttcaagcccgcgaactatgtcgacatactggctcagatacacgaggagctggagtcctgccctcctgacgagaagtcctgcctgtacctgctccagttccaggtcttccgcggccttggggaggccaagctgtcacggaggagcctccagtctgcgtgggagaaggcgagcaccatacacgagaagctcatctttggggcgtggctcaagtacgagaagaaaggggaggaggcaatctccgacctgctcagctcgtgctgcaagtgctcacaggagttcaggctgctggattttgtgtcgcaagtctccactgggtcacacatgatgaactatgatgatgatgatgatgagtctgatgagtttcggggttctgcggtggttcatttccggataagagatgatatgattgcatgcgatcgacggaaacttgcagctctgtcaactccactgtatgcaatgcttaacggtggatttagggaatcctatctggaggtcattgacatgtctagaaatggtatctcccctattggcatgagggcaatcagtaaattcagcctatcaggaagactaccttatttgtcagcagatgctatcttggagatgcttgattttgccaataagttttgctgcaagggcctcaaggatgcctgtgagcgaaagcttgcttctttcatctcttcaaggcaagatgctatagatttcatggagtgtgctcttgagctgggctgttccattcttgctgcttcatgcttacaagtgctcttgaatgagcttccagagtgcttgaatgatgaacaagtggttaggatattctcctctgcaaataaggcacagagattgacaatggttggcaatgcatctttctccctatattgccttctcagtgaagtctccgtgagtaccaacccaacatcggatgtcactgtgagtttcttggaaaaactggtagagtcggcatcagattctaggcagaagcagctggccttacatcagctggcatgcaccagatttttaaggaaagattaccctgaatctgagtgcttgttcaatgctgccttttctgctggccatctttattcgttagtgggtttggctagattggcctctctgaggggtaataagcattttgctctcaagttgctagactctgtgatgtcatctcggtggcctcttggatggatgtatcaagagagagcactctatttggatggtgataacaagttagaaaatcttaacaaggctactgagttggaccctacccttacatatccctatatgtttcgagctgcatctttgatgaaaaggcaaagtgttgaagctgcattgatggagataaaccggatccttggatttaaactggtgctggagtgcttagaactaaggttctgttgctaccttgcccttgaggattatagggctgccttatgtgacgtgcaggcaatcctcactcttgccccagattatcgtatgattggtggccgggttgctgccaagcagctgcgaatgctagtgctagagaatgtagagcagtggacacctgctgactgttggatgcaactttatgatcgctggtcgtctgtggatgatatagggtccctctctgttatatatcaaatgctggagtcagagactgccaaaggagttttgtactttagacaatctttgcttcttctcagattaaactgtcctgaggcggcaatgaggagtttgcagcttgctcgtgagcatgctgcaagtgatcatgaaaggcttgtctatgaaggatggatattgtatgatactggccactgcgaggaaggactgcagaaagcggaagcatcaattgcaatacaacggtcatttgaggcattttttctgaaagcttatgctttggctgattcgagtcttgatccttcgaccacagcaacagttgtatcacttctagaagatgcattgcggtgtccctcagatagacttcggaagggtcaagctctaaacaaccttggaagtgtttatgtggattgtgggaagcttgacctggcagctgaatgctacattaacgccctaaagatcggccacaccagagcgcaccaaggccttgcgagggttcatttccttcggaacaacagagtcggtgcgtatgatgaaatgaccaagctgatagagaaggccaggaacaacgcgtcggcatacgagaagagatctgagtactgcgagcgggagctgacgaaaacggacttgcagatggtcaccaaactcgaccctctgcgagtctacccctacagataccgtgctgctggtaagtgccgtttgcccgcttcctgctgcatggcatatctagtttcttatacttttaatacgacaaagctaggacgtgatgtgatcctagccccaccagattcaaagcaggttgaaacttagaatataaaaattcttgacacggtagtttattaattgttaatggatgtagctcatgtgtgctcaactcccaagtggttggtgctactttaacgaaccaactaccatggttcctaacataaaagctggtgagaagtcaattgctgatggacaaccacaaggagaaagaggccgtcgcggagctgaccagggcgatcgccttcaaggcggacctgaacctgctccacctgcgcgcggccttccacgagcacatcggcgacatctcgagcgccctccgggactgccgcgcggccctcctggtggaccccaaccaccaggagatgctggagctgcaccaccgggtgaacagccaggaaccatgagcggagcgccgccatggtgtacatacaggacgtgataggaagcccctcatagccaaccccccgccataccagtgtatgttttgtaccatacacagcatgtcaatgtaaggatagtagaaaagccactttaggtccctccctggctccctccccttgcaaaccaaacacctacattccttgtgtgcctagttagatatgttgtttgccatatagcctttcccttagtaaattattgttgtcgactgtgattaagcctcctaattgtacccgccacgtggcccgtgctgccagaatcaagaagttttgactgtaccttctgtatgtaaatgcaatgggggaaaaatgatgaatggaagcttttgtcaagcctgcaggcaacttgctg

SEQ ID NO: 208985 - DNA, 3134 bp, Zea Mays
gtcgcacccgctctccccgtgctgctggtggattcgttcaaggcgggggccgcctgcctgcccgcccgcttttccgtaccctggtccccggttgggttgggttggatttggttgcgaggtgttgttgggggtgggcgctcgggtggcggagtggttacttccccgcttggcctcttgctgcgccccgctgggccgtgtcgtgccattaaagccggcgcctttggtttctctctccacctctctctatccgcccccgccccggctctctctctagctgcagattggtgcctcacccctagcggtcggtggttggggccgggttccgacggctgctcgggagctcgactggggcttggaagtccaaagccgccgcctcctcgtggcgcgccgctccggaattcttgccttcttgggctccgaatctcgccgcccggtgtttgatttgcggcgttcctagcgaattcggggctgatttgcccccctatggcgaggatttgagtggactcgagaggaacaagtagaggggagtcctgatttgggcccctgccgtggtatgtgccatgaggaagctcttcttctccgagtcggcctgcaaggagaccaagctccactgcgcgccccactcatggctgcccctcgagagggggaagctctccaagttctccggccatgccgccgccggctcctccatagaggcattgatgaagatgccggagccggcagtgcttccgtacttcaagcccgcgaactatgtcgacatactggctcagatacacgaggagctggagtcctgccctcctgacgagaagtcctgcctgtacctgctccagttccaggtcttccgcggccttggggaggccaagctgtcacggaggagcctccagtctgcgtgggagaaggcgagcaccatacacgagaagctcatctttggggcgtggctcaagtacgagaagaaaggggaggaggcaatctccgacctgctcagctcgtgctgcaagtgctcacaggagttcaggctgctggattttgtgtcgcaagtctccactgggtcacacatgatgaactatgatgatgatgatgatgagtctgatgagtttcggggttctgcggtggttcatttccggataagagatgatatgattgcatgcgatcgacggaaacttgcagctctgtcaactccactgtatgcaatgcttaacggtggatttagggaatcctatctggaggtcattgacatgtctagaaatggtatctcccctattggcatgagggcaatcagtaaattcagcctatcaggaagactaccttatttgtcagcagatgctatcttggagatgcttgattttgccaataagttttgctgcaagggcctcaaggatgcctgtgagcgaaagcttgcttctttcatctcttcaaggcaagatgctatagatttcatggagtgtgctcttgagctgggctgttccattcttgctgcttcatgcttacaagtgctcttgaatgagcttccagagtgcttgaatgatgaacaagtggttaggatattctcctctgcaaataaggcacagagattgacaatggttggcaatgcatctttctccctatattgccttctcagtgaagtctccgtgagtaccaacccaacatcggatgtcactgtgagtttcttggaaaaactggtagagtcggcatcagattctaggcagaagcagctggccttacatcagctggcatgcaccagatttttaaggaaagattaccctgaatctgagtgcttgttcaatgctgccttttctgctggccatctttattcgttagtgggtttggctagattggcctctctgaggggtaataagcattttgctctcaagttgctagactctgtgatgtcatctcggtggcctcttggatggatgtatcaagagagagcactctatttggatggtgataacaagttagaaaatcttaacaaggctactgagttggaccctacccttacatatccctatatgtttcgagctgcatctttgatgaaaaggcaaagtgttgaagctgcattgatggagataaaccggatccttggatttaaactggtgctggagtgcttagaactaaggttctgttgctaccttgcccttgaggattatagggctgccttatgtgacgtgcaggcaatcctcactcttgccccagattatcgtatgattggtggccgggttgctgccaagcagctgcgaatgctagtgctagagaatgtagagcagtggacacctgctgactgttggatgcaactttatgatcgctggtcgtctgtggatgatatagggtccctctctgttatatatcaaatgctggagtcagagactgccaaaggagttttgtactttagacaatctttgcttcttctcagattaaactgtcctgaggcggcaatgaggagtttgcagcttgctcgtgagcatgctgcaagtgatcatgaaaggcttgtctatgaaggatggatattgtatgatactggccactgcgaggaaggactgcagaaagcggaagcatcaattgcaatacaacggtcatttgaggcattttttctgaaagcttatgctttggctgattcgagtcttgatccttcgaccacagcaacagttgtatcacttctagaagatgcattgcggtgtccctcagatagacttcggaagggtcaagctctaaacaaccttggaagtgtttatgtggattgtgggaagcttgacctggcagctgaatgctacattaacgccctaaagatcggccacaccagagcgcaccaaggccttgcgagggttcatttccttcggaacaacagagtcggtgcgtatgatgaaatgaccaagctgatagagaaggccaggaacaacgcgtcggcatacgagaagagatctgagtactgcgagcgggagctgacgaaaacggacttgcagatggtcaccaaactcgaccctctgcgagtctacccctacagataccgtgctgctggtatgtgcttttggctgttgattagctggagcgttctttcttgctactactattactatactacccgtcggtcaggattagcatgcagtcattattgcactcattgggggtgaagattggag

SEQ ID NO: 208986 - DNA, 1513 bp, Zea Mays
atcgctctccccctgaacccccaacactactccacaagaccacaaccccgaacccggccggcggcagcacaacatgagaacagcccccccccccccccccccccccccccccttctcgcgcctcctacctctctccagtcggttcccacgccttgccgcgctttacctctgcggcgcactcccgttatcatataacccgcgcgccggctccggcgagattcgaccaaactccatggggctcgagatggtggaggtcatgtccgagactgttcctacggttgtgcctgcggcagcgagggagaacggggtggatatttacccgctcagccgctactacttcggcgccagggacgccgccggcgtgccccgcggcctcgagaccgccgctgaccgcgcgctacggctcaaggcaaacttcgcggcgcacgggctccgcacgagcgtccacggcgtcctcctggtggagctgttcgatcacccgcacgtgctgctgctgcaggtccggaactcctccttcctgctcccgggaggccgcctcaggcctggcgaggaagaggtccgagggctcaagcgcaagctctccagcaagctctccgttgtcgatgatgtggaggccgttgaagaagaagactggcagtgcatcgggatgtggtggagatctgaatttgaggccatcccgtttccctacatgcctccacgattccgtgcggcaaaggtacagagttgtggaaaattctgctagttaattttatcttcgtcggcattgtgccgatcgacctgagcgtgtgagtcctgtcttgccctgaaggaatgcatgaagctgttcctgatcaggctgccgatgtcccggcagttcatcgtgcccaggaacatgaagctcctggccgtgcctttgtcccagattcatggcaatgctcaggtttacggtccaattatagccgccattccgagcctactatccaagttctccttcaacgtcatcagcgactgaattgtggaaaccaaccagaatgttgaggggttagtagacgcatgcatacttggctagttgaagtcatagaacagtgtgcgataccgatgggagcttgtattgagaagtagctcatctgtttttgttttttttttttttgtgtgtgcatatgtgtataatgtatccccctcctgggctcttgctgataatgatatgtatgtactgtatgtgtttctcgcgacctgtgtatgaccgtgtgagaaggattcagttctgtacaataactcattttgatttatttttgctcctacagtcctgaacttggaacataattagcacaccattccatgaaacagaagctactaaattcatttttcgggacaggtcatgtaacctgctaaccgctgaaggccaccaacttggatttcgttgagattccgttgggtgagccaaatttacctgcagaggttaagtgtgatccagatctttacacctcaacatagatccacacgtttgattagctataggacaatatgtgataca

SEQ ID NO: 208987 - DNA, 528 bp, Zea Mays
ctcactcatatatagccagcatatatagttactgaattgaaacgagaaaaaaaatccataaagttctgaagactaagtggatcgagcctgcgcgcgcgagggttgtcgtaaaatgtccaccgctattaggagggctaatgatgaattccccgtcgattgtagctacatgcatgaaggagtacacacgcatgcctatgttgtttgaattaatcaaattgcttgtttgttagtaattatattaccgcctccaactaggctccgatccgtacgtccacatgatcatcagctatttcatgcaagtgtcctactatatgttgttgctgttactgaaacgcatgcatgcttgtcccgaaccctctttttcttttttttctttttctttttttggtctcgcactcggacggacggacgactagcgcccgtgtgtttctagttttctgcgcgctcgcttctgctgctagtgctactgctccatgtgtattattattgctaggttggctatatatgctacgaagttgacctttggag

SEQ ID NO: 208988 - DNA, 1469 bp, Zea Mays
acccaaccctgccttctcttcttccttattcccagtttcccacagcttgcgcggtctcactctctctcggcgacgactacgccaaggcccaagtgtgccgaggtattttttaggctcaggtcgctaccgccctacggccccggtcttcttccggcccttcgccggcgacgagaaccagcagggcagcagacggatggcttcgtcggtgccggcgccatcggggtcggtgatcaccgtggcgtcgtcttcttcctcagcagccgcggccgcggtgtgcggcacgggctccccatgcgctgcgtgcaagttcctgcgtcgcaagtgccagccggactgcgtgttcgcgccctacttcccaccggacaacccgcagaagttcgtgcacgtgcaccgcgtcttcggcgcgagcaacgtgaccaagctgctgaacgagctccaccccttccagcgcgaggacgccgtgaactccctcgcctacgaggccgacatgcgcctccgcgaccccgtctacggctgcgtcggcgtcatctccatcctccagcacaacctacgacagctccagcaggacctcgcccgcgccaagtacgaactctccaagtaccaggcggcagcggcagcttctgcgtccacggcgccgacagggccgcaagcgatggcagagttcatcggcaacgcgatgccgaacggcgcgcacaacttcatcaacattggacactcggcggcgctcgggtccctcggaggctccgcctccgtgttcgggcaggagcagttcggcaacgcgcagatgctgtccaggagctatgacggcggcgagcccatcgcgaggctggggatcaacggcggcggctacgagttcggctactcgaccgcgatgggcgggtctggcgctgtctccggcctcgggacgctcggcatcagcccgttcttgaagtctggtaccgccggcggcgacgagaagcccaacggcggttactgaattgaaacgagaaaaaaaatccataaagttctgaagactaagtggatcgagcctgcgcgcgcgagggttgtcgtaaaatgtccaccgctattaggagggctaatgatgaattccccgtcgattgtagctacatgcatgaaggagtacacacgcatgcctatgttgtttgaattaatcaaattgcttgtttgttagtaattatattaccgcctccaactaggctccgatccgtacgtccacatgatcatcagctatttcatgcaagtgtcctactatatgttgttgctgttactgaaacgcatgcatgcttgtcccgaaccctctttttcttttttttctttttctttttttggtctcgcactcggacggacggacgactagcgcccgtgtgtttctagttttctgcgcgctcgcttctgctgctagtgctactgctccatgtgtattattattgctaggttggctatatatgctacgaagttgacctttggag

SEQ ID NO: 208989 - DNA, 1887 bp, Zea Mays
agcttttccgagaatttggatccctagatcattttattataaatgtggggcgagagaactcatcataagcactggcatcaaggtcatggtacctcggggaattccaacaacaaaaagcatgataagcggcagccaaaatttataccagacaattatagctccgtcgatgaggttactactgctctgcgagaagctggcctcgaatcgtcaaatctaatcctcggtattgatttcaccaaaagcaatgagtggtcaggcaggcattcctttagaagaaaatctctgcatgccattaatggcaccccaaatccatatgaacaagctatctctataatcgggcgaacgctgtcaccttttgacgatgataacttgataccatgttttggatttggcgatgcttctacacatgatcattctgtgttcagtttctacccagagaaccgaccctgtcgtggctttgaggaggttcttgtaaggtatcgacagattgtaccacatttgaacctttcaggaccaacttcttttgcacctcttatttatgcagcgatttctgttgttgaaaacagtaattggcagtaccatgtcctcgtgatcatagctgatggacaggtgactgccgcgaatataaatgatggaagattaagtccacaggaacaagcaactatacaagcaattgtcgatgctagctactatcctctttcaatagtaatggttggggtgggtgatggaccatgggatgcgatgcagcattttgatgactgtatccctgaaagagcttttgacaattttcagtttgtgaacttcactggtattatgtcaacaagtaaggatatgtcaaagaaggaggctgcatttgcccttgcagctcttatggaaataccttctcagtataaagcaacgcaaggcctccgacctccagaaaagcaagcacaaaggattggctctcctaggattcttcctcctccaaataaagttcttgaaaatgataatgccgccgccgctgcttcgcaccctcctcaaactgcaagctcgaaatcaactggtattggcaaaagtgctgctgacgagcaggtatgccccatatgtctaaccaatccaaaggacatggcttttcagtgtggtcatctgacatgtaaggaatgtggcccaacactatcaacgtgcccattgtgccgcgctctaatcaccatgcgtgtgaggctctactcctaagtcggttggtgtctggagggatgggaccaaacagaaaggagcaagaactttggggcgcaaggactgcgctacgatcttgagatatggtccatatggatgtcatgataacgatgcatgtacagaaaccttgtccgtgcctattcagtaatgtcgttgatgagtatcttccatcaatcacatgtaaaatttctaatgttatcttgtattagtagcaggggattgcttgttgagtggaataccaccagttgttcagcaacagatagtaaactccatgtgcatttggaagtcacttttgtgatttgtgtccaaccattggttcctgatagacagtttaccaaaaacagggttctttctgtctttcaccgaactgttggtctggaatttggagccacaaattcaatcgcggcaatatatatttaggcccagttcggttgcctgggaaggcttccaggccaggaaacagtggaccactcaatccagcccaagatttgatctagatggtaagggatcgggattcctaccgggctatggaggaaggggaactttaaaccgggccgtttttgtttttatttcgggttgaaacgaaaatctcagggctggattccaaactggataatttttccagccggtaagaggcatagagcggccggatgaggccgaaatggacgagacctt

SEQ ID NO: 208990 - DNA, 586 bp, Zea Mays
atttttccatcctactttcatccctagtctccagtccacaatgcggtcgcgcccacgccctcctagtcctccaccaacgacgtgggtctaggaaagcgtgcatccagatctagtgtccccgttctgttgtccccatccccgttcttctttgtttctttatctccacgatctagtaggtcatctatcctccaagatccgctccagtgttagcagtgagagatcttggtggaagcaatgaatactttgagaagaaaaatgtagctgcagtgcctatgtgataagcttatggattgtagttttgttctctctcaaacactatttttcttccctatatgtgtggatggagatgactatcttttattatctgtaaaaaatcgttttactttttattagcttggttggacatttggtgcctaaactttttattagtttggttggacatttggtgcctattgtgacaagcttatgcagtgcctatgtgacagttgttgttttctgtgaaacacgttgtatcatgttctggtttctgaaaccgttgaatctgtataaacaatctgttgtttgaaactgtttggttggacagttg

SEQ ID NO: 208991 - DNA, 5008 bp, Zea Mays
gcagcagcagatgggcaccaccgggaccggagcgccagcctggacatcagccacttcatgacgttaaacacagatcatcatcacttgatacaagtaaagaagaataatgctcaagtagttggctgctgatttcatcaggttgaaaagtgttgggcagagctagaagcatcattactattacacatatctgacggcaagtagctgttactactttacattatcgtaaatgttctgtttgtggcaagcaaaaatcgaacaaaaaactgtaggtgcatacagaagaaaaaaatacagtacaagctaattgtcaaacaagaagccaacaacatcagcagaatttccaaggcccaataacaaggtgcatgaatttccaaacacgcaagaactgcattaagttcaatggctcgtaaagagatcgatggtacatcgtcctacaccacgtaggaacttttcacttgtacttgacctataacataagcttgcttgctcatcagaaccaccagtgcctaccacttcacttctgaaaatatgtgatggcctatccattgcatttcaaacatgttccttcaactgcacaacgatcacttctgtaaattgaagggcaactggctttagcacaaaagtagggcggccaaataattctccaaaataagtctcatgaagaacagctacaatatctgcaagtattctttgatgcaaggccagaccatgtaatcccaacgttttgtgtgtacatggaaatcagctgcaagtcctgaactagggcacatttgtatgcttttacaaaaatcgtagtagagcattgcttggtggcatggggtacagatggctttggttacaaaaaaactgaccctggacagatttattaacaagagaactgtccaagacgccttatcaaataggagatggactatcttcatctttaggaagttccctcagattttgaactgcagcccaatagggaggataagcatatctttagcattgcttcatatggcagatacaccgcaaaggctgcttataaggatcttttcttggggtcaagctcctttggacattacatgacagattggctaagagagatctgaatcacccaagcaaatgtcctttatgtaaccaggaagctgaaacaataaatcatttgtttgtgtggtgtgtatttgcaagactcttctggtacaagatgttgagaaagattggtatgcattctttagcaccacaaccaggtgccacatccttctttgagtggtgggaaaaagcctcggaggctgtgaatgggctcttcaagaaaggacttgactccctcatcatcctgggtgcctgcatgatttggaagcaccgcaaatagatgtgttttttgataactggacacctagcctggctttaatcctaaatatcacttatgtttgagtttcacactatttcacctaaatatcacttcctttaagctaataataaattctgattatagaattgcagtgtgcatcaacttatccatgagccgaaatgaacttgcaccgattgcacattgaaagctcataaagcccaaaaatgttcatcgttgtcctgtgcaataaccaatgtgattatcaaaatcttgttagaatgtgtgtgtgggccggcggcactgttgggctgccggctgccagcccattagggttagggttgagtctctatatatatgtacttcatctcctatcaatacatccacttccatattcctacatggtatcaaaagattagggtttcctcacttctttccccagccgccaccccacctctgccctaggcacggcttccgcgccgccgccccgggaggctcatccttccctcctagggcagctcctctccagccgccggctcccagccatcctaggccggcgagcctccctgcgcgagatgtcctggagctcggtccctgccacctcccctcgtgtgcagggcgctgacgcacacactcctgggggcggcctccctcccctacgccgccagggcacctcctccccggccttgaaccgccgtcggacctccctgcaccggccgcgcgctacccctccctcccctacgccggcgcgaacaacagaggaggttggggccggggctgtccgcctggatctgcgctgccgctggcggatccgcctgaaccacagtagccgccgaccgcctctcaccccacagcagccgccaggaccgacgagccatcgcgtggatccgacggcggcctagttgcggccttccctggcgggcgcggcctctcccggtggcgcggttccccatggcgcgccggagcagcccctctgctctcgcccctctcctctccagctcggcagcaatggccgccctcagcttttcctctctctgctcatctcccatggcgctcaggtcctgtccctggtcgtcatccctctcctcaggaagccgacacccccatcttcttctccctgtttcctctacagcagccgctgctcttcctctctctggttcctctccggccgtctggctccctgctcggcgggcacaagcccccggacgcacggcgctctacctccagccccatggcggccgcggtctccaaccggcttcccacttcagctacctctcctaggtcgccagccaagcttcggatccatggcactcggctcctgagccccatttcccgcgcgttgagatgggacagggtgcgagcagtccctctgctcgttccctgttccccatggctgcctcccttggtcggcgtcctcctcttcgttgcgtccctcgcatgtgccccctcctcttcgctgcgtcctccgtcggcaccctcgcacgtgttgcccctcctcatcgcgttggccacctcctaaactgaccgcgctgatgcccagcagcgcgtcacccttcgagcttctcccgtcaccggtgtcgtcaacaccccttgctaggtccggcgcaggcccctgcccggctggacctgccccgccgcccacccccttcatcgccttcgctggatctgtcgctgtcgcggctttcccagccggatccacattgctgcgacctttccggctcgatctgccgtcccttttgctggatcgcttcttcccggctggatccgtcgctgtcgtggccttcccggccggatctgccgtttccccttctattctgccgcaggcgcggctaccatgaccggtgcagacgcgtgcgctgctgtcggcttccctggcggggctccttgacgcccggacgatcgaagaagcaggaaggccgacctgctggtgctcttttgttgtgtcgccctcgccaatcgttgacgctcgaacgtcgactcctcccgaagaacaggcttttgctgcgtgtctcctgaccgcgaccacctcgacttcggctacctcggcatctaggggctatcgtcttcttggagcacacaccaatctctactccagccgcaacattcgcaccatcacgacgctgcgactgcgggggatttcaacccgtcggctcctaccttcggcctctactccagtctcatcgtgtgtggtacccccgttgcgactgtgaggggatgttagactgtgtgtgtggaccggcgccactgttgggctgccggcccattagggttagggttgagtctctatatatatgtactccatctcctatcaatacatccactttcatattcctacacttgtaaacaaacaaattagcactacatatcccatactgaatatttgtctgcaatggggagataacggaagcaacgatctagcacataagaatgtgtgccaatttctaattacatgtattaacttgcacaccgtaaagcatttttccccagttgtctaagattccatcatgcatggagtattctatttaagcataggtataaaacaattctaggcagcaattggcatttttaaagcaaataaacagtaaacagttaaaacacctaagtgttcaacacaaaacatgtaaagcaaaatgtagaacacagtcattgtggatgtggtcacttacaaagatctcaggatgtgaggaagaaaagattacgtttttacaggaattgaaagatatcaggatgttatgtaatgagccgtggctgacagctggagatttcaacatgatttatcaggcttcagacaaaaataatgataatctggacagggacatgatgggaaggttttggagatttttaaataaatttgatttgaaagaaatccctctcctgggccgtaaatatacttggtccaacgagaggagttcacctactttggtaaggctggatagggccttttgctgtttggaatgggagaatatatttcctgattcagtcctccaaagttcggcgtctaatgtatccgatcattgccctttgattcttggtttaaaactccaaactaaaggcaagaggagatttcattttgaaagcttttgggcaaaagtgccaggattccttgaggtcgttcaacggaactgggaagctcatgtacagtccacaagtgcagtagagcgcctttttctcaagttgcaacggctcagtaaagatttacagaagtgggggcaaagaaaggttggtaacattaaattacatattgagatggctaaggaaataatacatagactggagattgcaagagattccagggatctttcaaacagggaagaatggctaaaaaagaagcttaaactacatctgcttggtcttgcttctttggaacgtaccattgctagactgcattctagaatcctttatctcaaggaaggagatgcaaataccttcttttttcaccatcaagcccgtttcagaaagaaaaagaattttattgctaagctgcatacagaaacctctatggctatcacacaagaagaaaagcaggcagcagtgctgaaattttatgaaaaggccttgggaacagctgaaagtcgccccctaactttaaatcttagtgagattggtatgcagcagcatgatttggccagcgtggacaacccattcacagaagagggattatgggcagcagttaaagacttaccc

SEQ ID NO: 208992 - DNA, 1679 bp, Zea Mays
aacagtgacatccaaaccgtgccattttttcgagcggcttgagccacaacagccccactctgtctgagtgtctgtgcctgcctgtgcaaagtagggtttccaccgggacacaggccgcctccatcccatggcgcgcgccgccgcctccaggctcgccgccgtggcgaactcttcctctacgcgcgagttgttcgcccgccacctcgccgccgctgccgcctcggcgtggaccgcaccgccgcgtctgcctgaaccagggagggagcggcggagcccgggctggtggtgtccgagcaggtcgtttcatgccacaaggcgggtgtatacaagggattactatgatgtgcttggagtaagcaaggatgcttctgcaccggatataaagaaggcatattatgcgctcgcaaagaagttccatcctgatactaataaagatgctgatgcagaaaaaacatttcaagaagttaaccgtgcctatgaggttttgaaggacaatgacaagcgtgaaatatatgatcagcttggaccagaagcatacgagcgtcaagcgtcaggtggtgaccctggagggccgggttttcctcggggtaacccatttggtgacatctttggtgatatctttgataatgcatacagaggtggccaagatgtcaaggtttctgttgaactatcattcatggaagctgtccaaggttgcagaaaaaccattacatggaagtggcgtcccccctggaactgtgcctaaaacatgtaaaacatgtaaaggctctggcgcgatatacatgcagaagggtatatttactgtcgaatgtacttgctccctgtgcaatgggagcgggaaaattgtcaagagtttttgcaagacttgcaaaggagaacaggtagtgaaggggaaaacgtcagtcaagctagatatagccgcaggaagtgacgataatgacatcatgaaggtttttggtaagggtggtgcagatgttgaccgaaataagcctggtgacctttatgttactatcaaggtcagagaggaccctacttttcgaagagaaggcatccatgtgcatgttgattctgttttaagcattgctcaggctgtcctaggtggaactgtcacggtaccaaccctcactggaaatgttacagtcaaggttcgtcaaggtacccaacctggagagaaggtcgtcctccggggcaaaggaataaaagcgaggaactcgccagtgtttgggaatcagtatgtacacttcaatatcagggttccgacggatgtgacgcaaaggcagagggagctgatagatgagttcgataaagaggagtgcgcagaccgggaaagacctgcggttgcctccggatgaagtttttggttcaaccattaattagttttagcaccacactagtttgatgccctcaatttctccaacccgccataaggtgctgtaggcaccaaaagcttattgtaacatttgaatcttatatagcatctacccagtgtgtaacgtatacattacgcgctaaattattgtaccattttcgatttttaaacagaaaagatagcgggggttgtcttcactcttcagtaacattcttttgggggtgtggttgtgtgccaagaatgaagagaggggatattggcaggagaaagtgtttttgaatttaatacgaatgtcatggtaccaattttg

SEQ ID NO: 208993 - DNA, 2212 bp, Zea Mays
ccacaggctccaatcccgtacctccggctccgccttataaataagctccccgcctccctggcccctaattgccccccggaagaagccgcaccaggagcaaattcctcctctctcgagggcggttgcgtgctcgcgtgaagaaggccggggccctatctctccgatcgcggtagggcgttcgcagcgccgattcgagccgacgattggccgtccgcgaaggttaaacaaaatcaaatccccctgttcatgtgttatggcagggcatcatcataataacacacatgcctccaggatggatcatgtgaacaggttccagagtgaagcacagccttttggcccaaagttatttatgcattctagaactgatgcagcaaatggagctctaccatcaggttatgtgggcgcaccaataagaccaaatggcattccattctcaagtcacaccgggcaatctcatattcagcacagtgatgctcctggaaccatgcttgcatcctattctggctatcctcttgctggaagctccagtagcacctatgcaccacataatactcatcatctgcctgctttgagctatccacataggtctgatgataacttcattctgagttcccatatggatgacagaagggttgcactgaagcggagaaatccaattatttatccagtggatggagtcaataatgggagctgttatgctggcagttcatctaatcctcagttcccatgctacatgcctccaaatcctattcctgctcctgaaccctgccctcctcgaataacatcaaatatgggttcaagctactggactgatcagccctttggtagcaatggaggatctcagaggaatgtgagaggtcgccatgatcacaatcctatccatttgggacacaatccaggtgtagcttgcgcaacaagcagcactcatgggccaccacaccatgctaatgtaattggtcctcaaagtacagcagtgccacaaaatagagcatatttttctatacctccaagagtgactgccccaggcagcgatggaaactgtagcatggttttcagggaagggacatactactctgctccgcagaggaccaacataaatgccccccctgtcctagcacctcctggttcttctgatagtctacattttgtgcatggtgggtatgccccaagagcagcccctcctaacagcatcagcacatatcctgccccggcttttgcgactcctaacaactcagtgacagttacccatgagcctgatatcccttgctatcgacctgccgtccctggctatccgcctgctacctcagcagcagcagcagcagcaagtgttcatgctgaaggtgctgctgcatcttcgagacatctaggtcatgtggctctaggttccagtggtagtgcaaggagtagaaggctgagggattcataccatgcttttcgtccactggttattgaagaaaataacttgagaggaccagcaaccgagcgttttatgatgctaaatcagttatttatccatgaatcgagagaagattctgaccctcactgggacatgaggctggacattgatgatatgagttatgaggagctgctggctttgggagaacgaataggcaatgtcaacacgggcctagctgatgaaaaactttcaagctgtgtgacggagataccctgctgcagctctgcccgtactcatgatgataatgagagcgcaagatgtgtaatttgcctggaggattacaaattcgaggactctgtcgggaagctaaaatgcaatcacaagtatcacgcagactgcatcaagaaatggctgcaggtgaagaacgcttgcccagtctgcaaagcttctgcggcagatgacggcggaggcaccgaatgaagcgccctgccgcccccattcaccctatctcaggcgaagctgtactggctgatctggtttgctgtgtgtaaataatggtcctgaaacggattatttgtgagctgaattaaactcgacatgtaaatttaatcctcaagctagttgcaaattgatggcagcggttagccctacgtgtcagccgtctgacgtaactgcagagagaaaacgtttgcatgcatatgtacagctcgatccaatagaggttattaaatgttaacaatttattagttagttaagccgtctttacgacgtccatcgtcacctaattaaattgcaactaattttcactcgcgggcg

SEQ ID NO: 208994 - DNA, 5362 bp, Zea Mays
cctccctggcccctaattgccccccggaagaagccgcaccaggagcaaattcctcctctctcgagggcggttgcgtgctcgcgtgaagaaggccggggccctatctctccgatcgcggtagggcgttcgcagcgccgattcgagccgacgattggccgtccgcgaagaacacataagttctacactcggtttttctttagaagcagaagtactgaatctgttaaatggtacaacactgttgtcctttgctttgatggtaatgcatgaaattcgaacaccgacatgtcttctgcatcttcaggtttagtgagatctggcctctgcaatagtcacttccttgaaagcagatataaggattattatagttggagttcaatctttggggacatgaattgattctgttatttgtttgactccagtttggggcaatcacgggctttaggttgggtgaggtattgttgtttcaatgaattcaggtactcaggttagtgatagtttcagaatattgtagttacattgtggcggtgagtaagctcttaagtcttaactcatgatgagaaccttaattcattgggtactacatttactccttttttagaaaaaatatacatttatgtttttctttcttcccttagagtccatagcctgatatgcgtatttccttctctgtagctcttccattgtccaactgaactttggaagttcttctagagaattatctagctctcagtttttttcagatatttgcatttattacttcaaaaatttgaattgttctattaatgacattgcaggtactatttgaacactgaactaaaaattggagtttcttttcttatttgacatcttgatgtgccaaaatcaagctctcgttaaaggtcaaacaaatgggcaaaatttgggctctttgattagttttttcagtgttaagtggtgaatctactgtggtaaatgggagagctgatccagttgatctatatgccttgtgaggactattttgtcctcaataagaatatatgttcaacatcactgttggacttgtgttgcccttagattgagatggtggcttctcttacaagattgtagcagccttttaactctcgaagagggggccccttcaattgtgagttttgagaagagccaattgctgctaccttcatatcattttgaggactggaaaaggtggaccagtgtcactcttagcatctaccacctagaactttagcccaatggtggtttatatgttgaaattcatcaagtataaaggcgagaagggtagtttcgttgcccacagttaacttgtagggagagaaatattgagatctgtggaaatattggctggagcagcagaatcactcaataattttgattttggatggtagaataggttggcgtaaatttggcaaaaagaacttaaacagttctttcacatcaaattagttgttctgaagattctttccaagtaaaaatcagcttatcatgtatgcttgggccatgaagtaacaattcttttgatcgctgaggatgtcatttgcagatagatattcaatgttgttggaaagagaaagatgctagttgaaaataggtgaattgatgatgttggaaacaagatgcatttattcataagacgaacaaagggacaacaatttcgaggaggaaccctttagctaggttgtgtgtgcatcattacatggacatgtgtgtacctgaaatgctagtgctatatctacctgccttcatattttctggggcttctggagctgatagatagtgtcatactttctgccttatgtccatttactttctgtttaacagaattatgtacaatttattattagtttctctcccaatgactaagcccgtttgacgggcttttcactccatgtaaagaattagaagattctagccaatcttcttatgttcaatataatgtatatgaactgtactgtttgataagtgctgccatataatttagttgcacactgtttcagcttctttggttattactgtattcctgttgttatagatgtttgtattgctgtcaataagttctttgccttcgaaaattggtcctttcacctggtgttgcacagagtcctggtgttgtgctgaactaatgttgtaaggcaactgtctttgttggttaggtattatgattttcatacttgatactggactactaaaatagcatctgtaatttgatcctaatcaatggattgtatagatgcttatctagtatttttctatcacatagagaaaagacaatgcagtctagatatgctgcttgtaattatcttttctaaagcttgtctaagttaaacgctatatatatctactagtctctttgttatcttcaaacaaacatcatcgtttgatactattacgacaataaatgatctccaatcctttatattggaggaataataatatgtaacattggttgggtgtagagattacattatatacgtctctaaccctaataggctacatgtgctaggctaggtccatgacacacaaccatgaagaggacccagatccttcatcacgaactttggttgaagtgtgtgtgtttgtgcatatataaaatcttaggcaccataataacatgacgtatacataatggttctcttcaacttgcatctacattattgacataacataggtatcgtctagctacttggtgaataaaacttcagagaatcatattttgttgttttcatatggtaaattcatatgttctttctcttcaacttgcatctacattattggcataacataggtatcgtctagctacttggtgactaaaacttcagaaagtcatatttcgttattttcatatggtaaaatcatatgttctatcattacttgtcaggccaagttactgccataaccaaagctataaaggtttctaattcttgtattgaggtctaaaagtcagatctccaccatatatattttattttgtagcagactattatgcaagtatgatgatgattccttctctagtttaattctgtaaactacatactgtagtcaaaaagttttatgtttactttgttaattacgtcggcatggtttctagtcttcttggatatatgacgaggacttcatttgtgttgtgtgttgcaccaaagttaaataagacactggatatgatggaatatttgggttttggcactggcagctctagcctgtgtgactgtaatctcacatcttgcggttctaaggtctgaatgattctttttagtttattacagaagtctaagtatttgtggttctctgtatatattttgtttctaaatctacaagtatatttgcagctgcaacttgcttttctagaatactaatgccaaccctatattttttcaggttaaacaaaatcaaatccccctgttcatgtgttatggcagggcatcatcataataacacacatgcctccaggatggatcatgtgaacaggttccagagtgaagcacagccttttggcccaaagttatttatgcattctagaactgatgcagcaaatggagctctaccatcaggttatgtgggcgcaccaataagaccaaatggcattccattctcaagtcacaccgggcaatctcatattcagcacagtgatgctcctggaaccatgcttgcatcctattctggctatcctcttgctggaagctccagtagcacctatgcaccacataatactcatcatctgcctgctttgagctatccacataggtctgatgataacttcattctgagttcccatatggatgacagaagggttgcactgaagcggagaaatccaattatttatccagtggatggagtcaataatgggagctgttatgctggcagttcatctaatcctcagttcccatgctacatgcctccaaatcctattcctgctcctgaaccctgccctcctcgaataacatcaaatatgggttcaagctactggactgatcagccctttggtagcaatggaggatctcagaggaatgtgagaggtcgccatgatcacaatcctatccatttgggacacaatccaggtgtagcttgcgcaacaagcagcactcatgggccaccacaccatgctaatgtaattggtcctcaaagtacagcagtgccacaaaatagagcatatttttctatacctccaagagtgactgccccaggcagcgatggaaactgtagcatggttttcagggaagggacatactactctgctccgcagaggaccaacataaatgccccccctgtcctagcacctcctggttcttctgatagtctacattttgtgcatggtgggtatgccccaagagcagcccctcctaacagcatcagcacatatcctgccccggcttttgcgactcctaacaactcagtgacagttacccatgagcctgatatcccttgctatcgacctgccgtccctggctatccgcctgctacctcagcagcagcagcagcagcaagtgttcatgctgaaggtgctgctgcatcttcgagacatctaggtcatgtggctctaggttccagtggtagtgcaaggagtagaaggctgagggattcataccatgcttttcgtccactggttattgaagaaaataacttgagaggaccagcaaccgagcgttttatgatgctaaatcagttatttatccatgaatcgagagaagattctgaccctcactgggacatgaggctggacattgatgatatgagttatgaggagctgctggctttgggagaacgaataggcaatgtcaacacgggcctagctgatgaaaaactttcaagctgtgtgacggagataccctgctgcagctctgcccgtactcatgatgataatgagagcgcaagatgtgtaatttgcctggaggattacaaattcgaggactctgtcgggaagctaaaatgcaatcacaagtatcacgcagactgcatcaagaaatggctgcaggtgaagaacgcttgcccagtctgcaaagcttctgcggcagatgacggcggaggcaccgaatgaagcgccctgccgcccccattcaccctatctcaggcgaagctgtactggctgatctggtttgctgtgtgtaaataatggtcctgaaacggattatttgtgagctgaattaaactcgacatgtaaatttaatcctcaagctagttgcaaattgatggcagcggttagccctacgtgtcagccgtctgacgtaactgcagagagaaaacgtttgcatgcatatgtacagctcgatccaatagaggttattaaatgttaacaatttattagttagttaagccgtctttacgacgtccatcgtcacctaattaaattgcaactaattttcactcgcgggcg

SEQ ID NO: 208995 - DNA, 3064 bp, Zea Mays
cctccctggcccctaattgccccccggaagaagccgcaccaggagcaaattcctcctctctcgagggcggttgcgtgctcgcgtgaagaaggccggggccctatctctccgatcgcggtagggcgttcgcagcgccgattcgagccgacgattggccgtccgcgaaggtactatttgaacactgaactaaaaattggagtttcttttcttatttgacatcttgatgtgccaaaatcaagctctcgttaaaggtcaaacaaatgggcaaaatttgggctctttgattagttttttcagtgttaagtggtgaatctactgtggtaaatgggagagctgatccagttgatctatatgccttgtgaggactattttgtcctcaataagaatatatgttcaacatcactgttggacttgtgttgcccttagattgagatggtggcttctcttacaagattgtagcagccttttaactctcgaagagggggccccttcaattgtgagttttgagaagagccaattgctgctaccttcatatcattttgaggactggaaaaggtggaccagtgtcactcttagcatctaccacctagaactttagcccaatggtggtttatatgttgaaattcatcaagtataaaggcgagaagggtagtttcgttgcccacagttaacttgtagggagagaaatattgagatctgtggaaatattggctggagcagcagaatcactcaataattttgattttggatggtagaataggttggcgtaaatttggcaaaaagaacttaaacagttctttcacatcaaattagttgttctgaagattctttccaagtaaaaatcagcttatcatgtatgcttgggccatgaagtaacaattcttttgatcgctgaggatgtcatttgcagatagatattcaatgttgttggaaagagaaagatgctagttgaaaataggtgaattgatgatgttggaaacaagatgcatttattcataagacgaacaaagggacaacaatttcgaggaggaaccctttagctaggttgtgtgtgcatcattacatggacatgttaaacaaaatcaaatccccctgttcatgtgttatggcagggcatcatcataataacacacatgcctccaggatggatcatgtgaacaggttccagagtgaagcacagccttttggcccaaagttatttatgcattctagaactgatgcagcaaatggagctctaccatcaggttatgtgggcgcaccaataagaccaaatggcattccattctcaagtcacaccgggcaatctcatattcagcacagtgatgctcctggaaccatgcttgcatcctattctggctatcctcttgctggaagctccagtagcacctatgcaccacataatactcatcatctgcctgctttgagctatccacataggtctgatgataacttcattctgagttcccatatggatgacagaagggttgcactgaagcggagaaatccaattatttatccagtggatggagtcaataatgggagctgttatgctggcagttcatctaatcctcagttcccatgctacatgcctccaaatcctattcctgctcctgaaccctgccctcctcgaataacatcaaatatgggttcaagctactggactgatcagccctttggtagcaatggaggatctcagaggaatgtgagaggtcgccatgatcacaatcctatccatttgggacacaatccaggtgtagcttgcgcaacaagcagcactcatgggccaccacaccatgctaatgtaattggtcctcaaagtacagcagtgccacaaaatagagcatatttttctatacctccaagagtgactgccccaggcagcgatggaaactgtagcatggttttcagggaagggacatactactctgctccgcagaggaccaacataaatgccccccctgtcctagcacctcctggttcttctgatagtctacattttgtgcatggtgggtatgccccaagagcagcccctcctaacagcatcagcacatatcctgccccggcttttgcgactcctaacaactcagtgacagttacccatgagcctgatatcccttgctatcgacctgccgtccctggctatccgcctgctacctcagcagcagcagcagcagcaagtgttcatgctgaaggtgctgctgcatcttcgagacatctaggtcatgtggctctaggttccagtggtagtgcaaggagtagaaggctgagggattcataccatgcttttcgtccactggttattgaagaaaataacttgagaggaccagcaaccgagcgttttatgatgctaaatcagttatttatccatgaatcgagagaagattctgaccctcactgggacatgaggctggacattgatgatatgagttatgaggagctgctggctttgggagaacgaataggcaatgtcaacacgggcctagctgatgaaaaactttcaagctgtgtgacggagataccctgctgcagctctgcccgtactcatgatgataatgagagcgcaagatgtgtaatttgcctggaggattacaaattcgaggactctgtcgggaagctaaaatgcaatcacaagtatcacgcagactgcatcaagaaatggctgcaggtgaagaacgcttgcccagtctgcaaagcttctgcggcagatgacggcggaggcaccgaatgaagcgccctgccgcccccattcaccctatctcaggcgaagctgtactggctgatctggtttgctgtgtgtaaataatggtcctgaaacggattatttgtgagctgaattaaactcgacatgtaaatttaatcctcaagctagttgcaaattgatggcagcggttagccctacgtgtcagccgtctgacgtaactgcagagagaaaacgtttgcatgcatatgtacagctcgatccaatagaggttattaaatgttaacaatttattagttagttaagccgtctttacgacgtccatcgtcacctaattaaattgcaactaattttcactcgcgggcg

SEQ ID NO: 208996 - DNA, 3164 bp, Zea Mays
cggaagaagccgcaccaggagcaaattcctcctctctcgagggcggttgcgtgctcgcgtgaagaaggccggggccctatctctccgatcgcggtagggcgttcgcagcgccgattcgagccgacgattggccgtccgcgaaggtttagtgagatctggcctctgcaatagtcacttccttgaaagcagatataaggattattatagttggagttcaatctttggggacatgaattgattctgttatttgtttgactccagtttggggcaatcacgggctttaggttgggtgaggtactatttgaacactgaactaaaaattggagtttcttttcttatttgacatcttgatgtgccaaaatcaagctctcgttaaaggtcaaacaaatgggcaaaatttgggctctttgattagttttttcagtgttaagtggtgaatctactgtggtaaatgggagagctgatccagttgatctatatgccttgtgaggactattttgtcctcaataagaatatatgttcaacatcactgttggacttgtgttgcccttagattgagatggtggcttctcttacaagattgtagcagccttttaactctcgaagagggggccccttcaattgtgagttttgagaagagccaattgctgctaccttcatatcattttgaggactggaaaaggtggaccagtgtcactcttagcatctaccacctagaactttagcccaatggtggtttatatgttgaaattcatcaagtataaaggcgagaagggtagtttcgttgcccacagttaacttgtagggagagaaatattgagatctgtggaaatattggctggagcagcagaatcactcaataattttgattttggatggtagaataggttggcgtaaatttggcaaaaagaacttaaacagttctttcacatcaaattagttgttctgaagattctttccaagtaaaaatcagcttatcatgtatgcttgggccatgaagtaacaattcttttgatcgctgaggatgtcatttgcagatagatattcaatgttgttggaaagagaaagatgctagttgaaaataggtgaattgatgatgttggaaacaagatgcatttattcataagacgaacaaagggacaacaatttcgaggaggaaccctttagctaggttaaacaaaatcaaatccccctgttcatgtgttatggcagggcatcatcataataacacacatgcctccaggatggatcatgtgaacaggttccagagtgaagcacagccttttggcccaaagttatttatgcattctagaactgatgcagcaaatggagctctaccatcaggttatgtgggcgcaccaataagaccaaatggcattccattctcaagtcacaccgggcaatctcatattcagcacagtgatgctcctggaaccatgcttgcatcctattctggctatcctcttgctggaagctccagtagcacctatgcaccacataatactcatcatctgcctgctttgagctatccacataggtctgatgataacttcattctgagttcccatatggatgacagaagggttgcactgaagcggagaaatccaattatttatccagtggatggagtcaataatgggagctgttatgctggcagttcatctaatcctcagttcccatgctacatgcctccaaatcctattcctgctcctgaaccctgccctcctcgaataacatcaaatatgggttcaagctactggactgatcagccctttggtagcaatggaggatctcagaggaatgtgagaggtcgccatgatcacaatcctatccatttgggacacaatccaggtgtagcttgcgcaacaagcagcactcatgggccaccacaccatgctaatgtaattggtcctcaaagtacagcagtgccacaaaatagagcatatttttctatacctccaagagtgactgccccaggcagcgatggaaactgtagcatggttttcagggaagggacatactactctgctccgcagaggaccaacataaatgccccccctgtcctagcacctcctggttcttctgatagtctacattttgtgcatggtgggtatgccccaagagcagcccctcctaacagcatcagcacatatcctgccccggcttttgcgactcctaacaactcagtgacagttacccatgagcctgatatcccttgctatcgacctgccgtccctggctatccgcctgctacctcagcagcagcagcagcagcaagtgttcatgctgaaggtgctgctgcatcttcgagacatctaggtcatgtggctctaggttccagtggtagtgcaaggagtagaaggctgagggattcataccatgcttttcgtccactggttattgaagaaaataacttgagaggaccagcaaccgagcgttttatgatgctaaatcagttatttatccatgaatcgagagaagattctgaccctcactgggacatgaggctggacattgatgatatgagttatgaggagctgctggctttgggagaacgaataggcaatgtcaacacgggcctagctgatgaaaaactttcaagctgtgtgacggagataccctgctgcagctctgcccgtactcatgatgataatgagagcgcaagatgtgtaatttgcctggaggattacaaattcgaggactctgtcgggaagctaaaatgcaatcacaagtatcacgcagactgcatcaagaaatggctgcaggtgaagaacgcttgcccagtctgcaaagcttctgcggcagatgacggcggaggcaccgaatgaagcgccctgccgcccccattcaccctatctcaggcgaagctgtactggctgatctggtttgctgtgtgtaaataatggtcctgaaacggattatttgtgagctgaattaaactcgacatgtaaatttaatcctcaagctagttgcaaattgatggcagcggttagccctacgtgtcagccgtctgacgtaactgcagagagaaaacgtttgcatgcatatgtacagctcgatccaatagaggttattaaatgttaacaatttattagttagttaagccgtctttacgacgtccatcgtcacctaattaaattgcaactaattttcactcgcgggcg

SEQ ID NO: 208997 - DNA, 3196 bp, Zea Mays
cggaagaagccgcaccaggagcaaattcctcctctctcgagggcggttgcgtgctcgcgtgaagaaggccggggccctatctctccgatcgcggtagggcgttcgcagcgccgattcgagccgacgattggccgtccgcgaaggtttagtgagatctggcctctgcaatagtcacttccttgaaagcagatataaggattattatagttggagttcaatctttggggacatgaattgattctgttatttgtttgactccagtttggggcaatcacgggctttaggttgggtgaggtattgttgtttcaatgaattcaggtactcaggtactatttgaacactgaactaaaaattggagtttcttttcttatttgacatcttgatgtgccaaaatcaagctctcgttaaaggtcaaacaaatgggcaaaatttgggctctttgattagttttttcagtgttaagtggtgaatctactgtggtaaatgggagagctgatccagttgatctatatgccttgtgaggactattttgtcctcaataagaatatatgttcaacatcactgttggacttgtgttgcccttagattgagatggtggcttctcttacaagattgtagcagccttttaactctcgaagagggggccccttcaattgtgagttttgagaagagccaattgctgctaccttcatatcattttgaggactggaaaaggtggaccagtgtcactcttagcatctaccacctagaactttagcccaatggtggtttatatgttgaaattcatcaagtataaaggcgagaagggtagtttcgttgcccacagttaacttgtagggagagaaatattgagatctgtggaaatattggctggagcagcagaatcactcaataattttgattttggatggtagaataggttggcgtaaatttggcaaaaagaacttaaacagttctttcacatcaaattagttgttctgaagattctttccaagtaaaaatcagcttatcatgtatgcttgggccatgaagtaacaattcttttgatcgctgaggatgtcatttgcagatagatattcaatgttgttggaaagagaaagatgctagttgaaaataggtgaattgatgatgttggaaacaagatgcatttattcataagacgaacaaagggacaacaatttcgaggaggaaccctttagctaggttaaacaaaatcaaatccccctgttcatgtgttatggcagggcatcatcataataacacacatgcctccaggatggatcatgtgaacaggttccagagtgaagcacagccttttggcccaaagttatttatgcattctagaactgatgcagcaaatggagctctaccatcaggttatgtgggcgcaccaataagaccaaatggcattccattctcaagtcacaccgggcaatctcatattcagcacagtgatgctcctggaaccatgcttgcatcctattctggctatcctcttgctggaagctccagtagcacctatgcaccacataatactcatcatctgcctgctttgagctatccacataggtctgatgataacttcattctgagttcccatatggatgacagaagggttgcactgaagcggagaaatccaattatttatccagtggatggagtcaataatgggagctgttatgctggcagttcatctaatcctcagttcccatgctacatgcctccaaatcctattcctgctcctgaaccctgccctcctcgaataacatcaaatatgggttcaagctactggactgatcagccctttggtagcaatggaggatctcagaggaatgtgagaggtcgccatgatcacaatcctatccatttgggacacaatccaggtgtagcttgcgcaacaagcagcactcatgggccaccacaccatgctaatgtaattggtcctcaaagtacagcagtgccacaaaatagagcatatttttctatacctccaagagtgactgccccaggcagcgatggaaactgtagcatggttttcagggaagggacatactactctgctccgcagaggaccaacataaatgccccccctgtcctagcacctcctggttcttctgatagtctacattttgtgcatggtgggtatgccccaagagcagcccctcctaacagcatcagcacatatcctgccccggcttttgcgactcctaacaactcagtgacagttacccatgagcctgatatcccttgctatcgacctgccgtccctggctatccgcctgctacctcagcagcagcagcagcagcaagtgttcatgctgaaggtgctgctgcatcttcgagacatctaggtcatgtggctctaggttccagtggtagtgcaaggagtagaaggctgagggattcataccatgcttttcgtccactggttattgaagaaaataacttgagaggaccagcaaccgagcgttttatgatgctaaatcagttatttatccatgaatcgagagaagattctgaccctcactgggacatgaggctggacattgatgatatgagttatgaggagctgctggctttgggagaacgaataggcaatgtcaacacgggcctagctgatgaaaaactttcaagctgtgtgacggagataccctgctgcagctctgcccgtactcatgatgataatgagagcgcaagatgtgtaatttgcctggaggattacaaattcgaggactctgtcgggaagctaaaatgcaatcacaagtatcacgcagactgcatcaagaaatggctgcaggtgaagaacgcttgcccagtctgcaaagcttctgcggcagatgacggcggaggcaccgaatgaagcgccctgccgcccccattcaccctatctcaggcgaagctgtactggctgatctggtttgctgtgtgtaaataatggtcctgaaacggattatttgtgagctgaattaaactcgacatgtaaatttaatcctcaagctagttgcaaattgatggcagcggttagccctacgtgtcagccgtctgacgtaactgcagagagaaaacgtttgcatgcatatgtacagctcgatccaatagaggttattaaatgttaacaatttattagttagttaagccgtctttacgacgtccatcgtcacctaattaaattgcaactaattttcactcgcgggcg

SEQ ID NO: 208998 - DNA, 4569 bp, Zea Mays
cggaagaagccgcaccaggagcaaattcctcctctctcgagggcggttgcgtgctcgcgtgaagaaggccggggccctatctctccgatcgcggtagggcgttcgcagcgccgattcgagccgacgattggccgtccgcgaaggtactatttgaacactgaactaaaaattggagtttcttttcttatttgacatcttgatgtgccaaaatcaagctctcgttaaaggtcaaacaaatgggcaaaatttgggctctttgattagttttttcagtgttaagtggtgaatctactgtggtaaatgggagagctgatccagttgatctatatgccttgtgaggactattttgtcctcaataagaatatatgttcaacatcactgttggacttgtgttgcccttagattgagatggtggcttctcttacaagattgtagcagccttttaactctcgaagagggggccccttcaattgtgagttttgagaagagccaattgctgctaccttcatatcattttgaggactggaaaaggtggaccagtgtcactcttagcatctaccacctagaactttagcccaatggtggtttatatgttgaaattcatcaagtataaaggcgagaagggtagtttcgttgcccacagttaacttgtagggagagaaatattgagatctgtggaaatattggctggagcagcagaatcactcaataattttgattttggatggtagaataggttggcgtaaatttggcaaaaagaacttaaacagttctttcacatcaaattagttgttctgaagattctttccaagtaaaaatcagcttatcatgtatgcttgggccatgaagtaacaattcttttgatcgctgaggatgtcatttgcagatagatattcaatgttgttggaaagagaaagatgctagttgaaaataggtgaattgatgatgttggaaacaagatgcatttattcataagacgaacaaagggacaacaatttcgaggaggaaccctttagctaggttgtgtgtgcatcattacatggacatgtgtgtacctgaaatgctagtgctatatctacctgccttcatattttctggggcttctggagctgatagatagtgtcatactttctgccttatgtccatttactttctgtttaacagaattatgtacaatttattattagtttctctcccaatgactaagcccgtttgacgggcttttcactccatgtaaagaattagaagattctagccaatcttcttatgttcaatataatgtatatgaactgtactgtttgataagtgctgccatataatttagttgcacactgtttcagcttctttggttattactgtattcctgttgttatagatgtttgtattgctgtcaataagttctttgccttcgaaaattggtcctttcacctggtgttgcacagagtcctggtgttgtgctgaactaatgttgtaaggcaactgtctttgttggttaggtattatgattttcatacttgatactggactactaaaatagcatctgtaatttgatcctaatcaatggattgtatagatgcttatctagtatttttctatcacatagagaaaagacaatgcagtctagatatgctgcttgtaattatcttttctaaagcttgtctaagttaaacgctatatatatctactagtctctttgttatcttcaaacaaacatcatcgtttgatactattacgacaataaatgatctccaatcctttatattggaggaataataatatgtaacattggttgggtgtagagattacattatatacgtctctaaccctaataggctacatgtgctaggctaggtccatgacacacaaccatgaagaggacccagatccttcatcacgaactttggttgaagtgtgtgtgtttgtgcatatataaaatcttaggcaccataataacatgacgtatacataatggttctcttcaacttgcatctacattattgacataacataggtatcgtctagctacttggtgaataaaacttcagagaatcatattttgttgttttcatatggtaaattcatatgttctttctcttcaacttgcatctacattattggcataacataggtatcgtctagctacttggtgactaaaacttcagaaagtcatatttcgttattttcatatggtaaaatcatatgttctatcattacttgtcaggccaagttactgccataaccaaagctataaaggtttctaattcttgtattgaggtctaaaagtcagatctccaccatatatattttattttgtagcagactattatgcaagtatgatgatgattccttctctagtttaattctgtaaactacatactgtagtcaaaaagttttatgtttactttgttaattacgtcggcatggtttctagtcttcttggatatatgacgaggacttcatttgtgttgtgtgttgcaccaaagttaaataagacactggatatgatggaatatttgggttttggcactggcagctctagcctgtgtgactgtaatctcacatcttgcggttctaaggttaaacaaaatcaaatccccctgttcatgtgttatggcagggcatcatcataataacacacatgcctccaggatggatcatgtgaacaggttccagagtgaagcacagccttttggcccaaagttatttatgcattctagaactgatgcagcaaatggagctctaccatcaggttatgtgggcgcaccaataagaccaaatggcattccattctcaagtcacaccgggcaatctcatattcagcacagtgatgctcctggaaccatgcttgcatcctattctggctatcctcttgctggaagctccagtagcacctatgcaccacataatactcatcatctgcctgctttgagctatccacataggtctgatgataacttcattctgagttcccatatggatgacagaagggttgcactgaagcggagaaatccaattatttatccagtggatggagtcaataatgggagctgttatgctggcagttcatctaatcctcagttcccatgctacatgcctccaaatcctattcctgctcctgaaccctgccctcctcgaataacatcaaatatgggttcaagctactggactgatcagccctttggtagcaatggaggatctcagaggaatgtgagaggtcgccatgatcacaatcctatccatttgggacacaatccaggtgtagcttgcgcaacaagcagcactcatgggccaccacaccatgctaatgtaattggtcctcaaagtacagcagtgccacaaaatagagcatatttttctatacctccaagagtgactgccccaggcagcgatggaaactgtagcatggttttcagggaagggacatactactctgctccgcagaggaccaacataaatgccccccctgtcctagcacctcctggttcttctgatagtctacattttgtgcatggtgggtatgccccaagagcagcccctcctaacagcatcagcacatatcctgccccggcttttgcgactcctaacaactcagtgacagttacccatgagcctgatatcccttgctatcgacctgccgtccctggctatccgcctgctacctcagcagcagcagcagcagcaagtgttcatgctgaaggtgctgctgcatcttcgagacatctaggtcatgtggctctaggttccagtggtagtgcaaggagtagaaggctgagggattcataccatgcttttcgtccactggttattgaagaaaataacttgagaggaccagcaaccgagcgttttatgatgctaaatcagttatttatccatgaatcgagagaagattctgaccctcactgggacatgaggctggacattgatgatatgagttatgaggagctgctggctttgggagaacgaataggcaatgtcaacacgggcctagctgatgaaaaactttcaagctgtgtgacggagataccctgctgcagctctgcccgtactcatgatgataatgagagcgcaagatgtgtaatttgcctggaggattacaaattcgaggactctgtcgggaagctaaaatgcaatcacaagtatcacgcagactgcatcaagaaatggctgcaggtgaagaacgcttgcccagtctgcaaagcttctgcggcagatgacggcggaggcaccgaatgaagcgccctgccgcccccattcaccctatctcaggcgaagctgtactggctgatctggtttgctgtgtgtaaataatggtcctgaaacggattatttgtgagctgaattaaactcgacatgtaaatttaatcctcaagctagttgcaaattgatggcagcggttagccctacgtgtcagccgtctgacgtaactgcagagagaaaacgtttgcatgcatatgtacagctcgatccaatagaggttattaaatgttaacaatttattagttagttaagccgtctttacgacgtccatcgtcacctaattaaattgcaactaattttcactcgcgggcg

SEQ ID NO: 208999 - DNA, 7233 bp, Zea Mays
cggaagaagccgcaccaggagcaaattcctcctctctcgagggcggttgcgtgctcgcgtgaagaaggccggggccctatctctccgatcgcggtagggcgttcgcagcgccgattcgagccgacgattggccgtccgcgaaggtatacccctccgattcggcccccagccctgcttaaatccgcgtggtactcctatgcattcggcggtagcggcacttcctggtacagcctaccctgcgtgggtagtgggtggatgctcgtggaatttagggggagttgcaggatcggtgcgcccggttggggttctcgctgctgagtcgcagtaatggggatttgggggtcgctgttccctcctcgtcgtcttcatttcgtcgattagtgcgatttgagtgaaacggtacatcgattctgcgtgggaaagcgtggcggtaatcggtggtggttcttcatttcgcctcatattgtctgatttgtattctagctgttcgcttcatctctatcaccaaaatccctgttctttctatcataaaaaagaatacaatcccacatttcagcctctttatgtattttcagtgaattgattttacccaaatctatcaccaaactccagtttctacagacataggtcataggtctgccttggtttggctcgggggctcttgagttatgtcatttaggataggaaacacaacatcaacatcatcaacatagtcttttagtcccaagcaagttgaggtaggctagagttgaaacacaacaagatgttacaaaagagagagtgagaaagtggaggggaaaagctttttagagcactataaggaaaaatgcctaatcacggttcgggcacgtgggtagcttctttccaagcacttctattcaaacacaacttcattggtatattccattctttcaagtcccttttgattggctcctcccatgtcaagtttggtcgacctctacctctctcacattattgtccatcttatggtgtctatatgcaccggtgcctctagtggtctccggtggacatatccaaaccatctcaatcggtgttgaataagcttttcttcaattggcgctactcttagccgatcgcgtatgtcatcgtttctcactcggtccaatcttgtgtgcccacatatccaacgcaacatacgcatatctgcgacacttagttgttggctgtaccaaaacttgtcgtgttatgttcatgtttgggtgtgtcaaacaatccttagtcccaggtgatcaatatacatcaatgtgtctccctgttaccatctgttttgatcattgcctcttttatgacccttctttgagttgaccattctccattttcaaaattatgttactatagttcagttcatatctatacccttcaactgaagttatctgactgtatggatgactaattatcatctagcagtttgaggaatcatgtttcctgtcccagtttacttactctgtagctcatgcattttttaaccttcaagtggaagcatttggatatttagtttttaatccacatctgagtgaaattcatgactgatgattttgaccttgaagcttatgattgagtaattcttttctgtatctcctttgttgtttattagtcagtagaagaaactggtaaatatgtatccatattacaaatctgaatcgcgtttatctccacttgtcaatctgtgatgccaggatttatcatttcgttgaacacactttcttgttttgatataagcttaaacaagaatagccataatttagaagcaataacctagaattacatgttacatgctcacaagaaaaatatcatgcacatgacttatgctatatctaaggtttcgaacgtaccttctccctgtggcaccccaacagccattaaattattcaaggtaccttttgatgcttcaatctgttttgaaaatatctaaattccattggacaaagaacacataagttctacactcggtttttctttagaagcagaagtactgaatctgttaaatggtacaacactgttgtcctttgctttgatggtaatgcatgaaattcgaacaccgacatgtcttctgcatcttcaggtatctttattggtatttaaagactatatatacaatattatgttttattataaatggcacaaaaaccaatatttcttatgggaatgcaggtttagtgagatctggcctctgcaatagtcacttccttgaaagcagatataaggattattatagttggagttcaatctttggggacatgaattgattctgttatttgtttgactccagtttggggcaatcacgggctttaggttgggtgaggtattgttgtttcaatgaattcaggtactcaggttagtgatagtttcagaatattgtagttacattgtggcggtgagtaagctcttaagtcttaactcatgatgagaaccttaattcattgggtactacatttactccttttttagaaaaaatatacatttatgtttttctttcttcccttagagtccatagcctgatatgcgtatttccttctctgtagctcttccattgtccaactgaactttggaagttcttctagagaattatctagctctcagtttttttcagatatttgcatttattacttcaaaaatttgaattgttctattaatgacattgcaggtactatttgaacactgaactaaaaattggagtttcttttcttatttgacatcttgatgtgccaaaatcaagctctcgttaaaggtcaaacaaatgggcaaaatttgggctctttgattagttttttcagtgttaagtggtgaatctactgtggtaaatgggagagctgatccagttgatctatatgccttgtgaggactattttgtcctcaataagaatatatgttcaacatcactgttggacttgtgttgcccttagattgagatggtggcttctcttacaagattgtagcagccttttaactctcgaagagggggccccttcaattgtgagttttgagaagagccaattgctgctaccttcatatcattttgaggactggaaaaggtggaccagtgtcactcttagcatctaccacctagaactttagcccaatggtggtttatatgttgaaattcatcaagtataaaggcgagaagggtagtttcgttgcccacagttaacttgtagggagagaaatattgagatctgtggaaatattggctggagcagcagaatcactcaataattttgattttggatggtagaataggttggcgtaaatttggcaaaaagaacttaaacagttctttcacatcaaattagttgttctgaagattctttccaagtaaaaatcagcttatcatgtatgcttgggccatgaagtaacaattcttttgatcgctgaggatgtcatttgcagatagatattcaatgttgttggaaagagaaagatgctagttgaaaataggtgaattgatgatgttggaaacaagatgcatttattcataagacgaacaaagggacaacaatttcgaggaggaaccctttagctaggttgtgtgtgcatcattacatggacatgtgtgtacctgaaatgctagtgctatatctacctgccttcatattttctggggcttctggagctgatagatagtgtcatactttctgccttatgtccatttactttctgtttaacagaattatgtacaatttattattagtttctctcccaatgactaagcccgtttgacgggcttttcactccatgtaaagaattagaagattctagccaatcttcttatgttcaatataatgtatatgaactgtactgtttgataagtgctgccatataatttagttgcacactgtttcagcttctttggttattactgtattcctgttgttatagatgtttgtattgctgtcaataagttctttgccttcgaaaattggtcctttcacctggtgttgcacagagtcctggtgttgtgctgaactaatgttgtaaggcaactgtctttgttggttaggtattatgattttcatacttgatactggactactaaaatagcatctgtaatttgatcctaatcaatggattgtatagatgcttatctagtatttttctatcacatagagaaaagacaatgcagtctagatatgctgcttgtaattatcttttctaaagcttgtctaagttaaacgctatatatatctactagtctctttgttatcttcaaacaaacatcatcgtttgatactattacgacaataaatgatctccaatcctttatattggaggaataataatatgtaacattggttgggtgtagagattacattatatacgtctctaaccctaataggctacatgtgctaggctaggtccatgacacacaaccatgaagaggacccagatccttcatcacgaactttggttgaagtgtgtgtgtttgtgcatatataaaatcttaggcaccataataacatgacgtatacataatggttctcttcaacttgcatctacattattgacataacataggtatcgtctagctacttggtgaataaaacttcagagaatcatattttgttgttttcatatggtaaattcatatgttctttctcttcaacttgcatctacattattggcataacataggtatcgtctagctacttggtgactaaaacttcagaaagtcatatttcgttattttcatatggtaaaatcatatgttctatcattacttgtcaggccaagttactgccataaccaaagctataaaggtttctaattcttgtattgaggtctaaaagtcagatctccaccatatatattttattttgtagcagactattatgcaagtatgatgatgattccttctctagtttaattctgtaaactacatactgtagtcaaaaagttttatgtttactttgttaattacgtcggcatggtttctagtcttcttggatatatgacgaggacttcatttgtgttgtgtgttgcaccaaagttaaataagacactggatatgatggaatatttgggttttggcactggcagctctagcctgtgtgactgtaatctcacatcttgcggttctaaggtctgaatgattctttttagtttattacagaagtctaagtatttgtggttctctgtatatattttgtttctaaatctacaagtatatttgcagctgcaacttgcttttctagaatactaatgccaaccctatattttttcaggttaaacaaaatcaaatccccctgttcatgtgttatggcagggcatcatcataataacacacatgcctccaggatggatcatgtgaacaggttccagagtgaagcacagccttttggcccaaagttatttatgcattctagaactgatgcagcaaatggagctctaccatcaggttatgtgggcgcaccaataagaccaaatggcattccattctcaagtcacaccgggcaatctcatattcagcacagtgatgctcctggaaccatgcttgcatcctattctggctatcctcttgctggaagctccagtagcacctatgcaccacataatactcatcatctgcctgctttgagctatccacataggtctgatgataacttcattctgagttcccatatggatgacagaagggttgcactgaagcggagaaatccaattatttatccagtggatggagtcaataatgggagctgttatgctggcagttcatctaatcctcagttcccatgctacatgcctccaaatcctattcctgctcctgaaccctgccctcctcgaataacatcaaatatgggttcaagctactggactgatcagccctttggtagcaatggaggatctcagaggaatgtgagaggtcgccatgatcacaatcctatccatttgggacacaatccaggtgtagcttgcgcaacaagcagcactcatgggccaccacaccatgctaatgtaattggtcctcaaagtacagcagtgccacaaaatagagcatatttttctatacctccaagagtgactgccccaggcagcgatggaaactgtagcatggttttcagggaagggacatactactctgctccgcagaggaccaacataaatgccccccctgtcctagcacctcctggttcttctgatagtctacattttgtgcatggtgggtatgccccaagagcagcccctcctaacagcatcagcacatatcctgccccggcttttgcgactcctaacaactcagtgacagttacccatgagcctgatatcccttgctatcgacctgccgtccctggctatccgcctgctacctcagcagcagcagcagcagcaagtgttcatgctgaaggtgctgctgcatcttcgagacatctaggtcatgtggctctaggttccagtggtagtgcaaggagtagaaggctgagggattcataccatgcttttcgtccactggttattgaagaaaataacttgagaggaccagcaaccgagcgttttatgatgctaaatcagttatttatccatgaatcgagagaagattctgaccctcactgggacatgaggctggacattgatgatatgagttatgaggagctgctggctttgggagaacgaataggcaatgtcaacacgggcctagctgatgaaaaactttcaagctgtgtgacggagataccctgctgcagctctgcccgtactcatgatgataatgagagcgcaagatgtgtaatttgcctggaggattacaaattcgaggactctgtcgggaagctaaaatgcaatcacaagtatcacgcagactgcatcaagaaatggctgcaggtgaagaacgcttgcccagtctgcaaagcttctgcggcagatgacggcggaggcaccgaatgaagcgccctgccgcccccattcaccctatctcaggcgaagctgtactggctgatctggtttgctgtgtgtaaataatggtcctgaaacggattatttgtgagctgaattaaactcgacatgtaaatttaatcctcaagctagttgcaaattgatggcagcggttagccctacgtgtcagccgtctgacgtaactgcagagagaaaacgtttgcatgcatatgtacagctcgatccaatagaggttattaaatgttaacaatttattagttagttaagccgtctttacgacgtccatcgtcacctaattaaattgcaactaattttcactcgcgggcg

SEQ ID NO: 209000 - DNA, 2100 bp, Zea Mays
cggaagaagccgcaccaggagcaaattcctcctctctcgagggcggttgcgtgctcgcgtgaagaaggccggggccctatctctccgatcgcggtagggcgttcgcagcgccgattcgagccgacgattggccgtccgcgaaggttaaacaaaatcaaatccccctgttcatgtgttatggcagggcatcatcataataacacacatgcctccaggatggatcatgtgaacaggttccagagtgaagcacagccttttgcaaatggagctctaccatcaggttatgtgggcgcaccaataagaccaaatggcattccattctcaagtcacaccgggcaatctcatattcagcacagtgatgctcctggaaccatgcttgcatcctattctggctatcctcttgctggaagctccagtagcacctatgcaccacataatactcatcatctgcctgctttgagctatccacataggtctgatgataacttcattctgagttcccatatggatgacagaagggttgcactgaagcggagaaatccaattatttatccagtggatggagtcaataatgggagctgttatgctggcagttcatctaatcctcagttcccatgctacatgcctccaaatcctattcctgctcctgaaccctgccctcctcgaataacatcaaatatgggttcaagctactggactgatcagccctttggtagcaatggaggatctcagaggaatgtgagaggtcgccatgatcacaatcctatccatttgggacacaatccaggtgtagcttgcgcaacaagcagcactcatgggccaccacaccatgctaatgtaattggtcctcaaagtacagcagtgccacaaaatagagcatatttttctatacctccaagagtgactgccccaggcagcgatggaaactgtagcatggttttcagggaagggacatactactctgctccgcagaggaccaacataaatgccccccctgtcctagcacctcctggttcttctgatagtctacattttgtgcatggtgggtatgccccaagagcagcccctcctaacagcatcagcacatatcctgccccggcttttgcgactcctaacaactcagtgacagttacccatgagcctgatatcccttgctatcgacctgccgtccctggctatccgcctgctacctcagcagcagcagcagcagcaagtgttcatgctgaaggtgctgctgcatcttcgagacatctaggtcatgtggctctaggttccagtggtagtgcaaggagtagaaggctgagggattcataccatgcttttcgtccactggttattgaagaaaataacttgagaggaccagcaaccgagcgttttatgatgctaaatcagttatttatccatgaatcgagagaagattctgaccctcactgggacatgaggctggacattgatgatatgagttatgaggagctgctggctttgggagaacgaataggcaatgtcaacacgggcctagctgatgaaaaactttcaagctgtgtgacggagataccctgctgcagctctgcccgtactcatgatgataatgagagcgcaagatgtgtaatttgcctggaggattacaaattcgaggactctgtcgggaagctaaaatgcaatcacaagtatcacgcagactgcatcaagaaatggctgcaggtgaagaacgcttgcccagtctgcaaagcttctgcggcagatgacggcggaggcaccgaatgaagcgccctgccgcccccattcaccctatctcaggcgaagctgtactggctgatctggtttgctgtgtgtaaataatggtcctgaaacggattatttgtgagctgaattaaactcgacatgtaaatttaatcctcaagctagttgcaaattgatggcagcggttagccctacgtgtcagccgtctgacgtaactgcagagagaaaacgtttgcatgcatatgtacagctcgatccaatagaggttattaaatgttaacaatttattagttagttaagccgtctttacgacgtccatcgtcacctaattaaattgcaactaattttcactcgcgggcg

SEQ ID NO: 209001 - DNA, 3506 bp, Zea Mays
cggaagaagccgcaccaggagcaaattcctcctctctcgagggcggttgcgtgctcgcgtgaagaaggccggggccctatctctccgatcgcggtagggcgttcgcagcgccgattcgagccgacgattggccgtccgcgaaggtttagtgagatctggcctctgcaatagtcacttccttgaaagcagatataaggattattatagttggagttcaatctttggggacatgaattgattctgttatttgtttgactccagtttggggcaatcacgggctttaggttgggtgaggtattgttgtttcaatgaattcaggtactcaggttagtgatagtttcagaatattgtagttacattgtggcggtgagtaagctcttaagtcttaactcatgatgagaaccttaattcattgggtactacatttactccttttttagaaaaaatatacatttatgtttttctttcttcccttagagtccatagcctgatatgcgtatttccttctctgtagctcttccattgtccaactgaactttggaagttcttctagagaattatctagctctcagtttttttcagatatttgcatttattacttcaaaaatttgaattgttctattaatgacattgcaggtactatttgaacactgaactaaaaattggagtttcttttcttatttgacatcttgatgtgccaaaatcaagctctcgttaaaggtcaaacaaatgggcaaaatttgggctctttgattagttttttcagtgttaagtggtgaatctactgtggtaaatgggagagctgatccagttgatctatatgccttgtgaggactattttgtcctcaataagaatatatgttcaacatcactgttggacttgtgttgcccttagattgagatggtggcttctcttacaagattgtagcagccttttaactctcgaagagggggccccttcaattgtgagttttgagaagagccaattgctgctaccttcatatcattttgaggactggaaaaggtggaccagtgtcactcttagcatctaccacctagaactttagcccaatggtggtttatatgttgaaattcatcaagtataaaggcgagaagggtagtttcgttgcccacagttaacttgtagggagagaaatattgagatctgtggaaatattggctggagcagcagaatcactcaataattttgattttggatggtagaataggttggcgtaaatttggcaaaaagaacttaaacagttctttcacatcaaattagttgttctgaagattctttccaagtaaaaatcagcttatcatgtatgcttgggccatgaagtaacaattcttttgatcgctgaggatgtcatttgcagatagatattcaatgttgttggaaagagaaagatgctagttgaaaataggtgaattgatgatgttggaaacaagatgcatttattcataagacgaacaaagggacaacaatttcgaggaggaaccctttagctaggttaaacaaaatcaaatccccctgttcatgtgttatggcagggcatcatcataataacacacatgcctccaggatggatcatgtgaacaggttccagagtgaagcacagccttttggcccaaagttatttatgcattctagaactgatgcagcaaatggagctctaccatcaggttatgtgggcgcaccaataagaccaaatggcattccattctcaagtcacaccgggcaatctcatattcagcacagtgatgctcctggaaccatgcttgcatcctattctggctatcctcttgctggaagctccagtagcacctatgcaccacataatactcatcatctgcctgctttgagctatccacataggtctgatgataacttcattctgagttcccatatggatgacagaagggttgcactgaagcggagaaatccaattatttatccagtggatggagtcaataatgggagctgttatgctggcagttcatctaatcctcagttcccatgctacatgcctccaaatcctattcctgctcctgaaccctgccctcctcgaataacatcaaatatgggttcaagctactggactgatcagccctttggtagcaatggaggatctcagaggaatgtgagaggtcgccatgatcacaatcctatccatttgggacacaatccaggtgtagcttgcgcaacaagcagcactcatgggccaccacaccatgctaatgtaattggtcctcaaagtacagcagtgccacaaaatagagcatatttttctatacctccaagagtgactgccccaggcagcgatggaaactgtagcatggttttcagggaagggacatactactctgctccgcagaggaccaacataaatgccccccctgtcctagcacctcctggttcttctgatagtctacattttgtgcatggtgggtatgccccaagagcagcccctcctaacagcatcagcacatatcctgccccggcttttgcgactcctaacaactcagtgacagttacccatgagcctgatatcccttgctatcgacctgccgtccctggctatccgcctgctacctcagcagcagcagcagcagcaagtgttcatgctgaaggtgctgctgcatcttcgagacatctaggtcatgtggctctaggttccagtggtagtgcaaggagtagaaggctgagggattcataccatgcttttcgtccactggttattgaagaaaataacttgagaggaccagcaaccgagcgttttatgatgctaaatcagttatttatccatgaatcgagagaagattctgaccctcactgggacatgaggctggacattgatgatatgagttatgaggagctgctggctttgggagaacgaataggcaatgtcaacacgggcctagctgatgaaaaactttcaagctgtgtgacggagataccctgctgcagctctgcccgtactcatgatgataatgagagcgcaagatgtgtaatttgcctggaggattacaaattcgaggactctgtcgggaagctaaaatgcaatcacaagtatcacgcagactgcatcaagaaatggctgcaggtgaagaacgcttgcccagtctgcaaagcttctgcggcagatgacggcggaggcaccgaatgaagcgccctgccgcccccattcaccctatctcaggcgaagctgtactggctgatctggtttgctgtgtgtaaataatggtcctgaaacggattatttgtgagctgaattaaactcgacatgtaaatttaatcctcaagctagttgcaaattgatggcagcggttagccctacgtgtcagccgtctgacgtaactgcagagagaaaacgtttgcatgcatatgtacagctcgatccaatagaggttattaaatgttaacaatttattagttagttaagccgtctttacgacgtccatcgtcacctaattaaattgcaactaattttcactcgcgggcg

SEQ ID NO: 209002 - DNA, 2524 bp, Zea Mays
cggaagaagccgcaccaggagcaaattcctcctctctcgagggcggttgcgtgctcgcgtgaagaaggccggggccctatctctccgatcgcggtagggcgttcgcagcgccgattcgagccgacgattggccgtccgcgaaggtactatttgaacactgaactaaaaattggagtttcttttcttatttgacatcttgatgtgccaaaatcaagctctcgttaaaggtcaaacaaatgggcaaaatttgggctctttgattagttttttcagtgttaagtggtgaatctactgtggtaaatgggagagctgatccagttgatctatatgccttgtgaggactattttgtcctcaataagaatatatgttcaacatcactgttggacttgtgttgcccttagattgagatggtggcttctcttacaagattgtagcagccttttaactctcgaagagggggccccttcaattgtgagttttgagaagagccaattgctgctaccttcatatcattttgaggactggaaaaggttaaacaaaatcaaatccccctgttcatgtgttatggcagggcatcatcataataacacacatgcctccaggatggatcatgtgaacaggttccagagtgaagcacagccttttggcccaaagttatttatgcattctagaactgatgcagcaaatggagctctaccatcaggttatgtgggcgcaccaataagaccaaatggcattccattctcaagtcacaccgggcaatctcatattcagcacagtgatgctcctggaaccatgcttgcatcctattctggctatcctcttgctggaagctccagtagcacctatgcaccacataatactcatcatctgcctgctttgagctatccacataggtctgatgataacttcattctgagttcccatatggatgacagaagggttgcactgaagcggagaaatccaattatttatccagtggatggagtcaataatgggagctgttatgctggcagttcatctaatcctcagttcccatgctacatgcctccaaatcctattcctgctcctgaaccctgccctcctcgaataacatcaaatatgggttcaagctactggactgatcagccctttggtagcaatggaggatctcagaggaatgtgagaggtcgccatgatcacaatcctatccatttgggacacaatccaggtgtagcttgcgcaacaagcagcactcatgggccaccacaccatgctaatgtaattggtcctcaaagtacagcagtgccacaaaatagagcatatttttctatacctccaagagtgactgccccaggcagcgatggaaactgtagcatggttttcagggaagggacatactactctgctccgcagaggaccaacataaatgccccccctgtcctagcacctcctggttcttctgatagtctacattttgtgcatggtgggtatgccccaagagcagcccctcctaacagcatcagcacatatcctgccccggcttttgcgactcctaacaactcagtgacagttacccatgagcctgatatcccttgctatcgacctgccgtccctggctatccgcctgctacctcagcagcagcagcagcagcaagtgttcatgctgaaggtgctgctgcatcttcgagacatctaggtcatgtggctctaggttccagtggtagtgcaaggagtagaaggctgagggattcataccatgcttttcgtccactggttattgaagaaaataacttgagaggaccagcaaccgagcgttttatgatgctaaatcagttatttatccatgaatcgagagaagattctgaccctcactgggacatgaggctggacattgatgatatgagttatgaggagctgctggctttgggagaacgaataggcaatgtcaacacgggcctagctgatgaaaaactttcaagctgtgtgacggagataccctgctgcagctctgcccgtactcatgatgataatgagagcgcaagatgtgtaatttgcctggaggattacaaattcgaggactctgtcgggaagctaaaatgcaatcacaagtatcacgcagactgcatcaagaaatggctgcaggtgaagaacgcttgcccagtctgcaaagcttctgcggcagatgacggcggaggcaccgaatgaagcgccctgccgcccccattcaccctatctcaggcgaagctgtactggctgatctggtttgctgtgtgtaaataatggtcctgaaacggattatttgtgagctgaattaaactcgacatgtaaatttaatcctcaagctagttgcaaattgatggcagcggttagccctacgtgtcagccgtctgacgtaactgcagagagaaaacgtttgcatgcatatgtacagctcgatccaatagaggttattaaatgttaacaatttattagttagttaagccgtctttacgacgtccatcgtcacctaattaaattgcaactaattttcactcgcgggcg

SEQ ID NO: 209003 - DNA, 2220 bp, Zea Mays
cggaagaagccgcaccaggagcaaattcctcctctctcgagggcggttgcgtgctcgcgtgaagaaggccggggccctatctctccgatcgcggtagggcgttcgcagcgccgattcgagccgacgattggccgtccgcgaaggtactatttgaacactgaactaaaaattggagtttcttttcttatttgacatcttgatgtgccaaaatcaagctctcgttaaaggttaaacaaaatcaaatccccctgttcatgtgttatggcagggcatcatcataataacacacatgcctccaggatggatcatgtgaacaggttccagagtgaagcacagccttttggcccaaagttatttatgcattctagaactgatgcagcaaatggagctctaccatcaggttatgtgggcgcaccaataagaccaaatggcattccattctcaagtcacaccgggcaatctcatattcagcacagtgatgctcctggaaccatgcttgcatcctattctggctatcctcttgctggaagctccagtagcacctatgcaccacataatactcatcatctgcctgctttgagctatccacataggtctgatgataacttcattctgagttcccatatggatgacagaagggttgcactgaagcggagaaatccaattatttatccagtggatggagtcaataatgggagctgttatgctggcagttcatctaatcctcagttcccatgctacatgcctccaaatcctattcctgctcctgaaccctgccctcctcgaataacatcaaatatgggttcaagctactggactgatcagccctttggtagcaatggaggatctcagaggaatgtgagaggtcgccatgatcacaatcctatccatttgggacacaatccaggtgtagcttgcgcaacaagcagcactcatgggccaccacaccatgctaatgtaattggtcctcaaagtacagcagtgccacaaaatagagcatatttttctatacctccaagagtgactgccccaggcagcgatggaaactgtagcatggttttcagggaagggacatactactctgctccgcagaggaccaacataaatgccccccctgtcctagcacctcctggttcttctgatagtctacattttgtgcatggtgggtatgccccaagagcagcccctcctaacagcatcagcacatatcctgccccggcttttgcgactcctaacaactcagtgacagttacccatgagcctgatatcccttgctatcgacctgccgtccctggctatccgcctgctacctcagcagcagcagcagcagcaagtgttcatgctgaaggtgctgctgcatcttcgagacatctaggtcatgtggctctaggttccagtggtagtgcaaggagtagaaggctgagggattcataccatgcttttcgtccactggttattgaagaaaataacttgagaggaccagcaaccgagcgttttatgatgctaaatcagttatttatccatgaatcgagagaagattctgaccctcactgggacatgaggctggacattgatgatatgagttatgaggagctgctggctttgggagaacgaataggcaatgtcaacacgggcctagctgatgaaaaactttcaagctgtgtgacggagataccctgctgcagctctgcccgtactcatgatgataatgagagcgcaagatgtgtaatttgcctggaggattacaaattcgaggactctgtcgggaagctaaaatgcaatcacaagtatcacgcagactgcatcaagaaatggctgcaggtgaagaacgcttgcccagtctgcaaagcttctgcggcagatgacggcggaggcaccgaatgaagcgccctgccgcccccattcaccctatctcaggcgaagctgtactggctgatctggtttgctgtgtgtaaataatggtcctgaaacggattatttgtgagctgaattaaactcgacatgtaaatttaatcctcaagctagttgcaaattgatggcagcggttagccctacgtgtcagccgtctgacgtaactgcagagagaaaacgtttgcatgcatatgtacagctcgatccaatagaggttattaaatgttaacaatttattagttagttaagccgtctttacgacgtccatcgtcacctaattaaattgcaactaattttcactcgcgggcg

SEQ ID NO: 209004 - DNA, 4926 bp, Zea Mays
cggaagaagccgcaccaggagcaaattcctcctctctcgagggcggttgcgtgctcgcgtgaagaaggccggggccctatctctccgatcgcggtagggcgttcgcagcgccgattcgagccgacgattggccgtccgcgaagccattaaattattcaaggtaccttttgatgcttcaatctgttttgaaaatatctaaattccattggacaaagaacacataagttctacactcggtttttctttagaagcagaagtactgaatctgttaaatggtacaacactgttgtcctttgctttgatggtaatgcatgaaattcgaacaccgacatgtcttctgcatcttcaggtttagtgagatctggcctctgcaatagtcacttccttgaaagcagatataaggattattatagttggagttcaatctttggggacatgaattgattctgttatttgtttgactccagtttggggcaatcacgggctttaggttgggtgaggtactatttgaacactgaactaaaaattggagtttcttttcttatttgacatcttgatgtgccaaaatcaagctctcgttaaaggtcaaacaaatgggcaaaatttgggctctttgattagttttttcagtgttaagtggtgaatctactgtggtaaatgggagagctgatccagttgatctatatgccttgtgaggactattttgtcctcaataagaatatatgttcaacatcactgttggacttgtgttgcccttagattgagatggtggcttctcttacaagattgtagcagccttttaactctcgaagagggggccccttcaattgtgagttttgagaagagccaattgctgctaccttcatatcattttgaggactggaaaaggtggaccagtgtcactcttagcatctaccacctagaactttagcccaatggtggtttatatgttgaaattcatcaagtataaaggcgagaagggtagtttcgttgcccacagttaacttgtagggagagaaatattgagatctgtggaaatattggctggagcagcagaatcactcaataattttgattttggatggtagaataggttggcgtaaatttggcaaaaagaacttaaacagttctttcacatcaaattagttgttctgaagattctttccaagtaaaaatcagcttatcatgtatgcttgggccatgaagtaacaattcttttgatcgctgaggatgtcatttgcagatagatattcaatgttgttggaaagagaaagatgctagttgaaaataggtgaattgatgatgttggaaacaagatgcatttattcataagacgaacaaagggacaacaatttcgaggaggaaccctttagctaggttgtgtgtgcatcattacatggacatgtgtgtacctgaaatgctagtgctatatctacctgccttcatattttctggggcttctggagctgatagatagtgtcatactttctgccttatgtccatttactttctgtttaacagaattatgtacaatttattattagtttctctcccaatgactaagcccgtttgacgggcttttcactccatgtaaagaattagaagattctagccaatcttcttatgttcaatataatgtatatgaactgtactgtttgataagtgctgccatataatttagttgcacactgtttcagcttctttggttattactgtattcctgttgttatagatgtttgtattgctgtcaataagttctttgccttcgaaaattggtcctttcacctggtgttgcacagagtcctggtgttgtgctgaactaatgttgtaaggcaactgtctttgttggttaggtattatgattttcatacttgatactggactactaaaatagcatctgtaatttgatcctaatcaatggattgtatagatgcttatctagtatttttctatcacatagagaaaagacaatgcagtctagatatgctgcttgtaattatcttttctaaagcttgtctaagttaaacgctatatatatctactagtctctttgttatcttcaaacaaacatcatcgtttgatactattacgacaataaatgatctccaatcctttatattggaggaataataatatgtaacattggttgggtgtagagattacattatatacgtctctaaccctaataggctacatgtgctaggctaggtccatgacacacaaccatgaagaggacccagatccttcatcacgaactttggttgaagtgtgtgtgtttgtgcatatataaaatcttaggcaccataataacatgacgtatacataatggttctcttcaacttgcatctacattattgacataacataggtatcgtctagctacttggtgaataaaacttcagagaatcatattttgttgttttcatatggtaaattcatatgttctttctcttcaacttgcatctacattattggcataacataggtatcgtctagctacttggtgactaaaacttcagaaagtcatatttcgttattttcatatggtaaaatcatatgttctatcattacttgtcaggccaagttactgccataaccaaagctataaaggtttctaattcttgtattgaggtctaaaagtcagatctccaccatatatattttattttgtagcagactattatgcaagtatgatgatgattccttctctagtttaattctgtaaactacatactgtagtcaaaaagttttatgtttactttgttaattacgtcggcatggtttctagtcttcttggatatatgacgaggacttcatttgtgttgtgtgttgcaccaaagttaaataagacactggatatgatggaatatttgggttttggcactggcagctctagcctgtgtgactgtaatctcacatcttgcggttctaaggttaaacaaaatcaaatccccctgttcatgtgttatggcagggcatcatcataataacacacatgcctccaggatggatcatgtgaacaggttccagagtgaagcacagccttttggcccaaagttatttatgcattctagaactgatgcagcaaatggagctctaccatcaggttatgtgggcgcaccaataagaccaaatggcattccattctcaagtcacaccgggcaatctcatattcagcacagtgatgctcctggaaccatgcttgcatcctattctggctatcctcttgctggaagctccagtagcacctatgcaccacataatactcatcatctgcctgctttgagctatccacataggtctgatgataacttcattctgagttcccatatggatgacagaagggttgcactgaagcggagaaatccaattatttatccagtggatggagtcaataatgggagctgttatgctggcagttcatctaatcctcagttcccatgctacatgcctccaaatcctattcctgctcctgaaccctgccctcctcgaataacatcaaatatgggttcaagctactggactgatcagccctttggtagcaatggaggatctcagaggaatgtgagaggtcgccatgatcacaatcctatccatttgggacacaatccaggtgtagcttgcgcaacaagcagcactcatgggccaccacaccatgctaatgtaattggtcctcaaagtacagcagtgccacaaaatagagcatatttttctatacctccaagagtgactgccccaggcagcgatggaaactgtagcatggttttcagggaagggacatactactctgctccgcagaggaccaacataaatgccccccctgtcctagcacctcctggttcttctgatagtctacattttgtgcatggtgggtatgccccaagagcagcccctcctaacagcatcagcacatatcctgccccggcttttgcgactcctaacaactcagtgacagttacccatgagcctgatatcccttgctatcgacctgccgtccctggctatccgcctgctacctcagcagcagcagcagcagcaagtgttcatgctgaaggtgctgctgcatcttcgagacatctaggtcatgtggctctaggttccagtggtagtgcaaggagtagaaggctgagggattcataccatgcttttcgtccactggttattgaagaaaataacttgagaggaccagcaaccgagcgttttatgatgctaaatcagttatttatccatgaatcgagagaagattctgaccctcactgggacatgaggctggacattgatgatatgagttatgaggagctgctggctttgggagaacgaataggcaatgtcaacacgggcctagctgatgaaaaactttcaagctgtgtgacggagataccctgctgcagctctgcccgtactcatgatgataatgagagcgcaagatgtgtaatttgcctggaggattacaaattcgaggactctgtcgggaagctaaaatgcaatcacaagtatcacgcagactgcatcaagaaatggctgcaggtgaagaacgcttgcccagtctgcaaagcttctgcggcagatgacggcggaggcaccgaatgaagcgccctgccgcccccattcaccctatctcaggcgaagctgtactggctgatctggtttgctgtgtgtaaataatggtcctgaaacggattatttgtgagctgaattaaactcgacatgtaaatttaatcctcaagctagttgcaaattgatggcagcggttagccctacgtgtcagccgtctgacgtaactgcagagagaaaacgtttgcatgcatatgtacagctcgatccaatagaggttattaaatgttaacaatttattagttagttaagccgtctttacgacgtccatcgtcacctaattaaattgcaactaattttcactcgcgggcg

SEQ ID NO: 209005 - DNA, 4879 bp, Zea Mays
agaacacataagttctacactcggtttttctttagaagcagaagtactgaatctgttaaatggtacaacactgttgtcctttgctttgatggtaatgcatgaaattcgaacaccgacatgtcttctgcatcttcaggtttagtgagatctggcctctgcaatagtcacttccttgaaagcagatataaggattattatagttggagttcaatctttggggacatgaattgattctgttatttgtttgactccagtttggggcaatcacgggctttaggttgggtgaggtattgttgtttcaatgaattcaggtactatttgaacactgaactaaaaattggagtttcttttcttatttgacatcttgatgtgccaaaatcaagctctcgttaaaggtcaaacaaatgggcaaaatttgggctctttgattagttttttcagtgttaagtggtgaatctactgtggtaaatgggagagctgatccagttgatctatatgccttgtgaggactattttgtcctcaataagaatatatgttcaacatcactgttggacttgtgttgcccttagattgagatggtggcttctcttacaagattgtagcagccttttaactctcgaagagggggccccttcaattgtgagttttgagaagagccaattgctgctaccttcatatcattttgaggactggaaaaggtggaccagtgtcactcttagcatctaccacctagaactttagcccaatggtggtttatatgttgaaattcatcaagtataaaggcgagaagggtagtttcgttgcccacagttaacttgtagggagagaaatattgagatctgtggaaatattggctggagcagcagaatcactcaataattttgattttggatggtagaataggttggcgtaaatttggcaaaaagaacttaaacagttctttcacatcaaattagttgttctgaagattctttccaagtaaaaatcagcttatcatgtatgcttgggccatgaagtaacaattcttttgatcgctgaggatgtcatttgcagatagatattcaatgttgttggaaagagaaagatgctagttgaaaataggtgaattgatgatgttggaaacaagatgcatttattcataagacgaacaaagggacaacaatttcgaggaggaaccctttagctaggttgtgtgtgcatcattacatggacatgtgtgtacctgaaatgctagtgctatatctacctgccttcatattttctggggcttctggagctgatagatagtgtcatactttctgccttatgtccatttactttctgtttaacagaattatgtacaatttattattagtttctctcccaatgactaagcccgtttgacgggcttttcactccatgtaaagaattagaagattctagccaatcttcttatgttcaatataatgtatatgaactgtactgtttgataagtgctgccatataatttagttgcacactgtttcagcttctttggttattactgtattcctgttgttatagatgtttgtattgctgtcaataagttctttgccttcgaaaattggtcctttcacctggtgttgcacagagtcctggtgttgtgctgaactaatgttgtaaggcaactgtctttgttggttaggtattatgattttcatacttgatactggactactaaaatagcatctgtaatttgatcctaatcaatggattgtatagatgcttatctagtatttttctatcacatagagaaaagacaatgcagtctagatatgctgcttgtaattatcttttctaaagcttgtctaagttaaacgctatatatatctactagtctctttgttatcttcaaacaaacatcatcgtttgatactattacgacaataaatgatctccaatcctttatattggaggaataataatatgtaacattggttgggtgtagagattacattatatacgtctctaaccctaataggctacatgtgctaggctaggtccatgacacacaaccatgaagaggacccagatccttcatcacgaactttggttgaagtgtgtgtgtttgtgcatatataaaatcttaggcaccataataacatgacgtatacataatggttctcttcaacttgcatctacattattgacataacataggtatcgtctagctacttggtgaataaaacttcagagaatcatattttgttgttttcatatggtaaattcatatgttctttctcttcaacttgcatctacattattggcataacataggtatcgtctagctacttggtgactaaaacttcagaaagtcatatttcgttattttcatatggtaaaatcatatgttctatcattacttgtcaggccaagttactgccataaccaaagctataaaggtttctaattcttgtattgaggtctaaaagtcagatctccaccatatatattttattttgtagcagactattatgcaagtatgatgatgattccttctctagtttaattctgtaaactacatactgtagtcaaaaagttttatgtttactttgttaattacgtcggcatggtttctagtcttcttggatatatgacgaggacttcatttgtgttgtgtgttgcaccaaagttaaataagacactggatatgatggaatatttgggttttggcactggcagctctagcctgtgtgactgtaatctcacatcttgcggttctaaggtctgaatgattctttttagtttattacagaagtctaagtatttgtggttctctgtatatattttgtttctaaatctacaagtatatttgcagctgcaacttgcttttctagaatactaatgccaaccctatattttttcaggttaaacaaaatcaaatccccctgttcatgtgttatggcagggcatcatcataataacacacatgcctccaggatggatcatgtgaacaggttccagagtgaagcacagccttttggcccaaagttatttatgcattctagaactgatgcagcaaatggagctctaccatcaggttatgtgggcgcaccaataagaccaaatggcattccattctcaagtcacaccgggcaatctcatattcagcacagtgatgctcctggaaccatgcttgcatcctattctggctatcctcttgctggaagctccagtagcacctatgcaccacataatactcatcatctgcctgctttgagctatccacataggtctgatgataacttcattctgagttcccatatggatgacagaagggttgcactgaagcggagaaatccaattatttatccagtggatggagtcaataatgggagctgttatgctggcagttcatctaatcctcagttcccatgctacatgcctccaaatcctattcctgctcctgaaccctgccctcctcgaataacatcaaatatgggttcaagctactggactgatcagccctttggtagcaatggaggatctcagaggaatgtgagaggtcgccatgatcacaatcctatccatttgggacacaatccaggtgtagcttgcgcaacaagcagcactcatgggccaccacaccatgctaatgtaattggtcctcaaagtacagcagtgccacaaaatagagcatatttttctatacctccaagagtgactgccccaggcagcgatggaaactgtagcatggttttcagggaagggacatactactctgctccgcagaggaccaacataaatgccccccctgtcctagcacctcctggttcttctgatagtctacattttgtgcatggtgggtatgccccaagagcagcccctcctaacagcatcagcacatatcctgccccggcttttgcgactcctaacaactcagtgacagttacccatgagcctgatatcccttgctatcgacctgccgtccctggctatccgcctgctacctcagcagcagcagcagcagcaagtgttcatgctgaaggtgctgctgcatcttcgagacatctaggtcatgtggctctaggttccagtggtagtgcaaggagtagaaggctgagggattcataccatgcttttcgtccactggttattgaagaaaataacttgagaggaccagcaaccgagcgttttatgatgctaaatcagttatttatccatgaatcgagagaagattctgaccctcactgggacatgaggctggacattgatgatatgagttatgaggagctgctggctttgggagaacgaataggcaatgtcaacacgggcctagctgatgaaaaactttcaagctgtgtgacggagataccctgctgcagctctgcccgtactcatgatgataatgagagcgcaagatgtgtaatttgcctggaggattacaaattcgaggactctgtcgggaagctaaaatgcaatcacaagtatcacgcagactgcatcaagaaatggctgcaggtgaagaacgcttgcccagtctgcaaagcttctgcggcagatgacggcggaggcaccgaatgaagcgccctgccgcccccattcaccctatctcaggcgaagctgtactggctgatctggtttgctgtgtgtaaataatggtcctgaaacggattatttgtgagctgaattaaactcgacatgtaaatttaatcctcaagctagttgcaaattgatggcagcggttagccctacgtgtcagccgtctgacgtaactgcagagagaaaacgtttgcatgcatatgtacagctcgatccaatagaggttattaaatgttaacaatttattagttagttaagccgtctttacgacgtccatcgtcacctaattaaattgcaactaattttcactcgcgggcg

SEQ ID NO: 209006 - DNA, 3098 bp, Zea Mays
caccgacatgtcttctgcatcttcaggtttagtgagatctggcctctgcaatagtcacttccttgaaagcagatataaggattattatagttggagttcaatctttggggacatgaattgattctgttatttgtttgactccagtttggggcaatcacgggctttaggttgggtgaggtattgttgtttcaatgaattcaggtactatttgaacactgaactaaaaattggagtttcttttcttatttgacatcttgatgtgccaaaatcaagctctcgttaaaggtcaaacaaatgggcaaaatttgggctctttgattagttttttcagtgttaagtggtgaatctactgtggtaaatgggagagctgatccagttgatctatatgccttgtgaggactattttgtcctcaataagaatatatgttcaacatcactgttggacttgtgttgcccttagattgagatggtggcttctcttacaagattgtagcagccttttaactctcgaagagggggccccttcaattgtgagttttgagaagagccaattgctgctaccttcatatcattttgaggactggaaaaggtggaccagtgtcactcttagcatctaccacctagaactttagcccaatggtggtttatatgttgaaattcatcaagtataaaggcgagaagggtagtttcgttgcccacagttaacttgtagggagagaaatattgagatctgtggaaatattggctggagcagcagaatcactcaataattttgattttggatggtagaataggttggcgtaaatttggcaaaaagaacttaaacagttctttcacatcaaattagttgttctgaagattctttccaagtaaaaatcagcttatcatgtatgcttgggccatgaagtaacaattcttttgatcgctgaggatgtcatttgcagatagatattcaatgttgttggaaagagaaagatgctagttgaaaataggtgaattgatgatgttggaaacaagatgcatttattcataagacgaacaaagggacaacaatttcgaggaggaaccctttagctaggttgtgtgtgcatcattacatggacatgttaaacaaaatcaaatccccctgttcatgtgttatggcagggcatcatcataataacacacatgcctccaggatggatcatgtgaacaggttccagagtgaagcacagccttttggcccaaagttatttatgcattctagaactgatgcagcaaatggagctctaccatcaggttatgtgggcgcaccaataagaccaaatggcattccattctcaagtcacaccgggcaatctcatattcagcacagtgatgctcctggaaccatgcttgcatcctattctggctatcctcttgctggaagctccagtagcacctatgcaccacataatactcatcatctgcctgctttgagctatccacataggtctgatgataacttcattctgagttcccatatggatgacagaagggttgcactgaagcggagaaatccaattatttatccagtggatggagtcaataatgggagctgttatgctggcagttcatctaatcctcagttcccatgctacatgcctccaaatcctattcctgctcctgaaccctgccctcctcgaataacatcaaatatgggttcaagctactggactgatcagccctttggtagcaatggaggatctcagaggaatgtgagaggtcgccatgatcacaatcctatccatttgggacacaatccaggtgtagcttgcgcaacaagcagcactcatgggccaccacaccatgctaatgtaattggtcctcaaagtacagcagtgccacaaaatagagcatatttttctatacctccaagagtgactgccccaggcagcgatggaaactgtagcatggttttcagggaagggacatactactctgctccgcagaggaccaacataaatgccccccctgtcctagcacctcctggttcttctgatagtctacattttgtgcatggtgggtatgccccaagagcagcccctcctaacagcatcagcacatatcctgccccggcttttgcgactcctaacaactcagtgacagttacccatgagcctgatatcccttgctatcgacctgccgtccctggctatccgcctgctacctcagcagcagcagcagcagcaagtgttcatgctgaaggtgctgctgcatcttcgagacatctaggtcatgtggctctaggttccagtggtagtgcaaggagtagaaggctgagggattcataccatgcttttcgtccactggttattgaagaaaataacttgagaggaccagcaaccgagcgttttatgatgctaaatcagttatttatccatgaatcgagagaagattctgaccctcactgggacatgaggctggacattgatgatatgagttatgaggagctgctggctttgggagaacgaataggcaatgtcaacacgggcctagctgatgaaaaactttcaagctgtgtgacggagataccctgctgcagctctgcccgtactcatgatgataatgagagcgcaagatgtgtaatttgcctggaggattacaaattcgaggactctgtcgggaagctaaaatgcaatcacaagtatcacgcagactgcatcaagaaatggctgcaggtgaagaacgcttgcccagtctgcaaagcttctgcggcagatgacggcggaggcaccgaatgaagcgccctgccgcccccattcaccctatctcaggcgaagctgtactggctgatctggtttgctgtgtgtaaataatggtcctgaaacggattatttgtgagctgaattaaactcgacatgtaaatttaatcctcaagctagttgcaaattgatggcagcggttagccctacgtgtcagccgtctgacgtaactgcagagagaaaacgtttgcatgcatatgtacagctcgatccaatagaggttattaaatgttaacaatttattagttagttaagccgtctttacgacgtccatcgtcacctaattaaattgcaactaattttcactcgcgggcg

SEQ ID NO: 209007 - DNA, 5494 bp, Zea Mays
gtagatgctgcagtgcagtgcagtgcggtgcagaggctccaaaaaggacgagaccatggttgctggctcgctcgctcgctcgagggtcgagtgcgtttctaacgctgcccacaccacacaccacacaccagcctagtcgagaagaaagaaacctccggtctctgggtcaggttctcgccgagcacgcgatttcacccgtcctttcggttcagatcttgtttcggattcgacaggcgagggtgggagttatagaggagagccggacatttcggcgcggagcaaagctaatcaggagttgcaacataatatgctgtcaattatgatcaatttggtctgacgaagattttctgcaaacaaatagtaaagctaaagcttgtggatacaagaacttcagcatgacgaagaaacacaaaattagaaagtccaagcatcttttagagagcaaaaaggatgttgatgaaaatgtggagaacattttaagaatgatagaggaggagaacgaacagactgagaatgaacaagatgattctggaaatcccgtcaggaaatcaaagctatcttcccttgtgaagggcttccatgaggactatcaataccttcacaagcactacaaacagctaattagcaaactagaaactgctggccacagttcctcaggttcagattcatctgattcagatgtggaaggagacagattagagaataatgtaactacaccaaaagcagtgttgaatgaagaaaacggcctgaaccataagcttgatgaggttcatagcatggaagcagaaatcgagatgctaaaacaaagtacagaagaacacaccaaggaaatatctgatctgaaacagctactagaaaaagcaatcaaggataaagaagctacaaggggagagttcactttagaggttgcaaatttatcatctgagaatgaaaatctgaaatcattagttgaaactgcaaagagggaggaaggagacttgcttaacatcataaaatctaaggagaatgaggtcaaaacattgtctagtgagaagcaaactattgaagaggagagagataacctgaagatgtcagttgtagacatgaagaaggagatggaagatctgagcaatcagctcaaagatacagtggataaatgcagcgtcatggcatcagaactagagaagtccctgaaggctgagaaagaagtgcagaccttgtttgaagaaaaccagaacctgaagaaccataacttgatgctgtcggtggagcatgataacctgaaagcacttcatcataacttagatattgagtgctgtcaactgaaggcaaccattgcagaaaccaaagctgaaaatgaatcattgaccacagaaaatcattcagctgaaagaaaactccagcaattgagggtagaaatagatggcttgatggctgagaccacagtgataatgaacaatctggacaaggaacgtagtactgcagcagaagaaaaagaaaggctaacatcagaaaattctgtatacatgagtgagttagaggaggcacaatctaatgttaaggatctagaaaaggaactggagtcaacaaaaagtgttctcaataatcgtattgcggagctatgtaaggagaagaattctaccacatcagagatagaacggctagaggcttctttgatgaatcatcagaacgatctgtcacaacaacttgataggatttcagatatgcagaagactactgaaaacctggagctggcaaattctaacctgcataatgagattgtaaaagtacaaggacaaaagaatgaagctgttgcttctatagttaatctcgagagcatgttagaacagcaagtacaagagattgcaaatcttcaggaggccaacaaagaactcaaagcagcaaagactgatctacataatgaggttatgttacttcaacaggagaaaattgtagcactgactcagttacaagaatatgaggctcaaatcaagaatcttcgaattgacttggaacagcagtgcaaccaaatttcagttatgcagcaagcaaatgaagaaacacaggataaaaattctagcttgcacaagcaactggaagaaactaggattcatctgcaagaggagatcattgcattacaaggagagaaggaagaggccatcagtagcttacagcagtcaaatgattcactcaagaccctagaagtccagttagagcagcaaagagaacaaatttctgttctgcagcttgctcatgaagacttgcaaaatagcaattccaacctagagatgcaattggaagaggcgaaggttagtcaccatgctgaaattctagcattacaagatgaaaagaacaagattatttcagagttgcagcagtcagatggttgtatcaagaaccttagatttgagttggagcaaggaaaagagcaaacctcaatcttgcttcatgctaatgaagatatgaagaataacatttctgtcttggacaagcaattggaagaggtcaggagcagtttgcatgctgaaattgcagaagtacgtgcagagaaggagacagctctatcagagttacatatgtctcagacttccatcaggaacttagagagtgtggtagaaaagcaaactgagaacattttaactctagaaaaagctaatgataagttaaacaataaaatatgtatcttgacagagcaagtagaacaagccaaggctgagctgcataaggaggtagcggcaatacaagaagagaaggatacagcactaacacaattaagacagtcagagttttcaatacaagatcttgagaatgaggtgacacgactgaaagacgaactttcaattcagctggaaaaaaattccaccttggacaagcaatttgaagaattcaagagcaagctgcatgctgaaattttagacctacgcgcagagaaggacacatctctattggagttacagacatctcaggattctgtaaggaatcttgagattctggttgaaaagcaaactgagaacatttcaactctgcaccaagctaatgatgagttacagaagaacatctacactttgactgagcaatcacaacaagccaaggaggagatgcaggatgagttgaaggcaatacaagaagagaaggatacagtgctaacacaactgaagcagtcagagacttcagtacaaaatctagaggatgaggtgacacgactgaaagaggaactttccgtccagctagaaaacaattccaccttggacaagcagtttgcagaagctaggagcaatctgcatgctgaaatttcagacctacgtgcagagaagggcacatctctactggagttacagatgtctcaggcttctgtcaggaatcttgagattttggtcggaaagcaaactgagaacatttcaactctacagcaagctaatgaagagttacaaaagaacatctacactttgactgagcaatcacaacaggtcaaggtggagatgcaaagtgatttgaaggcaatacaagaagagaagaatgcggtgctatcacaactgaagcagtcagaaacttcagtacaaaatcttgagaatgaggtgatacgactgaaagaggagctttctgtccagctagaaaacaattccaccttggacaagcagtttgaagaagccaggagcaatctgcatgctgaaatttcagagctacgtgcagataagaacacatctctattgaaattacagacgtctcaggattctgtcaggaatcttgagattgtggttgaaaagcaaactgagaacatttcaactctacagcaagctaatgatgagttacagaagaacatctacactttgacggagcaatcacaacgagacaaggcggagatattgtggttgaaaagcaaactgagaacatttcaactctacagcaagctaatgatgaattacagaagaatgtctatactttgactgagcaatcacagcaagccaaggtggagatgcaggatgagttgaagtcaatacaagaagagaaggatgcagcgctaacacaactgaagctgtcagagacttcagtacaaaatcttgagaatgaggtgacacgactgaaatgggagttctccgtccagctagaaaacaattccaccttggacaagcagttggaggaggcaatgttgaaagtgtctagcctacatgagaatcttgagaaggcccaagctgaagcagcttgtcaacttgatggcatgagtacaaaaaccaaagatctagaggagacaatcaatcaattgtcttctcaaaagactaagttggagaaggatgtgaaaattatgattgaagcatgcacagaaaacatgtcatgtttggcaggatttgaagatagagttacacaaaaaatttcagatcaggaggcaggactgaaggttctccaccagagccttggaggggctgttggtagctgtcagaggcttcagtatgcatatgatgaggtgtccacaagggcatcacatcttgagatacttaagaggagtcagatggagcagattgatcagctagagcagaaaaacacagaaactgtggagaaacatcggcttctggaagaggaaaagttatctgcaaataaggagaatattaagctacaaaagcatgtccaagaccttgaagttcagctccagctagcaaagcagaagcttaaagttactgaggcagaaagcaaatgcaaagaagagagatatgaagcgtcagtggaagcactgcgggcagagatctgtcatcttgaacaattagtacagcagttttcagggagagtcagcttgctggaaggaactctcatgcaggttaaaggacatgctgagtcagtggtctgtaaatgggctgacaaattggatgagctagaaacaatctgcagtcagaattttgtgctcttcattgaccgctcatctgcatgtagtgacgagcttaaaatcctgaggaagaaggtacatgatcatcttaatgaacagaaggaacttgccaatgcgaacaacgagctggctattaggttcaaagagaaagaaatggtggtgtcagaaatggtgaagagtgctgctgaggcacagacaaagatgctccagctccagaagacggtggacgagaaagaagacgagctagcagctagagtgcaggagaagagagaagccatcaagcaactgagcgacaccattgtttaccacaagaactatagcgatgacctggtgcgctacatccgcagtcagagtcgccctcgcctcccgttctgcctttaaatctgaaagtcaatgaaagatgtaaaggcttaatctagctgtgattttttttttttgcagtaaggagaccattgcaatttttcttatgtatcatatatagggctcgaatactttctggaggtagccatatattcagtggcttgtgtattctattcgctactaaggggactgctgtagtaattgatttattcgttttgccttatcttttttatcggatcggtgaatatactgcctgagactgcgaaggaaggctcaagaaat

SEQ ID NO: 209008 - DNA, 5651 bp, Zea Mays
gtagatgctgcagtgcagtgcagtgcggtgcagaggctccaaaaaggacgagaccatggttgctggctcgctcgctcgctcgagggtcgagtgcgtttctaacgctgcccacaccacacaccacacaccagcctagtcgagaagaaagaaacctccggtctctgggtcaggttctcgccgagcacgcgatttcacccgtcctttcggttcagatcttgtttcggattcgacaggcgagggtgggagttatagaggagagccggacatttcggcgcggagcaaagctaatcaggagttgcaacataatatgctgtcaattatgatcaatttggtctgacgaagattttctgcaaacaaatagtaaagctaaagcttgtggatacaagaacttcagcatgacgaagaaacacaaaattagaaagtccaagcatcttttagagagcaaaaaggatgttgatgaaaatgtggagaacattttaagaatgatagaggaggagaacgaacagactgagaatgaacaagatgattctggaaatcccgtcaggaaatcaaagctatcttcccttgtgaagggcttccatgaggactatcaataccttcacaagcactacaaacagctaattagcaaactagaaactgctggccacagttcctcaggttcagattcatctgattcagatgtggaaggagacagattagagaataatgtaactacaccaaaagcagtgttgaatgaagaaaacggcctgaaccataagcttgatgaggttcatagcatggaagcagaaatcgagatgctaaaacaaagtacagaagaacacaccaaggaaatatctgatctgaaacagctactagaaaaagcaatcaaggataaagaagctacaaggggagagttcactttagaggttgcaaatttatcatctgagaatgaaaatctgaaatcattagttgaaactgcaaagagggaggaaggagacttgcttaacatcataaaatctaaggagaatgaggtcaaaacattgtctagtgagaagcaaactattgaagaggagagagataacctgaagatgtcagttgtagacatgaagaaggagatggaagatctgagcaatcagctcaaagatacagtggataaatgcagcgtcatggcatcagaactagagaagtccctgaaggctgagaaagaagtgcagaccttgtttgaagaaaaccagaacctgaagaaccataacttgatgctgtcggtggagcatgataacctgaaagcacttcatcataacttagatattgagtgctgtcaactgaaggcaaccattgcagaaaccaaagctgaaaatgaatcattgaccacagaaaatcattcagctgaaagaaaactccagcaattgagggtagaaatagatggcttgatggctgagaccacagtgataatgaacaatctggacaaggaacgtagtactgcagcagaagaaaaagaaaggctaacatcagaaaattctgtatacatgagtgagttagaggaggcacaatctaatgttaaggatctagaaaaggaactggagtcaacaaaaagtgttctcaataatcgtattgcggagctatgtaaggagaagaattctaccacatcagagatagaacggctagaggcttctttgatgaatcatcagaacgatctgtcacaacaacttgataggatttcagatatgcagaagactactgaaaacctggagctggcaaattctaacctgcataatgagattgtaaaagtacaaggacaaaagaatgaagctgttgcttctatagttaatctcgagagcatgttagaacagcaagtacaagagattgcaaatcttcaggaggccaacaaagaactcaaagcagcaaagactgatctacataatgaggttatgttacttcaacaggagaaaattgtagcactgactcagttacaagaatatgaggctcaaatcaagaatcttcgaattgacttggaacagcagtgcaaccaaatttcagttatgcagcaagcaaatgaagaaacacaggataaaaattctagcttgcacaagcaactggaagaaactaggattcatctgcaagaggagatcattgcattacaaggagagaaggaagaggccatcagtagcttacagcagtcaaatgattcactcaagaccctagaagtccagttagagcagcaaagagaacaaatttctgttctgcagcttgctcatgaagacttgcaaaatagcaattccaacctagagatgcaattggaagaggcgaaggttagtcaccatgctgaaattctagcattacaagatgaaaagaacaagattatttcagagttgcagcagtcagatggttgtatcaagaaccttagatttgagttggagcaaggaaaagagcaaacctcaatcttgcttcatgctaatgaagatatgaagaataacatttctgtcttggacaagcaattggaagaggtcaggagcagtttgcatgctgaaattgcagaagtacgtgcagagaaggagacagctctatcagagttacatatgtctcagacttccatcaggaacttagagagtgtggtagaaaagcaaactgagaacattttaactctagaaaaagctaatgataagttaaacaataaaatatgtatcttgacagagcaagtagaacaagccaaggctgagctgcataaggaggtagcggcaatacaagaagagaaggatacagcactaacacaattaagacagtcagagttttcaatacaagatcttgagaatgaggtgacacgactgaaagacgaactttcaattcagctggaaaaaaattccaccttggacaagcaatttgaagaattcaagagcaagctgcatgctgaaattttagacctacgcgcagagaaggacacatctctattggagttacagacatctcaggattctgtaaggaatcttgagattctggttgaaaagcaaactgagaacatttcaactctgcaccaagctaatgatgagttacagaagaacatctacactttgactgagcaatcacaacaagccaaggaggagatgcaggatgagttgaaggcaatacaagaagagaaggatacagtgctaacacaactgaagcagtcagagacttcagtacaaaatctagaggatgaggtgacacgactgaaagaggaactttccgtccagctagaaaacaattccaccttggacaagcagtttgcagaagctaggagcaatctgcatgctgaaatttcagacctacgtgcagagaagggcacatctctactggagttacagatgtctcaggcttctgtcaggaatcttgagattttggtcggaaagcaaactgagaacatttcaactctacagcaagctaatgaagagttacaaaagaacatctacactttgactgagcaatcacaacaggtcaaggtggagatgcaaagtgatttgaaggcaatacaagaagagaagaatgcggtgctatcacaactgaagcagtcagaaacttcagtacaaaatcttgagaatgaggtgatacgactgaaagaggagctttctgtccagctagaaaacaattccaccttggacaagcagtttgaagaagccaggagcaatctgcatgctgaaatttcagagctacgtgcagataagaacacatctctattgaaattacagacgtctcaggattctgtcaggaatcttgagattgtggttgaaaagcaaactgagaacatttcaactctacagcaagctaatgatgagttacagaagaacatctacactttgacggagcaatcacaacgagacaaggcggagatgcaggatgagttgaaggcaatacaagaagataaggatgcagtgctaacacaactgaagcagtcagagacttcagtacaaaatctagaggatgagttgacacgactgaaagaggagctttccgtccagctagaaaacaattccaccttggacaagcagtttgcagaagccaggagcaatctgcatgctgaaatttcagacctacatacagagaaggacacatctctacgggaattacagacgtctcaggcttgtgtcaggaatcttgagattgtggttgaaaagcaaactgagaacatttcaactctacagcaagctaatgatgaattacagaagaatgtctatactttgactgagcaatcacagcaagccaaggtggagatgcaggatgagttgaagtcaatacaagaagagaaggatgcagcgctaacacaactgaagctgtcagagacttcagtacaaaatcttgagaatgaggtgacacgactgaaatgggagttctccgtccagctagaaaacaattccaccttggacaagcagttggaggaggcaatgttgaaagtgtctagcctacatgagaatcttgagaaggcccaagctgaagcagcttgtcaacttgatggcatgagtacaaaaaccaaagatctagaggagacaatcaatcaattgtcttctcaaaagactaagttggagaaggatgtgaaaattatgattgaagcatgcacagaaaacatgtcatgtttggcaggatttgaagatagagttacacaaaaaatttcagatcaggaggcaggactgaaggttctccaccagagccttggaggggctgttggtagctgtcagaggcttcagtatgcatatgatgaggtgtccacaagggcatcacatcttgagatacttaagaggagtcagatggagcagattgatcagctagagcagaaaaacacagaaactgtggagaaacatcggcttctggaagaggaaaagttatctgcaaataaggagaatattaagctacaaaagcatgtccaagaccttgaagttcagctccagctagcaaagcagaagcttaaagttactgaggcagaaagcaaatgcaaagaagagagatatgaagcgtcagtggaagcactgcgggcagagatctgtcatcttgaacaattagtacagcagttttcagggagagtcagcttgctggaaggaactctcatgcaggttaaaggacatgctgagtcagtggtctgtaaatgggctgacaaattggatgagctagaaacaatctgcagtcagaattttgtgctcttcattgaccgctcatctgcatgtagtgacgagcttaaaatcctgaggaagaaggtacatgatcatcttaatgaacagaaggaacttgccaatgcgaacaacgagctggctattaggttcaaagagaaagaaatggtggtgtcagaaatggtgaagagtgctgctgaggcacagacaaagatgctccagctccagaagacggtggacgagaaagaagacgagctagcagctagagtgcaggagaagagagaagccatcaagcaactgagcgacaccattgtttaccacaagaactatagcgatgacctgtaaggagaccattgcaatttttcttatgtatcatatatagggctcgaatactttctggaggtagccatatattcagtggcttgtgtattctattcgctactaaggggactgctgtagtaattgatttattcgttttgccttatcttttttatcggatcggtgaatatactgcctgagactgcgaaggaaggctcaagaaat

SEQ ID NO: 209009 - DNA, 5607 bp, Zea Mays
tgcgtttctaacgctgcccacaccacacaccacacaccagcctagtcgagaagaaagaaacctccggtctctgggtcaggttctcgccgagcacgcgatttcacccgtcctttcggttcaggagcaaagctaatcaggagttgcaacataatatgctgtcaattatgatcaatttggtctgacgaagattttctgcaaacaaatagtaaagctaaagcttgtggatacaagaacttcagcatgacgaagaaacacaaaattagaaagtccaagcatcttttagagagcaaaaaggatgttgatgaaaatgtggagaacattttaagaatgatagaggaggagaacgaacagactgagaatgaacaagatgattctggaaatcccgtcaggaaatcaaagctatcttcccttgtgaagggcttccatgaggactatcaataccttcacaagcactacaaacagctaattagcaaactagaaactgctggccacagttcctcaggttcagattcatctgattcagatgtggaaggagacagattagagaataatgtaactacaccaaaagcagtgttgaatgaagaaaacggcctgaaccataagcttgatgaggttcatagcatggaagcagaaatcgagatgctaaaacaaagtacagaagaacacaccaaggaaatatctgatctgaaacagctactagaaaaagcaatcaaggataaagaagctacaaggggagagttcactttagaggttgcaaatttatcatctgagaatgaaaatctgaaatcattagttgaaactgcaaagagggaggaaggagacttgcttaacatcataaaatctaaggagaatgaggtcaaaacattgtctagtgagaagcaaactattgaagaggagagagataacctgaagatgtcagttgtagacatgaagaaggagatggaagatctgagcaatcagctcaaagatacagtggataaatgcagcgtcatggcatcagaactagagaagtccctgaaggctgagaaagaagtgcagaccttgtttgaagaaaaccagaacctgaagaaccataacttgatgctgtcggtggagcatgataacctgaaagcacttcatcataacttagatattgagtgctgtcaactgaaggcaaccattgcagaaaccaaagctgaaaatgaatcattgaccacagaaaatcattcagctgaaagaaaactccagcaattgagggtagaaatagatggcttgatggctgagaccacagtgataatgaacaatctggacaaggaacgtagtactgcagcagaagaaaaagaaaggctaacatcagaaaattctgtatacatgagtgagttagaggaggcacaatctaatgttaaggatctagaaaaggaactggagtcaacaaaaagtgttctcaataatcgtattgcggagctatgtaaggagaagaattctaccacatcagagatagaacggctagaggcttctttgatgaatcatcagaacgatctgtcacaacaacttgataggatttcagatatgcagaagactactgaaaacctggagctggcaaattctaacctgcataatgagattgtaaaagtacaaggacaaaagaatgaagctgttgcttctatagttaatctcgagagcatgttagaacagcaagtacaagagattgcaaatcttcaggaggccaacaaagaactcaaagcagcaaagactgatctacataatgaggttatgttacttcaacaggagaaaattgtagcactgactcagttacaagaatatgaggctcaaatcaagaatcttcgaattgacttggaacagcagtgcaaccaaatttcagttatgcagcaagcaaatgaagaaacacaggataaaaattctagcttgcacaagcaactggaagaaactaggattcatctgcaagaggagatcattgcattacaaggagagaaggaagaggccatcagtagcttacagcagtcaaatgattcactcaagaccctagaagtccagttagagcagcaaagagaacaaatttctgttctgcagcttgctcatgaagacttgcaaaatagcaattccaacctagagatgcaattggaagaggcgaaggttagtcaccatgctgaaattctagcattacaagatgaaaagaacaagattatttcagagttgcagcagtcagatggttgtatcaagaaccttagatttgagttggagcaaggaaaagagcaaacctcaatcttgcttcatgctaatgaagatatgaagaataacatttctgtcttggacaagcaattggaagaggtcaggagcagtttgcatgctgaaattgcagaagtacgtgcagagaaggagacagctctatcagagttacatatgtctcagacttccatcaggaacttagagagtgtggtagaaaagcaaactgagaacattttaactctagaaaaagctaatgataagttaaacaataaaatatgtatcttgacagagcaagtagaacaagccaaggctgagctgcataaggaggtagcggcaatacaagaagagaaggatacagcactaacacaattaagacagtcagagttttcaatacaagatcttgagaatgaggtgacacgactgaaagacgaactttcaattcagctggaaaaaaattccaccttggacaagcaatttgaagaattcaagagcaagctgcatgctgaaattttagacctacgcgcagagaaggacacatctctattggagttacagacatctcaggattctgtaaggaatcttgagattctggttgaaaagcaaactgagaacatttcaactctgcaccaagctaatgatgagttacagaagaacatctacactttgactgagcaatcacaacaagccaaggaggagatgcaggatgagttgaaggcaatacaagaagagaaggatacagtgctaacacaactgaagcagtcagagacttcagtacaaaatctagaggatgaggtgacacgactgaaagaggaactttccgtccagctagaaaacaattccaccttggacaagcagtttgcagaagctaggagcaatctgcatgctgaaatttcagacctacgtgcagagaagggcacatctctactggagttacagatgtctcaggcttctgtcaggaatcttgagattttggtcggaaagcaaactgagaacatttcaactctacagcaagctaatgaagagttacaaaagaacatctacactttgactgagcaatcacaacaggtcaaggtggagatgcaaagtgatttgaaggcaatacaagaagagaagaatgcggtgctatcacaactgaagcagtcagaaacttcagtacaaaatcttgagaatgaggtgatacgactgaaagaggagctttctgtccagctagaaaacaattccaccttggacaagcagtttgaagaagccaggagcaatctgcatgctgaaatttcagagctacgtgcagataagaacacatctctattgaaattacagacgtctcaggattctgtcaggaatcttgagattgtggttgaaaagcaaactgagaacatttcaactctacagcaagctaatgatgagttacagaagaacatctacactttgacggagcaatcacaacgagacaaggcggagatgcaggatgagttgaaggcaatacaagaagataaggatgcagtgctaacacaactgaagcagtcagagacttcagtacaaaatctagaggatgagttgacacgactgaaagaggagctttccgtccagctagaaaacaattccaccttggacaagcagtttgcagaagccaggagcaatctgcatgctgaaatttcagacctacatacagagaaggacacatctctacgggaattacagacgtctcaggcttgtgtcaggaatcttgagattgtggttgaaaagcaaactgagaacatttcaactctacagcaagctaatgatgaattacagaagaatgtctatactttgactgagcaatcacagcaagccaaggtggagatgcaggatgagttgaagtcaatacaagaagagaaggatgcagcgctaacacaactgaagctgtcagagacttcagtacaaaatcttgagaatgaggtgacacgactgaaatgggagttctccgtccagctagaaaacaattccaccttggacaagcagttggaggaggcaatgttgaaagtgtctagcctacatgagaatcttgagaaggcccaagctgaagcagcttgtcaacttgatggcatgagtacaaaaaccaaagatctagaggagacaatcaatcaattgtcttctcaaaagactaagttggagaaggatgtgaaaattatgattgaagcatgcacagaaaacatgtcatgtttggcaggatttgaagatagagttacacaaaaaatttcagatcaggaggcaggactgaaggttctccaccagagccttggaggggctgttggtagctgtcagaggcttcagtatgcatatgatgaggtgtccacaagggcatcacatcttgagatacttaagaggagtcagatggagcagattgatcagctagagcagaaaaacacagaaactgtggagaaacatcggcttctggaagaggaaaagttatctgcaaataaggagaatattaagctacaaaagcatgtccaagaccttgaagttcagctccagctagcaaagcagaagcttaaagttactgaggcagaaagcaaatgcaaagaagagagatatgaagcgtcagtggaagcactgcgggcagagatctgtcatcttgaacaattagtacagcagttttcagggagagtcagcttgctggaaggaactctcatgcaggttaaaggacatgctgagtcagtggtctgtaaatgggctgacaaattggatgagctagaaacaatctgcagtcagaattttgtgctcttcattgaccgctcatctgcatgtagtgacgagcttaaaatcctgaggaagaaggtacatgatcatcttaatgaacagaaggaacttgccaatgcgaacaacgagctggctattaggttcaaagagaaagaaatggtggtgtcagaaatggtgaagagtgctgctgaggcacagacaaagatgctccagctccagaagacggtggacgagaaagaagacgagctagcagctagagtgcaggagaagagagaagccatcaagcaactgagcgacaccattgtttaccacaagaactatagcgatgacctggtgcgctacatccgcagtcagagtcgccctcgcctcccgttctgcctttaaatctgaaagtcaatgaaagatgtaaaggcttaatctagctgtgattttttttttttgcagtaaggagaccattgcaatttttcttatgtatcatatatagggctcgaatactttctggaggtagccatatattcagtggcttgtgtattctattcgctactaaggggactgctgtagtaattgatttattcgttttgccttatcttttttatcggatcggtgaatatactgcctgagactgcgaaggaaggctcaagaaat

SEQ ID NO: 209010 - DNA, 5481 bp, Zea Mays
cccacaccacacaccacacaccagcctagtcgagaagaaagaaacctccggtctctgggtcaggttctcgccgagcacgcgatttcacccgtcctttcggttcagatcttgtttcggattcgacaggcgagggtgggagttatagaggagagccggacatttcggcgcgatgttgatgaaaatgtggagaacattttaagaatgatagaggaggagaacgaacagactgagaatgaacaagatgattctggaaatcccgtcaggaaatcaaagctatcttcccttgtgaagggcttccatgaggactatcaataccttcacaagcactacaaacagctaattagcaaactagaaactgctggccacagttcctcaggttcagattcatctgattcagatgtggaaggagacagattagagaataatgtaactacaccaaaagcagtgttgaatgaagaaaacggcctgaaccataagcttgatgaggttcatagcatggaagcagaaatcgagatgctaaaacaaagtacagaagaacacaccaaggaaatatctgatctgaaacagctactagaaaaagcaatcaaggataaagaagctacaaggggagagttcactttagaggttgcaaatttatcatctgagaatgaaaatctgaaatcattagttgaaactgcaaagagggaggaaggagacttgcttaacatcataaaatctaaggagaatgaggtcaaaacattgtctagtgagaagcaaactattgaagaggagagagataacctgaagatgtcagttgtagacatgaagaaggagatggaagatctgagcaatcagctcaaagatacagtggataaatgcagcgtcatggcatcagaactagagaagtccctgaaggctgagaaagaagtgcagaccttgtttgaagaaaaccagaacctgaagaaccataacttgatgctgtcggtggagcatgataacctgaaagcacttcatcataacttagatattgagtgctgtcaactgaaggcaaccattgcagaaaccaaagctgaaaatgaatcattgaccacagaaaatcattcagctgaaagaaaactccagcaattgagggtagaaatagatggcttgatggctgagaccacagtgataatgaacaatctggacaaggaacgtagtactgcagcagaagaaaaagaaaggctaacatcagaaaattctgtatacatgagtgagttagaggaggcacaatctaatgttaaggatctagaaaaggaactggagtcaacaaaaagtgttctcaataatcgtattgcggagctatgtaaggagaagaattctaccacatcagagatagaacggctagaggcttctttgatgaatcatcagaacgatctgtcacaacaacttgataggatttcagatatgcagaagactactgaaaacctggagctggcaaattctaacctgcataatgagattgtaaaagtacaaggacaaaagaatgaagctgttgcttctatagttaatctcgagagcatgttagaacagcaagtacaagagattgcaaatcttcaggaggccaacaaagaactcaaagcagcaaagactgatctacataatgaggttatgttacttcaacaggagaaaattgtagcactgactcagttacaagaatatgaggctcaaatcaagaatcttcgaattgacttggaacagcagtgcaaccaaatttcagttatgcagcaagcaaatgaagaaacacaggataaaaattctagcttgcacaagcaactggaagaaactaggattcatctgcaagaggagatcattgcattacaaggagagaaggaagaggccatcagtagcttacagcagtcaaatgattcactcaagaccctagaagtccagttagagcagcaaagagaacaaatttctgttctgcagcttgctcatgaagacttgcaaaatagcaattccaacctagagatgcaattggaagaggcgaaggttagtcaccatgctgaaattctagcattacaagatgaaaagaacaagattatttcagagttgcagcagtcagatggttgtatcaagaaccttagatttgagttggagcaaggaaaagagcaaacctcaatcttgcttcatgctaatgaagatatgaagaataacatttctgtcttggacaagcaattggaagaggtcaggagcagtttgcatgctgaaattgcagaagtacgtgcagagaaggagacagctctatcagagttacatatgtctcagacttccatcaggaacttagagagtgtggtagaaaagcaaactgagaacattttaactctagaaaaagctaatgataagttaaacaataaaatatgtatcttgacagagcaagtagaacaagccaaggctgagctgcataaggaggtagcggcaatacaagaagagaaggatacagcactaacacaattaagacagtcagagttttcaatacaagatcttgagaatgaggtgacacgactgaaagacgaactttcaattcagctggaaaaaaattccaccttggacaagcaatttgaagaattcaagagcaagctgcatgctgaaattttagacctacgcgcagagaaggacacatctctattggagttacagacatctcaggattctgtaaggaatcttgagattctggttgaaaagcaaactgagaacatttcaactctgcaccaagctaatgatgagttacagaagaacatctacactttgactgagcaatcacaacaagccaaggaggagatgcaggatgagttgaaggcaatacaagaagagaaggatacagtgctaacacaactgaagcagtcagagacttcagtacaaaatctagaggatgaggtgacacgactgaaagaggaactttccgtccagctagaaaacaattccaccttggacaagcagtttgcagaagctaggagcaatctgcatgctgaaatttcagacctacgtgcagagaagggcacatctctactggagttacagatgtctcaggcttctgtcaggaatcttgagattttggtcggaaagcaaactgagaacatttcaactctacagcaagctaatgaagagttacaaaagaacatctacactttgactgagcaatcacaacaggtcaaggtggagatgcaaagtgatttgaaggcaatacaagaagagaagaatgcggtgctatcacaactgaagcagtcagaaacttcagtacaaaatcttgagaatgaggtgatacgactgaaagaggagctttctgtccagctagaaaacaattccaccttggacaagcagtttgaagaagccaggagcaatctgcatgctgaaatttcagagctacgtgcagataagaacacatctctattgaaattacagacgtctcaggattctgtcaggaatcttgagattgtggttgaaaagcaaactgagaacatttcaactctacagcaagctaatgatgagttacagaagaacatctacactttgacggagcaatcacaacgagacaaggcggagatgcaggatgagttgaaggcaatacaagaagataaggatgcagtgctaacacaactgaagcagtcagagacttcagtacaaaatctagaggatgagttgacacgactgaaagaggagctttccgtccagctagaaaacaattccaccttggacaagcagtttgcagaagccaggagcaatctgcatgctgaaatttcagacctacatacagagaaggacacatctctacgggaattacagacgtctcaggcttgtgtcaggaatcttgagattgtggttgaaaagcaaactgagaacatttcaactctacagcaagctaatgatgaattacagaagaatgtctatactttgactgagcaatcacagcaagccaaggtggagatgcaggatgagttgaagtcaatacaagaagagaaggatgcagcgctaacacaactgaagctgtcagagacttcagtacaaaatcttgagaatgaggtgacacgactgaaatgggagttctccgtccagctagaaaacaattccaccttggacaagcagttggaggaggcaatgttgaaagtgtctagcctacatgagaatcttgagaaggcccaagctgaagcagcttgtcaacttgatggcatgagtacaaaaaccaaagatctagaggagacaatcaatcaattgtcttctcaaaagactaagttggagaaggatgtgaaaattatgattgaagcatgcacagaaaacatgtcatgtttggcaggatttgaagatagagttacacaaaaaatttcagatcaggaggcaggactgaaggttctccaccagagccttggaggggctgttggtagctgtcagaggcttcagtatgcatatgatgaggtgtccacaagggcatcacatcttgagatacttaagaggagtcagatggagcagattgatcagctagagcagaaaaacacagaaactgtggagaaacatcggcttctggaagaggaaaagttatctgcaaataaggagaatattaagctacaaaagcatgtccaagaccttgaagttcagctccagctagcaaagcagaagcttaaagttactgaggcagaaagcaaatgcaaagaagagagatatgaagcgtcagtggaagcactgcgggcagagatctgtcatcttgaacaattagtacagcagttttcagggagagtcagcttgctggaaggaactctcatgcaggttaaaggacatgctgagtcagtggtctgtaaatgggctgacaaattggatgagctagaaacaatctgcagtcagaattttgtgctcttcattgaccgctcatctgcatgtagtgacgagcttaaaatcctgaggaagaaggtacatgatcatcttaatgaacagaaggaacttgccaatgcgaacaacgagctggctattaggttcaaagagaaagaaatggtggtgtcagaaatggtgaagagtgctgctgaggcacagacaaagatgctccagctccagaagacggtggacgagaaagaagacgagctagcagctagagtgcaggagaagagagaagccatcaagcaactgagcgacaccattgtttaccacaagaactatagcgatgacctggtgcgctacatccgcagtcagagtcgccctcgcctcccgttctgcctttaaatctgaaagtcaatgaaagatgtaaaggcttaatctagctgtgattttttttttttgcagtaaggagaccattgcaatttttcttatgtatcatatatagggctcgaatactttctggaggtagccatatattcagtggcttgtgtattctattcgctactaaggggactgctgtagtaattgatttattcgttttgccttatcttttttatcggatcggtgaatatactgcctgagactgcgaaggaaggctcaagaaat

SEQ ID NO: 209011 - DNA, 230 bp, Zea Mays
gcgtgggcaaggcatgacagtgcgacaagagagaaactaacggagagctctgttcgttctgctgattgcttatgattcgtggcggtagctgggagagcttgggactggccagacgcgaccaactcaccactgtaataagacgacttttatacatagctgacagtacgcaacctcagttcaggcgcaaggtaattgttttgcatgtctatgacgagcatcgtcacttttgg

SEQ ID NO: 209012 - DNA, 710 bp, Zea Mays
gttggtttcgattcaattagcctgatttgatgtccaggtttgatttcgattcaactgaaccggtttaatttgatggggttgtagtacctttttttttcttatcacaagagacagagcatgcatgcggcatgcctccatggccgtggctttttttcctgctttacacactgccgcctccttatctcctagatcttcacacccatggttttttttccctattttgttctgtggtcttttcagtcatgctggctgggactgctaccgatgctgctgctggtcatgagaagctagctattggccttgtagtaccggagtaaatgattggcgctactagttttttcccctatccccaaatttttcatcttgcagtggtacccttcgccttgggagctgaaagcatggggagatgctgccggccggccggccagtacactgcaacactgagaggttcccaaaggagtcatggacgaggacgactcatggtggtgggtggggtcgatcaagttcttgttgttgggtcgaaaatggagcacggagacgagccatatttagcaaggaaggtttaagtccatacccaagattgggcaaggtggcctatcatgaaaatgatgatgatggccgcaaaggtcaataagtactatgaaaggagaaaagcataatacgaaggcacgatgcaaaggtataagctaaggctagtacagacaagcaag

SEQ ID NO: 209013 - DNA, 3566 bp, Zea Mays
aggacgctgaccctaacgcacccgtggaaaggaatataccgacggcctctcgcttccacccatccggtcgcgtttcccccgttccaaattcgccaacccacaccaccttcctctctctcgccgccgccctcagatcagatcaaagcggaacaccaactcctcctcttcctcctcctcgtagggtttggtgtgttcacctcacctctcgcggcgacagcgaagccttctcttctcttcccctccgctccgctccgctccgctccgctcggtgtttcagccatgatgtcgcggtcgtacaccaacctgctcgacctcgcggagggcaacttcgcggcgctgggcccggccgccggcgccggcggcggcgggcggcagaggcaggggtcgttcgggctgaggcggatgtcgcgggtgatgacggtgccggggacgctctcggagctcgacggcgaggacgagtcggagccggcggccaccagcagcgtcgcctccgacgcgccctcgtccgtggcggcggaccgcctcatagtggtctccaaccagctgcccatcgtcgcgcgccggaggcccgacggccgaggatggtccttcgtgtgggacgacgactcgcttctgctccagctccgcgacggcattcccgaggatatggaggtgctcttcgtcggctccctccgcgccgacgtccccgtagccgagcaggacgaggtgtcgcaggcgttgctcgaccggttccgctgcgcgccggtcttcctccctgaccgcctcaacgaccgcttctaccacggcttctgcaagcgccaactctggcctctgttccactacatgctccccttctcctcatccgcgtccgccgccggcaccacctcttcctcctccgccgccacttgcaacggtcgcttcgaccgcagcgcttgggaggcgtacgtgctcgccaacaagttcttcttcgagaaggtcgtcgaggcacttcctctcgtgctgcagtaggatgctgggaattgaataccagtcaaagcgtgggtacattgaattggattactttggccgcactgtcgggatcaaaatcatgccagtgggagttcatatgggtcaattggagttgggtctgcgcttgcctgatagggaatggaggctttctgagcttcaacggcagtttcaggggaaaactgtcttgcttggtgtggatgatatggatatctttaaggggatcaatttgaagcttctcgcctttgagaacatgttgaggacacatcccaagtggcaggggagagcagtgttagtgcagattgctaacccagcccgtggaaggggtaaagatctggaagccatccaggctgagattgaggagagctgccagcggatcaatggagactttggccagtcagggtatagccctgttgttttcatcggccgtgatgtgtcaagtgttgagaagatcgcctattatacgatagcggaatgtgtggtggtcactgctgtgagggatgggatgaacttgacaccgtatgaatacgttgtctgtaggcagggtgcaccaggatctcagtcggtatcagaggtgagtgggccaaagaagagcatgctggttgtgtcagagtttattggctgctcaccgtcactgagcggtgctattagggttaacccatggaatatagaggcaaccgcagaggcgatgaatgaggccatttcaatgccagaacaggaaaaacagttgaggcatgagaaacattaccgttatgtcaggagccatgacgtcgcttattggtcaaagagcttcatcatagacttggaaagggtttgtaaggatcacttcaagaggacttgttggggcatagggttgggttttggtttcagggtggtggccttggaccctcatttcacaaagcttaacatggattcaatcattaatgcttatgagctttcagagagcagggctatattgctcgattatgatggaactctggttccccaaacttccctcaacaaggaacctagtccacaggttttgagcatcatcaataccctttgctcagatagtagaaacatcgtttttcttgtcagtggtcgagacaaagataccttgggaaagtggttctcctcatgtccaagattggggattgcagctgaacatggttacttcttgaggtggtctagagaagaagagtggcaaacatgcactcaggcattggacttcggatggatgcaaatggcgaagccagtgatgaatttatatacagaagcaactgatggatcctacattgaggccaaggaaagtgccttggtgtggcaccatcaggatgctgacctaggctttggatcctcacaggcaaaggagatgcttgatcacctggaaagtgtactagcaaatgaaccagtctctgtcaagagtggccagttcattgttgaagtcaaaccacagggaataagcaagggaatagttgccgagaggatacttgcatcagtgaaggagagaggaaagcaggctgatttcttattgtgcatcggcgatgataggtctgatgaggacatgtttgaaaatattgctgatatcattgggaggaatttggttgctccaagaacagcactgtttgcgtgcactgtgggacaaaaaccaagcaaagccaaattctacctggatgatacattcgaagtggtcactatgctgagcgcactggcagatgccacaggtcctgaactggagactgattcggctgatgaatctgtcgcatatatctcatcacttgatattggtgacgaacaatcagaatccagtgataaaccagttgaagggtcttagccagttttctcttgcgttttcagaacatgatgattgtttcaatagtcaattctattctacacaattttctgatgggaactcaacgactaacaactggttctacgaatgctccagagtgaagcttctcaatctgctgtgctccaagttctccagttgggcaagatagtacagtctgttgctccaaggcgtagatccatatgttcatagctgacttacttggcacgttctttcactttctcattcctggttgaattaaaatgaaaacctcacagaagacaaagggagcgctgtttggctcattggctgaagtaatctggggggaggtataggagtggcgtatgtgaaaggagcctgtgcgcaggttgtgatatgattccttattaacacgacgttacaaagtggtgtcacttcttgaactaccagtagtaacaatcccaagagtgaggttcgaattgattaattaattgcttcaaagccggatctcggatggttttgctccaacgttttcccctcgtgcggttttttttaataaattttctgggtttacgttgaaagatgccttggaagatagcatatttttaggcctgtctatcagttctgatgaccactgccaatcagcgctggatgcttggcgattgtgtaccttaacacgctaagagcatctccaataatattaatccaaataagagggtattggtgatttcacaattagtgttttttttttgtaaatattagggaaggtgctcaataatccttcacaatatataag

SEQ ID NO: 209014 - DNA, 3512 bp, Zea Mays
ggacgctgaccctaacgcacccgtggaaaggaatataccgacggcctctcgcttccacccatccggtcgcgtttcccccgttccaaattcgccaacccacaccaccttcctctctctcgccgccgccctcagatcagatcaaagcggaacaccaactcctcctcttcctcctcctcgtagggtttggtgtgttcacctcacctctcgcggcgacagcgaagccttctcttctcttcccctccgctccgctccgctccgctccgctcggtgtttcagccatgatgtcgcggtcgtacaccaacctgctcgacctcgcggagggcaacttcgcggcgctgggcccggccgccggcgccggcggcggcgggcggcagaggcaggggtcgttcgggctgaggcggatgtcgcgggtgatgacggtgccggggacgctctcggagctcgacggcgaggacgagtcggagccggcggccaccagcagcgtcgcctccgacgcgccctcgtccgtggcggcggaccgcctcatagtggtctccaaccagctgcccatcgtcgcgcgccggaggcccgacggccgaggatggtccttcgtgtgggacgacgactcgcttctgctccagctccgcgacggcattcccgaggatatggaggtgctcttcgtcggctccctccgcgccgacgtccccgtagccgagcaggacgaggtgtcgcaggcgttgctcgaccggttccgctgcgcgccggtcttcctccctgaccgcctcaacgaccgcttctaccacggcttctgcaagcgccaactctggcctctgttccactacatgctccccttctcctcatccgcgtccgccgccggcaccacctcttcctcctccgccgccacttgcaacggtcgcttcgaccgcagcgcttgggaggcgtacgtgctcgccaacaagttcttcttcgagaaggtcgtcgaggtaatcaacccggaggatgactacgtttgggttcacgactaccatctcatggcgctgcctaccttcctccgccgctgcttcaaccgcctccgcatcggattcttcctccacagccccttcccctcgtccgagatctaccgcaccctccctgttcgggaggagatactcaaggcgctgctcaactgtgacctaattggcttccacacttttgattacgccaggcacttcctctcgtgctgcagtaggatgctgggaattgaataccagtcaaagcgtgggtacattgaattggattactttggccgcactgtcgggatcaaaatcatgccagtgggagttcatatgggtcaattggagttgggtctgcgcttgcctgatagggaatggaggctttctgagcttcaacggcagtttcaggggaaaactgtcttgcttggtgtggatgatatggatatctttaaggggatcaatttgaagcttctcgcctttgagaacatgttgaggacacatcccaagtggcaggggagagcagtgttagtgcagattgctaacccagcccgtggaaggggtaaagatctggaagccatccaggctgagattgaggagagctgccagcggatcaatggagactttggccagtcagggtatagccctgttgttttcatcggccgtgatgtgtcaagtgttgagaagatcgcctattatacgatagcggaatgtgtggtggtcactgctgtgagggatgggatgaacttgacaccgtatgaatacgttgtctgtaggcagggtgcaccaggatctcagtcggtatcagaggtgagtgggccaaagaagagcatgctggttgtgtcagagtttattggctgctcaccgtcactgagcggtgctattagggttaacccatggaatatagaggcaaccgcagaggcgatgaatgaggccatttcaatgccagaacaggaaaaacagttgaggcatgagaaacattaccgttatgtcaggagccatgacgtcgcttattggtcaaagagcttcatcatagacttggaaagggtttgtaaggatcacttcaagaggacttgttggggcatagggttgggttttggtttcagggtggtggccttggaccctcatttcacaaagcttaacatggattcaatcattaatgcttatgagctttcagagagcagggctatattgctcgattatgatggaactctggttccccaaacttccctcaacaaggaacctagtccacaggttttgagcatcatcaataccctttgctcagatagtagaaacatcgtttttcttgtcagtggtcgagacaaagataccttgggaaagtggttctcctcatgtccaagattggggattgcagctgaacatggttacttcttgagggaataagcaagggaatagttgccgagaggatacttgcatcagtgaaggagagaggaaagcaggctgatttcttattgtgcatcggcgatgataggtctgatgaggacatgtttgaaaatattgctgatatcattgggaggaatttggttgctccaagaacagcactgtttgcgtgcactgtgggacaaaaaccaagcaaagccaaattctacctggatgatacattcgaagtggtcactatgctgagcgcactggcagatgccacaggtcctgaactggagactgattcggctgatgaatctgtcgcatatatctcatcacttgatattggtgacgaacaatcagaatccagtgataaaccagttgaagggtcttagccagttttctcttgcgttttcagaacatgatgattgtttcaatagtcaattctattctacacaattttctgatgggaactcaacgactaacaactggttctacgaatgctccagagtgaagcttctcaatctgctgtgctccaagttctccagttgggcaagatagtacagtctgttgctccaaggcgtagatccatatgttcatagctgacttacttggcacgttctttcactttctcattcctggttgaattaaaatgaaaacctcacagaagacaaagggagcgctgtttggctcattggctgaagtaatctggggggaggtataggagtggcgtatgtgaaaggagcctgtgcgcaggttgtgatatgattccttattaacacgacgttacaaagtggtgtcacttcttgaactaccagtagtaacaatcccaagagtgaggttcgaattgattaattaattgcttcaaagccggatctcggatggttttgctccaacgttttcccctcgtgcggttttttttaataaattttctgggtttacgttgaaagatgccttggaagatagcatatttttaggcctgtctatcagttctgatgaccactgccaatcagcgctggatgcttggcgattgtgtaccttaacacgctaagagcatctccaataatattaatccaaataagagggtattggtgatttcacaattagtgttttttttttgtaaatattagggaaggtgctcaataatccttcacaatatataag

SEQ ID NO: 209015 - DNA, 2650 bp, Zea Mays
agaagagttggtgtgaattgagttatacattttcgctactcaagcacaagcttaaggcccctatgattctatagggtatcgcatacagagcgaccggaaagtccctatctgcagtgtgcatccaatggaacaagcaactattcagtgcctcggttgtctcaagtcaaaaatacctgttgctaagagctaccactgttcagccaaatgcttctctgatgcatggcagcaccacaaagttttgcatgaacgagctagtagtgctctaaatgaaaatggggctgaagaagaggagttatttggcagatttggcagtggtggttctggggttctaagtactgctggatctggttctttgtcaaattttggacaaagccctggtgttaataatggacctgtgcctttctatccctcaggtaccgataaaaattctggagaaacttggtttgaagttggacgctcacgaacatatacaccaactgctgatgatattggacatgcactaaagtttgagtgcgtagctgtggattcagaaaaaaagtctccaattggaccctcaacctcaatcatgacatcacgtgtaattcccgcgccaactcctacccctcgccgccttatccaagtgaatggggatgttttaggtcacttggatttagacagccaaatttcgtccttagggacattcactgtgttatcctacaatattcttgctgatgcatatgctacaactgatgcatatagctactgcccaacatgggcacttacctggaattatagaagacaaaatttgctgcgtgaaattattggttatcatgctgatatcatctgtctacaggaggtacaagtaaaccatttcgaagattttttttcacctgagcttgacaaacatggatatcaggcgctttacaagaaaaggacaacagaggtgtattctggaaatcctatggccatagatggatgtgctactttttttcgtagagacaagttttcacatgttaaaaaatacgaggttgagttcaataaggctgcacagtctttaacagatgctattattcctgctgcccagaaaagagtggctttaagtcgattgattaaagacaacattgcactaattgcggttttagaagccaaatttggtaatcatggagctgaaaatcctggtaaaagacagctcctttgtgtggcaaatacacatataaatgtccatcaagacctaaaagatgtgaagctatgggaggttcataccctcctaaaaggattggagaagatagctgtcagtgcagacattcctatgttggtctgtggagatttcaactcaacccctgggagttctccacatgcgcttctggcaatgggcaaagttgatcagcatcatccagatctggcaatagacccccttggaattttacgccctccaagcaagttgaatcaccagcttcctttggtcagtgcatactctgcatttgcaagaatggtaggtgttggctatgatttggagcatcagcggaggacagaccctgcaacaaatgaaccactcttcacaaattgcacaagagattttactggaactattgattacatattttacacagcggactcattgacagtggattcattattggaacttttggatgaagaaagcttaagaaaagacacagctctcccatcccctgaatggtcatcagatcacatagcactcttagctgagttccggtgcaagccaagaatcagacgttgacacattagctctccaggtcttgtagaaaaggtcattgtcatcatccttggtggtggaacaccgttccatgtgggaacttgaggcagggcgggaacgcgggctctcggggaagcaaacaaccaagcagcctcaggaaggggaagaggcttgtaacatttgatttttaccctcctacatttgagctcatgatacttaagatgcccctgtgtaccattactttctatagaagaaaaatacttgagagaaatatttgaagggttataaggcccgtttttcttttttgttcactgcggtcgcgttcgattccttttggctgtgtccatgctcgctgcctacaatacgcagccacgcaggagtcctcgacttctgtaaattctgtaccaatgtaataccagttccagtttttgttttccacaatgttgctggcgctggctcaggcactcattgctgttagatgtggtgcctttttgttctatacttgactggaatgtggccgtatggttgttggctccgtgacctgttacgagttggtccgagccagtcctctggccaagagccgatgctccttggtttcttcgaccaaactggcaccaagcacgttggcgattaacgcaaagttcagatgttggacgtgctggtaacctctaaggggctgctttgggagtaagaatactgcagagaggattagaggggctaaaattcacttgctatttaattttgaatagcaaggagattttagcacctccaatctctttcgatgttctcttctctaacaagtgttaagataatggttggttttagagctagttaggatagaacggctccatcctaaaattttgtggagctaaatggttcatcatttgattttttttagaatcactctgttttatatagaatcaattcaaacaacgtgca

SEQ ID NO: 209016 - DNA, 3308 bp, Zea Mays
cccggcccggcccacccagtcatagccaactacacgacacaacctgccttccttggttcctccaccccgtcctcccctgtcccgtcgcgtcagccactcgccgcggccaactaccgccgccgctgttgcagccgcccatctgcttccatcgcgtcgcggaggccgctcgcttcgccgccgcacgctccgctcttccggtgccctcctccgggaccctcggccacgccgcgtcgccttaaaccctagatctgcgctccccgcccccgcgctggccgcggccgcgtactgacgccggcacgctgccgatctccatacgtcgctcgatcccaggtttagctgcttcgaatttagataagtttcttccatgcatcgtgttggaagtgctggtaacacggctggctcgactcgaccgagaaaggagaagcgcttcacatatgtgctcaatgatgctgatgataaaaagcattgtgcaggaatcaattgcatggcttatctaaatggttctacatttagtacaagtgattacctttttagcgggagtcgtgatggtaccttgaaaagatgggaattaaataatggggatgcaagtttctcagcaacttttgagtctcatgttgattgggttaatgatgccattatagttggagaaaagcttgtttcctgttcctcagacaccacaataaaggtctggaattgcttctccgatggtgcttgtaccaggactttccgccagcattctgattatgtgatttgtcttgctgctgctgagaagaatagcaatattgtagcctctggtggtcttggtggtgaggtttttgtttgggaccttgatgctgctcttgctcctgtagccaaatctgtggacgcaaaagaagacgaggttcctaatggaaactcagggcctcctttgacaacattgtgcagtgtaaattctagtagcaatattgcttcctctaatagtcaatcacatgggtacagtccaattgctgccaaaggtcacaaagattcagtttacgcattggctatgaatgatacaggaactcttcttctctctggtggcactgaaaaggttgtccgggtgtgggatccgaggacaggttcaaaaaacatgaaattgagggggcacactgacaatatcagggccttacttgttgattctacagggaggtattgcctatcaggatcatctgattcgatgataagactatgggatctaggacaacagcgttgtgttcattcttatgctgtgcatactgattcagtttgggcgcttgcaaccactcattcgtttggtcatgtctacagtggtggaagagaccaatctgtatacctaacagacttatccacaagagagagtgttttactttgcacaaatgaatgccctattctacagttgtctctgcaagatgacacaatatgggtggcaacaactgattcttctgtatatggatggccagctgaagggctcacaccccaaaaggttttccaaaagggtggctcattcttagctgggaatttgtcattctcaagggcaagagcttctttagaaggatcagcacctgtccctgtatacaaagagccatcttttgtcgtcccaggggttccagcaatagttcaacatgaaataatgaataatagaaggcatgtactgacaaaggataccactggttcagtcaaattgtgggagatcacccggggtgctgttattgaagactttggcaaggtttcatttgaggataagaaaaaggagttgtttgagatggtaagcatacctgcttggttcaccatggatgctcgattaggatgcttgtctgtccacctggatactccacaatgcttttctgcagaaatatatgcagttgatctaaatgtttctggagcacaagaagatctcaagattaatttggctcatgataccctttgtggcttgctagttcattggagtaaaagaaagcagaaatctagttcgcatggcttgcctaatggtgatagttcaatagggaaagatgttccgtcaaaagactcgcaccgatcaagaactgaggtggatgacacaactgaaaaccacacaactcatgtgctcccatcatttgagttttctacagtttcacctccatcaattatcacagaaggttctagtggagggccttggagaaagagaattactgatttggatggaaccgaaggtgtggcttttatttacatcctgctgaaggttcgcctgcgccaaacataactcaagggaagcttagtgctccacggatattacgaattcacaaggttgctaactatgtggttgagaaactcgttcttgacaaaccattggatggaggctctgatagtacgtttgttatgggattgagttctgctcaatcacagctctcacagctagatagttcttcgcggcttggactaaagccatggcaaaaaacaaagccatgtattgaggtattgtgcaataaccaggttctatcaccagatatgagtttggctacagtgcgaacatatatatggaagaagccggaagatttgattcttcattatagagtggtccaatcgagatgatcacggcttcagatgtacatgctcacatggttctccagatatgtcccagcatgtccgcacctttagatggtgtggttgaagatgcctttggcttagagaggaagcatcatcttcacagaggaaatattttgctcttgctccgccctccccccggtagctgttcccagaatcgacttgttcgcttctctgtaaagttcctgaccttgccctggtagtaagatgtatcatagcacaggtataaggctctctgctggctgccgagcttgtaaatgtagaagattaggtgcttaataaaagatcgaaaggatatgttttttctttcgtttttctttgacagcatttgtaagaaaaaaaaagaggctgacgctcggcccagatcgtggcgctccgacgtcgattattggatttaaccccgccgatccccttggaggtgtttggttgagaccagggtaagaggtggacgggaacccgggaacaataaagctgtttttgggacatgttgatgtcgggagctactttacctctcatccttcaacaattgttctatatactctatagggctattttagttttttttgttttttgctagcgagaaatcagaaataaatgattgctttgttttgataatcaaagctgttggatcatggtctcatggatgtgtcccctccccactgataatctgatatacattttgatctggacggtgtgtgattcggtggcagctaggacagcgtgtcgcattg

SEQ ID NO: 209017 - DNA, 3296 bp, Zea Mays
cccggcccggcccacccagtcatagccaactacacgacacaacctgccttccttggttcctccaccccgtcctcccctgtcccgtcgcgtcagccactcgccgcggccaactaccgccgccgctgttgcagccgcccatctgcttccatcgcgtcgcggaggccgctcgcttcgccgccgcacgctccgctcttccggtgccctcctccgggaccctcggccacgccgcgtcgccttaaaccctagatctgcgctccccgcccccgcgctggccgcggccgcgtactgacgccggcacgctgccgatctccatacgtcgctcgatcccaggtttagctgcttcgaatttagataagtttcttccatgcatcgtgttggaagtgctggtaacacggctggctcgactcgaccgagaaaggagaagcgcttcacatatgtgctcaatgatgctgatgataaaaagcattgtgcaggaatcaattgcatggcttatctaaatggttctacatttagtacaagtgattacctttttagcgggagtcgtgatggtaccttgaaaagatgggaattaaataatggggatgcaagtttctcagcaacttttgagtctcatgttgattgggttaatgatgccattatagttggagaaaagcttgtttcctgttcctcagacaccacaataaaggtctggaattgcttctccgatggtgcttgtaccaggactttccgccagcattctgattatgtgatttgtcttgctgctgctgagaagaatccaaatctgtggacgcaaaagaagacgaggttcctaatggaaactcagggcctcctttgacaacattgtgcagtgtaaattctagtagcaatattgcttcctctaatagtcaatcacatgggtacagtccaattgctgccaaaggtcacaaagattcagtttacgcattggctatgaatgatacaggaactcttcttctctctggtggcactgaaaaggttgtccgggtgtgggatccgaggacaggttcaaaaaacatgaaattgagggggcacactgacaatatcagggccttacttgttgattctacagggaggtattgcctatcaggatcatctgattcgatgataagactatgggatctaggacaacagcgttgtgttcattcttatgctgtgcatactgattcagtttgggcgcttgcaaccactcattcgtttggtcatgtctacagtggtggaagagaccaatctgtatacctaacagacttatccacaagagagagtgttttactttgcacaaatgaatgccctattctacagttgtctctgcaagatgacacaatatgggtggcaacaactgattcttctgtatatggatggccagctgaagggctcacaccccaaaaggttttccaaaagggtggctcattcttagctgggaatttgtcattctcaagggcaagagcttctttagaaggatcagcacctgtccctgtatacaaagagccatcttttgtcgtcccaggggttccagcaatagttcaacatgaaataatgaataatagaaggcatgtactgacaaaggataccactggttcagtcaaattgtgggagatcacccggggtgctgttattgaagactttggcaaggtttcatttgaggataagaaaaaggagttgtttgagatggtaagcatacctgcttggttcaccatggatgctcgattaggatgcttgtctgtccacctggatactccacaatgcttttctgcagaaatatatgcagttgatctaaatgtttctggagcacaagaagatctcaagattaatttggctcatgataccctttgtggcttgctagttcattggagtaaaagaaagcagaaatctagttcgcatggcttgcctaatggtgatagttcaatagggaaagatgttccgtcaaaagactcgcaccgatcaagaactgaggtggatgacacaactgaaaaccacacaactcatgtgctcccatcatttgagttttctacagtttcacctccatcaattatcacagaaggttctagtggagggccttggagaaagagaattactgatttggatggaaccgaaggtgatctaccttggtggtgtgtggactgtgttactcacaatcgatatccaaaggaaaatacaaagtgtggcttttatttacatcctgctgaaggttcgcctgcgccaaacataactcaagggaagcttagtgctccacggatattacgaattcacaaggttgctaactatgtggttgagaaactcgttcttgacaaaccattggatggaggctctgatagtacgtttgttatgggattgagttctgctcaatcacagctctcacagctagatagttcttcgcggcttggactaaagccatggcaaaaaacaaagccatgtattgaggtattgtgcaataaccaggttctatcaccagatatgagtttggctacagtgcgaacatatatatggaagaagccggaagatttgattcttcattatagagtggtccaatcgagatgatcacggcttcagatgtacatgctcacatggttctccagatatgtcccagcatgtccgcacctttagatggtgtggttgaagatgcctttggcttagagaggaagcatcatcttcacagaggaaatattttgctcttgctccgccctccccccggtagctgttcccagaatcgacttgttcgcttctctgtaaagttcctgaccttgccctggtagtaagatgtatcatagcacaggtataaggctctctgctggctgccgagcttgtaaatgtagaagattaggtgcttaataaaagatcgaaaggatatgttttttctttcgtttttctttgacagcatttgtaagaaaaaaaaagaggctgacgctcggcccagatcgtggcgctccgacgtcgattattggatttaaccccgccgatccccttggaggtgtttggttgagaccagggtaagaggtggacgggaacccgggaacaataaagctgtttttgggacatgttgatgtcgggagctactttacctctcatccttcaacaattgttctatatactctatagggctattttagttttttttgttttttgctagcgagaaatcagaaataaatgattgctttgttttgataatcaaagctgttggatcatggtctcatggatgtgtcccctccccactgataatctgatatacattttgatctggacggtgtgtgattcggtggcagctaggacagcgtgtcgcattg

SEQ ID NO: 209018 - DNA, 2647 bp, Zea Mays
tgcctcttgtttctaaaccttggttttgcacatcaatgcatcaatcagtgttattaaaactacgtttaaacgtcaaaactctaatcagagattgaaaccgtgttttggcgttctaaactgtaaaacacagtttcatgcgttttagaccattatctacttttgggcccagtctgttagttaattttgggtccaatctggcccagtctccacacgcttgccctactcccctaccctgaagcccaatgactagtagcacactgctctgctctctatcgtcaccgccgcctgaaggtattgttgccttgttcctgtcgtctgctgcacctgtgcgccctctccctccgcgccgtgccgctcctctccctccgcgctgccctctctctccatgcctctgtttgctagcagccggtagccagcacccagcaatcgactcctctcatcctctctgctctctgttttggtattgcctatcaggatcatctgattcgatgataagactatgggatctaggacaacagcgttgtgttcattcttatgctgtgcatactgattcagtttgggcgcttgcaaccactcattcgtttggtcatgtctacagtggtggaagagaccaatctgtatacctaacagacttatccacaagagagagtgttttactttgcacaaatgaatgccctattctacagttgtctctgcaagatgacacaatatgggtggcaacaactgattcttctgtatatggatggccagctgaagggctcacaccccaaaaggttttccaaaagggtggctcattcttagctgggaatttgtcattctcaagggcaagagcttctttagaaggatcagcacctgtccctgtatacaaagagccatcttttgtcgtcccaggggttccagcaatagttcaacatgaaataatgaataatagaaggcatgtactgacaaaggataccactggttcagtcaaattgtgggagatcacccggggtgctgttattgaagactttggcaaggtttcatttgaggataagaaaaaggagttgtttgagatggtaagcatacctgcttggttcaccatggatgctcgattaggatgcttgtctgtccacctggatactccacaatgcttttctgcagaaatatatgcagttgatctaaatgtttctggagcacaagaagatctcaagattaatttggctcatgataccctttgtggcttgctagttcattggagtaaaagaaagcagaaatctagttcgcatggcttgcctaatggtgatagttcaatagggaaagatgttccgtcaaaagactcgcaccgatcaagaactgaggtggatgacacaactgaaaaccacacaactcatgtgctcccatcatttgagttttctacagtttcacctccatcaattatcacagaaggttctagtggagggccttggagaaagagaattactgatttggatggaaccgaaggtgatctaccttggtggtgtgtggactgtgttactcacaatcgatatccaaaggaaaatacaaagtgtggcttttatttacatcctgctgaaggttcgcctgcgccaaacataactcaagggaagcttagtgctccacggatattacgaattcacaaggttgctaactatgtggttgagaaactcgttcttgacaaaccattggatggaggctctgatagtacgtttgttatgggattgagttctgctcaatcacagctctcacagctagatagttcttcgcggcttggactaaagccatggcaaaaaacaaagccatgtattgaggttctatcaccagatatgagtttggctacagtgcgaacatatatatggaagaagccggaagatttgattcttcattatagagtggtccaatcgagatgatcacggcttcagatgtacatgctcacatggttctccagatatgtcccagcatgtccgcacctttagatggtgtggttgaagatgcctttggcttagagaggaagcatcatcttcacagaggaaatattttgctcttgctccgccctccccccggtagctgttcccagaatcgacttgttcgcttctctgtaaagttcctgaccttgccctggtagtaagatgtatcatagcacaggtataaggctctctgctggctgccgagcttgtaaatgtagaagattaggtgcttaataaaagatcgaaaggatatgttttttctttcgtttttctttgacagcatttgtaagaaaaaaaaagaggctgacgctcggcccagatcgtggcgctccgacgtcgattattggatttaaccccgccgatccccttggaggtgtttggttgagaccagggtaagaggtggacgggaacccgggaacaataaagctgtttttgggacatgttgatgtcgggagctactttacctctcatccttcaacaattgttctatatactctatagggctattttagttttttttgttttttgctagcgagaaatcagaaataaatgattgctttgttttgataatcaaagctgttggatcatggtctcatggatgtgtcccctccccactgataatctgatatacattttgatctggacggtgtgtgattcggtggcagctaggacagcgtgtcgcattg

SEQ ID NO: 209019 - DNA, 2418 bp, Zea Mays
cttgctatccaagttgtgtaatttgccgtgttatccactttcatgttagtgcaaatgagttgatgaggaaatggcttgtacgcttatgtgacacattatataactatgatggttacaacaaagtggcgtacctggaagcagcagttttggatggtcaaattactgattttctggatgataacactgagtgatctctctcactggcctgggtgttggggtgtaaatcatgtcagttttcgtcaaaccacttactaatcgtttttaacaatgttttcaggtattgcctatcaggatcatctgattcgatgataagactatgggatctaggacaacagcgttgtgttcattcttatgctgtgcatactgattcagtttgggcgcttgcaaccactcattcgtttggtcatgtctacagtggtggaagagaccaatctgtatacctaacagacttatccacaagagagagtgttttactttgcacaaatgaatgccctattctacagttgtctctgcaagatgacacaatatgggtggcaacaactgattcttctgtatatggatggccagctgaagggctcacaccccaaaaggttttccaaaagggtggctcattcttagctgggaatttgtcattctcaagggcaagagcttctttagaaggatcagcacctgtccctgtatacaaagagccatcttttgtcgtcccaggggttccagcaatagttcaacatgaaataatgaataatagaaggcatgtactgacaaaggataccactggttcagtcaaattgtgggagatcacccggggtgctgttattgaagactttggcaaggtttcatttgaggataagaaaaaggagttgtttgagatggtaagcatacctgcttggttcaccatggatgctcgattaggatgcttgtctgtccacctggatactccacaatgcttttctgcagaaatatatgcagttgatctaaatgtttctggagcacaagaagatctcaagattaatttggctcatgataccctttgtggcttgctagttcattggagtaaaagaaagcagaaatctagttcgcatggcttgcctaatggtgatagttcaatagggaaagatgttccgtcaaaagactcgcaccgatcaagaactgaggtggatgacacaactgaaaaccacacaactcatgtgctcccatcatttgagttttctacagtttcacctccatcaattatcacagaaggttctagtggagggccttggagaaagagaattactgatttggatggaaccgaaggtgtggcttttatttacatcctgctgaaggttcgcctgcgccaaacataactcaagggaagcttagtgctccacggatattacgaattcacaaggttgctaactatgtggttgagaaactcgttcttgacaaaccattggatggaggctctgatagtacgtttgttatgggattgagttctgctcaatcacagctctcacagctagatagttcttcgcggcttggactaaagccatggcaaaaaacaaagccatgtattgaggtattgtgcaataaccaggttctatcaccagatatgagtttggctacagtgcgaacatatatatggaagaagccggaagatttgattcttcattatagagtggtccaatcgagatgatcacggcttcagatgtacatgctcacatggttctccagatatgtcccagcatgtccgcacctttagatggtgtggttgaagatgcctttggcttagagaggaagcatcatcttcacagaggaaatattttgctcttgctccgccctccccccggtagctgttcccagaatcgacttgttcgcttctctgtaaagttcctgaccttgccctggtagtaagatgtatcatagcacaggtataaggctctctgctggctgccgagcttgtaaatgtagaagattaggtgcttaataaaagatcgaaaggatatgttttttctttcgtttttctttgacagcatttgtaagaaaaaaaaagaggctgacgctcggcccagatcgtggcgctccgacgtcgattattggatttaaccccgccgatccccttggaggtgtttggttgagaccagggtaagaggtggacgggaacccgggaacaataaagctgtttttgggacatgttgatgtcgggagctactttacctctcatccttcaacaattgttctatatactctatagggctattttagttttttttgttttttgctagcgagaaatcagaaataaatgattgctttgttttgataatcaaagctgttggatcatggtctcatggatgtgtcccctccccactgataatctgatatacattttgatctggacggtgtgtgattcggtggcagctaggacagcgtgtcgcattg

SEQ ID NO: 209020 - DNA, 1764 bp, Zea Mays
aactaatctaggaaaacttggaagcggacaggatcatcgccaaatcgaaggagattgaacgaagcagcccagccaaattcccctcgccgccccgtcccttctcgacatttcttgtcccgtcgtcgcctcaatctcgaagcctctccggcggagccgcctcatcatcgttccgaaggcctccaaccaaacatcctctagggtttccgcatcgtccgtcgcgatgggcttcacgaagcggtcgccccagcatcccgcctccccagccggcggcgaggtcggcgcccagacggcagggaaggtcacaccagtgccggcggcgccggagtcggcgcccgcggcggtggtgccgaggcctccggacgtggcgcccttcctgaccaaggtctacgacatggtctccgacccggccaccgacgcggtcatctcctggagcgccgccggcggcagtttcgtgatctgggactcgcacgctttcgagcgcgacctgctgccgcggcacttcaagcacaatcacttcaccagcttcatacgccagctcaacacctacggatttcataaagttgatccagatagatgggaatgggccaatgaaggctttgttaagggccaaaaacatcttttgaagaccatcaagagaaagaagaaatcctctcaggatgtacctagtgatctgcagtcggtgcctgtcaaaactgcacctggcactgagaatatcgagataggaaaatatggaggccttgaaaaggaggttgagacacttaagagggacaaggcccttctaatgcagcagcttgtagatctacggcagtaccagcaatcatctagcgctgaagtgcagaatttaattcaacgcctccgtgtgatggagcagaaccagcagcagatgatggcacttttggcaattgttgtccagaatccagacttcctgaaccagctcgtgcagcagcagcgcaggagtaactggtggaatgatgatggtaacaggaaaagaaggttccaagctctggaacatggtcctgtagatgaccaagagacttctggtggaggcgcacaaattattcaatatcgtcctcctgttcctgaaacttccaatcagccaataccagcaaatgaagctttctattcaacccctgcacaaccagcttcaagccctgcacttgagatgcccatggatgtagagatggcttcaaacaatgttaatacctttgattcaactggcaatgattttactgacacctctgctctatgtgaatgggatgacatggatatatttggtgatgaacttgagcacattcttcaacagccagagcaggactttcaagtggaccctcctttaacagttgaggattatggttatgatcatccacggttagagcaggactgtcagatggaagcacaacagaattgcaaaaatcctcaatatgctgatgtcataactgaagcatgagcggtggtcccccagaatgttgtccagtaacattagtggatagagatttgtgatgaacagaatcttgagactggcaggttagccaccattgggaacctgaagaccgtcgggattgctcagaattcagtatactaatactaatactaaaaaaaaaatatacagtaacacatgttgactatacatgatttcgttttccttactcgctcgaccaaaggcagccgtacaatgtttttacttttgtccagtttgttgcttcggctagcgaggggtgtggaaaaaggaagggataaggcgcttggttgacccggaccggacgg

SEQ ID NO: 209021 - DNA, 823 bp, Zea Mays
atccgtccaaccatactcacgagaaggaagtgagcctagctcaactggttaggttggaggtgtggtcgtacacccaaccaaccaggttcaagtcttctccagcttgaatttagtatcgctggtaggtgaatcagctcctccagaaatgcttcagaagttgacatatctggctatcagacaccatcctcagattaagcgtgttgacaccgttcgagcatacacctttggggtgctttactttgttgaggttgacattgagcttccagaggacttgccacttaaggaggcacacgccattggagaatctctccaaatcaagattgaggagctacctgaagttgagcgagcattcgttcacctagatttcgaatgtgaccataagccggagcattcaattctcaacaagcttcccagcagccagccttgatccgaacgaatcctgtgtggtagattgtcgtgcagaatctgctgcagttcttgcattggcgtcttgtgctgtatgacaaaactaagagttcaattagttttgtggcggtgagtttaagatcaggcgcatctaagactacgagagatgaaggtgccgaatgcagagatttctcgagtgtggaaccctttgtggttctgttggtatggtcttcgttttgagcgaaattaagcattttgctgttggcatcatggcatgtgattggcggcgatctagctgtgtgctatcgactacggtgatgtttagacatggtttcgagaaagagagtagatccttgatttctttaagcaaatctcagtgcctttttattttagggctagtttgatatcagtttctaag

SEQ ID NO: 209022 - DNA, 1836 bp, Zea Mays
gaattctgcgctcatagagaaaacaggggagagagagtactatgagaaacaatttgccacattgaggtcctttgaggaagttgactcactagaagaatccaatgaaatcaacgaggatgaggagcttgcggagcaaatccagagtgaatttgctatgaagatatcaaattatgcaaacattgttctcttagcgttgaaggtatacgctacaataaaaagtggatcaattgctatagctgcctcaacactggattcactgcttgatctcatggctggtggtatcctttggttcacacatctgtcaatgaagagcatcaatgtctacaagtaccccattggcaaactgagggtacagcctgtaggcattatcatcttcgctgctgtcatggccactttaggcttccaagtatttattcaggctgttgaaaagctggtagtgaatgaggctccagataaactgaaccaagtgcaattattgtggctatattcaatcatgatctttgcaacaatagtgaaattaggtctgtggctctactgccgaacgtctggtaacaagattgtccgtgcttatgctaaggatcactatttcgatgttgtcacaaatgttgtgggtttggctgctgctgtccttggtgatagattctactggtggattgacccaattggtgcaattgttcttgcagtgtacacgatttcaaactggtctggaacagtgtgggaaaatgcagttttaactgcttatacctgcactcatttacatccgtccaaccatactcacgagaaggaagtgagcctagctcaactggttaggttggaggtgtggtcgtacacccaaccaaccaggttcaagtcttctccagcttgaatttaggtgcctactttctctattttctctttgttgataatgaaaaaccacctactttctcttagctactataaatggattatttttaaccttgaagtggtgctaccgttacaaataaaagttacttgagccaaatgcttgctctggaatcacttcggactatcacctagagcagttgccacatgcagcaccaagattacttgcacgttacaaattggctaggactgacagacaaccttgttattgctatcctccatgtagtatcgctggtaggtgaatcagctcctccagaaatgcttcagaagttgacatatctggctatcagacaccatcctcagattaagcgtgttgacaccgttcgagcatacacctttggggtgctttactttgttgaggttgacattgagcttccagaggacttgccacttaaggaggcacacgccattggagaatctctccaaatcaagattgaggagctacctgaagttgagcgagcattcgttcacctagatttcgaatgtgaccataagccggagcattcaattctcaacaagcttcccagcagccagccttgatccgaacgaatcctgtgtggtagattgtcgtgcagaatctgctgcagttcttgcattggcgtcttgtgctgtatgacaaaactaagagttcaattagttttgtggcggtgagtttaagatcaggcgcatctaagactacgagagatgaaggtgccgaatgcagagatttctcgagtgtggaaccctttgtggttctgttggtatggtcttcgttttgagcgaaattaagcattttgctgttggcatcatggcatgtgattggcggcgatctagctgtgtgctatcgactacggtgatgtttagacatggtttcgagaaagagagtagatccttgatttctttaagcaaatctcagtgcctttttattttagggctagtttgatatcagtttctaag

SEQ ID NO: 209023 - DNA, 685 bp, Zea Mays
tgctgcaagcaggcaacaatggacaagccctgaacttctgctgaatccggtactgatatgccgcaacgaagcagaaaaatgcttgatagagacttcaatcaactccatacgaataagcatgaaggttaagcaggcagatgaattggagaacattcttgccaagaagttccttaggtttttgtcaatgagggcagaggcattccaagtgttgaggagaaaaccggttcagggctatgatatcagtttcctgataacaaactaccattgtgaggacatgcataagcacaagctcatagatttcatcgtgcaatttatggaggatattgacaaggagatcagcgagctgaagctgtcagtaaacactcgtggccggctagtggccactgaattcttgaagcagttcttatgactcggccatggccgtagtcagtgttgattatcatggcctgcaactaagctgccgttctgcaacagctttaagtttttttttatacgacagctcttgtaaatgccttgccaaagatgcattcgtggccctgggccacctgattaacagctgacaattgcagtatcaggacgcacatagcgctctgagattgttcatgtgatcaattcctgtgttttttaattattctttcatttgcaaggccttcattgtttttcaccgactgttggcgttgtggcg

SEQ ID NO: 209024 - DNA, 517 bp, Zea Mays
gccccgtggtcacgcatcaggcctgctgcttgtctcgttcactcctgcgtgatctctctcccttccggcgacgcctgggccaccgccgcggccgccctacgccaggtgcccaggttctcgtccggctcttcgccggcgatgagcacccaccaggccaatacgctgcggttgtacctcacctgcatccggaacactctggaggcggcgatgtgcctccagaatttcccttgccaagaagtcgagaggcacaacaaaccggaggtggagctcaagacaagccctgaacttctgctgaatccggtactgatatgccgcaacgaagcagaaaaatgcttgatagagacttcaatcaactccatacgaataagcatgaaggttaagcaggcagatgaattggagaacattcttgccaagaagttccttaggtttttgtcaatgagggcagaggcattccaagtgttgaggagaaaaccggttcaggcacagggatacatcattgtggacagctggatgatgg

SEQ ID NO: 209025 - DNA, 3718 bp, Zea Mays
gggaatttccggttgccatccgtaacctccacccacctcgcgctctcgctgttctgcaacacgtgggtcagtcgaagcgggctcatctgcactgctgggttgtctaggacacgaccctacatcgcggctcgcgggcgtcagggcgcagatcagccatgccttccatcgagcagttccagcattggatggcaaccaacgtgtgtgctcttgtcttcgtttatccgtgcgtgggttctttcgtctggctggggactcctgcacgccggctctcgtacgaccgccgttctcccggacttcgtcggctcccacttttggaacttctagtctattgtcgccttctagcagagattggtggaagacgacgatgtctcgctaaaggagaggagtggaggaggcgggagcagcaagaatggcgtgctccaccaatctctgcttctcagtgtcgattcctcctctcccagcctcttgttcttctgactcctcccccttccgcacaatggagcgtgtgtcctgcactctgtccaggtatgtttcttgttgccctacctccataggcattggtgaagcggttacggtgatggggatgggcaagatcgtgcggtggtgcgctgggaagtagcacttcctcgccaagaggaacaccaggcgcaagaagaggctctccaatatgtcaaaagaatcatagacaccatagatctctggcgattgttgcggttggcgacacaaaattggaacttaatgtgttccaaatagcgacaatgcctcactcgaaacaggtgtggcaattgcagcttcatttgcttccaagcaaagaggaccaatgtttcagtaaggacttttgattgtctttgtctacaatggtttatcaatttcacccttcctacacatgaaactcgcactaggtacaacagctatgacagagaacaaaaaggtagtcttttgttgactaaggccttgttcgtttctgccggattggtaggtcggaacgattcctgaccggattgtttctctaatttatataaactttgattagctggaacgattccagttataatccgacggaaacgaacaaaggactaagacgtctccaaccgtctcctctcccctcaccgtatttgctattgtggtctccaaccgtctcctctctcctcaccatgtttgccattgcattgcatgtacaacgtcacaatatactctttcaacaactcaccccgctctatgaatgagggagttttaagggcatgtttggttcgtatctaactgtattacactttgcataaggttagtcgttcgaattgaagaactaaccttcgataaaaaaaaagttaggcaaagtgtagcaaattaagcagtgaaccaaacatgtccttaatctccctgcttccattatcttaatttaattacctgataataatgtgttgtcttgttcttgattcatagcggttgaaaataagtgaccaacaatattcgttccaaatttttaactacccgtatccgttcatgtatcctggagaaatatattacgttaggatacagaataactttgtatctagttcctgttttcatccctaagcagacagcactgtcgcaagccataatctgcaataacaacatataattgtgccatccaaaaaacgtaattattgtttgttcgagataatgcgctaataacgtgtggctagttctagcaactggatgtgggtgcctgcagtgtgggcccgagcaaatccatctcttgcgctcgcagacaacggccttcccgccgccggtacaatcagatgcagatgctaatgatacagtccgtccagaccccacccgccgccgcccacctccgcgctgctgcgcccgccagcacgccaccgctcctcgcgcgtaggctggccggttctcgtccagctcccgcctccgccggaacaatcagatgcagccgatgctaacgctacagtccgtccagcccccacccgccgctgcccacctccgcgccgctgcgtccgccaagacgccactgctcctcccgcgcagagcggccggtcctcctccagcttccgcctccgcctccgcctcggctgagttcccaggatccgttccagacagcgctcagatggcgccccgacggcggcggcgccggagcgtggccggcatcgaccaggacgaactcctcgatcccgaggccctcgcggaccccgacagcggcttctacgagatcaacggcgtgaggctgcaccacaaggtctgcagccacgaggatgaggactcgtccagcgaccagtccaccggtagtaccattgcctcagactcagacgctgtcctgaaaagccagattggcctgcccatactgctgctgcacggcttcggcgcgtcagtcttctcctggagcagtgtgatgcggcctctcgcccgcattgtccgtgccaaggttcttgcgttcgaccggccggcgtttgggctgacatcccgggccagtcgctctgccgatgacgccaagcctctcaatccttactccatggcgttctcggtcttggccacgttggcgttcatcgactaccttggcgctgagaaggccatacttgttgggtaatactagtcctcatcccaaatctgaattgcttgcttctctcgctagctctgtctatctgcattgctttcgtgtgattattattatatgtacgtgtgtgatgaccattgcccccaggcactcagctggttgccttgtagcagtggatgcatactttgaggcaccggaacgggtggctgctctcgtgctagttgcgccggctatatttgcaccaaggaaggcggtgaaagagggccagtcaggggaagaagaaggagggcagcaagcacagagggttcccaacgatgaaaattcgcctccaaatttgttcgctaggatttcgggaggatttcttgagctatggaagcacgttgcggggcttgttctcaagatgatcacagcgatacgagatgtggtccgatctttgtgtcttaaagctgtcgttgcttttcttcggtcatcgttgggtgtggtgctggtaagatgggtgatggataaatttggtatactgggcgtccggaatgcatggtatgacccgagcaaagtaactgatcatgtcatacaaggctacacaaagctctgctggaacacaccgtatccatgatcatagattctgtgtctgcatcaagagtaccagtttcaaagaggctttctgagatctcatgcccagtgctagtggtgacaggtgacaccgatcgcattgttcctgcttggaatgccgagcgtgtggcacgcgctatacctggagcaacttttgaggcgatcaagagttgtggtcacttgccccacgaagaaaggcctgaggaattcctgtccgtcgttgaaaattttctacggacaacgtttgcaaatccaaatgaacaagtatttcaagcagctgtatcatgaattatgtgttgagtacgatctatttgctttataataaatcttaaagacccactcgtgtacaatgagagtggaatttggagtttaagcacatgagaagtaaaagaagttgaagaaaacttatatagtttgtctcctgcttttttttaaacaaagcaagagagggagaaaactaaagctacaagtgcgcacgttttatgttttcttttgcgtgataattcgtgcgacttgtgacttacgatgtgatgattcatgctaattttatttctatcttttgtt

SEQ ID NO: 209026 - DNA, 3602 bp, Zea Mays
gggaatttccggttgccatccgtaacctccacccacctcgcgctctcgctgttctgcaacacgtgggtcagtcgaagcgggctcatctgcactgctgggttgtctaggacacgaccctacatcgcggctcgcgggcgtcagggcgcagatcagccatgccttccatcgagcagttccagcattggatggcaaccaacgtgtgtgctcttgtcttcgtttatccgtgcgtgggttctttcgtctggctggggactcctgcacgccggctctcgtacgaccgccgttctcccggacttcgtcggctcccacttttggaacttctagtctattgtcgccttctagcagagattggtggaagacgacgatgtctcgctaaaggagaggagtggaggaggcgggagcagcaagaatggcgtgctccaccaatctctgcttctcagtgtcgattcctcctctcccagcctcttgttcttctgactcctcccccttccgcacaatggagcgtgtgtcctgcactctgtccaggtatgtttcttgttgccctacctccataggcattggtgaagcggttacggtgatggggatgggcaagatcgtgcggtggtgcgctgggaagtagcacttcctcgccaagaggaacaccaggcgcaagaagaggctctccaatatgtcaaaagaatcatagacaccatagatctctggcgattgttgcggttggcgacacaaaattggaacttaatgtgttccaaatagcgacaatgcctcactcgaaacaggtgtggcaattgcagcttcatttgcttccaagcaaagaggaccaatgtttcagtaaggacttttgattgtctttgtctacaatggtttatcaatttcacccttcctacacatgaaactcgcactaggtacaacagctatgacagagaacaaaaaggtagtcttttgttgactaaggccttgttcgtttctgccggattggtaggtcggaacgattcctgaccggattgtttctctaatttatataaactttgattagctggaacgattccagttataatccgacggaaacgaacaaaggactaagacgtctccaaccgtctcctctcccctcaccgtatttgctattgtggtctccaaccgtctcctctctcctcaccatgtttgccattgcattgcatgtacaacgtcacaatatactctttcaacaactcaccccgctctatgaatgagggagttttaagggcatgtttggttcgtatctaactgtattacactttgcataaggttagtcgttcgaattgaagaactaaccttcgataaaaaaaaagttaggcaaagtgtagcaaattaagcagtgaaccaaacatgtccttaatctccctgcttccattatcttaatttaattacctgataataatgtgttgtcttgttcttgattcatagcggttgaaaataagtgaccaacaatattcgttccaaatttttaactacccgtatccgttcatgtatcctggagaaatatattacgttaggatacagaataactttgtatctagttcctgttttcatccctaagcagacagcactgtcgcaagccataatctgcaataacaacatataattgtgccatccaaaaaacgtaattattgtttgttcgagataatgcgctaataacgtgtggctagttctagcaactggatgtgggtgcctgcagtgtgggcccgagcaaatccatctcttgcgctcgcagacaacggccttcccgccgccggtacaatcagatgcagatgctaatgatacagtccgtccagaccccacccgccgccgcccacctccgcgctgctgcgcccgccagcacgccaccgctcctcgcgcgtaggctggccggttctcgtccagctcccgcctccgccggaacaatcagatgcagccgatgctaacgctacagtccgtccagcccccacccgccgctgcccacctccgcgccgctgcgtccgccaagacgccactgctcctcccgcgcagagcggccggtcctcctccagcttccgcctccgcctccgcctcggctgagttcccaggatccgttccagacagcgctcagatggcgccccgacggcggcggcgccggagcgtggccggcatcgaccaggacgaactcctcgatcccgaggccctcgcggaccccgacagcggcttctacgagatcaacggcgtgaggctgcaccacaaggtctgcagccacgaggatgaggactcgtccagcgaccagtccaccggtagtaccattgcctcagactcagacgctgtcctgaaaagccagattggcctgcccatactgctgctgcacggcttcggcgcgtcagtcttctcctggagcagtgtgatgcggcctctcgcccgcattgtccgtgccaaggttcttgcgttcgaccggccggcgtttgggctgacatcccgggccagtcgctctgccgatgacgccaagcctctcaatccttactccatggcgttctcggtcttggccacgttggcgttcatcgactaccttggcgctgagaaggccatacttgttggtggatgcatactttgaggcaccggaacgggtggctgctctcgtgctagttgcgccggctatatttgcaccaaggaaggcggtgaaagagggccagtcaggggaagaagaaggagggcagcaagcacagagggttcccaacgatgaaaattcgcctccaaatttgttcgctaggatttcgggaggatttcttgagctatggaagcacgttgcggggcttgttctcaagatgatcacagcgatacgagatgtggtccgatctttgtgtcttaaagctgtcgttgcttttcttcggtcatcgttgggtgtggtgctggtaagatgggtgatggataaatttggtatactgggcgtccggaatgcatggtatgacccgagcaaagtaactgatcatgtcatacaaggctacacaaagcctctaaaatccaagggttgggagacagctctgctggaacacaccgtatccatgatcatagattctgtgtctgcatcaagagtaccagtttcaaagaggctttctgagatctcatgcccagtgctagtggtgacaggtgacaccgatcgcattgttcctgcttggaatgccgagcgtgtggcacgcgctatacctggagcaacttttgaggcgatcaagagttgtggtcacttgccccacgaagaaaggcctgaggaattcctgtccgtcgttgaaaattttctacggacaacgtttgcaaatccaaatgaacaagtatttcaagcagctgtatcatgaattatgtgttgagtacgatctatttgctttataataaatcttaaagacccactcgtgtacaatgagagtggaatttggagtttaagcacatgagaagtaaaagaagttgaagaaaacttatatagtttgtctcctgcttttttttaaacaaagcaagagagggagaaaactaaagctacaagtgcgcacgttttatgttttcttttgcgtgataattcgtgcgacttgtgacttacgatgtgatgattcatgctaattttatttctatcttttgtt

SEQ ID NO: 209027 - DNA, 3599 bp, Zea Mays
gggaatttccggttgccatccgtaacctccacccacctcgcgctctcgctgttctgcaacacgtgggtcagtcgaagcgggctcatctgcactgctgggttgtctaggacacgaccctacatcgcggctcgcgggcgtcagggcgcagatcagccatgccttccatcgagcagttccagcattggatggcaaccaacgtgtgtgctcttgtcttcgtttatccgtgcgtgggttctttcgtctggctggggactcctgcacgccggctctcgtacgaccgccgttctcccggacttcgtcggctcccacttttggaacttctagtctattgtcgccttctagcagagattggtggaagacgacgatgtctcgctaaaggagaggagtggaggaggcgggagcagcaagaatggcgtgctccaccaatctctgcttctcagtgtcgattcctcctctcccagcctcttgttcttctgactcctcccccttccgcacaatggagcgtgtgtcctgcactctgtccaggcattggtgaagcggttacggtgatggggatgggcaagatcgtgcggtggtgcgctgggaagtagcacttcctcgccaagaggaacaccaggcgcaagaagaggctctccaatatgtcaaaagaatcatagacaccatagatctctggcgattgttgcggttggcgacacaaaattggaacttaatgtgttccaaatagcgacaatgcctcactcgaaacaggtgtggcaattgcagcttcatttgcttccaagcaaagaggaccaatgtttcagtaaggacttttgattgtctttgtctacaatggtttatcaatttcacccttcctacacatgaaactcgcactaggtacaacagctatgacagagaacaaaaaggtagtcttttgttgactaaggccttgttcgtttctgccggattggtaggtcggaacgattcctgaccggattgtttctctaatttatataaactttgattagctggaacgattccagttataatccgacggaaacgaacaaaggactaagacgtctccaaccgtctcctctcccctcaccgtatttgctattgtggtctccaaccgtctcctctctcctcaccatgtttgccattgcattgcatgtacaacgtcacaatatactctttcaacaactcaccccgctctatgaatgagggagttttaagggcatgtttggttcgtatctaactgtattacactttgcataaggttagtcgttcgaattgaagaactaaccttcgataaaaaaaaagttaggcaaagtgtagcaaattaagcagtgaaccaaacatgtccttaatctccctgcttccattatcttaatttaattacctgataataatgtgttgtcttgttcttgattcatagcggttgaaaataagtgaccaacaatattcgttccaaatttttaactacccgtatccgttcatgtatcctggagaaatatattacgttaggatacagaataactttgtatctagttcctgttttcatccctaagcagacagcactgtcgcaagccataatctgcaataacaacatataattgtgccatccaaaaaacgtaattattgtttgttcgagataatgcgctaataacgtgtggctagttctagcaactggatgtgggtgcctgcagtgtgggcccgagcaaatccatctcttgcgctcgcagacaacggccttcccgccgccggtacaatcagatgcagatgctaatgatacagtccgtccagaccccacccgccgccgcccacctccgcgctgctgcgcccgccagcacgccaccgctcctcgcgcgtaggctggccggttctcgtccagctcccgcctccgccggaacaatcagatgcagccgatgctaacgctacagtccgtccagcccccacccgccgctgcccacctccgcgccgctgcgtccgccaagacgccactgctcctcccgcgcagagcggccggtcctcctccagcttccgcctccgcctccgcctcggctgagttcccaggatccgttccagacagcgctcagatggcgccccgacggcggcggcgccggagcgtggccggcatcgaccaggacgaactcctcgatcccgaggccctcgcggaccccgacagcggcttctacgagatcaacggcgtgaggctgcaccacaaggtctgcagccacgaggatgaggactcgtccagcgaccagtccaccggtagtaccattgcctcagactcagacgctgtcctgaaaagccagattggcctgcccatactgctgctgcacggcttcggcgcgtcagtcttctcctggagcagtgtgatgcggcctctcgcccgcattgtccgtgccaaggttcttgcgttcgaccggccggcgtttgggctgacatcccgggccagtcgctctgccgatgacgccaagcctctcaatccttactccatggcgttctcggtcttggccacgttggcgttcatcgactaccttggcgctgagaaggccatacttgttgggcactcagctggttgccttgtagcagtggatgcatactttgaggcaccggaacgggtggctgctctcgtgctagttgcgccggctatatttgcaccaaggaaggcggtgaaagagggccagtcaggggaagaagaaggagggcagcaagcacagagggttcccaacgatgaaaattcgcctccaaatttgttcgctaggatttcgggaggatttcttgagctatggaagcacgttgcggggcttgttctcaagatgatcacagcgatacgagatgtggtccgatctttgtgtcttaaagctgtcgttgcttttcttcggtcatcgttgggtgtggtgctggtaagatgggtgatggataaatttggtatactgggcgtccggaatgcatggtatgacccgagcaaagtaactgatcatgtcatacaaggctacacaaagcctctaaaatccaagggttgggagacagctctgctggaacacaccgtatccatgatcatagattctgtgtctgcatcaagagtaccagtttcaaagaggctttctgagatctcatgcccagtgctagtggtgacaggtgacaccgatcgcattgttcctgcttggaatgccgagcgtgtggcacgcgctatacctggagcaacttttgaggcgatcaagagttgtggtcacttgccccacgaagaaaggcctgaggaattcctgtccgtcgttgaaaattttctacggacaacgtttgcaaatccaaatgaacaagtatttcaagcagctgtatcatgaattatgtgttgagtacgatctatttgctttataataaatcttaaagacccactcgtgtacaatgagagtggaatttggagtttaagcacatgagaagtaaaagaagttgaagaaaacttatatagtttgtctcctgcttttttttaaacaaagcaagagagggagaaaactaaagctacaagtgcgcacgttttatgttttcttttgcgtgataattcgtgcgacttgtgacttacgatgtgatgattcatgctaattttatttctatcttttgtt

SEQ ID NO: 209028 - DNA, 1514 bp, Zea Mays
gtggatgtctcttccagagtgatggatcctttaggccttgctgtgtcgacatcgtcttgcctcccgaaatcacatggcaggaagtcgagaccatcaagcagcatggcaaggacttcagcttcgttagatgctggcagtagcaatgatgttggccacctctcatcaaccctggagaagctgtgggtctgggaaaaaaagctctatcaggaagttaaggatgaggagaagctacggatgaagtatgagaagtattacagaaggctgaaatccatggacgaacgaggcgctgaatcaagtacaatcgactccacccgtttgtccgcaagacttgtggagtccaagatcagcatcaacattagaaccgcaaacgccttctcgttaaaaatacaggagattcgagacgaagagctttaccctcaactggttgatctcatccagaggttcaggagtttgtggaaagatattatggaatgccatgagaagcagctattagccatacaggacagtaggattcactggatgaaggcgatgactgtaagtgaatccggcgttgtgtcagaggcctcacgggatttggaacgggagctgacgaaatggtaccgttgcttcaacaagtggatgatctcgcaaaggtcctgtgccgaggcgctgaacgaatggctgaagaaatggctccctgagtcgcaggaggaggttacagcagacggggctcctcctttctccccgggcaggcttggcgcgccacccgtattcgtcgtctcaaacgactggttccaagcgatcgagatggtctccaggactgatgtgctgaaagcgatcgaccagttctctaaggtcgtgcgtagattcaagaagagccaggaagacgagcggcggcagaggcggagagccgaccacgcctccaaagactacgacagaaagcgcaaggatctggaggaagagctcgggctgagcaccatggagagtcctcgctacagccatgacaaccgtgtggtggacctggagaagctgaggaaaagaagagacgaggagagcaccaggcatgacagggtcctgaatcatgcccacgtcacggcttcagctactctgccagtcggtttggtccctgtgctgcaacagatcaccagcttctttcagaggaaccaacgggtctacatgcagattagaactcaacaaggcgcctgatgatgatttctagttagcagtgttgcattcttttgtatatagaatttacaagatggggttatagactgctggagttttacataagtagctactaattcatggtaggtataggtgttagactgtgtgtgtgggccggtaccgctgttgggctgtcagtccattaggaggttagggttctgtgtctatatatgtaatcaccacctctatgcaatatcaatcaagagttccattctcctacaataggaagggctactaattcatggagtgtttcattattcatgtattagttgggctagcttgggttagctctaacccacccttacgacctc

SEQ ID NO: 209029 - DNA, 3388 bp, Zea Mays
agaaaatgagagaaaaatagagggcgaaagagcaaacggggaagacatcgaaaccgaaggcaaaagctacaacgactccttccattcttgtctctccgcctccatctcgccccgcaacgcccgcatttggtgccgcctctctccacgcgctttcccaatcacggcgccgctttcaatcaccgcctcgccgtgcaccgccacaccttcccgtccccggacccgacgcagcgtgccctgccgccgtccgtcccccttcgtataatggacgccgacgagccaccggagcccgctgtatccgcacgcctctgccgccgattccggaggtaggatttcgccctcccgcgcggcaatgggctgcacgacctcccacgacgccgtcgccgccgctgtcacctcctccagttcccggccccgtgcgcgccgcgcgtccgcgtccgcgtccgggccctcaccgcggcgcggagaccccgccgcgctgtgccgcgagcgcgtggcgctcatccgcgccgcggccgaccgccggtacgcgctcgccgccgcgcacgctgcctacttccgctcgctcgccgctgtcggcgacgcgctgcggcgcttcgtggcgtccgcgctcgcgcccggcacgcccgggtcctcgccggtgctcacgctcccgccttcccccgccaagccggtcgctgccgcgtccgccagcctcccgccgtcgccgtcgtccaccgtctcgccgctctcgcactccgtctccgacgacgacctccatctccatgaccttgacgacaccccgtctccgtcgacgtccacgagacactaccaccacttcatgagaagatcgcccaccgtgcccaccgtggtgtacgaggaccccaacgcccagacacagtacaccacagccgagaccagctacggatacgcctacggcgtcggcgacggctacgggcctgcgtacccgtacggtccctatggtgaggtagttgcaggagagactccggaggcggcaccgagatcgcctgggccgccgccttcgcccccgaccgcggaggcctcgccatgggaattcttcgacccgttcacgcagtacgaccagttcatggaggactacactcgtgggaatctgccaaccaacagccccaactacgccgagctgaggaggatggaaggcatcccggagcttgaggacgaggccgagttggtggggaatgcagaggcatcaaagccatcgacttctggggtttctgatcagaacaagaaagggaagggaccaattcaagacaatgccgcttccaacggcgatttttctggtgacagcaagctgcagaagaaagcgacttcaaaggccgattcttctggtggaaagctgcagagggatgccacttcaatcagcgattctcctggtggcaagctgcagaggaagggatcggaaccacctcctggtggcaagttacaggggaagggatcggagccaactactgacgccaaaggcgaggcggggaaaccggtgtccaggaatgattccgggccaagcaatgtcagctcgaaaaacaaagaagggaggaagaagaacacaatgagcctaaagggcacagttagcagtgacattgatggcagcagcaccagtgggaagaagaaaggtgtggccttcgaaagggaacgatccatcagagaagcagaaggatgtggggagatccatggccagtcggtggtgagcagcgacccattctcaccatcgcatcatgggacgagggatgtcagagaggcgattaatgaggtcaatgagctgttcgacgaggcggcaaactgcagcacagatgtctcaaggctgctggaggtgggcaaaatgcctcgtagcgataccccgagagttctcagatatgtctcttccagagtgatggatcctttaggccttgctgtgtcgacatcgtcttgcctcccgaaatcacatggcaggaagtcgagaccatcaagcagcatggcaaggacttcagcttcgttagatgctggcagtagcaatgatgttggccacctctcatcaaccctggagaagctgtgggtctgggaaaaaaagctctatcaggaagttaaggtggttgttctaggatgaggagaagctacggatgaagtatgagaagtattacagaaggctgaaatccatggacgaacgaggcgctgaatcaagtacaatcgactccacccgtttgtccgcaagacttgtggagtccaagatcagcatcaacattagaaccgcaaacgccttctcgttaaaaatacaggagattcgagacgaagagctttaccctcaactggttgatctcatccagaggttcaggagtttgtggaaagatattatggaatgccatgagaagcagctattagccatacaggacagtaggattcactggatgaaggcgatgactgtaagtgaatccggcgttgtgtcagaggcctcacgggatttggaacgggagctgacgaaatggtaccgttgcttcaacaagtggatgatctcgcaaaggtcctgtgccgaggcgctgaacgaatggctgaagaaatggctccctgagtcgcaggaggaggttacagcagacggggctcctcctttctccccgggcaggcttggcgcgccacccgtattcgtcgtctcaaacgactggttccaagcgatcgagatggtctccaggactgatgtgctgaaagcgatcgaccagttctctaaggtcgtgcgtagattcaagaagagccaggaagacgagcggcggcagaggcggagagccgaccacgcctccaaagactacgacagaaagcgcaaggatctggaggaagagctcgggctgagcaccatggagagtcctcgctacagccatgacaaccgtgtggtggacctggagaagctgaggaaaagaagagacgaggagagcaccaggcatgacagggtcctgaatcatgcccacgtcacggcttcagctactctgccagtcggtttggtccctgtgctgcaacagatcaccagcttctttcagaggaaccaacgggtctacatgcagattagaactcaacaaggcgcctgatgatgatttctagttagcagtgttgcattcttttgtatatagaatttacaagatggggttatagactgctggagttttacataagtagctactaattcatggtaggtataggtgttagactgtgtgtgtgggccggtaccgctgttgggctgtcagtccattaggaggttagggttctgtgtctatatatgtaatcaccacctctatgcaatatcaatcaagagttccattctcctacaataggaagggctactaattcatggagtgtttcattattcatgtattagttgggctagcttgggttagctctaacccacccttacgacctc

SEQ ID NO: 209030 - DNA, 5066 bp, Zea Mays
caaatggtactgaaactgatccctcaaattttttaatagctcggaaaaagactctttgtttcgttgcagttgcacgggttggcgccggctcctccgatccagtctggccaccgggcaccggcgatgggctgctcgccggaggggggctctgcggcgtgtccggactgcctgagacgccttgtcctacgtgacctcgccggctccggcctctccttcgtctacggcctctccgactcaccgctccccttcgccgcctccgccgtcgttcagattgcatctgatggagacgagggaagtattgggaggcagcatatctccagttttgttttagtgggcttatgtggtggcaaagtgccttttaatagccaacaatgtgacaacagttccttggagaattgcattcataaagatccccaggcagagcaaaccttatacaatggtgataatgaatatactgagcagtcagattcctcatcttgtatagaatgcattgaaggttgcaaaagttcctctggtccttgtaagcaaccattggccataagcacgattaccaaattagctcctgcttgctatcttagcataggccacacttcagaggttagagagcttattacaggttatctgacctcatcaagtgaagagtatgtgattaattcgttaaatctgctatttgaaaacaaaattagtggatctgctggtttagatttcctcagcttcgttggattttcagcatttgatgacttgcattcttctggctgtgtgaggcatcccaacatcttaccagtgttaggtatactagaaacatccgattgttgctacatgttacaaccaaaggccccatacaccttggaaaacattatgcactacagtccagaggcattctgctcagattggcatattagatttcttgtctaccagataatatctgctgtggcataccttcatgatttaggagttcatcatggcaacctaaggccatcaaagatcttgatgtcagattccttatggccttacctgagcataagtgatacctgccctgtaaagcacagttggggtgttgccaatcataaatgttcacctaattcatgttgttttatggaggactgttcctcaaaagccatttatagtggtttcaaactgcaatcgtcgttagattggcattctcactttaagcaatggtggaaaggtgaactgagcaattatgagtaccttcttgtcttaaacaagttagctggtagaagatggggcgatccaggttttcacactgtgatgccttgggtaatagattttacagggatacctgatgaaagttctgataatggttggagggacctgaccaaaagtaaatggcggttggcaaaaggtgatgagcagttggattttacgtattcatcatctgaagttccacatcatgtttctgatgagtgtctctcagagctagctgtctgcagttacaaagcaaggaggttacctaagaccatcttgagatcagctgtgcgttccgtctatgagccgaatgaatacccgtctagtatgcaaaggctttatcaatggactccagatgaatgcattcctgaattttatagtgatcctcagattttcacctctcttcattctgaaatgagtgatttggcattaccttcctgggcaacatctgcagcagatttcatttatcttcacagggatgcattggagagcgaccgagtctcacaacaactgcatcactggattgacataacatttggctataaactttctggagaggcatctgttgaagcaaaaaatgtcatgttgccctctaatgatccatctaggccaaaatcgattggccggcatcagctttttacaaggcctcatcctaagcgccttgttagcacacctcatgcagtctaccacaataatttggactcttgtgctagatgctgtggcaaacgaagcggtgcaacaactgatgcagtgttaaatggctgtggatctccaaatatggtttcagaaattggccgtctggaggaatttgagaaagcaactctgtttgcagagcttgaataccagttgaatccagtctatgattatgctgatggtgatccttcaacttgtttctcttcaaacaaatatcccaagaaacaaaatgcagatcagatattgcagcatgacaatgcattgccagcagcacctaactttgatcttggttcctttctagaatgctttgagtctgatgataattctcatatgggttatcaagaactgctgctctggaataaaaagtctaattcacaaaacgaatgccatgcaaatgatgtattttctattgggtgcattctggcagaaatctatgtgcaaaaaccactttttgacaatgccttgctatctgcatacaaagaaattgggataatgcccggagcacttcaaggcctgccttctcatgtcacacttcttgttgagtcatgcatacagagggaatggaaaaggaggccatcagcaaagcaccttttggagtcatcatactttcctccatcagttcgatctgcatatatgtttcttgctccacttcaagttttgtctacatctagagagcgaatcaagtatgctgctaagcttgcaagtgaaggggcactcaaagctatgggagaatttgctgctgaaatgtgtgcaccttattgcctgtctcttctttcatcatctttgtcagatgttgataccgaatcagccttgtctctgcttaaagaatttctagggagtttgactatccaagcaactaaggaccttgttctgcacatcattcagaaaatcttacaggcaccagaatattcacatctgaaggttgccttccttcaagactcttttattcgggatttgtggaagaaattggggaaaaaaacttatattgaaaagatacatcctttggtgatctcaaacttatacagttcacctaacaagatcatcgcctctgctgcatctactgttctgatcgtctcaaggggacttcttggagaaaattttgttgtaaagcaaattcttccgttgcttttgaatgtcatattctcttgtatcgattcgtctaagatgagtaagcccgagccacagcatagttggaattctttcgcgctgattgatagcttatctgccttggaaggtcttgtgttggttcttcctgtcaaaactgttattaaggagcttcttcaggaccaagcctgtctttatgtaaaagttcttatgcagattcctttggatcttcgtgtgattcaagtggctgctacagcactcattgacctttgtcaacgaattggaccagaaaacacttctatatatgttttgccacaactcaaggagctttttgctgaactggccttttctcatgattcatctggtcttaaccatcctataaaaggatttaaaagttctgatgaaaataaaaacaagccaattaaagtggaatccagaattgaccttttgttgctgctatatcctttcttggcatcacttgttgggatagagaagctccgagagtcttgctcaacatggtttcttttggagcaagcacttcaaaggttgtacaattggaagtgggagccttctggtgattgttctaagaatgctgaaaatatgaaaggtcaaaggctccagcctggtaactatatgtcatcagagtttgttccaaccaaactgcttttcaatggggtaggttggtccatgccacaatcagaaaccactaaaaaaaatggtcggaacactgcagcttctaaccttgagaatgagacatctagtgacaatttgtctacttcaagttctggtaatcaaccatggttttggttccccacccctgatagtagttggggtgttccagaatttcttggtcgtggtggtggtttgagggatgaacttccctggaagattaaagcttctatcctttactcagcccgtgctcaccctggtgctctgcgttcattagcagtccatgatgatgagtgcacagtttttactggaggagttggtcctggttttaaaggaagtatccagaggtgggaattgccaaacatgaattgcacatctggttattatgggcatgaagaggttgtcaattccatctgtatcctgtcaattactggcagagtggcttcttgtgatggcactatccatatatggaatgggcagtctggaaagctcattgcagctcatgctgagtcgtctacaacttttccactccaaaccccatctattgagcaggcaaacatgcttaatcaggacgcactctcaggtggaatattgtcaaatgcatttcgtggtagtttgtatacgactatgcattatatggaatctgagggtatacttgttgctggtatgggaaatggttcaatcagatttattgacatatctcaagatcagaagctacatttatggaagagcgatacggctgaaatatctttctcatcacttgtgtcggctatttgctcgtgtggctcaaacaagctcaggaaaggaagcctaatggcttcatcctggatagcagcaggtttaagttctggatattgtcgattgcttgataagcgcagtgggaacatcattgcagtttggcgagcacatgatggacacattacaaagctggcagcaccagatgatcacttaattttgtcgagttcccttgacaagactcttcgagtgtgggacctcagaaggaatctggcaacacagtcaaacattttcagaagtcattcagacggcatttccaacttctctgtgtggggtcaggacgtggtatcaatttcaaggaacaaaattgcactaacttccctgtcgagaccagaaagtgaaattggacatcagcagcttgcacttcagaacttgtattcggctgacagaggggtgaaacataaaaacctatctgtcctttcaactattgctgtgcttcctttgtcaaggttgtttgtggttggaactgaagatggatttctcaaaatgtgccactaggtgcttcttccggtactggtgaccatctctcattgtgaagttttggtggtttgtctccttcgatgtgctgagttgatttttgtgtggagccttgttttgcg

SEQ ID NO: 209031 - DNA, 5164 bp, Zea Mays
caaatggtactgaaactgatccctcaaattttttaatagctcggaaaaagactctttgtttcgttgcagttgcacgggttggcgccggctcctccgatccagtctggccaccgggcaccggcgatgggctgctcgccggaggggggctctgcggcgtgtccggactgcctgagacgccttgtcctacgtgacctcgccggctccggcctctccttcgtctacggcctctccgactcaccgctccccttcgccgcctccgccgtcgttcagattgcatctgatggagacgagggaagtattgggaggcagcatatctccagttttgttttagtgggcttatgtggtggcaaagtgccttttaatagccaacaatgtgacaacagttccttggagaattgcattcataaagatccccaggcagagcaaaccttatacaatggtgataatgaatatactgagcagtcagattcctcatcttgtatagaatgcattgaaggttgcaaaagttcctctggtccttgtaagcaaccattggccataagcacgattaccaaattagctcctgcttgctatcttagcataggccacacttcagaggttagagagcttattacaggttatctgacctcatcaagtgaagagtatgtgattaattcgttaaatctgctatttgaaaacaaaattagtggatctgctggtttagatttcctcagcttcgttggattttcagcatttgatgacttgcattcttctggctgtgtgaggcatcccaacatcttaccagtgttaggtatactagaaacatccgattgttgctacatgttacaaccaaaggccccatacaccttggaaaacattatgcactacagtccagaggcattctgctcagattggcatattagatttcttgtctaccagataatatctgctgtggcataccttcatgatttaggagttcatcatggcaacctaaggccatcaaagatcttgatgtcagattccttatggccttacctgagcataagtgatacctgccctgtaaagcacagttggggtgttgccaatcataaatgttcacctaattcatgttgttttatggaggactgttcctcaaaagccatttatagtggtttcaaactgcaatcgtcgttagattggcattctcactttaagcaatggtggaaaggtgaactgagcaattatgagtaccttcttgtcttaaacaagttagctggtagaagatggggcgatccaggttttcacactgtgatgccttgggtaatagattttacagggatacctgatgaaagttctgataatggttggagggacctgaccaaaagtaaatggcggttggcaaaaggtgatgagcagttggattttacgtattcatcatctgaagttccacatcatgtttctgatgagtgtctctcagagctagctgtctgcagttacaaagcaaggaggttacctaagaccatcttgagatcagctgtgcgttccgtctatgagccgaatgaatacccgtctagtatgcaaaggctttatcaatggactccagatgaatgcattcctgaattttatagtgatcctcagattttcacctctcttcattctgaaatgagtgatttggcattaccttcctgggcaacatctgcagcagatttcatttatcttcacagggatgcattggagagcgaccgagtctcacaacaactgcatcactggattgacataacatttggctataaactttctggagaggcatctgttgaagcaaaaaatgtcatgttgccctctaatgatccatctaggccaaaatcgattggccggcatcagctttttacaaggcctcatcctaagcgccttgttagcacacctcatgcagtctaccacaataatttggactcttgtgctagatgctgtggcaaacgaagcggtgcaacaactgatgcagtgttaaatggctgtggatctccaaatatggtttcagaaattggccgtctggaggaatttgagaaagcaactctgtttgcagagcttgaataccagttgaatccagtctatgattatgctgatggtgatccttcaacttgtttctcttcaaacaaatatcccaagaaacaaaatgcagatcagatattgcagcatgacaatgcattgccagcagcacctaactttgatcttggttcctttctagaatgctttgagtctgatgataattctcatatgggttatcaagaactgctgctctggaataaaaagtctaattcacaaaacgaatgccatgcaaatgatgtattttctattgggtgcattctggcagaaatctatgtgcaaaaaccactttttgacaatgccttgctatctgcatacaaagaaattgggataatgcccggagcacttcaaggcctgccttctcatgtcacacttcttgttgagtcatgcatacagagggaatggaaaaggaggccatcagcaaagcaccttttggagtcatcatactttcctccatcagttcgatctgcatatatgtttcttgctccacttcaagttttgtctacatctagagagcgaatcaagtatgctgctaagcttgcaagtgaaggggcactcaaagctatgggagaatttgctgctgaaatgtgtgcaccttattgcctgtctcttctttcatcatctttgtcagatgttgataccgaatcagccttgtctctgcttaaagaatttctagggagtttgactatccaagcaactaaggaccttgttctgcacatcattcagaaaatcttacaggcaccagaatattcacatctgaaggttgccttccttcaagactcttttattcgggatttgtggaagaaattggggaaaaaaacttatattgaaaagatacatcctttggtgatctcaaacttatacagttcacctaacaagatcatcgcctctgctgcatctactgttctgatcgtctcaagtgaggaactaggaataccaattaccattcatcagacgattttaccactaattcactgttttggcaaaggattatgtgctgatggaatcaataccttgggggacttcttggagaaaattttgttgtaaagcaaattcttccgttgcttttgaatgtcatattctcttgtatcgattcgtctaagatgagtaagcccgagccacagcatagttggaattctttcgcgctgattgatagcttatctgccttggaaggtcttgtgttggttcttcctgtcaaaactgttattaaggagcttcttcaggaccaagcctgtctttatgtaaaagttcttatgcagattcctttggatcttcgtgtgattcaagtggctgctacagcactcattgacctttgtcaacgaattggaccagaaaacacttctatatatgttttgccacaactcaaggagctttttgctgaactggccttttctcatgattcatctggtcttaaccatcctataaaaggatttaaaagttctgatgaaaataaaaacaagccaattaaagtggaatccagaattgaccttttgttgctgctatatcctttcttggcatcacttgttgggatagagaagctccgagagtcttgctcaacatggtttcttttggagcaagcacttcaaaggttgtacaattggaagtgggagccttctggtgattgttctaagaatgctgaaaatatgaaaggtcaaaggctccagcctggtaactatatgtcatcagagtttgttccaaccaaactgcttttcaatggggtaggttggtccatgccacaatcagaaaccactaaaaaaaatggtcggaacactgcagcttctaaccttgagaatgagacatctagtgacaatttgtctacttcaagttctggtaatcaaccatggttttggttccccacccctgatagtagttggggtgttccagaatttcttggtcgtggtggtggtttgagggatgaacttccctggaagattaaagcttctatcctttactcagcccgtgctcaccctggtgctctgcgttcattagcagtccatgatgatgagtgcacagtttttactggaggagttggtcctggttttaaaggaagtatccagaggtgggaattgccaaacatgaattgcacatctggttattatgggcatgaagaggttgtcaattccatctgtatcctgtcaattactggcagagtggcttcttgtgatggcactatccatatatggaatgggcagtctggaaagctcattgcagctcatgctgagtcgtctacaacttttccactccaaaccccatctattgagcaggcaaacatgcttaatcaggacgcactctcaggtggaatattgtcaaatgcatttcgtggtagtttgtatacgactatgcattatatggaatctgagggtatacttgttgctggtatgggaaatggttcaatcagatttattgacatatctcaagatcagaagctacatttatggaagagcgatacggctgaaatatctttctcatcacttgtgtcggctatttgctcgtgtggctcaaacaagctcaggaaaggaagcctaatggcttcatcctggatagcagcaggtttaagttctggatattgtcgattgcttgataagcgcagtgggaacatcattgcagtttggcgagcacatgatggacacattacaaagctggcagcaccagatgatcacttaattttgtcgagttcccttgacaagactcttcgagtgtgggacctcagaaggaatctggcaacacagtcaaacattttcagaagtcattcagacggcatttccaacttctctgtgtggggtcaggacgtggtatcaatttcaaggaacaaaattgcactaacttccctgtcgagaccagaaagtgaaattggacatcagcagcttgcacttcagaacttgtattcggctgacagaggggtgaaacataaaaacctatctgtcctttcaactattgctgtgcttcctttgtcaaggttgtttgtggttggaactgaagatggatttctcaaaatgtgccactaggtgcttcttccggtactggtgaccatctctcattgtgaagttttggtggtttgtctccttcgatgtgctgagttgatttttgtgtggagccttgttttgcg

SEQ ID NO: 209032 - DNA, 5174 bp, Zea Mays
caaatggtactgaaactgatccctcaaattttttaatagctcggaaaaagactctttgtttcgttgcagttgcacgggttggcgccggctcctccgatccagtctggccaccgggcaccggcgatgggctgctcgccggaggggggctctgcggcgtgtccggactgcctgagacgccttgtcctacgtgacctcgccggctccggcctctccttcgtctacggcctctccgactcaccgctccccttcgccgcctccgccgtcgttcagattgcatctgatggagacgagggaagtattgggaggcagcatatctccagttttgttttagtgggcttatgtggtggcaaagtgccttttaatagccaacaatgtgacaacagttccttggagaattgcattcataaagatccccaggcagagcaaaccttatacaatggtgataatgaatatactgagcagtcagattcctcatcttgtatagaatgcattgaaggttgcaaaagttcctctggtccttgtaagcaaccattggccataagcacgattaccaaattagctcctgcttgctatcttagcataggccacacttcagaggttagagagcttattacaggttatctgacctcatcaagtgaagagtatgtgattaattcgttaaatctgctatttgaaaacaaaattagtggatctgctggtttagatttcctcagcttcgttggattttcagcatttgatgacttgcattcttctggctgtgtgaggcatcccaacatcttaccagtgttaggtatactagaaacatccgattgttgctacatgttacaaccaaaggccccatacaccttggaaaacattatgcactacagtccagaggcattctgctcagattggcatattagatttcttgtctaccagataatatctgctgtggcataccttcatgatttaggagttcatcatggcaacctaaggccatcaaagatcttgatgtcagattccttatggccttacctgagcataagtgatacctgccctgtaaagcacagttggggtgttgccaatcataaatgttcacctaattcatgttgttttatggaggactgttcctcaaaagccatttatagtggtttcaaactgcaatcgtcgttagattggcattctcactttaagcaatggtggaaaggtgaactgagcaattatgagtaccttcttgtcttaaacaagttagctggtagaagatggggcgatccaggttttcacactgtgatgccttgggtaatagattttacagggatacctgatgaaagttctgataatggttggagggacctgaccaaaagtaaatggcggttggcaaaaggtgatgagcagttggattttacgtattcatcatctgaagttccacatcatgtttctgatgagtgtctctcagagctagctgtctgcagttacaaagcaaggaggttacctaagaccatcttgagatcagctgtgcgttccgtctatgagccgaatgaatacccgtctagtatgcaaaggctttatcaatggactccagatgaatgcattcctgaattttatagtgatcctcagattttcacctctcttcattctgaaatgagtgatttggcattaccttcctgggcaacatctgcagcagatttcatttatcttcacagggatgcattggagagcgaccgagtctcacaacaactgcatcactggattgacataacatttggctataaactttctggagaggcatctgttgaagcaaaaaatgtcatgttgccctctaatgatccatctaggccaaaatcgattggccggcatcagctttttacaaggcctcatcctaagcgccttgttagcacacctcatgcagtctaccacaataatttggactcttgtgctagatgctgtggcaaacgaagcggtgcaacaactgatgcagtgttaaatggctgtggatctccaaatatggtttcagaaattggccgtctggaggaatttgagaaagcaactctgtttgcagagcttgaataccagttgaatccagtctatgattatgctgatggtgatccttcaacttgtttctcttcaaacaaatatcccaagaaacaaaatgcagatcagatattgcagcatgacaatgcattgccagcagcacctaactttgatcttggttcctttctagaatgctttgagtctgatgataattctcatatgggttatcaagaactgctgctctggaataaaaagtctaattcacaaaacgaatgccatgcaaatgatgtattttctattgggtgcattctggcagaaatctatgtgcaaaaaccactttttgacaatgccttgctatctgcatacaaagaaattgggataatgcccggagcacttcaaggcctgccttctcatgtcacacttcttgttgagtcatgcatacagagggaatggaaaaggaggccatcagcaaagcaccttttggagtcatcatactttcctccatcagttcgatctgcatatatgtttcttgctccacttcaagttttgtctacatctagagagcgaatcaagtatgctgctaagcttgcaagtgaaggggcactcaaagctatgggagaatttgctgctgaaatgtgtgcaccttattgcctgtctcttctttcatcatctttgtcagatgttgataccgaatcagccttgtctctgcttaaagaatttctagggagtttgactatccaagcaactaaggaccttgttctgcacatcattcagaaaatcttacaggcaccagaatattcacatctgaaggttgccttccttcaagactcttttattcgggatttgtggaagaaattggggaaaaaaacttatattgaaaagatacatcctttggtgatctcaaacttatacagttcacctaacaagatcatcgcctctgctgcatctactgttctgatcgtctcaagtgaggaactaggaataccaattaccattcatcagacgattttaccactaattcactgttttggcaaaggattatgtgctgatggaatcaataccttggttaggattgggggacttcttggagaaaattttgttgtaaagcaaattcttccgttgcttttgaatgtcatattctcttgtatcgattcgtctaagatgagtaagcccgagccacagcatagttggaattctttcgcgctgattgatagcttatctgccttggaaggtcttgtgttggttcttcctgtcaaaactgttattaaggagcttcttcaggaccaagcctgtctttatgtaaaagttcttatgcagattcctttggatcttcgtgtgattcaagtggctgctacagcactcattgacctttgtcaacgaattggaccagaaaacacttctatatatgttttgccacaactcaaggagctttttgctgaactggccttttctcatgattcatctggtcttaaccatcctataaaaggatttaaaagttctgatgaaaataaaaacaagccaattaaagtggaatccagaattgaccttttgttgctgctatatcctttcttggcatcacttgttgggatagagaagctccgagagtcttgctcaacatggtttcttttggagcaagcacttcaaaggttgtacaattggaagtgggagccttctggtgattgttctaagaatgctgaaaatatgaaaggtcaaaggctccagcctggtaactatatgtcatcagagtttgttccaaccaaactgcttttcaatggggtaggttggtccatgccacaatcagaaaccactaaaaaaaatggtcggaacactgcagcttctaaccttgagaatgagacatctagtgacaatttgtctacttcaagttctggtaatcaaccatggttttggttccccacccctgatagtagttggggtgttccagaatttcttggtcgtggtggtggtttgagggatgaacttccctggaagattaaagcttctatcctttactcagcccgtgctcaccctggtgctctgcgttcattagcagtccatgatgatgagtgcacagtttttactggaggagttggtcctggttttaaaggaagtatccagaggtgggaattgccaaacatgaattgcacatctggttattatgggcatgaagaggttgtcaattccatctgtatcctgtcaattactggcagagtggcttcttgtgatggcactatccatatatggaatgggcagtctggaaagctcattgcagctcatgctgagtcgtctacaacttttccactccaaaccccatctattgagcaggcaaacatgcttaatcaggacgcactctcaggtggaatattgtcaaatgcatttcgtggtagtttgtatacgactatgcattatatggaatctgagggtatacttgttgctggtatgggaaatggttcaatcagatttattgacatatctcaagatcagaagctacatttatggaagagcgatacggctgaaatatctttctcatcacttgtgtcggctatttgctcgtgtggctcaaacaagctcaggaaaggaagcctaatggcttcatcctggatagcagcaggtttaagttctggatattgtcgattgcttgataagcgcagtgggaacatcattgcagtttggcgagcacatgatggacacattacaaagctggcagcaccagatgatcacttaattttgtcgagttcccttgacaagactcttcgagtgtgggacctcagaaggaatctggcaacacagtcaaacattttcagaagtcattcagacggcatttccaacttctctgtgtggggtcaggacgtggtatcaatttcaaggaacaaaattgcactaacttccctgtcgagaccagaaagtgaaattggacatcagcagcttgcacttcagaacttgtattcggctgacagaggggtgaaacataaaaacctatctgtcctttcaactattgctgtgcttcctttgtcaaggttgtttgtggttggaactgaagatggatttctcaaaatgtgccactaggtgcttcttccggtactggtgaccatctctcattgtgaagttttggtggtttgtctccttcgatgtgctgagttgatttttgtgtggagccttgttttgcg

SEQ ID NO: 209033 - DNA, 5136 bp, Zea Mays
caaatggtactgaaactgatccctcaaattttttaatagctcggaaaaagactctttgtttcgttgcagttgcacgggttggcgccggctcctccgatccagtctggccaccgggcaccggcgatgggctgctcgccggaggggggctctgcggcgtgtccggactgcctgagacgccttgtcctacgtgacctcgccggctccggcctctccttcgtctacggcctctccgactcaccgctccccttcgccgcctccgccgtcgttcagattgcatctgatggagacgagggaagtattgggaggcagcatatctccagttttgttttagtgggcttatgtggtggcaaagtgccttttaatagccaacaatgtgacaacagttccttggagaattgcattcataaagatccccaggcagagcaaaccttatacaatggtgataatgaatatactgagcagtcagattcctcatcttgtatagaatgcattgaaggttgcaaaagttcctctggtccttgtaagcaaccattggccataagcacgattaccaaattagctcctgcttgctatcttagcataggccacacttcagaggttagagagcttattacaggttatctgacctcatcaagtgaagagtatgtgattaattcgttaaatctgctatttgaaaacaaaattagtggatctgctggtttagatttcctcagcttcgttggattttcagcatttgatgacttgcattcttctggctgtgtgaggcatcccaacatcttaccagtgttaggtatactagaaacatccgattgttgctacatgttacaaccaaaggccccatacaccttggaaaacattatgcactacagtccagaggcattctgctcagattggcatattagatttcttgtctaccagataatatctgctgtggcataccttcatgatttaggagttcatcatggcaacctaaggccatcaaagatcttgatgtcagattccttatggccttacctgagcataagtgatacctgccctgtaaagcacagttggggtgttgccaatcataaatgttcacctaattcatgttgttttatggaggactgttcctcaaaagccatttatagtggtttcaaactgcaatcgtcgttagattggcattctcactttaagcaatggtggaaaggtgaactgagcaattatgagtaccttcttgtcttaaacaagttagctggtagaagatggggcgatccaggttttcacactgtgatgccttgggtaatagattttacagggatacctgatgaaagttctgataatggttggagggacctgaccaaaagtaaatggcggttggcaaaaggtgatgagcagttggattttacgtattcatcatctgaagttccacatcatgtttctgatgagtgtctctcagagctagctgtctgcagttacaaagcaaggaggttacctaagaccatcttgagatcagctgtgcgttccgtctatgagccgaatgaatacccgtctagtatgcaaaggctttatcaatggactccagatgaatgcattcctgaattttatagtgatcctcagattttcacctctcttcattctgaaatgagtgatttggcattaccttcctgggcaacatctgcagcagatttcatttatcttcacagggatgcattggagagcgaccgagtctcacaacaactgcatcactggattgacataacatttggctataaactttctggagaggcatctgttgaagcaaaaaatgtcatgttgccctctaatgatccatctaggccaaaatcgattggccggcatcagctttttacaaggcctcatcctaagcgccttgttagcacacctcatgcagtctaccacaataatttggactcttgtgctagatgctgtggcaaacgaagcggtgcaacaactgatgcagtgttaaatggctgtggatctccaaatatggtttcagaaattggccgtctggaggaatttgagaaagcaactctgtttgcagagcttgaataccagttgaatccagtctatgattatgctgatggtgatccttcaacttgtttctcttcaaacaaatatcccaagaaacaaaatgcagatcagatattgcagcatgacaatgcattgccagcagcacctaactttgatcttggttcctttctagaatgctttgagtctgatgataattctcatatgggttatcaagaactgctgctctggaataaaaagtctaattcacaaaacgaatgccatgcaaatgatgtattttctattgggtgcattctggcagaaatctatgtgcaaaaaccactttttgacaatgccttgctatctgcatacaaagaaattgggataatgcccggagcacttcaaggcctgccttctcatgtcacacttcttgttgagtcatgcatacagagggaatggaaaaggaggccatcagcaaagcaccttttggagtcatcatactttcctccatcagttcgatctgcatatatgtttcttgctccacttcaagttttgtctacatctagagagcgaatcaagtatgctgctaagcttgcaagtgaaggggcactcaaagctatgggagaatttgctgctgaaatgtgtgcaccttattgcctgtctcttctttcatcatctttgtcagatgttgataccgaatcagccttgtctctgcttaaagaatttctagggagtttgactatccaagcaactaaggaccttgttctgcacatcattcagaaaatcttacaggcaccagaatattcacatctgaaggttgccttccttcaagactcttttattcgggatttgtggaagaaattggggaaaaaaacttatattgaaaagatacatcctttggtgatctcaaacttatacagttcacctaacaagatcatcgcctctgctgcatctactgttctgatcgtctcaagtgaggaactaggaataccaattaccattcatcagacgattttaccactaattcactgttttggcaaaggattatgtgctgatggaatcaataccttggttaggattgggggacttcttggagaaaattttgttgtaaagcaaattcttccgttgcttttgaatgtcatattctcttgtatcgattcgtctaagatgagtaagcccgagccacagcatagttggaattctttcgcgctgattgatagcttatctgccttggaaggtcttgtgttggttcttcctgtcaaaactgttattaaggagcttcttcaggaccaagcctgtctttatgtaaaagttcttatgcagattcctttggatcttcgtgtgattcaagtggctgctacagcactcattgacctttgtcaacgaattggaccagaaaacacttctatatatgttttgccacaactcaaggagctttttgctgaactggccttttctcatgattcatctggtcttaaccatcctataaaaggatttaaaagttctgatgaaaataaaaacaagccaattaaagtggaatccagaattgaccttttgttgctgctatatcctttcttggcatcacttgttgggatagagaagctccgagagtcttgctcaacatggtttcttttggagcaagcacttcaaaggttgtacaattggaagtgggagccttctggtgattgttctaagaatgctgaaaatatgaaaggtcaaaggctccagcctggtaactatatgtcatcagagtttgttccaaccaaactgcttttcaatggggtaggttggtccatgccacaatcagaaaccactaaaaaaaatggtcggaacactgcagcttctaaccttgagaatgagacatctagtgacaatttgtctacttcaagttctggtaatcaaccatggttttggttccccacccctgatagtagttggggtgttccagaatttcttggtcgtggtggtggtttgagggatgaacttccctggaagattaaagcttctatcctttactcagcccgtgctcaccctggtgctctgcgttcattagcagtccatgatgatgagtgcacagtttttactggaggagttggtcctggttttaaaggaagtatccagaggtgggaattgccaaacatgaattgcacatctggttattatgggcatgaagagagtggcttcttgtgatggcactatccatatatggaatgggcagtctggaaagctcattgcagctcatgctgagtcgtctacaacttttccactccaaaccccatctattgagcaggcaaacatgcttaatcaggacgcactctcaggtggaatattgtcaaatgcatttcgtggtagtttgtatacgactatgcattatatggaatctgagggtatacttgttgctggtatgggaaatggttcaatcagatttattgacatatctcaagatcagaagctacatttatggaagagcgatacggctgaaatatctttctcatcacttgtgtcggctatttgctcgtgtggctcaaacaagctcaggaaaggaagcctaatggcttcatcctggatagcagcaggtttaagttctggatattgtcgattgcttgataagcgcagtgggaacatcattgcagtttggcgagcacatgatggacacattacaaagctggcagcaccagatgatcacttaattttgtcgagttcccttgacaagactcttcgagtgtgggacctcagaaggaatctggcaacacagtcaaacattttcagaagtcattcagacggcatttccaacttctctgtgtggggtcaggacgtggtatcaatttcaaggaacaaaattgcactaacttccctgtcgagaccagaaagtgaaattggacatcagcagcttgcacttcagaacttgtattcggctgacagaggggtgaaacataaaaacctatctgtcctttcaactattgctgtgcttcctttgtcaaggttgtttgtggttggaactgaagatggatttctcaaaatgtgccactaggtgcttcttccggtactggtgaccatctctcattgtgaagttttggtggtttgtctccttcgatgtgctgagttgatttttgtgtggagccttgttttgcg

SEQ ID NO: 209034 - DNA, 1870 bp, Zea Mays
atcagatagcgcgctcccagtcccagtccatcatcggacacacctgctctcggctcgtggttcgcggcttcgcgcacgcgcagcaatggcgctccggccgcagctgcttcgcctcctcctcccatcgcctccccaccggaaccctccgcctccgccctcctccccgtccgtcgcacccattggccgccgcaccgccgcagcagccgtcctcctgctcgccgcgggcgtctccgccccgcccccgcgcgccgcccgcgccgagcccgacggcgaggacgtcgacgaggcccgcatcgtccgcctattccaggaggcgtcgccgtcggtcgtgttcatcaaggacctcgtcgtcgcggggccgcaggggcggagagttggtgaggatgaggacggggacgaggagggcggcggtgctaaggtggagggcacaggctcgggattcgtgtgggactccacgggccacattgtcacgaattaccacgtggttgcgaagttagctggagacggatctgcatctcatcgctgcaaggtgtttttggagggttctggtggcaaaagttactcaaaggaagcgaggctaatagggtgtgatccagcatatgatcttgcggttctgaaggtttggaatttcattatctgtggctcaagttctggtgatgtcaaattggttcggagctgtggtctttgagttcaagattagtgctgcagatagatgctgacagggaccagctgaggcctgctctgattggcacatcacggagtttgcgagttgggcaaagctgctttgccattgggaacccttatggatatgaacacactctaactactgggtttcttgtaggttattagtggattggggagggaaataccatctcccaatgggagagcgatccgtggggctatacagacagatactgctataaatgctggtaactcaggaggcccacttattgactcttatggccatgtaattggtgtcaatactgctacattcacacgtaaaggatctgggatctcgtccggggtgaacttcgccatccccatcgacacggtggtgcagtcggtccccaacctgatagtgtacgggacctccgtgagcaacaggttttattaactgtgttgtacatcatcatgatccgttccagtgcgtgtcctcactctgtctttgctacgctctcgttactccatatatgcgtacttgtgtgtgttaattactactactcatttggagctgggcaacttgaggtcgtcactactactgatttggagcctgatcttgagaaagatgagccaggtctccgctctctttcatcacagagacggtccaagaagaaaggaacggcacgaggaagaaacggagggcaaggggaacctcgactgccatcatggggagctccggcgctgacccggccgtgtccggtccgctgcattgtttgggtggggcgtgggggcgtcggtcgggtcggggcggggagttgtcgccgtcgccaggcgtgcctccgatccccctgcatgtgccgtgcgtgctcctcggcccggcgctcgtagcctttccaagattcatcacatgtcgcacgcaacctgcgcatgctctcctgggcgtacgtaagtacgtgtgttccactcaaaggctaacgtttcgatgcgccggtcggatcaccgtactgtaccggccggccggggtatgtacgtataaggccaacaaacctctggttccatacgtgcgtgcgcacggcacaggccatctcgtcacacgcaaacacacgagtggtccagctcgagcgggtgtctagcattgccctgctttttaaaatagtattcattttaggctttttatgtctatattcaaatagataatgataaatctaga

SEQ ID NO: 209035 - DNA, 1466 bp, Zea Mays
gtgattcacaagctgaatatggagtacagctttgaccgtgactggaagaagatagaggcttttgttggctccaagaccgtcatccaggagtcacgcacaaaagtactttttgaaggttcagaaaaatggaaccagtgaacatgtcccacctccacgaccaaagcgaaaagctgcccatccatatcctcagaaagcttccaagaatgaaccaaactatggtctcaagacagattcatcttccatacataggaactctggcatgaatgtgtctgtttcttcatggcctcataggtctatcccgcaagctgttgcttcatcgatggtgaaagaagatttaggtgctggaacactaggtccaaacaatttttgctcaagcagtactgaaggccctccaagaacttggcaacctggtgaaacaaatggtccaataaatcaaattccgtcactccgccttatgccggattttgcgggagtgtacagcttcttaggtagtgttttcgatccaagcacaagtgatcatctgcagaaactgaaggagatgaatccaattgatgttgagacggcgctgttgttgatgaggaatctctccatcaatttgaccagtcctgattttgaagatcaaaggaaattgttgtctttatatagcgcttctgatggacctgagctagggagctccaggagttcggctctagcaacgagtgcacctttcatgattaagggtggatagtgtggccaggtctgtccgcatataatttcagttggacagacctcaggatggtgccctggcgtagcaccgatgagtgacgaaggaggcgcctgcaccttttcgcttctcgctagcttcatgactgctgattgtgtaagggtgcggccatgaaaggtgagattggtctgcggtcatgaaaggtgagattggtctgcggcctgatgtgtatataaaatttttgccacgaaggaggcgcctgcacctatcccaaaagctcggccatctagggcattggatgctgcttcagttcagataatcaaggctgtccttggaaatgggacgagaggaaagatcccttccccattcgttgagttcagttctctgattggtttcttgctgccctcttgatacggggacctgtgcgccatgtggccgtctcgctgtttatgtgggcaagtttcacttgaggagttgagagggcttgaggcgatcgtggttttgtagagcaacgagtgcaccttccgaatattccttgttcctgtgtgaatcgtctatattgcatcaggcgtcgttgccattgtgtaaaagggaaataaaatcacaatgtaaaggatacactaccatttgaattgtattcagtatcgaagcaacctggcgacgagttcattgcaagggtggatatgttatttgaagtggcctttccaaatgctttcggtttattagttcaaaatatgatttagttttttttttttgcaatgct

SEQ ID NO: 209036 - DNA, 1454 bp, Zea Mays
ctgtgattcacaagctgaatatggagtacagctttgaccgtgactggaagaagatagaggcttttgttggctccaagaccgtcatccagattaggagtcacgcacaaaagtactttttgaaggttcagaaaaatggaaccagtgaacatgtcccacctccacgaccaaagcgaaaagctgcccatccatatcctcagaaagcttccaagaatgattcatcttccatacataggaactctggcatgaatgtgtctgtttcttcatggcctcataggtctatcccgcaagctgttgcttcatcgatggtgaaagaagatttaggtgctggaacactaggtccaaacaatttttgctcaagcagtactgaaggccctccaagaacttggcaacctggtgaaacaaatggtccaataaatcaaattccgtcactccgccttatgccggattttgcgggagtgtacagcttcttaggtagtgttttcgatccaagcacaagtgatcatctgcagaaactgaaggagatgaatccaattgatgttgagacggcgctgttgttgatgaggaatctctccatcaatttgaccagtcctgattttgaagatcaaaggaaattgttgtctttatatagcgcttctgatggacctgagctagggagctccaggagttcggctctagcaacgagtgcacctttcatgtaaggattaagggtggatagtgtggccaggtctgtccgcatataatttcagttggacagacctcaggatggtgccctggcgtagcaccgatgagtgacgaaggaggcgcctgcaccttttcgcttctcgctagcttcatgactgctgattgtgtaagggtgcggccatgaaaggtgagattggtctgcggtcatgaaaggtgagattggtctgcggcctgatgtgtatataaaatttttgccacgaaggaggcgcctgcacctatcccaaaagctcggccatctagggcattggatgctgcttcagttcagataatcaaggctgtccttggaaatgggacgagaggaaagatcccttccccattcgttgagttcagttctctgattggtttcttgctgccctcttgatacggggacctgtgcgccatgtggccgtctcgctgtttatgtgggcaagtttcacttgaggagttgagagggcttgaggcgatcgtggttttgtagagcaacgagtgcaccttccgaatattccttgttcctgtgtgaatcgtctatattgcatcaggcgtcgttgccattgtgtaaaagggaaataaaatcacaatgtaaaggatacactaccatttgaattgtattcagtatcgaagcaacctggcgacgagttcattgcaagggtggatatgttatttgaagtggcctttccaaatgctttcggtttattagttcaaaatatgatttagttttttttttttgcaatgct

SEQ ID NO: 209037 - DNA, 1449 bp, Zea Mays
ctgtgattcacaagctgaatatggagtacagctttgaccgtgactggaagaagatagaggcttttgttggctccaagaccgtcatccagattaggagtcacgcacaaaagtactttttgaaggttcagaaaaatggaaccagtgaacatgtcccacctccacgaccaaagcgaaaagctgcccatccatatcctcagaaagcttccaagaatgattcatcttccatacataggaactctggcatgaatgtgtctgtttcttcatggcctcataggtctatcccgcaagctgttgcttcatcgatggtgaaagaagatttaggtgctggaacactaggtccaaacaatttttgctcaagcagtactgaaggccctccaagaacttggcaacctggtgaaacaaatggtccaataaatcaaattccgtcactccgccttatgccggattttgcgggagtgtacagcttcttaggtagtgttttcgatccaagcacaagtgatcatctgcagaaactgaaggagatgaatccaattgatgttgagacggcgctgttgttgatgaggaatctctccatcaatttgaccagtcctgattttgaagatcaaaggaaattgttgtctttatatagcgcttctgatggacctgagctagggagctccaggagttcggctctagcaacgagtgcacctttcatgattaagggtggatagtgtggccaggtctgtccgcatataatttcagttggacagacctcaggatggtgccctggcgtagcaccgatgagtgacgaaggaggcgcctgcaccttttcgcttctcgctagcttcatgactgctgattgtgtaagggtgcggccatgaaaggtgagattggtctgcggtcatgaaaggtgagattggtctgcggcctgatgtgtatataaaatttttgccacgaaggaggcgcctgcacctatcccaaaagctcggccatctagggcattggatgctgcttcagttcagataatcaaggctgtccttggaaatgggacgagaggaaagatcccttccccattcgttgagttcagttctctgattggtttcttgctgccctcttgatacggggacctgtgcgccatgtggccgtctcgctgtttatgtgggcaagtttcacttgaggagttgagagggcttgaggcgatcgtggttttgtagagcaacgagtgcaccttccgaatattccttgttcctgtgtgaatcgtctatattgcatcaggcgtcgttgccattgtgtaaaagggaaataaaatcacaatgtaaaggatacactaccatttgaattgtattcagtatcgaagcaacctggcgacgagttcattgcaagggtggatatgttatttgaagtggcctttccaaatgctttcggtttattagttcaaaatatgatttagttttttttttttgcaatgct

SEQ ID NO: 209038 - DNA, 1448 bp, Zea Mays
gttgaggcagttcagctactgtgattcacaagctgaatatggagtacagctttgaccgtgactggaagaagatagaggcttttgttggctccaagaccgtcatccagattaggagtcacgcacaaaagtactttttgaaggttcagaaaaatggaaccagtgaacatgtcccacctccacgaccaaagcgaaaagctgcccatccatatcctcagaaagcttccaagaatggaactctggcatgaatgtgtctgtttcttcatggcctcataggtctatcccgcaagctgttgcttcatcgatggtgaaagaagatttaggtgctggaacactaggtccaaacaatttttgctcaagcagtactgaaggccctccaagaacttggcaacctggtgaaacaaatggtccaataaatcaaattccgtcactccgccttatgccggattttgcgggagtgtacagcttcttaggtagtgttttcgatccaagcacaagtgatcatctgcagaaactgaaggagatgaatccaattgatgttgagacggcgctgttgttgatgaggaatctctccatcaatttgaccagtcctgattttgaagatcaaaggaaattgttgtctttatatagcgcttctgatggacctgagctagggagctccaggagttcggctctagcaacgagtgcacctttcatgattaagggtggatagtgtggccaggtctgtccgcatataatttcagttggacagacctcaggatggtgccctggcgtagcaccgatgagtgacgaaggaggcgcctgcaccttttcgcttctcgctagcttcatgactgctgattgtgtaagggtgcggccatgaaaggtgagattggtctgcggtcatgaaaggtgagattggtctgcggcctgatgtgtatataaaatttttgccacgaaggaggcgcctgcacctatcccaaaagctcggccatctagggcattggatgctgcttcagttcagataatcaaggctgtccttggaaatgggacgagaggaaagatcccttccccattcgttgagttcagttctctgattggtttcttgctgccctcttgatacggggacctgtgcgccatgtggccgtctcgctgtttatgtgggcaagtttcacttgaggagttgagagggcttgaggcgatcgtggttttgtagagcaacgagtgcaccttccgaatattccttgttcctgtgtgaatcgtctatattgcatcaggcgtcgttgccattgtgtaaaagggaaataaaatcacaatgtaaaggatacactaccatttgaattgtattcagtatcgaagcaacctggcgacgagttcattgcaagggtggatatgttatttgaagtggcctttccaaatgctttcggtttattagttcaaaatatgatttagttttttttttttgcaatgct

SEQ ID NO: 209039 - DNA, 1464 bp, Zea Mays
tgttgaggcagttcagctactgtgattcacaagctgaatatggagtacagctttgaccgtgactggaagaagatagaggcttttgttggctccaagaccgtcatccagattaggagtcacgcacaaaagtactttttgaaggttcagaaaaatggaaccagtgaacatgtcccacctccacgaccaaagcgaaaagctgcccatccatatcctcagaaagcttccaagaatgaaccaaactatggtctcaagacagattcatcttccatacataggaactctggcatgaatgtgtctgtttcttcatggcctcataggtctatcccgcaagctgttgcttcatcgatggtgaaagaagatttaggtgctggaacactaggtccaaacaatttttgctcaagcagtactgaaggccctccaagaacttggcaacctggtgaaacaaatggtccaataaatcaaattccgtcactccgcccttcttaggtagtgttttcgatccaagcacaagtgatcatctgcagaaactgaaggagatgaatccaattgatgttgagacggcgctgttgttgatgaggaatctctccatcaatttgaccagtcctgattttgaagatcaaaggaaattgttgtctttatatagcgcttctgatggacctgagctagggagctccaggagttcggctctagcaacgagtgcacctttcatgattaagggtggatagtgtggccaggtctgtccgcatataatttcagttggacagacctcaggatggtgccctggcgtagcaccgatgagtgacgaaggaggcgcctgcaccttttcgcttctcgctagcttcatgactgctgattgtgtaagggtgcggccatgaaaggtgagattggtctgcggtcatgaaaggtgagattggtctgcggcctgatgtgtatataaaatttttgccacgaaggaggcgcctgcacctatcccaaaagctcggccatctagggcattggatgctgcttcagttcagataatcaaggctgtccttggaaatgggacgagaggaaagatcccttccccattcgttgagttcagttctctgattggtttcttgctgccctcttgatacggggacctgtgcgccatgtggccgtctcgctgtttatgtgggcaagtttcacttgaggagttgagagggcttgaggcgatcgtggttttgtagagcaacgagtgcaccttccgaatattccttgttcctgtgtgaatcgtctatattgcatcaggcgtcgttgccattgtgtaaaagggaaataaaatcacaatgtaaaggatacactaccatttgaattgtattcagtatcgaagcaacctggcgacgagttcattgcaagggtggatatgttatttgaagtggcctttccaaatgctttcggtttattagttcaaaatatgatttagttttttttttttgcaatgct

SEQ ID NO: 209040 - DNA, 1503 bp, Zea Mays
attatgtgttgaggcagttcagctactgtgattcacaagctgaatatggagtacagctttgaccgtgactggaagaagatagaggcttttgttggctccaagaccgtcatccagattaggagtcacgcacaaaagtactttttgaaggttcagaaaaatggaaccagtgaacatgtcccacctccacgaccaaagcgaaaagctgcccatccatatcctcagaaagcttccaagaatgaaccaaactatggtctcaagacagattcatcttccatacataggaactctggcatgaatgtgtctgtttcttcatggcctcataggtctatcccgcaagctgttgcttcatcgatggtgaaagaagatttaggtgctggaacactaggtccaaacaatttttgctcaagcagtactgaaggccctccaagaacttggcaacctggtgaaacaaatggtccaataaatcaaattccgtcactccgccttatgccggattttgcgggagtgtacagcttcttaggtagtgttttcgatccaagcacaagtgatcatctgcagaaactgaaggagatgaatccaattgatgttgagacggcgctgttgttgatgaggaatctctccatcaatttgaccagtcctgattttgaagatcaaaggaaattgttgtctttatatagcgcttctgatggacctgagctagggagctccaggagttcggctctagcaacgagtgcacctttcatgtaaggattaagggtggatagtgtggccaggtctgtccgcatataatttcagttggacagacctcaggatggtgccctggcgtagcaccgatgagtgacgaaggaggcgcctgcaccttttcgcttctcgctagcttcatgactgctgattgtgtaagggtgcggccatgaaaggtgagattggtctgcggtcatgaaaggtgagattggtctgcggcctgatgtgtatataaaatttttgccacgaaggaggcgcctgcacctatcccaaaagctcggccatctagggcattggatgctgcttcagttcagataatcaaggctgtccttggaaatgggacgagaggaaagatcccttccccattcgttgagttcagttctctgattggtttcttgctgccctcttgatacggggacctgtgcgccatgtggccgtctcgctgtttatgtgggcaagtttcacttgaggagttgagagggcttgaggcgatcgtggttttgtagagcaacgagtgcaccttccgaatattccttgttcctgtgtgaatcgtctatattgcatcaggcgtcgttgccattgtgtaaaagggaaataaaatcacaatgtaaaggatacactaccatttgaattgtattcagtatcgaagcaacctggcgacgagttcattgcaagggtggatatgttatttgaagtggcctttccaaatgctttcggtttattagttcaaaatatgatttagttttttttttttgcaatgct

SEQ ID NO: 209041 - DNA, 1656 bp, Zea Mays
aagagacaaaggtgctgtatctgctgtgccgctattcaaggtcatctactgatagctttctggtcctaagatcacactgataaaaggactggctctgaattactgccgttgcattctatgatgcaccattgcatgttgtgagcctgaacattgtgaaaaactttgttttatttggtgatattcacaaaagcatatattttcttagttggaaggaacaaggttctcaattgagtctgctggcaaaagattttggttcacttgattgttttgcaactgagttcttaattgatggaagcaccttgagccttgtagtttcagattctgacaagaacgtgcagattttctattatgcccccaaaatggtggagagctggaaggggcaaaagctcctttccagagcagaatttcatgttggagcccatgtgtcgaagtttctgagattacagatgttgcctacacaaggattagcatctgagaagacaaatcgttttgctcttgtatttggaacgttggatggtggaatcggatgcattgcacctgttgatgaattgacatttcgacggctccagagcttgcaaaggaagctcgtagatgccataccccatgtctgtggattgaatccaagatcgttcaggcatttcaagtcaaatggcaaggcacatcgtcctggaccagataacatcattgactttgagcttctttctcactatgagatgatgtctttagaagagcagctcgagattgcgcagcagattggaactacccgctctcagattctttctaactttagtgacttttcactgggcactagtttcttgtaagtggtaacctgtggctaagtaacaccatgcttctgatgaaagtggtgcttgccattcattagccacgtcaagaattaggcccaattccatcaacatggtcacttccaccagttttattgtaaagatggctgctgtaatttagatattaatggtgtaactggaagttgggcgcttggcaactgattgcaaccatatttgtttcgttggactgaagtagtattggaaactgcactgaaaatgaactatctgaagagtttctcgacaacgtctcagcataataaggggatgtttgaatgcactagaactaatagttagttggctaaaagttggtagtagaattagttagctaataaataactatctaactattaactaatttatcaaaaatagctaatagttgaactattagttaagttgtttggatgtgtcaactaattttatacattaactaaaagctatagtgcattcaaacactccctaagtcatgtttggcttagcttttagctaaacaacgaagaccctgtttggaagcaatattatttttaagttaggagaggctaccttggtttttaagaaactgagaatcaaatttttataaactgagtaataaaacttatgtttagaaccatctcaatttctataaactagtgtgttaaaaattggatggtttctataaactgagtcataaagtttatataataaagtttatatgaaaagcatggttttttgagtttggaaaactaatagtatcatcgaaaatctaccattagcttctcaaaataaaaaacctaacaacacttttttttaaaaaaaactttaatagctgagcttcacc

SEQ ID NO: 209042 - DNA, 2417 bp, Zea Mays
cccgcctcccgcaattcctccagctccccgaaactttttgcatctcctccaccaccaccgccccctccccttcgccccgacgaacacggcaccacgagccccgcacctcacacagatttagcctacctctcccaccgcggctacattcctcaccccaccctgtcggctgcataaacttttaaaaaaatgaaggcaaatatgggcacaaaagctcgtccactatctgttgacgcagacaaaggagagattggcgaaatagatacaagggctccttttgaatctgttaaagctgcagtgagtttatttggtgaagtcaaggtttcatctgacatatcagctgcaagaaagcctaaggttcctcaagcagagagggttttagccaaggagacagagctgcacttagcccagaaagagttgaataaatacaaggaacagctgaataatgctgagacaacgaaagtgcaggctctctctgagctagagaaagctaaaaaaactgtcgaggagctaacaaccaagctggatgtggttaacaagtccaaacagttggccattcaggcaacagaggatgcaaagactcgaaccaagcagcttgaaggtggcagcacaaatgaatgtctaggaacagatggtcctctgaggcaggaactcgaaagtgcaagggagcagcatgctatcgctttggcagaacttgatgcagcaaaacaggagcttagaaagctcaagaaggattttgaaacatctttggatatgaggttgtgtgctgcccagcaggaagacgaatcactccatacaactgaagccaacaaagaaaaagctaaccaacttcttggtgagattgcggaaattcaagaatcgcttatgcatgttaaggcagctacggtgcaagcacacgaagaagaggcacaaatccttgctgagaaggatgttgctagggccacgtataaacaagctttggaagaaacacagaagaaattgttgtctttgaggaatgattttgaccctgctgcttatgatagtctgaaagaaaaactagaacaaaccaattctgaggttgcatctatgcaaaaaaagatagaagatgctcgggctcaggatttagagtctgttgctgttgtcagcacagagttggatgatgctaaggaaatgttgcaaaaagtagcagaggaggaaagttctcttcgaagtttggtggaatcactgaaagtggaattggaagctgtaaaacaggagcacaaccagctcaaagagaaagacacagaaactgaatccattgtcggagatttacatgtcaagcttcagaaatgtaaatctgtgctggaggctgctgtggctgctgaatcaaaagctacgtcagcttctgatgacctgatgctggcccttcagcaactgtccgcggagtcaaacaatgcattgcaagaagctgagataatgcagaagagtgcggcggagctaagagaggaagccaaaaaggctcgggctgaactagcagaagccgaacaaaagttgcagttgacgttaaaggaagcagaagaggctaaagcagctgaagcaatggcccttgaccggatcaagcagctctcggacagagcaagtgccgctagagcatcaacttcagagtccggagcaaatatcgcaatttcaaaagaggagttcgaatctctaagccgaaaggtcgaggagtcagagaagttgagtgagatgaaagtcgctgctgccatggctcaagtggaagccatcagagccagcgagaacgaggcgatcaagaaactagaagctgctcgcaaggagatggaggacatggagttggcaacagaagaggccctaaagagggcagagatggccgaggcagccaaaaaggccgtggaaggtgagctcaagagatggcacgagaaagaacagaagaaaaccgcagaggccgcacagccttctgcgggggcagaagaactgggaagtgctgcgtcgccccctgtacgtcagacttctgccggaaaagcttccgagaagaacgaggggcatcagaggagcagtaaagcgctgctgaagaggagcttcatgctgccaaacatcgccagcatgttccataagaagaaaagccatccttccagttctccctcgcaccttcctggggaaaaatctgtgtgatctatccgaatccgaagctcctgtttgcgaactgaaatttccaaacttgaacgcttgcttttacactatattctgtataaaaatccgtctactcccttgcgccttgtagtaaatttcggacataattttaagattgcttgtaccccatatttttctgcactttcaggacttccggatgagtgcattgtacttcagcaacaacagtatctaagtcatgttcttgcaagcttccagaatagtggaagcatcacacatgctgcgaattgcattca

SEQ ID NO: 209043 - DNA, 1695 bp, Zea Mays
acacgcctctacagatccaggcgctcttctgctgcagcgccgcctctcgtcctcccggcgtcatcgtcgccgccctgatctccgcaggccggcgtgtggcggagatccatccgtgcttgaactgactccttccttagctagttcttggtgtgtctaagaccgcaagtcaggatgagcttaagaaagcatacagaaaagctgccataaaaaaccatcctgataagggtggagaccctgagaagtttaaagagctgtctcaagcttatgatgttcttagtgacccggagaagagggagatctatgaccagtatggagaagatgcccttaaggaaggaatgggaggaggcagcagcagtgatttccatagccctttcgacatttttgagcaactttttccgggttctagcacctttgggggtggtagctcaagaggacgcagacaaaagcgtggtgaagatgtggtgcatactatgaaggtttccttagacgatctgtacaatgggacaaccaagaaactatctttatcgcggagtgctttgtgctccaagtgcaaggggaaaggatccaagagtggggcatcaggaacatgccatggttgtcgtggtgctggaatgagaacaatcacaagacagataggccttggcatgatccaacagatgaacactgtttgccctgaatgcaaaggatcaggtgagatcataagtgacaaggacaaatgcccaagctgtaaaggaaacaaggtagtccaggagaagaaggtgttagaggttcatgtggagaaaggaatgcaacataaccaaaagattgtattccagggtcaagctgatgaagctcctgatacggttacaggagacattgtttttgtcttgcaacttaaagaccatccaaaatttaagaggatgtacgatgacttatatgttgagcacacaatctctctcaccgaagcattgtgtggcttccagtttgttcttactcatcttgatgggcgacagcttctgatcaaatctgaccccggggaggttattaaaccaggtcaacacaaggccattaacgatgaaggtatgcctcagcatggccgtcctttcatgaagggccgtctgtttgttgaattcaacgtggtgtttcccgagcctggtgcgctctcccctgcccagtgccgatcgttggagaagatccttccgccgaaaccagggagccaactgtcggacatggagctggaccagtgcgaggagaccacccttcacgatgtcaacattgaagaggagatgaggcgcaggcagcagcagaagaagcaggaagcctacgatgaagacgaggaggaggatgctcaaccaagggtgcaatgtgcccagcagtaaaatccgtgttcgttggaactgttctccaaaagtttcagcaggattttttatccatctgatcatctcgattctttttggcaaaaatataatcgttttataaactttaaactgttagttccatcctagtgtcagggaaaaaatgagagcccggaatggcatgttccttgtttgaactgcaatgcgtgattggtgttagttaagctctgctccatgttattttgttgtacccgtgaaaaaggtatcatgttcatggtgtgctactatttttgatgtgtaagaaacattgagcttgctggtagtgatgatttgtgatgcaccctggggtgctggctcaaaa

SEQ ID NO: 209044 - DNA, 1681 bp, Zea Mays
ctaaactttcccccctacataatcggcaatagtgcgggctgcggcaccgcagcagcgccatgaacgccgtcgaaccctccgccgccgccatcgccgaagaccccattactccggccgcctccgcagccccgtaccctggccgcctccgcgaagcacttaccgccctttccgaggcttgcgagtccggcaacttcaatgcttccgaaaccgcctccttcaccatctccgacattcttgacaccgcagccggcgtaagtggcgagctcgatgacgggagcgacgacagccaagacgcgtcgaggtcaggggcctccgaagtgctgcttcgcgaggtgctcgagttcctctctcgcccgtcatcgatctcgaaccagatggcccttgacgcgctctcgcttgtgcttcccaaacccgtggcgaagctaggggctcgaatggggagatgccgggatgttgccgcagctatcctaaagttcttcgtgacgaattgcaatccgagggacatgctctccatcctctgtgaggcattagatgcaccaatggagctaccaaatggcttatccagttttgttcttctactcgatgcacttgctaaagtgtttactttaattcagaggcgacatatcgagcaagtaaaggtggcactgcccgttgtacttaaagttatgcatgctactgtatcagaatgtgttgaggaacatggaagtgctgctgttgatcttttcaatgcagcacatggtgttggcaaggccattcaagaaatgtgcatatcaatgttcaacaaaaacaaagatctctgtgcaattcttggtttatactcccttcagaatatagctcttgtatcacgaagcagacagcaggatattctctctgcttgtggttcagttgtttttcagagtttcagatttcttaaaactagtggattcacctatcgtggcctactaactggcagtgatgtcacagctgcaacggttgaactttccaaagaggaagatgctgattttatggagcatttttcctttgctatggatggtgcagcactttcagttgtgtggacacttatgcatgatgataaagatatgtcaaagtatgctggagaagagttggaattagcagtaaaggaagttcagggcaaccatatggaaaaatgggaagcaattaacatgcttaaatatgtcctatcctcaattcattacccatggataatcaaatcccacagtttaaacttaatgctgattctatccggtgaagatcatgttgaagagatcaataatcatgtagatttcacatgctttgctcatcgcatttttgaaacactcaaggccattgaaagcgttatgattgctgcccctatggcattggtgcggaaaaaagcatttgctgctttgaaaaaggttatttcaatggtgccatcatcccagagatttgacatcttacatggtcttgtaaacaatagtacatctccagctttgactgcaattctccttgatctagtgaggcaggaagtttcgagagagagtcgccaagctgacaatgattgtattgaagacgaaggatttcgaggtaatgggttaccgcgctgggcatctcatgcacttgagttagttgagctgattttgaggcctccagaaggtggtcctccttgccttcctgatcacagtgaacaggaccttcgcacagg

SEQ ID NO: 209045 - DNA, 2383 bp, Zea Mays
agagggcaagacattctagagccggcctaccgcggggtacgtggcgacacctctcctgcaacgtgtccggcgcggacgacaggcatcgccgtcgccgtcacccaatggcctcggtgtccgtcgtgctgctacagcgctcctcctcgcgcgtccgaggatatatacggctccagcgcatcgccagctcttcagttacgttggttttggagggcgaggggcattggtggtggagcaacagccgcggccgcgacgagaggtttggcgcaagaacggtgcaccatatggcgggatcagtagagggggaaaacggcggcgtgccggtgggtggtcaagttgcgatggcgccgggcgtggtgaccggcggtgtggaggatgcctatggcgaggaccgcgcgaccgaggaccagactgtcacaccgtgggccgtctgcatcgcaagtggtcactccctgctgagggatccaaggcacaacaaagggctctctttcacggagaaagagcgggacacgcactacctgcgaggattattgcctccggtagtgctatctcaggacctccaggagaagaggatgttgcagaatgttaggcagttccaggtcccgttgcagcgctacactgcgctaatggaccttcaggagagaaatgagaggctattttacaagctcttgattgacaatgtcgaagaactgcttcctgttgtgtatacaccaacagtgggggaagcttgccagaagtatgggtcgatcttcagacgaccgcagggtttatacatcagcctcaaggagaagggaaggatcttggaggtactgaggaactggacagagaagagtattcaggttattgtggtcactgatggtgagcgcattttaggcctgggagatcttggttgccagggcatgggaattcctgtggggaagcttgcactgtatactgctcttggaggttgcttacctattaccattgatgtgggaacaaataatgaagacctactgaaggatgaattctacattggcttaaagcaaagaagagcaactggccaggaatactctgaatttctggatgagtttatggccgcagttaggcagaactatggacaaaaagttcttgtccagtttgaggactttgcaaaccacaatgcatttacacttcttgagaagtacaggacaaaccatcttgtatttaatgatgatatccagggcacggctgctgtagttcttgcagggattattgctgctctgaagtctgttggtgggactctagctgatcatacattcttgttcttcggtgcaggagaggctggtacgggcattgctgaactagttgctctcgagatatccagacaggcaaatgtttcagtagaagaggctcgcaaaaagatctggctggttgattcaaagggactaattgtggcctcacgtgaagagactctccagccatttaagaagcgatatgcacatgagcatgaacctgtcaaagatcttttaggtgctgttaaggctatcagaccaactgcactcataggatcagctggtgtaggtcaaagtttcactaaagaggtgattgaggttatgtcttcgattaatgagagacccattgtccttgctctatcgaacccgacgtcacagtctgaatgtactgctgaacaagcatatacatggagtcaggggcgtgccatatttggcagtggaagcccatttgatccggtgaaatataatgacaagctgtttgtgcctgcccaggcaaacaatgcatacattttccctgggtttggtctaggggtggtgatctcaggagccgtccgggtgtcagacgatatggttcttgctgctgctgaagcactagcggaacaggtaaccccggagcatattgagaaaggcctgatctacccgcccttctccatcatcaggaagatttcagctaacatagctgcccatgtcgccgcaaaagcttatgatctcggaatggctacccagctccctcggccaaaagacctggtgaagtacgctgagagctgcatgtacagccccgtctaccgatcgtacaggtgatgtgagcggacagtgctggatgcacctgaggatatatatgcatacctgctatgcttgttgttcatgtcgtcactgtgacgagtccgctgctgatactgcacgtgcgtactctatgtatgtagctgtgtaataaagttcaggggatgtaaattgacactcctaccaagtatgctgatgtatgttctcatgcgtgtcggggtttcttatacatggtttgtgttagatttagtatgaagatgacctctattttatttgatacaaatcgaataaattgtaggtttatattaaggccatgttcgtttttcttctaggattattattataatccagtttct

SEQ ID NO: 209046 - DNA, 2930 bp, Zea Mays
ccgcccccaagctgttcctgtttgcgacactccctgctaccactcagccgagccgagtagccgaccgaatcggcgtctcctccctccgcagctccgtttctccgacgcgctcagccgccggctaaccatctcaattctcacgacgtcaccgcctagtcgccctcactgacgacgcggcgccatgcctcctcttcctcgcgcccgcgccatcctactaccagtccctcctcctctccctcggttccaacgacaccgccgccgcccacctgcacgcgctcaccatccgcccccacctagcgggcacgggcgccaacgccctcgccgccgcgcacgtcgccgccacgctctcctcccactccttccggacccgcctcacgagctactccgtgctcctctcctaccctgcgtaccgctctctctcactctccgcgccggatcgcgacactgtgctcttcgctttgaagcaggaaacctacgcaggcgacccttacgaggcggtctccgccgaggccgtccccaccttcctcgcctacgcggcctccggttcggtctccgccgaggccgtctacgccaactacggccgcgcagaagatttcgcttacctcgccgcccgcggcatcgacgtcaccgggaaggtcgccgtcgcgcgctacggcgaagtgttccgcggcgacatcgtcaggaacgcgcgggatgccggcgccgccgcggcggtgatttactccgacgcgaaggactacgcggccgggaagaccttcccggacggaccgtggatgccgccgacaggcgtgcaggtgggtagcacgttcaagggggtgggggaccccacaacgccgatgtgggcgtcgtcggagggctgcgagcgcctgaccatcgcggaggcgatgagctccgatgacatgccggggataccggcgctgccggtgtcctggaaggatggggagaccatactacagctcatcggcggcgatgtggcgcccgagaattggcaaggaggcgatggcgcggcggcctataggggaatgagacgatggttactattcagaatgtcatttcggtgattgaagggggagaagaacctgaacggtatgatcaaaatccccaatcaccttacccccaatacctccttccaaactccaatttaggtaaggggcactgtatcatctacagtacaaatccgtctgtgggctcaagcattcagcctgaatgcgatggatggaaatttaaccttcgttaggtgaatgtgactagcaaaattgaagtgtatgagacactttttttctttgaacagtgtgtatggcacactttttcattgaaacggtgtgctcacacacactaaaagtatttgtaatcatactacagaggcagagttatggaactttgggtggctagtgatgaaacagtcaccatgaaccacttagtgttaaagatatatcacagatcttgtatggtatttcgaactacttagtcgcttacaaattgcaatctcattctttgaaagtttaaaaaaatctgtacaaattctgtgcaattatcattctaaaacatgcaggtatgtaatccttggaaatcaccgtgatgcatggacatttggggcagttgatccgaacagcgggacagcatccttgcttgagctagctcaacggttgtctgagctgcaaaagaagggctggagacctcgacggaccatcatcttgtgcaactgggatgccgaagagtatggattgacaggatccactgaatgggtcgaggagaacagggcaatgctaacttcaagaactgttgcttacctaaatgttgattctgcagtggctggtcatggattttatgcatctgcaactcctcaacttgatgaattgcttaaagaagctagtaagcaggtccaaaatccggacaatgggacacagagtctctatgatttgtggatgtcttctaacagttctcctttgattggaagattaggagggggaagttcggattattctgcatttgttcaacacattggtattccatcagtggacatggcgattgggtcagactatccggtctatcatagcttgtatgatgacttcatatggatggaaaagtttggagatcccttgttccagaggcatgttgcagctgcaagcatgtgggggcttgttgctcttaggctctcagatgaggagatcctacccttcaactacagcaattatgccacagagcttgagaatggagcattgggcataagtgaaagagtacagggaatgcctgtcagcttatcacccctgcacaagtcaatcaaagagttcagaaaggcagttgcaaaagtggattctgaattgaaggctctacagacatggaaaatttggtccccatggagaaacaaccccttaaaggtcagagacatcaatgatcggttgatgatgaccgaacgggcattcacagaccgggaaggactgtctggacggccatggtacaaacacctgatttacgcaccttcgctgcacaacgattacggggctgaagtgtatccaggcattggtgacgccattgagagggtgaagaaaacaaatacttctgaatccttgcaatctatacaacatgagatttacagggtctctcgagtcataaaccaggcagcgcttgttttaagtggagggctcacgtgaatgcagtagctggactgatacagtattgcatagtatggtgatattaaggggaaaaataaatttcactggcagtcattacatttgtgccgagttcttattttgattctggtacctataaattgcatattactctttccaaacttatccggttcctattttaaatcgtattctcaaaatttgtcatgggttcttatttcaaatttcaataaacactcggctccataaacttattgttatagtatcccggtcaatatcccatctccctgcactacggtctac

SEQ ID NO: 209047 - DNA, 4083 bp, Zea Mays
ttgcgttcatcaaccgcgtctggcgactcttgcgttcacggttcacccgaaccacacccgttcctttcctttctcctccctccctactcacacccctgaaccctttcacttcgtggcgccgactgcgcaaccggcaccaaccttcgccaggttttcgtgggctctttcaccgatacaaccatcctccaggctacttatattcggatctaacccaaagttgctgttttttccatatatgaaaagaagaacgcaagggatgctcgattgactctagttacttagcagaaccaaaagtggaaggccatcaaagatacgaggctattttctctccatgtctcggtcaccccacctcccaccccgctgcccaccgctgggtcctcagatcactcgaagggatgacggcatgttcacgcaaagctgcaggtttccatctggggatacgttcattggtgaaccaccgtgctggctggatgatctccttgaagattctgggaaagctcccaagctccctcctctcagaagggcctgcagcgattctgatgccatcttagatgcgctgtcgacattccagagcccaatttatccaatcgaggaatgtgatctaaactcaggtggtgaagctgaggacttgttgggtggagtcgaaggtgatgaaagtggttctgtggtcgaggctagctgtttctatggtccgaattcgccaagacagaagagtaggcttacaacttcagagagttccatgtgatgtgaatggtaatgtggccaatgtaactgctgatgcctgtgatgcttttggccatcctgatcaagacaagtcatttaaaaggcgctcagggcaaagatctagggtccgaaaacttcaatacatcgctgaacttgaaagaactgtcgaatcgcttcagaacattggagctgatttggccgtcagaatgtcatcacttttccatcttcacaatgctctatcaatggaaaacaagcaactgaggatacatatttccagtcttcagcaagcaaaactgattaaggatggtcagacgcaggccctaaagaatgaagctgaaaggttgaagcagatgtctgcccgtcaccgccggagcagaagcgtcacttcctgttatgacctgagctcattcggagcagatgctacggcagtcaattggcagatgcctgacatggcaaggctcagcctgaatggaagctcctctgtctccccaagaagcggctatggtatatgacagcagccggccctaacctccctcagaagataagtcgaggcattaccctagataacttttcgctaaccttacccaggcatatatttgagggcccatctttgactaggatatcagttggattcgctgaattttgcagaggctatcagcttaggcccggtttggttggggttttaggctgtttttgctttccaaaagccaaaagatcaaccaaaagacttttttcagaagcagttgcttttcgtaattttttttaaaacaccttagaccttgtttttggcttttggttttctgcttttctaaatgggttgaataaataacacagttgtttcgagagagatactataagaggtacattttacatttgttttaacggttcaggtttttcatagttgacgccttaccgcagagtacacaacatcttatcgctcatggctagtggtgataatggattatgatccaaatatttcttcacaagaaattagagctcttaataaattttagttaaaaatgaagaggaatagagattggtcctaatttgatttgacccttaaattttagtgtaaaatttagagcttattaacacccctacctatggcctacaacacattactcttagggtctgtttatttcggtatttttgataagcttttctaaaaatctggtcgtagggagatttaagtatcgtgagaactacatgtagggaaagatgaagtggtccataagatttgtgaaccagacagaatctactatcgtgacaattcgaccaattctatgttcacgttgattttgaacggtttttattaaaacgatttttacaaaaacaaattgaaagttagatgttttgcagtccacaacagcttttgatggctagaagctaaaaaaagttgaaacaatcaaaacttttcaattataataaaaaaggccacgcagaaataaaaaaggaaacaagactactgatacagggggtagaacaaaacgctgttggctgtcaattttgatctcatctattgaacgaatgactttggcaattatagcatgcctatttttggtcttttaaaagttgttggttgtatatatgttgtgatgctatgtcggggaaggttccctttctattattacaggccgtctgctcagtccgctcgactgattggcgtgtgtgtattgcaccccaccccactaaccttgtgcactacgccgggacaaatgacgtgacatgcaaggagggacaacacaagtacacaacaacccacgttaactaatgctctttttttagaaaacaacctaaaagcacttgcgacgtgtttggttcgatgtaatgtaatggtataggattccttcgggtatctgataacgttacatgtgtttgttataagttctattagaattagatacattggaatcggataccgctgtatagaaaactgaaaccctccaaccctagccggaatcaatgccccgattcactcgctcagggccgctcgagccttcctcctcctccttggacgccagtgccgcgccaccacctaggcctccatcctcctcggatgccagaagccagcgccaagtcttcgccgccgtccaggtaacaaatctcccagagtccattctctctaaatctcgaatttgcccagagtctgtctctctgaatcccctagagtccgtctctccgaatcccgattttgcccatgtgcttcgctcctttctagttcgtcagagttctagatccattggactgcgcgatagactgctccatgatcccgcggactactggttttggttcatcggagttctagatccagtgtaatcctggcagcagtagtagaccatggaggtctgctgcgcccagcgcatggcgtcccgctgctgcacgctgagtccgacgccgacgggggacgccggcacgggacgacactgggtgggactggcggacctgggagagggagagctggagagggcacgggggaatggacctagacctgcactgttttcttcagcgcgacagcccccagccaggtgtgggttgagttggactgccttcttcctcactggaatctgtatcccgttgtgcatttgctagctttatttttctgtggtccagcagaaataatttccagccagtttgcaccatgatcgcttccaaggttctggtcagcattttcaatcatttgtgaatcctgtcgttggttgctccttattttgtacgctagacttttgttgtacccaagcgttgctattcctcgtcgtaaactaatgaagggagtatttggcaattgtttctgtctattttatattctcttcattagtttcatacatatcttagatctgaatattttgttatataaattatgtttgactttatttattcgtaatctactactgtaaactataaacttgttggttggattttttatgtgggaatacataagaatgaaatcctggcacaagggggtttgttcagcagaggaaagttttgttcttaatttattagtctgcgggaagccaaagtggtttgcttctaagatctggtatcagtgaagaagcaatcaaagtgtttcacctgaaacgtaaattcttcgatttaggacaatttcactattcgatgataataatcctaacacaaactttgttttagttaagatggaccaatccatttgatcatgtactttataacaggatctgaaacttgtgtaacttgttttgcttcggatttagctggtggtactaccgtggccactccgaatgtcattttcttctgagtcctctatgctctgtttaatttatttgatgtgcacaatgatatccagatttatatgaaactcatttgttgacctccagatttatcctcaag

SEQ ID NO: 209048 - DNA, 4082 bp, Zea Mays
atgagccaggactacaggcccatttcattccgccgccaacttcaaggccgttgcgtttgcgttcatcaaccgcgtctggcgactcttgcgttcacggttcacccgaaccacacccgttcctttcctttctcctccctccctactcacacccctgaaccctttcacttcgtggcgccgactgcgcaaccggcaccaaccttcgccaggttttcgtgggctctttcaccgatacaaccatcctccagaacgcaagggatgctcgattgactctagttacttagcagaaccaaaagtggaaggccatcaaagatacgaggctattttctctccatgtctcggtcaccccacctcccaccccgctgcccaccgctgggtcctcagatcactcgaagggatgacggcatgttcacgcaaagctgcaggtttccatctggggatacgttcattggtgaaccaccgtgctggctggatgatctccttgaagattctgggaaagctcccaagctccctcctctcagaagggcctgcagcgattctgatgccatcttagatgcgctgtcgacattccagagcccaatttatccaatcgaggaatgtgatctaaactcaggtggtgaagctgaggacttgttgggtggagtcgaaggtgatgaaagtggttctgtggtcgaggctagctgtttctatggtccgaattcgccaagacagaagagtaggcttacaacttcagagagttccatgtgatgtgaatggtaatgtggccaatgtaactgctgatgcctgtgatgcttttggccatcctgatcaagacaagtcatttaaaaggcgctcagggcaaagatctagggtccgaaaacttcaatacatcgctgaacttgaaagaactgtcgaatcgcttcagaacattggagctgatttggccgtcagaatgtcatcacttttccatcttcacaatgctctatcaatggaaaacaagcaactgaggatacatatttccagtcttcagcaagcaaaactgattaaggatggtcagacgcaggccctaaagaatgaagctgaaaggttgaagcagatgtctgcccgtcaccgccggagcagaagcgtcacttcctgttatgacctgagctcattcggagcagatgctacggcagtcaattggcagatgcctgacatggcaaggctcagcctgaatggaagctcctctgtctccccaagaagcggctatggtatatgacagcagccggccctaacctccctcagaagataagtcgaggcattaccctagataacttttcgctaaccttacccaggcatatatttgagggcccatctttgactaggatatcagttggattcgctgaattttgcagaggctatcagcttaggcccggtttggttggggttttaggctgtttttgctttccaaaagccaaaagatcaaccaaaagacttttttcagaagcagttgcttttcgtaattttttttaaaacaccttagaccttgtttttggcttttggttttctgcttttctaaatgggttgaataaataacacagttgtttcgagagagatactataagaggtacattttacatttgttttaacggttcaggtttttcatagttgacgccttaccgcagagtacacaacatcttatcgctcatggctagtggtgataatggattatgatccaaatatttcttcacaagaaattagagctcttaataaattttagttaaaaatgaagaggaatagagattggtcctaatttgatttgacccttaaattttagtgtaaaatttagagcttattaacacccctacctatggcctacaacacattactcttagggtctgtttatttcggtatttttgataagcttttctaaaaatctggtcgtagggagatttaagtatcgtgagaactacatgtagggaaagatgaagtggtccataagatttgtgaaccagacagaatctactatcgtgacaattcgaccaattctatgttcacgttgattttgaacggtttttattaaaacgatttttacaaaaacaaattgaaagttagatgttttgcagtccacaacagcttttgatggctagaagctaaaaaaagttgaaacaatcaaaacttttcaattataataaaaaaggccacgcagaaataaaaaaggaaacaagactactgatacagggggtagaacaaaacgctgttggctgtcaattttgatctcatctattgaacgaatgactttggcaattatagcatgcctatttttggtcttttaaaagttgttggttgtatatatgttgtgatgctatgtcggggaaggttccctttctattattacaggccgtctgctcagtccgctcgactgattggcgtgtgtgtattgcaccccaccccactaaccttgtgcactacgccgggacaaatgacgtgacatgcaaggagggacaacacaagtacacaacaacccacgttaactaatgctctttttttagaaaacaacctaaaagcacttgcgacgtgtttggttcgatgtaatgtaatggtataggattccttcgggtatctgataacgttacatgtgtttgttataagttctattagaattagatacattggaatcggataccgctgtatagaaaactgaaaccctccaaccctagccggaatcaatgccccgattcactcgctcagggccgctcgagccttcctcctcctccttggacgccagtgccgcgccaccacctaggcctccatcctcctcggatgccagaagccagcgccaagtcttcgccgccgtccaggtaacaaatctcccagagtccattctctctaaatctcgaatttgcccagagtctgtctctctgaatcccctagagtccgtctctccgaatcccgattttgcccatgtgcttcgctcctttctagttcgtcagagttctagatccattggactgcgcgatagactgctccatgatcccgcggactactggttttggttcatcggagttctagatccagtgtaatcctggcagcagtagtagaccatggaggtctgctgcgcccagcgcatggcgtcccgctgctgcacgctgagtccgacgccgacgggggacgccggcacgggacgacactgggtgggactggcggacctgggagagggagagctggagagggcacgggggaatggacctagacctgcactgttttcttcagcgcgacagcccccagccaggtgtgggttgagttggactgccttcttcctcactggaatctgtatcccgttgtgcatttgctagctttatttttctgtggtccagcagaaataatttccagccagtttgcaccatgatcgcttccaaggttctggtcagcattttcaatcatttgtgaatcctgtcgttggttgctccttattttgtacgctagacttttgttgtacccaagcgttgctattcctcgtcgtaaactaatgaagggagtatttggcaattgtttctgtctattttatattctcttcattagtttcatacatatcttagatctgaatattttgttatataaattatgtttgactttatttattcgtaatctactactgtaaactataaacttgttggttggattttttatgtgggaatacataagaatgaaatcctggcacaagggggtttgttcagcagaggaaagttttgttcttaatttattagtctgcgggaagccaaagtggtttgcttctaagatctggtatcagtgaagaagcaatcaaagtgtttcacctgaaacgtaaattcttcgatttaggacaatttcactattcgatgataataatcctaacacaaactttgttttagttaagatggaccaatccatttgatcatgtactttataacaggatctgaaacttgtgtaacttgttttgcttcggatttagctggtggtactaccgtggccactccgaatgtcattttcttctgagtcctctatgctctgtttaatttatttgatgtgcacaatgatatccagatttatatgaaactcatttgttgacctccagatttatcctcaag

SEQ ID NO: 209049 - DNA, 3822 bp, Zea Mays
attccggcagatctccgagagtggaggaggaggtggcggtcgctccgtcgacgggcttccctccatcactctcctgctgcccgtcttgtgcggatcctgaacaagccaccacgcctcgtcttgtgctcttctcctctcgatcgcgcatgtcctgtcctgacctgaccggcccatcgccatcgccatagcatcgggggtcgagcagctcggcgaaatgacgcagctgggctgaggagagcggtcgatcgagagatcatccatcggggtcagggactcagggtgtgagcgagggtgtaggtagggtgggtaaagatggacaagatggagagctacctgaacgagaacttcgggggcgtcaaggcgaagcactcgtcggacgaggcgctggggcgatggcggagcgtcgtcggcgtcgtcaagaaccccaccaggcggttccgcttcaccgccaacctgggcaagcgctccgaggccgccgccatgaagcgatccaaccaggagaagctgcgggtcgccgtgctcgtctccaaggccgcgctccagttcatccacggcctgccgccgcagggcgactacgccgtgcccgccgacgtcaaggcggccggcttcggcatctgcgccgaggagctgagcttcatcgtggagagccacgacgtgaagaagctcaagtcccacggcggcgtggacggcctcctgtccaggctgtccacctcggcgtccgacggcctcgacggtagcaagctgatggcggcccggcaggagctcttcggcgtcaaccgcttcgccgaggcggagccccgcagcttctgggtcttcgtctgggaggcgctccaggacatgacgctcatgatcctggccgcctgcgcgctcgtctccctcgtcgtcggcatcgccaccgaggggtggccccacggcgcgcacgacgggctcggcatcgtcgccagcatcctgctcgtcgtcttcgtcaccgccaccagcgactaccgccagtcgctgcagttcaaggacctcgacaaggagaagaagaagatcacagtgcaggtcacgcggagcgggtaccgccagaagctctccatctacgacctcctcgcgggcgacatcgtgcacctcgccatcggcgaccaggtgcccgccgacgggctcttcgtgtcgggcttctccctgctcatcaacgagtccagcctcaccggagagagcgaacccgtcgcggtgagcgccgagaacccgttcctgctgtcggggaccaaggtgcaggacggcgcgtgcaagatgctggtcaccaccgtcggcatgcggacgcagtggggcaagctcatggccacgctcagcgagggcggcgacgacgagacgccgctgcaggtcaagctcaacggcgtggccaccatcatcggcaagatcggcctcgccttcgccgtggtcacgttcgcggtgctcacgcagggcctgttctggcgcaagctcgccgacggctcctacttcagctggaccggcgacgacgcgctggagctgctggaggtcttcgccatcgccgtcacgatcgtcgtcgtggccgtccccgagggcctgccactggccgtgacgctcagcctggcgttcgcaatgaagaagatgatgaacgacaaggcgctcgtgcggcacctcgcggcctgcgagaccatgggctccgccaccaccatctgcagcgacaagaccggcacgctgaccaccaaccacatgaccgtcgtgaaggcctgcatctgcggcaaggtgaaggacgtgaacagctccgcggagaccaagacgctgccctccgacctgccggcgtccgtcgtggcgatgctcctgcagtccatcttcaacaacaccggcggcgacgtcgtgctgaaccaggacagcaggcgcgagatcctgggcacgccgaccgaggccgccatcctggagttcgggctcgcccttggcggcgacttcgcgacggtgcgcaaggcgagcaccctgctcaaggtggagcccttcaactcggcaaagaagaggatgggggtggtcatccagctccccggcggcgcgctgcgggcgcactgcaagggcgcgtcggagatcgtcctggcgtcctgcgccaggtacctggacgagcacggcaacgtcgccgccctcgacggcgccaccgcggaccacctgagggccaccatcgacagcttcgccaacgaggcgctccggacgctgtgcctcgcctacgtcgacgtcggcgacgggttctccccgagcgaccagatcccgacggacgggtacacgtgcatcggcgtcgtggggatcaaggatcccgtccgtcccggcgtcaaggagtcggtggcgatctgcaggtccgctggcatcaccgtcaggatggtcacgggcgacaacatcaacacggccaaggcgatcgcgcgggagtgcggcatcctgactgaaggcggcgtagccatcgaaggcccagatttcagagtcaagagtgaggaggaactgcaagatctgatacccaaaatacaggtaatggcgagatcttcgccgctcgacaagcacactttggtgaagcacctacgaacaacatttgatgaagttgttgcggtcaccggcgatggcacaaacgatgctcctgcgctacacgaagccgacattgggcttgcgatgggcattgctggcactgaggtggcgaaagagagcgccgacgtgatcattctcgacgacaacttctccaccatagtgactgtcgccaaatggggccggtcggtgtacatcaacatccagaaatttgtgcagttccagctgacagtcaacgtcgttgcgctcatcgtcaacttctcttcagcttgcctgatagggagcgcgcccctgactgcggtgcagctgctctgggtgaacatgatcatggacacgctgggagctctggcgttggccacggagccccccaacgacgagctcatgaagaggactcccgtcggaaggaaaggcaacttcatcagcaacaccatgtggaggaacatcatggggcaggccctctaccagttcctcgtcatctggtacctgcagtctagggggaaacggctcttctggatcgacgagggcgccgccgacgccgacctggtcctgaacacggtcatcttcaactgcttcgtgttctgccaggttttcaacgaggtgaactcgagggagatggagagggtgaacgtgttccgaggcatcctggacaacaacgtgttcgtcatggtcctcggcagcaccgtcgtgttccagttcgtgatcgtgcagtgcctcggtagcttcgccaacacgacccctctcagcctcgcgcagtgggtcgcctgcgtcgccatcgggttcgtaggcatgcctatcgccgtggcggtgaagatggtgccggtggagtaggccggccttcagtggaggcagccaggcagttttggccgttgttgcttgccctcgtcatacagacatcttcctcgcttatgatctagacttctctggaggtcgagccgccatggcgatcggctcgattctgaaaagtgttgggtagaatcttgtagctttgaaagtttcagtttcagttttttttttgttcccagacgttcttcatttggaagtagtaactgttggcttgaaatgtttattacagatgtactgattttttttaagaacagaacaggttttattcatttgttattctacaaagggttcctgtgtcttgagatatatatagtgttgtaatttctagtaacggatcggtgagcatagtttgtgttagatttataagaggaggcacgaataagccacatttccgtatgggctctctaggtaacttttatttaaaat

SEQ ID NO: 209050 - DNA, 1191 bp, Zea Mays
taagttgtttctgcttgattgcaaatggaggtggcgaaagagagcgccgacgtgatcattctcgacgacaacttctccaccatagtgactgtcgccaaatggggccggtcggtgtacatcaacatccagaaatttgtgcagttccagctgacagtcaacgtcgttgcgctcatcgtcaacttctcttcagcttgcctgatagggagcgcgcccctgactgcggtgcagctgctctgggtgaacatgatcatggacacgctgggagctctggcgttggccacggagccccccaacgacgagctcatgaagaggactcccgtcggaaggaaaggcaacttcatcagcaacaccatgtggaggaacatcatggggcaggccctctaccagttcctcgtcatctggtacctgcagtctagggggaaacggctcttctggatcgacgagggcgccgccgacgccgacctggtcctgaacacggtcatcttcaactgcttcgtgttctgccaggttttcaacgaggtgaactcgagggagatggagagggtgaacgtgttccgaggcatcctggacaacaacgtgttcgtcatggtcctcggcagcaccgtcgtgttccagttcgtgatcgtgcagtgcctcggtagcttcgccaacacgacccctctcagcctcgcgcagtgggtcgcctgcgtcgccatcgggttcgtaggcatgcctatcgccgtggcggtgaagatggtgccggtggagtaggccggccttcagtggaggcagccaggcagttttggccgttgttgcttgccctcgtcatacagacatcttcctcgcttatgatctagacttctctggaggtcgagccgccatggcgatcggctcgattctgaaaagtgttgggtagaatcttgtagctttgaaagtttcagtttcagttttttttttgttcccagacgttcttcatttggaagtagtaactgttggcttgaaatgtttattacagatgtactgattttttttaagaacagaacaggttttattcatttgttattctacaaagggttcctgtgtcttgagatatatatagtgttgtaatttctagtaacggatcggtgagcatagtttgtgttagatttataagaggaggcacgaataagccacatttccgtatgggctctctaggtaacttttatttaaaat

SEQ ID NO: 209051 - DNA, 1751 bp, Zea Mays
catgtgcctacgacagctcgggacttcgggagccgcgggtgatcggaccgcgccccggccgggtggccttgcgtacggcagtggaaagtggtgatgcgctcagccgacacacacaccgcaaaaggcccacgagaagaccccgccggcccgccctctccctccccacctctactccacctccaatcctccccgttgctgtcccgccggcgtcgaagctcgagagaagggtgagcaccttgccgcgaggtgtgtccggtgagctagctagggacgcgccagctcgtgctgatctgacctggaagctctggaggcgatgaaagcgctcggacgggcgatgaggtgggcttcctgctgcaagctctcggacggggatgaaccaggtaggaggaagaaggacgcatcgtggcggatcttttcactgaaggagcttcagtcagcaacgaacaatttcaattacgataacaaggtcggcgagggtgggtttggcagtgtctattggggccagctctgggatgggtcacaggttgctgtgaagaggctcaagagttggagcaacaaagctgaaacagaatttgctgtcgaggtggagattctggcacggcacgcagcagagtgcaatctcagttgggaaagaaggatgaagatcgccgtcgattccgcagaagggatcgcttatctgcatcaccatgcgacgccacacatcattcatagagatgtcaaggcgagcaacgttctcctggattcgaatttccaagctcgggttgctgactttgggttcgccaagctagttccagacggcgcgacgcatgtcaccacaagggtgaaaggcacactcggttatctcgcaccagagtacgcgatgcttgggaaggcctctgaaagctgcgatgtcttcagtctcggagtcatgctcctagagcttgccagcgggaaaaagccagtggagaagcttaaccccaccacgaagcgaaccatagctgagtgggctcttcctctagctcgggacaggaagttcaaggaaattgccgatccaaagctcaatggtagcttcgtcgaggacgagctgaagcgaatggtgctcgttgggctcgcctgttcccaggacaagccagagcagagacccgtaatgtctgaagtcgtcgagctgctcagaggagaatctaccgagaggctttccaggctggagaatggtgatctgttcaagcctgatatctcgttccatggctcatccggacctgatagctcggactgcgtcacggaggagaggagtcccaaggcagatgcgacagaggaggctgttgattcaagtgagacggttccctcagcaaggtagtgtgatgcacggtggtgtactgtcagtaggtgccctgagctccttgcctgggggaaatgtgtttatcagttcatttttgtggttattccttgctatttagcaagttaatctgggagcctccttgcccggttctcttgtgtggtgtcattccttcgtgttggcatggttctatggcttgtaaaattctgtatgtaaatctgggcctggttccatcccttcgtgtagcaagcagttcactgcactgtggttagcgttttagctacttcagtccattaatgatttgtgtgtaagtctgtaatatgtatttttttaggtttttatgatggaacttcgtttttctaaaagatttttattttttcaagggacaatgaactaatttttttggaaaatagaaatctattatgaaaatgaggttctc

SEQ ID NO: 209052 - DNA, 1855 bp, Zea Mays
aagcagccgagcaggaccgtgcgcctagaatgtggacgactatggtacaaacataagtattagaggtttgcacgacgtctggtgtgtgcgagctcacagtcacaaaagaaacgatgtccactggcgaactgacggctccgtcatgcggcgatcgataaaaatgccgcgaggccaccacgcgagacgaacgcaaacgaagtgcggaaaataggcctattttttcttcttcctcgtagagatatttcggaagagggaacgagggcttcgattcgatccaggagtcgcccaaatcgtcttgtcttcgacttcggacacgagatcctctagagggttgtgctgtttggcgtgaggctttgggggcgatttgctttgctcgcatgggggatcatgtcgctgtggatgttggggagctcgttgcgtcccgagtcggtgaggcagcggggctattgtccggcggcaaggaggaaatgaaggcgctggctgggatggtggagtgccgcatttgccaggaggaggacctcgcaaagaacctcgagagcccctgtgcttgcagcggcagcctcaagtatgctcacagggaatgtgtgcaacgttggtgcaatgagaaaggagatataatctgtgaaatctgccatgagtcgtacaagcctggttacactgccccaacccaggtgcatcatgatgaaactaccatagagataagtggtggagattggaccatctctggcaaccgtttggatttacatgatcccagaatattggcaatggctgctgctcaacaccgtttacttgaagacgagtacgatgaatatactgcaacaaacaataacgctgctgtgttttgccgctctatatttctgattttgatggcccttctgctcctgaggcatacattgaccattactaacagtgatgatgaagatgatgcatctgctattttctcgctatttcttttgagagccgctggatttttgctgccatgctatattatggcttgggctattagtatcatgcagcgtcaaagacaaagacaggttggtggctcggtgccaatggaaatgtttctctttcatgtgtatactgtattgacttttgacggaaaagaattccacgaaactatttatacctagcatggattgaatatatatattaacggagttaagcaaccttttttccccattggttgcacacatccttttctttagggatggctgcacacatatccttgtttgaactgaggagttggatcttgggatgatcgtatctgtcctttctgatcaaacatgagatttctaagttagagaaaattgagatcatttgttgtctgtttagtatttccgtagttttataccccattaagtgcgtgggctgggctacatagtctttgttcctaattgccataccagtgaagaacgcatggatggttcttgttcatttttgatatgtcaggaagaagcaatgctgttaccaacggaagtggcgatcattctgcacccggacggaagaacaatgcaatttgcggtggcaccagcggaatctcctgcatcacatcagtgacaggctcacaggcctgcctcggaatctcagcatctggtcttaaaggtggaaagacgaggacgttgtgcaattcatgttgtgccttcgaatttagttaactttcaagcggagattcaatgtttgttcgatgggctctcagcaccttctgtacataaagagatttatctaataactaataagtgaatataagttaaatcaacacaaagtttgattttgtattgtggtatatacgaccgctgaacagatttctcacgtttggggaaagccatatttttggatgcagctaaaacgtcctaga

SEQ ID NO: 209053 - DNA, 1771 bp, Zea Mays
tgataaagggaagaaaaaaagcgtgacaccaacacgacatcctctcccctcgtccgctccgctctagcctgctgccatcctgtcctctcgtctcgtctcctcgcggcgctcctcccctgctcgccacctcccgccctttttaaaccaccaccactaccaaattcacttgcctccccaacaccgcttggccgcttggcgcttgctgctgcggcccgtcggtctaggcgtctagctaagctacctcgttatttaggcgacgcttgcatagcccagggctttgacacgacgcgacgccgattaagcgacacgaggccaggtcccggtcccggtagctcgaacgaggagctaagcagaggcgccgttctgctggttggcttctgtgatggggtcgtccacggaccacggtggcgccggttggcggggcaagaagcaggggtcgcagctgtggaagaaggcgctgctgcattcctccctctgcttcgtcatgggcttcttcaccggcttcgcgccgtcgtccgtgtccgactggacgtccgcggcggcggcggcgggcagcagcagcagcagcagccacgtggtacgggcgctgccggcgggcggggccttgaaccggagcctgctggcgcacggcgcggggcctggctacgaccgggcagcgtctccgcgcccgctcctggtggtcgtcacgacgacggagtcgacgcccgtggcgtccggcgagcgggccgccgcgctgacgcggacggcgcacgcgctgcggctggtggcgccgccgctgctgtgggtggtcgtggaggccgccccggacgcgccggccacggcgcggcagctgcgcgccacggggctcatgtaccgccacctgacgtacagggacaacttcaccgccgcgggcgcgggcaaggagcgccaccaccagcgcaacgtggcgctcgggcacgtcgagcaccaccgcctcgccggcgtcgtcctcttcgcgggcctcgacgacgtgctggacctccgcctcttcgaccagatcagggagatcagcgcgttcggtgcgtggccggtggcgacgatgtggcgggacgagagggaggtcgtcgtgcggggccccgcgtgcagctcgtccgcggtcaccggctggttctcccaggacctgagcgacggcaccgcggctgctgcctctaccacctccaccgcgagggcgaggccttctggcgaggtggacgtccacggcttcgccttcaacagctccgtgctctgggaccccgagcgctggggccgctacccgacctccgagcccgacaagtcccaggactccacgaagttcgtccagcaagtggttctggaagatcttagcaaggtgaagggcattccttccgattgttcagaggtcatggtatggcacgtcgatacggccgcgccttctccctcgtctccgcagaacaagaggagatagagagctgaacaccatagaagagaacggacgagcctggaggacggccggagtggtgtacactgtacatgcatggctacaccactgagatgctgattgtcctcctagctagttgcaaagaaggaaaatttttggttttctcaccggaggatggatccacctctgaccccccccccccccccccctccatcataatgtgcgattttctgctattcttttttttccttaaaaatgtgatatatgtatattttcccttttctttttactcaagtgggtttaggtgaatacaaacataataaccccttgaagtgtttctcaaggatgtaaaaagaa

SEQ ID NO: 209054 - DNA, 689 bp, Zea Mays
cagaggatctgcagagatggcaaatgccaactcgtccttattttctttattatattcctttaattactccgatgcgttgggctgatctggtgccaagagaagaagatgggggttattttagggttacgattgactgtcgatctttcttgacctaacaactaaagcagcccgtttggtgtgacggactccacgaagttcgtccagcaagtggttctggaagatcttagcaaggtgaagggcattccttccgattgttcagaggtcatggtatggcacgtcgatacggccgcgccttctccctcgtctccgcagaacaagaggagatagagagctgaacaccatagaagagaacggacgagcctggaggacggccggagtggtgtacactgtacatgcatggctacaccactgagatgctgattgtcctcctagctagttgcaaagaaggaaaatttttggttttctcaccggaggatggatccacctctgaccccccccccccccccccctccatcataatgtgcgattttctgctattcttttttttccttaaaaatgtgatatatgtatattttcccttttctttttactcaagtgggtttaggtgaatacaaacataataaccccttgaagtgtttctcaaggatgtaatggatagatggcaagctaaaaaagatcaacttaacaat

SEQ ID NO: 209055 - DNA, 2550 bp, Zea Mays
caaacaagtacgaggagtcgaggactgcagctgccccaccaaacgccgacctgccgggacatggcagctgcggcgccggccgcgggcaagggaaaacgaaagcgccacctctccgaggacgacgtctgcctcctccaaaggtacaatccggggacgatcctgacggcgctgcaggaggtggcgcagcatgcggagggccggatcatcgactggagggcggtggtggcgaagtcggccacggggatcacctccgcccgcgagtaccagatgctctggcgctacttagcatatcaccacgacctaaacgagagcatcgaagccggtgacctgcctctgtgacctggaattggagcttgaacccaatcccagcgagaccaaggaagctttatctgaggcctctgcattggccaaggcgctaatatccagatcttcacgtgagcaagcctcgggtcatcgcattaatttggatgttcctgcgctgaacactcaaaatgaaaagatagtgcgggttccatctaagcagcttgctcagagtcatcgtgtaacaaatgttacatgtcctgtttccaatccaaaacagttatctcatatagtaccctctcctactcatttggatccaaatggagcttctaaaaagagaaaaaaggcaaaagcttggtctaaagaggaggatgcagacctagcagctggtgtgcagaagtatggtgaaggaaattgggaggtcattttgcataaatgtaactttgataatacaagaacgcctgatcagttatctcagagatgggcactaaaacgcccaggaggatcaaccaagcctgctagcactaaacacgcctctgttggctcagaagaaagatcagcaactatcaaggcacttcatttggctgtcggtcctatgcctgtatcatctgcactaagatcaggacgtgaacaaagcattcagcataagtctacagcgtttgctcctaagatgccacaagtaagatctgcagtaaccccttcactggcaccggcactggcgctgccagtccaacctctgcgtgtggcagctgaagttcagtctccgcttcgtcatgggcaacaagctcctggccaaggtgcgccaccaaaattgtcaaatgcttcaaataatacacggaagaagcaagcagctctgccaaattctactttcagtccttcctcaatacaagcagcagcaattgctgctggtgggcgacttgccacagcctcaactgccgcaaatcttttaaaagctgcacaatctaagaatgctgtgcacataagatctctaggagcaacatctttgaaatcttctgcaagctttgatcatgggacacaatctgggggctcccagcacctagaatctctaaatgctagcgcagttaatggtgtttcaggagtttctgcagttaatcaatcagggccacctgctggagcggaaactaagaaggcattgggtaccacactagcacctgtcccatgcgacagcgaggaaaatgaggatggctctgaattttgtgcgattacgttagatgacttattccctgaagatgcaaagcagccggaaactgtggataccaaggcaaagcaaccagaaaccacgggtcccaaggcaaagcagccagaaaatgcagatcccaaggcaatgcatcaagaaaccatggatcccaaatcaaagcagccagatacactaaaggttgggatattagatcccaaagataaagacatgctagagttcgatcaatatgttgcttctcaaggagcacacttaaacacggatgatctgaataaaagcaagtgtaccaacagtgcttcccaagcccaaggtcttgttggcagccagaagaacccactgaaactgactcctgtggacgggaaagctaaccctgtaactgcggctgggagaggtaagcctgtagctgctggagtggcatcaaccggaaagaaggctacaatccctatctcacatttggcagcagggaccccacgcggcatagttgacacagtcaatgccaacgccccaattagaagaacactaacaaggagggcagccgcccttgtccccgctggttgccaagctcctcccccgaagcatgccatagacgcgaaaggctgccaaatgacgaatagcattgccacgtttgtcagttctggagtaccagccagcagccaggctagcacgcccgcgaaagatgctaacaaagcaagcccaccgtccagcagctgccagcccaagccggatagtgtggcggtgaacggtgctatcagggccgtgaagagtgttgctaagaaggggaatctgccagcagcagcagccaggcaatagacaggaccctgaataacacggtaaattttgtagtaatacccgtaggacttttgcgcgtcgattgtaccttggaatgtgaatattagtcgttttgcgtgtcattcttttcaccttgcatttgggtgatttttgtctggtattcctgctgggcatcgctaacgtaacttgaaagacgttctcgtctagttcccttgtgaagtgtgatgcttgtgtgtgtgtgtcta

SEQ ID NO: 209056 - DNA, 1104 bp, Zea Mays
cacaaacaaggccgtagcccgcagcttcgtctgttacgctacgtccggttccccaccgcgccgtgtgaaaaaaatggctgtgccggaggtggtggtggacggcgtcgtcttcccgccggcggcccgcccgccgggctccgcgggctcgcatttcctcggcggcgcaggtgcgtggcctcgagatcggaggcaacttcgtcaagttcacggccatcggcgtgtacctggaggacgcggccgtgccggcgctggcgaggaagtgggccggcaagacggccggcgagctcgcgtccgacgccgccttcttccgcgacgtcgtcacgggcggcttcgagaagtttcgcgcggggtgacgatgatccgcccgctcacgggcgagcagtacgcggggaaagtggcggagaactgcgtggcgtactggaaggcggccggcctgtacacggacgccgagggcgtcgccgtggagaagttcaagcaggtgttcaagccccatacgttcccgccgggagcctccatccacttcacgcactcgcccgccggagtcctcaccgtcgccttctccagggactcgtcggtgccggttgccggcggcgtggcgatcgacaacaagcttctctgcgaggccgtgctggagtccatcatcggggagcacggcgtgtcgccggccgcgaagctgagcctcgcggcgagggtgtcggagctcctgaccaaagggaccgccgcagccgcagccgcgctgcgggcggagcccgtctcggttaccgcctgagcggtccagcgaaccgcgaggagaaagagaaccgatcaagcaatcacgtctgccgcccttgcgtgctcctgctccgaacagatgccacgacggacggtgacgctgtcgcgtctgtttgcgctgtggcgttggcgtcgtgtctctgcctttctggccgcatgtgttcgctgtggtaacatttgaataaaagaaaacgcagatttgtttgcactgcaccccctaattccccagcgtgtgtggatcaatgtttgactcaaccacggactttggagattgcttattagtactgtgacgccgagactagtcacggttcctgctctaactatgacctactt

SEQ ID NO: 209057 - DNA, 966 bp, Zea Mays
gtgcgttgcgtccccggtccagtccaggcgtgcgtggcctcgagatcggaggcaacttcgtcaagttcacggccatcggcgtgtacctggaggacgcggccgtgccggcgctggcgaggaagtgggccggcaagacggccggcgagctcgcgtccgacgccgccttcttccgcgacgtcgtcacgggcggcttcgagaagtttcgcgcggggtgacgatgatccgcccgctcacgggcgagcagtacgcggggaaagtggcggagaactgcgtggcgtactggaaggcggccggcctgtacacggacgccgagggcgtcgccgtggagaagttcaagcaggtgttcaagccccatacgttcccgccgggagcctccatccacttcacgcactcgcccgccggagtcctcaccgtcgccttctccagggactcgtcggtgccggttgccggcggcgtggcgatcgacaacaagcttctctgcgaggccgtgctggagtccatcatcggggagcacggcgtgtcgccggccgcgaagctgagcctcgcggcgagggtgtcggagctcctgaccaaagggaccgccgcagccgcagccgcgctgcgggcggagcccgtctcggttaccgcctgagcggtccagcgaaccgcgaggagaaagagaaccgatcaagcaatcacgtctgccgcccttgcgtgctcctgctccgaacagatgccacgacggacggtgacgctgtcgcgtctgtttgcgctgtggcgttggcgtcgtgtctctgcctttctggccgcatgtgttcgctgtggtaacatttgaataaaagaaaacgcagatttgtttgcactgcaccccctaattccccagcgtgtgtggatcaatgtttgactcaaccacggactttggagattgcttattagtactgtgacgccgagactagtcacggttcctgctctaactatgacctactt

SEQ ID NO: 209058 - DNA, 841 bp, Zea Mays
cttgttttgtaagccatactgtgcgaaggccatgttccctgatacaaccttctcaggatcaccatgccctgatacaacctgcaccggactctcctgcctccacctaccgttttcctaaaacaccatgcgctgatagattctgcagcactgtaactgaagttggaagttccaccatctcactgcgttgaagttggtggttgtgctggtatttcacctttaactgtaaggactaatttgggaacccaatttttccactggattttcattttcctaaggaaaattagttcattttcccttgagaaaataggaatcccttagaaaaatatagtttccaaactagccctaaaattaaaagtgggttgtggttcaaacggagctgatttttgtgaggccatgttcctcatccccagacatggcatccaaaagaaagtttagttcttgtagctgtactccctggtagaatgagagaggtttgtacaaaaggtaacctgattgttcttaccaagacttgtcatagaaaggattgatgtatctagtggctactcaagggacagcttcataatgccgtatgtgttggcacgcgcacgcaccccgccgttgtgtttgggacgaaaacacttcctagaattcctagataactgttgaaggacttttatgaggatttattgattgattcgagttcatgtccttaatgacttgatgtagtgcttcatagttggaggctggggttgtataacagtgtaccatatggttctttcgacttttgcccccatctaacttgagtatttaagattgaacttgtaaagattttattttaaaaggaagcatgttgaaatgtgtc

SEQ ID NO: 209059 - DNA, 3124 bp, Zea Mays
tggataaagttgcacatagaagatctgcttaaacatctgatacatttcggttcaaggatagcgagggagtcgaaccgcaagaacttcggcagcaacagagccgcgaaccaggcatcagcaggcagcgtgcagattcaccagagtccagcttctccagtggcgtcggccacacgccagccatttcttaccaacaatcagccatgaacacgcttagctgtgacaagtgccgcatggtttggttgatggagcatcattatcagttgttacggttcatcacaaattttcaaacgattcattgtcagctggatggagcatccatcatttgttatgtatactagccctgaatcctgatcatgtaacagcaacttggacgtggttgaaacctaaaagtggccggctgctttgtgtcaggctgatgtggcgcctgcgttgggccggtttagacgagtaggtccaacctggatctgaccccacatgtcagtgactcaactgcaggggatctttctccggtctggacctgaccaaacaatgctggatgtaaagcagtcgtcggtgtcaatattttttaaaaaatcctatatttctttagaatcagctcgtacttctataatctcttatctactactataataaaaatatttatataaaaaataagtatataaaaataagtatttaaacattgatggttggctccatatttatacacttaatcaatagaaaatatatattttgtgttaatgttataccccggagtcgagtggcgagtccaatctcagactagccacgtgtacggcgtgcagtccttgctacgcgcacccctcctaccgcacacgcgaatccagccagcccacccaccgccgccgcctgctcgtccgcctctataagatgagacctgcccaccgccatggcgccatcccctccctcgaatcactcaggcggccagccgggagcgagagcgagctggaggagctcgattcgatgcgttgctgagcgtgggtcaatcgattcgggtcgggcggtggcgcagtccgagagatctgaaccctagcggccgtctgcccgtccggatctgtgaccagccctgctcggtgcttcggcggcatgagtgcctggaaggcgtggggaggagaagcggcggagatatgagcggaggaggcagcggcagcggggacgagttcgggcgggcggtggcacgcgccgcggttgcgcaggcgctggaggccgcggggttcgactgcgcgcaccgctccgcggtggacgcggtcgtcgacgtcctcttgcgctacatcacccacctgggccggtccgccgccttcaacgccaacctcgccggccgcgcgctcgccaacgaactcgacgtcatccaggtgctcgaggaggtcggcgccgacacggacggcttcgcgggcgcggcggacacgggccgctgcctcgttggttccggcgtcgtcagggacctcatggcgttcgtcgactccaaggacgaggtgccgttcgcgcggccgctgcctaggttccccgtccagcgcgtgcagccgcagccctctgccagcccggctgcggcggcggcggggagggagactgggttgaagcacgtgccggagtggctgcctgcgttcccggatccgcacacctatgtgagcacggaggtgtgggatgagccttcggcgaccaaggacagggtggacaaggtggagcaggtgcggcaacggaggaaggccgagaaatccctgctcagcttgcagcgaaggctggctatggcaggcgcggatgggtttcatccagcggttgcattggcggaggatagcgcagagaaggggaaggagatacaggcagctgggacaaagagaaacccgtttcttgagccagcattgccgcctggggagaaggatgtatctgaggttggtatgcctccggaaaagaagaaactatctgtcctcgaggcatttgcgccagctatgcaatctagaaccatcgtcagggatgttgatgctggggcaggattggatgaaaaccaaaggagcattgttcccaaagagagggctccggtgcaccttaagattggatttggaaagaagccgttggcagcagctctgaattcaagaaccctggacctgagagaagatccatccttcttgaaagaggaagcaaaggatgacaagaagcggagagcaggcatgatattaagggcatcaatggagaacccacaagagcttcctcagctctaaagttgtttgcggaggaagtgccgtacccagagtggagttgcatcatggtgtaattgtggaacttcagtttccagaatcttgaggccatgttccctgatacaaccttctcaggatcaccatgccctgatacaacctgcaccggactctcctgcctccacctaccgttttcctaaaacaccatgcgctgatagattctgcagcactgtaactgaagttggaagttccaccatctcactgcgttgaagttggtggttgtgctggtatttcacctttaactgtaaggactaatttgggaacccaatttttccactggattttcattttcctaaggaaaattagttcattttcccttgagaaaataggaatcccttagaaaaatatagtttccaaactagccctaaaattaaaagtgggttgtggttcaaacggagctgatttttgtgaggccatgttcctcatccccagacatggcatccaaaagaaagtttagttcttgtagctgtactccctggtagaatgagagaggtttgtacaaaaggtaacctgattgttcttaccaagacttgtcatagaaaggattgatgtatctagtggctactcaagggacagcttcataatgccgtatgtgttggcacgcgcacgcaccccgccgttgtgtttgggacgaaaacacttcctagaattcctagataactgttgaaggacttttatgaggatttattgattgattcgagttcatgtccttaatgacttgatgtagtgcttcatagttggaggctggggttgtataacagtgtaccatatggttctttcgacttttgcccccatctaacttgagtatttaagattgaacttgtaaagattttattttaaaaggaagcatgttgaaatgtgtc

SEQ ID NO: 209060 - DNA, 5312 bp, Zea Mays
gcacactcagaccagaccgccgccgccgcgccggtgatcgagtctcgtcggcgctaccttcacgccacaagacaataagcatcgacagccaggttcggctccaccaaacgtccttgctgcaaaaacatcatcttttatacagtcattgtgcgcactggcccctttccactggcaagaagaccctgaagtcatcgatgtgcggtattgcccttgtcctcgccagtgaccgccttgtcatcgttccctgtgccactgcaactactgccgcattggagacccagcactcctgcaagaggaagggcgtgccagatgagctgaaggaggccctgcgccggcggggccctgatagcctaggctacagaagtcgctgccttcttgctgatggcacggttgttgttggtgatggttgcaatgatggagtagagggtaaaatcggtgtgagtgactctagtgttgctgatttgttcttcatcggagcaacactgcatcttaggggagctaagctggtttcgcagccgctggtggcccccagtggaagtgtctttctgtataatggtgagatatatggaggaattcaggttgcggatgatgaaaatgacacccaagctcttttcaactctctggaatcttgttgttcatgtgattgccatgctcttggtagagataaaacatgtacttgttgtggtactgggagtggtgccaaatcagttttgcaagttctttccacaatcaaaggtccatgggctttgatatactggcaggcagatgaagtcaaatacgatttggtttggccgggatgcatttgggagaagaagcctcttggtacattggcccacagctgatgattctcacttcatattatcatcagtatcacccccttcatttgcaaagattcactctgatcaaacagtgtcagatcgtgacatgtctaaccatactaaagctagctactgggaagagcttccttgtgggatatacagcatgcatatgaaagacattggaaagcatggtgcatgcatgaaggaagggtggattgtggaagttaacacacataaatggatggcttcttcattgaatggattgatcaaatgggagaggaaactcacagttcctaccatggagaacattcctgttgacagagggaaccatcagttgtctcagagcttcataagctcaagagaacctgaagaaaatacgaataatgggatcacaaaggcagattttctgtcagattctagtttatgtgatgcaaattgcataacacagtcagcacatagagtattggttgcattaagggaatctgtaatgctgcggactaaaatgaacacactctttcagggtactctggatagatctgaggacggagagtcagccccaatagcagtcctcttctccggtggcttagactccatgctacttgcagcactgctagaccagtgcattgattccaaatggataattgatttgttaaatgtcagttttgatgggcaacttgcccctgataggatttctgcaatagctggactgaaggagcttcagaggatatctccgtgccggagatggcgtcttattgagattgacactgctttgacagacttgaacggggaaagtgaacatgtgatgtcactcatacacccttcaaatacctttatggatttgaacattggtattgcactctggttggctgctggtggtgatggttgggtggatggaagtatatgtcgtatgcaagatggttctcgctataagtacaggtcgagatctagagtccttatagtgggttctggggctgatgagcagtgtgctggttatggtagacatcggactaaatataggcttggagggtggaacgcattggatcaggagatgagactagatgtgcagagaatatggaaaaggaatatgggaagagatgataggtgcatctctgatcatggcaaggaggcccgtttcccatttcttgacgagaacgtgataaaaactttgttggaaattccgttatgggaaattgctaagcttgatgaacctgttggaaggggtgacaagaagatcttgagagaggttgcaaggctgctgggcctacaagaagctgctcttcagccaaagcgcgcgatccagttcggttcaaggatagcgagggagtcgaaccgcaagaacttcggcagcaacagagccgcgaaccaggcatcagcaggcagcgtgcagattcaccagagtccagcttctccagtggcgtcggccacacgccagccatttcttaccaacaatcagccatgaacacgcttagctgtgacaagtgccgcatggtttggttgatggagcatcattatcagttgttacggttcatcacaaattttcaaacgattcattgtcagctggatggagcatccatcatttgttatgtatactagccctgaatcctgatcatgtaacagcaacttggacgtggttgaaacctaaaagtggccggctgctttgtgtcaggctgatgtggcgcctgcgttgggccggtttagacgagtaggtccaacctggatctgaccccacatgtcagtgactcaactgcaggggatctttctccggtctggacctgaccaaacaatgctggatgtaaagcagtcgtcggtgtcaatattttttaaaaaatcctatatttctttagaatcagctcgtacttctataatctcttatctactactataataaaaatatttatataaaaaataagtatataaaaataagtatttaaacattgatggttggctccatatttatacacttaatcaatagaaaatatatattttgtgttaatgttataccccggagtcgagtggcgagtccaatctcagactagccacgtgtacggcgtgcagtccttgctacgcgcacccctcctaccgcacacgcgaatccagccagcccacccaccgccgccgcctgctcgtccgcctctataagatgagacctgcccaccgccatggcgccatcccctccgtctctgacccgcctacccatccccaccatttgccgcccaatccgccccgccgcgctccgccttgcctcgactcgaattcttaccaaccgtttgtggcttgaatttgaattccagctcgaatcactcaggcggccagccgggagcgagagcgagctggaggagctcgattcgatgcgttgctgagcgtgggtcaatcgattcgggtcgggcggtggcgcagtccgagagatctgaaccctagcggccgtctgcccgtccggatctgtgaccagccctgctcggtgcttcggcggcatgagtgcctggaaggcgtggggaggagaagcggcggagatatgagcggaggaggcagcggcagcggggacgagttcgggcgggcggtggcacgcgccgcggttgcgcaggcgctggaggccgcggggttcgactgcgcgcaccgctccgcggtggacgcggtcgtcgacgtcctcttgcgctacatcacccacctgggccggtccgccgccttcaacgccaacctcgccggccgcgcgctcgccaacgaactcgacgtcatccaggtgctcgaggaggtcggcgccgacacggacggcttcgcgggcgcggcggacacgggccgctgcctcgttggttccggcgtcgtcagggacctcatggcgttcgtcgactccaaggacgaggtgccgttcgcgcggccgctgcctaggttccccgtccagcgcgtgcagccgcagccctctgccagcccggctgcggcggcggcggggagggagactgggttgaagcacgtgccggagtggctgcctgcgttcccggatccgcacacctatgtgagcacggaggtgtgggatgagccttcggcgaccaaggacagggtggacaaggtggagcaggtgcggcaacggaggaaggccgagaaatccctgctcagcttgcagcgaaggctggctatggcaggcgcggatgggtttcatccagcggttgcattggcggaggatagcgcagagaaggggaaggagatacaggcagctgggacaaagagaaacccgtttcttgagccagcattgccgcctggggagaaggatgtatctgaggttggtatgcctccggaaaagaagaaactatctgtcctcgaggcatttgcgccagctatgcaatctagaaccatcgtcagggatgttgatgctggggcaggattggatgaaaaccaaaggagcattgttcccaaagagagggctccggtgcaccttaagattggatttggaaagaagccgttggcagcagctctgaattcaagaaccctggacctgagagaagatccatccttcttgaaagaggaagcaaaggatgacaagaagcggagagcaggcatgatattaagggcatcaatggagaacccacaagagcttcctcagctctaaagttgtttgcggaggaagtgccgtacccagagtggagttgcatcatggtgtaattgtggaacttcagtttccagaatcttgaggccatgttccctgatacaaccttctcaggatcaccatgccctgatacaacctgcaccggactctcctgcctccacctaccgttttcctaaaacaccatgcgctgatagattctgcagcactgtaactgaagttggaagttccaccatctcactgcgttgaagttggtggttgtgctggtatttcacctttaactgtaaggactaatttgggaacccaatttttccactggattttcattttcctaaggaaaattagttcattttcccttgagaaaataggaatcccttagaaaaatatagtttccaaactagccctaaaattaaaagtgggttgtggttcaaacggagctgatttttgtgaggccatgttcctcatccccagacatggcatccaaaagaaagtttagttcttgtagctgtactccctggtagaatgagagaggtttgtacaaaaggtaacctgattgttcttaccaagacttgtcatagaaaggattgatgtatctagtggctactcaagggacagcttcataatgccgtatgtgttggcacgcgcacgcaccccgccgttgtgtttgggacgaaaacacttcctagaattcctagataactgttgaaggacttttatgaggatttattgattgattcgagttcatgtccttaatgacttgatgtagtgcttcatagttggaggctggggttgtataacagtgtaccatatggttctttcgacttttgcccccatctaacttgagtatttaagattgaacttgtaaagattttattttaaaaggaagcatgttgaaatgtgtc

SEQ ID NO: 209061 - DNA, 5155 bp, Zea Mays
gaaagagaaaagaggtactgagggagcaagagtcgcacactcagaccagaccgccgccgccgcgccggtgatcgagtctcgtcggcgctaccttcacgccacaagacaataagcatcgacagccaggttcggctccaccaaacgtccttgctgcaaaaacatcatcttttatacagtcattgtgcgcactggcccctttccactggcaagaagaccctgaagtcatcgatgtgcggtattgcccttgtcctcgccagtgaccgccttgtcatcgttccctgtgccactgcaactactgccgcattggagacccagcactcctgcaagaggaagggcgtgccagatgagctgaaggaggccctgcgccggcggggccctgatagcctaggctacagaagtcgctgccttcttgctgatggcacggttgttgttggtgatggttgcaatgatggagtagagggtaaaatcggtgtgagtgactctagtgttgctgatttgttcttcatcggagcaacactgcatcttaggggagctaagctggtttcgcagccgctggtggcccccagtggaagtgtctttctgtataatggtgagatatatggaggaattcaggttgcggatgatgaaaatgacacccaagctcttttcaactctctggaatcttgttgttcatgtgattgccatgctcttggtagagataaaacatgtacttgttgtggtactgggagtggtgccaaatcagttttgcaagttctttccacaatcaaaggtccatgggctttgatatactggcaggcagatgaagtcaaatacgatttggtttggccgggatgcatttgggagaagaagcctcttggtacattggcccacagctgatgattctcacttcatattatcatcagtatcacccccttcatttgcaaagattcactctgatcaaacagtgtcagatcgtgacatgtctaaccatactaaagctagctactgggaagagcttccttgtgggatatacagcatgcatatgaaagacattggaaagcatggtgcatgcatgaaggaagggtggattgtggaagttaacacacataaatggatggcttcttcattgaatggattgatcaaatgggagaggaaactcacagttcctaccatggagaacattcctgttgacagagggaaccatcagttgtctcagagcttcataagctcaagagaacctgaagaaaatacgaataatgggatcacaaaggcagattttctgtcagattctagtttatgtgatgcaaattgcataacacagtcagcacatagagtattggttgcattaagggaatctgtaatgctgcggactaaaatgaacacactctttcagggtactctggatagatctgaggacggagagtcagccccaatagcagtcctcttctccggtggcttagactccatgctacttgcagcactgctagaccagtgcattgattccaaatggataattgatttgttaaatgtcagttttgatgggcaacttgcccctgataggatttctgcaatagctggactgaaggagcttcagaggatatctccgtgccggagatggcgtcttattgagattgacactgctttgacagacttgaacggggaaagtgaacatgtgatgtcactcatacacccttcaaatacctttatggtggaacgcattggatcaggagatgagactagatgtgcagagaatatggaaaaggaatatgggaagagatgataggtgcatctctgatcatggcaaggaggcccgtttcccatttcttgacgagaacgtgataaaaactttgttggaaattccgttatgggaaattgctaagcttgatgaacctgttggaaggggtgacaagaagatcttgagagaggttgcaaggctgctgggcctacaagaagctgctcttcagccaaagcgcgcgatccagttcggttcaaggatagcgagggagtcgaaccgcaagaacttcggcagcaacagagccgcgaaccaggcatcagcaggcagcgtgcagattcaccagagtccagcttctccagtggcgtcggccacacgccagccatttcttaccaacaatcagccatgaacacgcttagctgtgacaagtgccgcatggtttggttgatggagcatcattatcagttgttacggttcatcacaaattttcaaacgattcattgtcagctggatggagcatccatcatttgttatgtatactagccctgaatcctgatcatgtaacagcaacttggacgtggttgaaacctaaaagtggccggctgctttgtgtcaggctgatgtggcgcctgcgttgggccggtttagacgagtaggtccaacctggatctgaccccacatgtcagtgactcaactgcaggggatctttctccggtctggacctgaccaaacaatgctggatgtaaagcagtcgtcggtgtcaatattttttaaaaaatcctatatttctttagaatcagctcgtacttctataatctcttatctactactataataaaaatatttatataaaaaataagtatataaaaataagtatttaaacattgatggttggctccatatttatacacttaatcaatagaaaatatatattttgtgttaatgttataccccggagtcgagtggcgagtccaatctcagactagccacgtgtacggcgtgcagtccttgctacgcgcacccctcctaccgcacacgcgaatccagccagcccacccaccgccgccgcctgctcgtccgcctctataagatgagacctgcccaccgccatggcgccatcccctccgtctctgacccgcctacccatccccaccatttgccgcccaatccgccccgccgcgctccgccttgcctcgactcgaattcttaccaaccgtttgtggcttgaatttgaattccagctcgaatcactcaggcggccagccgggagcgagagcgagctggaggagctcgattcgatgcgttgctgagcgtgggtcaatcgattcgggtcgggcggtggcgcagtccgagagatctgaaccctagcggccgtctgcccgtccggatctgtgaccagccctgctcggtgcttcggcggcatgagtgcctggaaggcgtggggaggagaagcggcggagatatgagcggaggaggcagcggcagcggggacgagttcgggcgggcggtggcacgcgccgcggttgcgcaggcgctggaggccgcggggttcgactgcgcgcaccgctccgcggtggacgcggtcgtcgacgtcctcttgcgctacatcacccacctgggccggtccgccgccttcaacgccaacctcgccggccgcgcgctcgccaacgaactcgacgtcatccaggtgctcgaggaggtcggcgccgacacggacggcttcgcgggcgcggcggacacgggccgctgcctcgttggttccggcgtcgtcagggacctcatggcgttcgtcgactccaaggacgaggtgccgttcgcgcggccgctgcctaggttccccgtccagcgcgtgcagccgcagccctctgccagcccggctgcggcggcggcggggagggagactgggttgaagcacgtgccggagtggctgcctgcgttcccggatccgcacacctatgtgagcacggaggtgtgggatgagccttcggcgaccaaggacagggtggacaaggtggagcaggtgcggcaacggaggaaggccgagaaatccctgctcagcttgcagcgaaggctggctatggcaggcgcggatgggtttcatccagcggttgcattggcggaggatagcgcagagaaggggaaggagatacaggcagctgggacaaagagaaacccgtttcttgagccagcattgccgcctggggagaaggatgtatctgaggttggtatgcctccggaaaagaagaaactatctgtcctcgaggcatttgcgccagctatgcaatctagaaccatcgtcagggatgttgatgctggggcaggattggatgaaaaccaaaggagcattgttcccaaagagagggctccggtgcaccttaagattggatttggaaagaagccgttggcagcagctctgaattcaagaaccctggacctgagagaagatccatccttcttgaaagaggaagcaaaggatgacaagaagcggagagcaggcatgatattaagggcatcaatggagaacccacaagagcttcctcagctctaaagttgtttgcggaggaagtgccgtacccagagtggagttgcatcatggtgtaattgtggaacttcagtttccagaatcttgaggccatgttccctgatacaaccttctcaggatcaccatgccctgatacaacctgcaccggactctcctgcctccacctaccgttttcctaaaacaccatgcgctgatagattctgcagcactgtaactgaagttggaagttccaccatctcactgcgttgaagttggtggttgtgctggtatttcacctttaactgtaaggactaatttgggaacccaatttttccactggattttcattttcctaaggaaaattagttcattttcccttgagaaaataggaatcccttagaaaaatatagtttccaaactagccctaaaattaaaagtgggttgtggttcaaacggagctgatttttgtgaggccatgttcctcatccccagacatggcatccaaaagaaagtttagttcttgtagctgtactccctggtagaatgagagaggtttgtacaaaaggtaacctgattgttcttaccaagacttgtcatagaaaggattgatgtatctagtggctactcaagggacagcttcataatgccgtatgtgttggcacgcgcacgcaccccgccgttgtgtttgggacgaaaacacttcctagaattcctagataactgttgaaggacttttatgaggatttattgattgattcgagttcatgtccttaatgacttgatgtagtgcttcatagttggaggctggggttgtataacagtgtaccatatggttctttcgacttttgcccccatctaacttgagtatttaagattgaacttgtaaagattttattttaaaaggaagcatgttgaaatgtgtc

SEQ ID NO: 209062 - DNA, 947 bp, Zea Mays
ccttccagttcccacgaaaaaggaaaaaagaaaactcaagagcccaggcttatctagaaacctcgctaaccctcgaggcctcgagtagctatgaagcagcgaggcgacgacggtgccgacggcgcagctgctttcgccggctgcctggattgcagggaggcaacgccgccgccgccgccgacagtgacgacgctgctgccgccttcggtttctaactccttcgatcatcgcttttctgaggtacaaacttagttccatggcttccgatgacactgctgaaatgtgaatgttctgtttcgacgacgttgccaagaaaattgttgggaaatcatacaactctcctatcatcagttacagggacttcaactatcctactagatttaacattgatcgtatctcttaaattcacatttgtagttgtgtacaaccaaatatcatttgtggatttagagaaagaactcttcatgaagtcattcatagcatcatatggaagaaatgtcattgccatcacccagatgaaacattccactatctgtcaactccaacaaaactattgtctagaccaaaacaatcattctccaaattaacaggatagtcctggagatgaaggccaggacctaccgtcgtttgagtcaccataaaaaagaagcaacattcgattggttggttggctaacggacccagcgcattgtccaaagctcaaccgcagcatggcgggaggcagctcatgcacatcagccagtcaccgatcgagcatcggcttgcggtaccggatagagcaagtgatacatttggcggatagatagccagcttttgtctaatactatagtttacaatgttgtatctaaacactatttatcaaaaccatggtatgtttggagctaccaaaactacggtattatcatagcaattgcaaagtataatattataaaactatggttctgaga

SEQ ID NO: 209063 - DNA, 1015 bp, Zea Mays
ccttccagttcccacgaaaaaggaaaaaagaaaactcaagagcccaggcttatctagaaacctcgctaaccctcgaggcctcgagtagctatgaagcagcgaggcgacgacggtgccgacggcgcagctgctttcgccggctgcctggattgcagggaggcaacgccgccgccgccgccgacagtgacgacgctgctgccgccttcggtttctaactccttcgatcatcgcttttctgagttgtttgtgttttggaatcaaggtgcacatttgcatgaattggatcttttagcgaccagaccatataggtacaaacttagttccatggcttccgatgacactgctgaaatgtgaatgttctgtttcgacgacgttgccaagaaaattgttgggaaatcatacaactctcctatcatcagttacagggacttcaactatcctactagatttaacattgatcgtatctcttaaattcacatttgtagttgtgtacaaccaaatatcatttgtggatttagagaaagaactcttcatgaagtcattcatagcatcatatggaagaaatgtcattgccatcacccagatgaaacattccactatctgtcaactccaacaaaactattgtctagaccaaaacaatcattctccaaattaacaggatagtcctggagatgaaggccaggacctaccgtcgtttgagtcaccataaaaaagaagcaacattcgattggttggttggctaacggacccagcgcattgtccaaagctcaaccgcagcatggcgggaggcagctcatgcacatcagccagtcaccgatcgagcatcggcttgcggtaccggatagagcaagtgatacatttggcggatagatagccagcttttgtctaatactatagtttacaatgttgtatctaaacactatttatcaaaaccatggtatgtttggagctaccaaaactacggtattatcatagcaattgcaaagtataatattataaaactatggttctgaga

SEQ ID NO: 209064 - DNA, 794 bp, Zea Mays
ccttccagttcccacgaaaaaggaaaaaagaaaactcaagagcccaggcttatctagaaacctcgctaaccctcgaggcctcgagtagctatgaagcagcgaggcgacgacggtgccgacggcgcagctgctttcgccggctgcctggattgcaggtcctccgaccattgctttttgcgggaggcaacgccgccgccgccgccgacagtgacgacgctgctgccgccttcggtttctaactccttcgatcatcgcttttctgagttgtgtacaaccaaatatcatttgtggatttagagaaagaactcttcatgaagtcattcatagcatcatatggaagaaatgtcattgccatcacccagatgaaacattccactatctgtcaactccaacaaaactattgtctagaccaaaacaatcattctccaaattaacaggatagtcctggagatgaaggccaggacctaccgtcgtttgagtcaccataaaaaagaagcaacattcgattggttggttggctaacggacccagcgcattgtccaaagctcaaccgcagcatggcgggaggcagctcatgcacatcagccagtcaccgatcgagcatcggcttgcggtaccggatagagcaagtgatacatttggcggatagatagccagcttttgtctaatactatagtttacaatgttgtatctaaacactatttatcaaaaccatggtatgtttggagctaccaaaactacggtattatcatagcaattgcaaagtataatattataaaactatggttctgaga

SEQ ID NO: 209065 - DNA, 1039 bp, Zea Mays
ccttccagttcccacgaaaaaggaaaaaagaaaactcaagagcccaggcttatctagaaacctcgctaaccctcgaggcctcgagtagctatgaagcagcgaggcgacgacggtgccgacggcgcagctgctttcgccggctgcctggattgcaggtcctccgaccattgctttttgcgggaggcaacgccgccgccgccgccgacagtgacgacgctgctgccgccttcggtttctaactccttcgatcatcgcttttctgagttgtttgtgttttggaatcaaggtgcacatttgcatgaattggatcttttagcgaccagaccatataggtacaaacttagttccatggcttccgatgacactgctgaaatgtgaatgttctgtttcgacgacgttgccaagaaaattgttgggaaatcatacaactctcctatcatcagttacagggacttcaactatcctactagatttaacattgatcgtatctcttaaattcacatttgtagttgtgtacaaccaaatatcatttgtggatttagagaaagaactcttcatgaagtcattcatagcatcatatggaagaaatgtcattgccatcacccagatgaaacattccactatctgtcaactccaacaaaactattgtctagaccaaaacaatcattctccaaattaacaggatagtcctggagatgaaggccaggacctaccgtcgtttgagtcaccataaaaaagaagcaacattcgattggttggttggctaacggacccagcgcattgtccaaagctcaaccgcagcatggcgggaggcagctcatgcacatcagccagtcaccgatcgagcatcggcttgcggtaccggatagagcaagtgatacatttggcggatagatagccagcttttgtctaatactatagtttacaatgttgtatctaaacactatttatcaaaaccatggtatgtttggagctaccaaaactacggtattatcatagcaattgcaaagtataatattataaaactatggttctgaga

SEQ ID NO: 209066 - DNA, 962 bp, Zea Mays
ccttccagttcccacgaaaaaggaaaaaagaaaactcaagagcccaggcttatctagaaacctcgctaaccctcgaggcctcgagtagctatgaagcagcgaggcgacgacggtgccgacggcgcagctgctttcgccggctgcctggattgcagctttcgtgccggcagggaggcaacgccgccgccgccgccgacagtgacgacgctgctgccgccttcggtttctaactccttcgatcatcgcttttctgaggtacaaacttagttccatggcttccgatgacactgctgaaatgtgaatgttctgtttcgacgacgttgccaagaaaattgttgggaaatcatacaactctcctatcatcagttacagggacttcaactatcctactagatttaacattgatcgtatctcttaaattcacatttgtagttgtgtacaaccaaatatcatttgtggatttagagaaagaactcttcatgaagtcattcatagcatcatatggaagaaatgtcattgccatcacccagatgaaacattccactatctgtcaactccaacaaaactattgtctagaccaaaacaatcattctccaaattaacaggatagtcctggagatgaaggccaggacctaccgtcgtttgagtcaccataaaaaagaagcaacattcgattggttggttggctaacggacccagcgcattgtccaaagctcaaccgcagcatggcgggaggcagctcatgcacatcagccagtcaccgatcgagcatcggcttgcggtaccggatagagcaagtgatacatttggcggatagatagccagcttttgtctaatactatagtttacaatgttgtatctaaacactatttatcaaaaccatggtatgtttggagctaccaaaactacggtattatcatagcaattgcaaagtataatattataaaactatggttctgaga

SEQ ID NO: 209067 - DNA, 965 bp, Zea Mays
ccttccagttcccacgaaaaaggaaaaaagaaaactcaagagcccaggcttatctagaaacctcgctaaccctcgaggcctcgagtagctatgaagcagcgaggcgacgacggtgccgacggcgcagctgctttcgccggctgcctggattgcaggtcctccgaccattgctttttgcgggaggcaacgccgccgccgccgccgacagtgacgacgctgctgccgccttcggtttctaactccttcgatcatcgcttttctgaggtacaaacttagttccatggcttccgatgacactgctgaaatgtgaatgttctgtttcgacgacgttgccaagaaaattgttgggaaatcatacaactctcctatcatcagttacagggacttcaactatcctactagatttaacattgatcgtatctcttaaattcacatttgtagttgtgtacaaccaaatatcatttgtggatttagagaaagaactcttcatgaagtcattcatagcatcatatggaagaaatgtcattgccatcacccagatgaaacattccactatctgtcaactccaacaaaactattgtctagaccaaaacaatcattctccaaatgatagtcctggagatgaaggccaggacctaccgtcgtttgagtcaccataaaaaagaagcaacattcgattggttggttggctaacggacccagcgcattgtccaaagctcaaccgcagcatggcgggaggcagctcatgcacatcagccagtcaccgatcgagcatcggcttgcggtaccggatagagcaagtgatacatttggcggatagatagccagcttttgtctaatactatagtttacaatgttgtatctaaacactatttatcaaaaccatggtatgtttggagctaccaaaactacggtattatcatagcaattgcaaagtataatattataaaactatggttctgaga

SEQ ID NO: 209068 - DNA, 1467 bp, Zea Mays
ggcgcgactcctcaactgaaactgtgtcattgtctgtcagtgctcgccgcgcggatctagggggaggggggccgtgcccggcgcggacgccgggatgccgatctgcgcgccgtcgtccgactcctcggcctcggcctcgtcgggcttgggcgcccgcgtctgggtgctccacgggctagcgctcggcgcggcggccgcggccgctgccgttgcgtacctgtaccggcggccgaccgggttccgcagccgcgcggtggggatcatacccgcgcgcttcgcctccacgcgcttcgagggcaagccgctcgttcccatcctcggcaagcccatgatccagagaacatgggaaagagttatgctagcttcttcgttggaccatgttgttgtggcaacggatgatgagagaattgcagaatgctgtcgaggatttggagctgatgttataatgacatcagcatcttgcaaaaacggatctgaacgctgctgtgaggcactaaagaagcttgataagcactatgatattgttgtcaatattcaaggagatgagcctctcattgaaccagagataatagatggtgtagttatgtcactgcagcgagctcctgatgcagtcttcagcacagctgttacttcactgaaaccagaagatgcattcgatacaaacagggtgaagtgtgttgtggataatctgggctacgcaatatacttttcaagagggctgattccattcaataaatcagggaacgccaatccaaaatatccatatcttcttcatcttggaatcgcgggctttgattcaaaatttttgaagatatatccagaacttccaccaacaccattacaaatggaagaggacctagagcaactaaaagttcttgaaaatggctataggatgaaggtgatcaaagtggaccatgatgcccatggtgtggatgcacccgaggacgttgagaaaatcgaagcactgatgcgaacgagaaacattcagtagaaaacgaagagaaagcaagtgctttgcattgctatcggcgttggcttggtgggatacttttggttgtgctttcccgtcttctgaatagcatgataccaagtgaagttggtgcatcacttcttgaagttttgtgcttgctaaaacgttcagtgattggatatgtcacttgcattagtcctcaatcagcagttcagcgcgcaggtggattgtatctgtacttcagtagttagtagcattactttcagtcttctttacattgaaaaacaaatcgtttctggagatgaagcaattggacagtgtaaaacaaaaggctaaagacccatccatgccgcgaggcgtgattgatataaggccagactcatcggaactttcattagacttccatttacatgtaataagttttcatatatacaatgttgatgatgtatacaattttaatgacgtgacggtgtttttttttaaaaacaacacctgct

SEQ ID NO: 209069 - DNA, 1568 bp, Zea Mays
aataggtcggctgccttctgtcactctcccctctgctcaaaatttcccccaaaacttctcctcttgaggaaggcagcccaagcgagcgcgctgcaatggcggactcgtcggcgccgacgagagtgatgatggcggtgaacgagtcgtcgctcaaggggtacccgcacccctccatcagctgtcgcaccgccttcgactggacgctctccaagctcgtccgctccaaccctgggggcttccacttcctcttcgtccacgttcaggtccccgacgaggacggatttgatgacatggatagcatctatgcttcgccggaggactttcaccaaatgaagcagagagacaagataagagggcttcatttgctcgagtactttgtaaaccaatgccatcagttagggataaaatgcgaggcatggatcagacatggagatccaaaggaggttatctgcagcgaagtgaagagagtccagcctgaccttctagttgtgggaagtaggggtcttgggccatttcagagggttttcgtgggcacggtgagcgagttctgcgttaagcatgccgaatgccccgtcatcaccataaaacggaacgctaccgaagctcctcaggaccctgtcgacgattgatgcttccaagccaagccatgccatgtcactggagaatgagatgttcttcttcactgcttttataatgggttgatgtacaaaatacgatatggaagtggtgcctggaactagttcgcggagggttccaactcttgcacactgcgcccccaaaaactagagttgaagatgtaaaacgccgtcgtccgccgagggacgacgagagattgcttcgctggaacgaacgccccgccccttatttgcccctgcccgtccacagccacagccacagcttgagcagggtacctgaagcccgcgtagtcctttggcacggcgtagcctttgggaacgccgacgagctggggctgttgctgatgcttaagctgacgccccttgttgctgccagcaagcttgccgtcgctcttccacgccggaggcttccccggcgcgaacttgatctcgaagccgtcgtcgatgtcgtggatcgtggcgcgggagctcgccacgggcttcatcgccgggcacttgatctcgaatccgccgcccttctccaggtcgcctccgacggagtcggaggcgtaggagtcctggtcggcggcgtacctcttcctggagagccggcgcccgcacagcctgccggcgacgcaggcggccacggcgaggaaggagatcgccgcgagcacggcgaagaccgggccgaacgagcccttggcggtcgtggaaggcgcccgcgcgcgcaggacggcgttggaggacgcggggtagtagaccgtggggtcaggcatatccttggttctcggcgctctctcaagctgctagctgctgatatatgccaccaccacgctctccctcgaagaaaatggttcggccgtttgggtgtcgcactcttgggcaccgaggggagtgctggtcgttttatgatggggagctgaaggcgccggtttgaaccgagcgattactttg

SEQ ID NO: 209070 - DNA, 552 bp, Zea Mays
aataggtcggctgccttctgtcactctcccctctgctcaaaatttcccccaaaacttctcctcttgaggaaggcagcccaagcgagcgcgctgcaatggcggactcgtcggcgccgacgagagtgatgatggcggtgaacgagtcgtcgctcaaggggtacccgcacccctccatcagctgtcgcaccgccttcgactggacgctctccaagctcgtccgctccaaccctgggggcttccacttcctcttcgtccacgttcaggtccccgacgaggacggatttgatgacatggatagcatctatgcttcgccggaggactttcaccaaatgaagcagagagacaagataagagggcttcatttgctcgagtactttgtaaaccaatgccatcagttagggataaaatgcgaggcatggatcagacatggagatccaaaggaggttatctgcagcgaagtgaagagagtccagcctgaccttctagttgtgggaagtaggggtcttgggccatttcagagtggcgagagctatctcgctaagtcaccgggtc

SEQ ID NO: 209071 - DNA, 3139 bp, Zea Mays
aactcaaacatcactccagtacactccacagtagcgcacgcgcattccacactccagtgcttcggttcagcatggagcctaaaccctcgccgccgccggccgccccttcgcgccgccgcggcgcagcgaccaagcgcaaggagaaggccgcatctgcggtgccctccgggtccccgtcgccgaaacgccaggcccgggagcgcgggcccgtctaccagccgtcccttccgccgcctcaaccgcgcagccgccaacccgcacgcaagccgcagcgcaagcccgcacgcaataaatcgccgcggcgctccgtggagccgccgcgcgcgcaggaggaggaggagggcccgccgccactgccgccaccacggccgtcgctggagaaggagatcgaggccgttctgtcccgcggcgctggcgtccacgttgtacccaccttcgccggatggttttcatggaaggaaattcaccccatcgagaagcaaatgttggctacattttttgatgggaaatcagagagacggacacccgagatatatttgggaatcagaaatttaatcatgaacaagtttcactgtaatcccgaagtgcatctggagtccaaagatttgtgtgagttgtcagttggggagatggatgctcgtctagtaatcttggagttcttggcctactggggtttagttaatttccaccctttcccatcagttgtacaggaacacaagctggttgagagtaaaagtagtgctgagacagcagaaggaatttctcaggctgagaagttatttcagtttgaaacagttcattcttacttggtacctgtttcaaaggaagctgaagcaatatctccagttcagttcactagcttgctccctgagcctaccctagctgaagatgcaataggtgcagctgagtcttctgttgagtaccattgcaattcctgctcagttgattgttcaagaaagcgttatcattgtaggactcaggtagactttgatttttgttcagattgctacaacgaagaaaaatttgatgaaggcatgtcaaaatctgatttcatccttatggaatctgcagatgttccagggtctggtggttctaactggactgaccatgagacattgcttcttttggaagcgttagaaattttcaaaggaaaagaatggcatgagattgctgagcatgttgctacaaaaacaaaagaacagtgcatgttacacttccttcaaatgccaatttctgaaccgtttcttgatggcgatgatttcaatgaaacaccccagaagatcacaaaacaggattcagcagaaactggtccttctgatgtacctgacaagatggatgtagatggtaatgcggaaggaaaagagagcactgatgaaaaagcttacaagaaagcagattccagttccgcagaaacaagaacaaaattagctgaccaaaatatttctgctaaagaggatactatgaaattaggtgatgatgacctagttgcttccattgttgatgaaccaaataaatcttcattggtggatcctgcacataagaagaattctgctaatgctgatgtctctggggaacacccatccaactttattactaatatcctgagatccacttttgaagcagttgaccactttctgggtaaagaagacatgggttcgtttgctgaagcaggaaatcctgtgatggcactggctgcgtttcttgcttctcttgtggaacgtgatgatgctgtttcttcatgttgtagttcgttgagagctatatcagagatgtctcctgctctccaactggcaactgaacactgttttattcttccagatccaccaagtgacctcaaagatccggcttccactttcagcccttgcgcaggcggtgagagccaagaaggtgctgatactactcaaaatgtgaatgataccgataaaaacaacagcgaaagggaagatagtgatttagctctggagaaggagagtgctacattcacctcacagaagcagcacctggaagaattatctgacgcaaaggaaacatttattggaggtcctgaggcagaggccaaatccaacagcacaaaggattctgacaatccaattgctaaggaagccagtccagcaagtacaaaagacacagctatccctgaacaagttgaaagaccaagttctgaggaattactagctgatgtttcacttccacaagggaaggtagagccgaagaagactgaacctgcacctgctgcctcgtctagtatccaacagcatgggtgcaaacaagctggaaatggcaacactgaacctaaaagcaaggaaaacgctgcggccgatgatgaccccataacaaggctacagcgagcggccggtactgccatttcggcagctgcagtgaaggccaagttccttgtggagcaggaggagggttacattcggcagctagctgcacttgtgatcgaaaagcagtttcagaagatggaaacaaaaatgtcgtttctcaccgaagttggaaacctggtgttacgatcgagagatttgacagagaggatgcggaagaagcttttgttggagcggagcatgataatcgcttctcgaatgggtgcagcagcggcttccagaacaatccagcacggggctccggtgaccaccagactcccagtagggcatgtgcatgccttgaatccgcagctgaggcgcccttgaagctttttatagtatgtatatgatcagtaagactggcctatgtaggaggtgtgctaatccgcctctgtataaaatgcagtgtactgtagacgcgtctagggttctggagtcagtaggctttgatgctcaccacaccacacgacttggcttttcttttccttttcgtttaaccaagagttttcttctttgatgtcttacctcgccaccgccatacaatgacatgtgtttgaactcgttaactcgtggtcagtcaagctcaaacaatggataggaggtcagttaagcttaaacaatggacatacataaaaaggtttgatgctaagttacacaaaatattagggtaacattgtttttttcgtctcctgcaatggtgttgtacggtggtatttatagctaaccgagggttagccctgtcctgtcaaagataattataccctcggttacctacg

SEQ ID NO: 209072 - DNA, 2194 bp, Zea Mays
aggatgcacaacaaacagcctagtgcacttgacattaagaattagtgaattactccattcgctggggcaagatgttccagggtctggtggttctaactggactgaccatgagacattgcttcttttggaagcgttagaaattttcaaaggaaaagaatggcatgagattgctgagcatgttgctacaaaaacaaaagaacagtgcatgttacacttccttcaaatgccaatttctgaaccgtttcttgatggcgatgatttcaatgaaacaccccagaagatcacaaaacaggattcagcagaaactggtccttctgatgtacctgacaagatggatgtagatggtaatgcggaaggaaaagagagcactgatgaaaaagcttacaagaaagcagattccagttccgcagaaacaagaacaaaattagctgaccaaaatatttctgctaaagaggatactatgaaattaggtgatgatgacctagttgcttccattgttgatgaaccaaataaatcttcattggtggatcctgcacataagaagaattctgctaatgctgatgtctctggggaacacccatccaactttattactaatatcctgagatccacttttgaagcagttgaccactttctgggtaaagaagacatgggttcgtttgctgaagcaggaaatcctgtgatggcactgttcgttgagagctatatcagagatgtctcctgctctccaactggcaactgaacactgttttattcttccagatccaccaagtgacctcaaagatccggcttccactttcagcccttgcgcaggcggtgagagccaagaaggtgctgatactactcaaaatgtgaatgataccgataaaaacaacagcgaaagggaagatagtgatttagctctggagaaggagagtgctacattcacctcacagaagcagcacctggaagaattatctgacgcaaaggaaacatttattggaggtcctgaggcagaggccaaatccaacagcacaaaggattctgacaatccaattgctaaggtggggagcagtgtagcatctgacaagatgagagatgggtgcaatgctaatgccattccgtgtcctgctacttcaaatcatacaactgaacccagctccgtagcttcccaggaagccagtccagcaagtacaaaagacacagctatccctgaacaagttgaaagaccaagttctgaggaattactagctgatgtttcacttccacaagggaaggtagagccgaagaagactgaacctgcacctgctgcctcgtctagtatccaacagcatgggtgcaaacaagctggaaatggcaacactgaacctaaaagcaaggaaaacgctgcggccgatgatgaccccataacaaggctacagcgagcggccggtactgccatttcggcagctgcagtgaaggccaagttccttgtggagcaggaggagggttacattcggcagctagctgcacttgtgatcgaaaagcagtttcagaagatggaaacaaaaatgtcgtttctcaccgaagttggaaacctggtgttacgatcgagagatttgacagagaggatgcggaagaagcttttgttggagcggagcatgataatcgcttctcgaatgggtgcagcagcggcttccagaacaatccagcacggggctccggtgaccaccagactcccagtagggcatgtgcatgccttgaatccgcagctgaggcgcccttgaagctttttatagtatgtatatgatcagtaagactggcctatgtaggaggtgtgctaatccgcctctgtataaaatgcagtgtactgtagacgcgtctagggttctggagtcagtaggctttgatgctcaccacaccacacgacttggcttttcttttccttttcgtttaaccaagagttttcttctttgatgtcttacctcgccaccgccatacaatgacatgtgtttgaactcgttaactcgtggtcagtcaagctcaaacaatggataggaggtcagttaagcttaaacaatggacatacataaaaaggtttgatgctaagttacacaaaatattagggtaacattgtttttttcgtctcctgcaatggtgttgtacggtggtatttatagctaaccgagggttagccctgtcctgtcaaagataattataccctcggttacctacg

SEQ ID NO: 209073 - DNA, 2288 bp, Zea Mays
ggccttaggccctgacaggtagactttgatttttgttcagattgctacaacgaagaaaaatttgatgaaggcatgtcaaaatctgatttcatccttatggaatctgcagatgttccagggtctggtggttctaactggactgaccatgagacattgcttcttttggaagcgttagaaattttcaaaggaaaagaatggcatgagattgctgagcatgttgctacaaaaacaaaagaacagtgcatgttacacttccttcaaatgccaatttctgaaccgtttcttgatggcgatgatttcaatgaaacaccccagaagatcacaaaacaggattcagcagaaactggtccttctgatgtacctgacaagatggatgtagatggtaatgcggaaggaaaagagagcactgatgaaaaagcttacaagaaagcagattccagttccgcagaaacaagaacaaaattagctgaccaaaatatttctgctaaagaggatactatgaaattaggtgatgatgacctagttgcttccattgttgatgaaccaaataaatcttcattggtggatcctgcacataagaagaattctgctaatgctgatgtctctggggaacacccatccaactttattactaatatcctgagatccacttttgaagcagttgaccactttctgggtaaagaagacatgggttcgtttgctgaagcaggaaatcctgtgatggcactggctgcgtttcttgcttctcttgtggaacgtgatgatgctgtttcttcatgttgtagttcgttgagagctatatcagagatgtctcctgctctccaactggcaactgaacactgttttattcttccagatccaccaagtgacctcaaagatccggcttccactttcagcccttgcgcaggcggtgagagccaagaaggtgctgatactactcaaaatgtgaatgataccgataaaaacaacagcgaaagggaagatagtgatttagctctggagaaggagagtgctacattcacctcacagaagcagcacctggaagaattatctgacgcaaaggaaacatttattggaggtcctgaggcagaggccaaatccaacagcacaaaggattctgacaatccaattgctaaggtggggagcagtgtagcatctgacaagatgagagatgggtgcaatgctaatgccattccgtgtcctgctacttcaaatcatacaactgaacccagctccgtagcttcccaggaagccagtccagcaagtacaaaagacacagctatccctgaacaagttgaaagaccaagttctgaggaattactagctgatgtttcacttccacaagggaaggtagagccgaagaagactgaacctgcacctgctgcctcgtctagtatccaacagcatgggtgcaaacaagctggaaatggcaacactgaacctaaaagcaaggaaaacgctgcggccgatgatgaccccataacaaggctacagcgagcggccggtactgccatttcggcagctgcagtgaaggccaagttccttgtggagcaggaggagggttacattcggcagctagctgcacttgtgatcgaaaagcagtttcagaagatggaaacaaaaatgtcgtttctcaccgaagttggaaacctggtgttacgatcgagagatttgacagagaggatgcggaagaagcttttgttggagcggagcatgataatcgcttctcgaatgggtgcagcagcggcttccagaacaatccagcacggggctccggtgaccaccagactcccagtagggcatgtgcatgccttgaatccgcagctgaggcgcccttgaagctttttatagtatgtatatgatcagtaagactggcctatgtaggaggtgtgctaatccgcctctgtataaaatgcagtgtactgtagacgcgtctagggttctggagtcagtaggctttgatgctcaccacaccacacgacttggcttttcttttccttttcgtttaaccaagagttttcttctttgatgtcttacctcgccaccgccatacaatgacatgtgtttgaactcgttaactcgtggtcagtcaagctcaaacaatggataggaggtcagttaagcttaaacaatggacatacataaaaaggtttgatgctaagttacacaaaatattagggtaacattgtttttttcgtctcctgcaatggtgttgtacggtggtatttatagctaaccgagggttagccctgtcctgtcaaagataattataccctcggttacctacg

SEQ ID NO: 209074 - DNA, 2084 bp, Zea Mays
tttactgaactatctcttatattatgaaatgtgtatgtatatgtacaacttgcttgaaacaatataatattgttacaacttataatacacccttttatcttacaactacttcaaacactggaacctggtttcctttgctttgctcttatatgtttatttactctcaaacatatatacaatcattatacattatactatgctgctaaacggatcgatacccaggcatgggcgggcgccatacactagtagtactactgtagcagttaaaatctattgaatctgtatgagatattttgaactggattttcagtatcccattggatccaaacggcgccgaagctgtctgtgcagtgtgcacatccgtctcacgtcacttgaagagtcgtgggagctcctgccccttccagaagcttccgcactcgtcgccagaccgggctcgtcgcctccaggcctcctctatccagacgcttctcacttccccttttgtctcctcccgtctcctcccccgtaccaaacaaacctcaccgagtcgcaactcgcaaggacagtgaaaacgcccaaacgagcgcgggcacgccaaccaaagcggcgaagcgcgaaggaaggaaggaaggaagcaagcaaagcagcagccatggggcttgactactacaagatcctgggcgtcgacaagggcgccaccgacgacgacctcaagaaggcctaccgcaagctcgccatgaagtggcaccccgacaagaaccccaataacaagaaggaggccgagaacaagttcaagcagatctcggaggcatacgatgtcctcagcgacccgcagaagcgcgcggtgtacgaccagtacggcgaggaggggctcaaggggcaggtgccgccgccgggcgccggcggggcgggctcaaccttcttctccaccggcggcgacgggccgacggtgttccggtttaacccgcgcaacgcggatgacatcttcgccgagttcttcggcggctccagccccttcggcggcatgggcgggagtgggatgcccggcatgcgggccggcgggtcgaggttctcctcgtccattttcggggacgatatgttcggctctgcgttcggcggcggcggcccggacgggcacggcatgcacaccggcggacgtgccgtgaaggcgccggccatcgagcggaagctgccgtgcagcctggaggagctgtacaagggcaccaccaagaagatgaagatttccagggaaattgctgacgccagtgggaagacgatgccagtggaagagatcctaacgatcgacgtgaagcccgggtggaagaagggcaccaagatcacgttcccggagaagggcaatgagacgccccacacgatcccggcggacctcgtcttcatcatcgacgagaagccgcacccggtgttcacccgcgacggcaacgacctggtggtgacccagaaggtcccgctggcggaggctctgacggggcacaccgcgcgcctggcgacgttggacgggcgcatcctgacggtgcccatcagctccgtgatccacccggggtacgaggaggtggtgcgcggcgagggcatgcccgtccccaaggacccgtccaggaagggcaacctccggataaagttcgacatcaagttcccggcgaggctctcggcggaccagaagtccggcgtcaagaggctgctcgggcagtagagcgcctcgtgttctggtgtgctgtgtgtcagacattttcgtgttggttgatcttgaactgggggatgctgccatttgcagcgtccgtgacgacgacgacgaggaggcaggccaccgagcgctgagtacagaacaagctagtggtggtatatggttgagaccttgagatgcacagcataggattccttgtgcaatcttccagacgggtggtgcttgtctgttcaccggtccatgtcgttccagccttgcaaaggtcggatggaataattattgagcacatacacgtacgttctttgtatttagtgtgagaaatagttattgcaatagcaattgtactccctccataaaaaaaaactctccttcccctaaaatatacttctttcgaggtcaagaa

SEQ ID NO: 209075 - DNA, 3466 bp, Zea Mays
ctttcccacttccccttttttgcccgcccgctacccaaccgccgccgcggttctcgctgccagcgacggacgggccacaccgcgcaggggctcagccccgccacccaccttaaccccgccgtcgggaggcgtcgtccccggcccggcccggcccggccctcgccctctactgcaactggactggcgcgtagacctgtccccgccacgagatcgttccgccctatgtcggtgaagatgctctttgcatagctcaagctgcaatctgatggaccctgatgacaagaagtttggaaatggaccaagggagctcactggtgctgttgatttgatcagccactacaaactgctgccacaccatgatttcttttgcaagaaacctttgccgctggcaatatcagatacacattatcttcacaatgttgtgggagacactgaaattcgcaaaggagaaggaatggagttagatcaacttgttcataatgcatatctgagggataaacctgcttatattcagccctttgatatggaaactctggggcaagcgttccaacttcgagaaacagctcttgtggatttgccttctactgaaaaaggtataccgactatttcgggtaaaccaaaaagtgagtccaaggacaaagagaagaagcataaaaggcacaaagacaaagacaaggaacacaagaagcacaaacatcggcataaggatcggagtaaggacaaagataaagacaaagacaaggataagaaaaaagataaaagtggccatcatgaaaagaagaggaagcatgagggaacagaagattcagtagatgtgcataagcacaagaagagtaagcacaagagctccaaaaccgatgagatggggaatggagttagttaacacttcctagctctacctccaatccttgtaatttgctgttaaaacttaaaaggagacagacggtctctgctatcaaaaccctgtgcagaatagtgattctcagaatacaccaaaaagagacaaccgggaaccaggataggctcaacacatgcaccagcagtcggcgcgcctccgacgcctcacacggatctaaacacgcggcgatacggttctgaggtcgtatcacacggattgggctgcgtcttgtggtgcacctaggatttcaccctagagatatcgtgcaacagtgtggcgaggaaagaggcggagacaacgagcagcgaggtatgtggtgtggggtgagacaagatgaagttttttctcttatttttttccacgctcgcgagattagggatggtgatggtggagttgttggactatagatggtcaaatgggtcgtgcttgacgggctagctcgagacacgagtcatttaatagtgttgaggcccgacacgtgaaccgtgtcatgcctaggcctccttgtcgaccccgcaacaattttaatagtgcattgagagaccccactgttaatagtgtgttgagttgtcactggtatgccgcgatctcaactaaaaccgagccatcatgatttctttctgtaatagagccagagaaacaataatattaaggtccaaagtgcattgaataaacacaacaatgttgatatctggttttaagccatcaacaaacctattcacaatagctgacacactaaacaaaggattgtgagcaagtatttggtgcataagtgtgtcaaattcatcttgtacttagagacactgttcgactgcctaacatgagaaactgtcggatacggtggttatgttggtctctctcaaatctagcataaacaatgcatagaatttaggacaatgagtctgtctataagaccaggatccacagactgaagccaaaaggctgtcgagcccacaaaatatatgacaacaattttcacccataactgatgggccacagaaaaaacttaaaagtacgactcacattttgtcttccacatttttggatggtggccatcaaatcgagggaaactcaattgaggcaagacaacaaccacatgtggaggataaactagtagaagtgaattagactgacgcggtataaaagttaaagcaaaaccctgaggtaggaacgagtgagtacctgtgatcggacctgtggagttagagtggtgaccacttcaaaaccagaacttcggtgaaacttggaagcgtccagatcactaatcccatagctgttcgttgccccgcatttgcgctgagtgaggaatgcggcactaatgttttgagggttgcgatcgaaaatcttgagggcatcccgaaaaggcaccaattcttccactttgtcggccaactgtgccacctcaacgagcagatggtccactgccacattcacttggggcttccatgctaccaatttccgcgcgaccgcgatattttcttcaagagtttgtttgatcaatttgttctgactctgcgtattttgtaacaaagtggtgagatctgcgatattacgctccatagcctccgattgtttttgaccgcgagtcttgaattgagggcgacgacggtagtcaggaaggtctgtcgggattggcctgaataatctgcttttgtatctttgggctagtcaaagtgcaattacctggagcgttgttaagaacatacttgttgacctcttcactatttacagcaagaaatttcaagatttcaataaggcctcgtttgtttcctttcatttcgaggaattggaatcttactaatggaatagattatttttttagaatgtgacattccaccactttccaaagttatcatataagcctacctcaaattcatggggtgagagatggaaatggattctatagatttacatgctatttttccgatgtacaacttatagcacattcttctacttgcgcctctattacataaatgtagtatataactatctccctcatataatttaagataatatacaaatatattacatatataaatatataaacttaattagttttgtctaaattataattattaaaatggaattcaattccaacgaaacaaacgggccctaaagtttcctctgttgctagactcttcattttcatcatgtccatggaatgacaatccttgatgcaaaagaaacttgaaacatcaaagtgaatatgtcaaccttatcttataaagattgcgatcatcatcactccacttctcaattttattatcaattgctgcattaggatttataaagccaagatatttctcttcggctatcttatgtgacatagaacccacatgttttagaagtgcttcagaccctttattccaattattccaaccatctgaagtaaatgcagaagtccctttgcccttatttgctttacttttgaataagtagcacatatagaaaaatgcagcatctttcttgacactatattcaatccaagaaattttttgaaaccacacaaaattaaaatggcgatctctatctccaattttcctatttgggaattcatgtgcatatggt

SEQ ID NO: 209076 - DNA, 1339 bp, Zea Mays
ctttcccacttccccttttttgcccgcccgctacccaaccgccgccgcggttctcgctgccagcgacggacgggccacaccgcgcaggggctcagccccgccacccaccttaaccccgccgtcgggaggcgtcgtccccggcccggcccggcccggccctcgccctctactgcaactggactggcgcgtagacctgtccccgccacgagatcgttccgccctatgtcggtgaagatgctctttgcatagctcaagctgcaatctgatggaccctgatgacaagaagtttggaaatggaccaagggagctcactggtgctgttgatttgatcagccactacaaactgctgccacaccatgatttcttttgcaagaaacctttgccgctggcaatatcagatacacattatcttcacaatgttgtgggagacactgaaattcgcaaaggagaaggaatggagttagatcaacttgttcataatgcatatctgagggataaacctgcttatattcagccctttgatatggaaactctggggcaagcgttccaacttcgagaaacagctcttgtggatttgccttctactgaaaaaggtataccgactatttcgggtaaaccaaaaagtgagtccaaggacaaagagaagaagcataaaaggcacaaagacaaagacaaggaacacaagaagcacaaacatcggcataaggatcggagtaaggacaaagataaagacaaagacaaggataagaaaaaagataaaagtggccatcatgaaaagaagaggaagcatgagggaacagaagattcagtagatgtgcataagcacaagaagagtaagcacaagagctccaaaaccgatgagatggggaatggagttagttaacacttcctagctctacctccaatccttgtaatttgctgttaaaacttaaaaggagacagacggtctctgctatcaaaaccctgtgcagaatagtggttgtctttcacctggatcatgtgggagacaactgacattataaagtgttggcggtggtgttgggggtatgcttcgtcgccgaaggtcctgtgagaagaaacatcttcgaaaggccaaaaacacaatgccgaagctaccaatcagggagcttcgtagcgtatctccagatgcaccgacttaaagatgaaatgaccaatcggcccatgacaacttgtgttatgattgtaaccatttgtaaagggcatgaatgtaatttctcacaggctgcgtcctgtgcctataaatagatgaacagtaccctcgtacttttcacgctttttcacatcttacttttgcccttgccttctgtcgcgctcaagg

SEQ ID NO: 209077 - DNA, 1254 bp, Zea Mays
ctttcccacttccccttttttgcccgcccgctacccaaccgccgccgcggttctcgctgccagcgacggacgggccacaccgcgcaggggctcagccccgccacccaccttaaccccgccgtcgggaggcgtcgtccccggcccggcccggcccggccctcgccctctactgcaactggactggcgcgtagacctgtccccgccacgagatcgttccgccctatgtcggtgaagatgctctttgcatagctcaagctgcaatctgatggaccctgatgacaagaagtttggaaatggaccaagggagctcactggtgctgttgatttgatcagccactacaaactgctgccacaccatgatttcttttgcaagaaacctttgccgctggcaatatcagatacacattatcttcacaatgttgtgggagacactgaaattcgcaaaggagaaggaatggagttagatcaacttgttcataatgcatatctgagggataaacctgcttatattcagccctttgatatggaaactctggggcaagcgttccaacttcgagaaacagctcttgtggatttgccttctactgaaaaaggtataccgactatttcgggtaaaccaaaaagtgagtccaaggacaaagagaagaagcataaaaggcacaaagacaaagacaaggaacacaagaagcacaaacatcggcataaggatcggagtaaggacaaagataaagacaaagacaaggataagaaaaaagataaaagtggccatcatgaaaagaagaggaagcatgagggaacagaagattcagtagatgtgcataagcacaagaagagtaagcacaagagctccaaaaccgatgagatggggaatggagttagttaacacttcctagctctacctccaatccttgtaatttgctgttaaaacttaaaaggagacagacggtctctgctatcaaaaccctgtgcagaatagtggtcctgtgagaagaaacatcttcgaaaggccaaaaacacaatgccgaagctaccaatcagggagcttcgtagcgtatctccagatgcaccgacttaaagatgaaatgaccaatcggcccatgacaacttgtgttatgattgtaaccatttgtaaagggcatgaatgtaatttctcacaggctgcgtcctgtgcctataaatagatgaacagtaccctcgtacttttcacgctttttcacatcttacttttgcccttgccttctgtcgcgctcaagg

SEQ ID NO: 209078 - DNA, 1006 bp, Zea Mays
ctttcccacttccccttttttgcccgcccgctacccaaccgccgccgcggttctcgctgccagcgacggacgggccacaccgcgcaggggctcagccccgccacccaccttaaccccgccgtcgggaggcgtcgtccccggcccggcccggcccggccctcgccctctactgcaactggactggcgcgtagacctgtccccgccacgagatcgttccgccctatgtcggtgaagatgctctttgcatagctcaagctgcaatctgatggaccctgatgacaagaagtttggaaatggaccaagggagctcactggtgctgttgatttgatcagccactacaaactgctgccacaccatgatttcttttgcaagaaacctttgccgctggcaatatcagatacacattatcttcacaatgttgtgggagacactgaaattcgcaaaggagaaggaatggagttagatcaacttgttcataatgcatatctgagggataaacctgcttatattcagccctttgatatggaaactctggggcaagcgttccaacttcgagaaacagctcttgtggatttgccttctactgaaaaaggtataccgactatttcgggtaaaccaaaaagtgagtccaaggacaaagagaagaagcataaaaggcacaaagacaaagacaaggaacacaagaagcacaaacatcggcataaggatcggagtaaggacaaagataaagacaaagacaaggataagaaaaaagataaaagtggccatcatgaaaagaagaggaagcatgagggaacagaagattcagtagatgtgcataagcacaagaagagtaagcacaagagctccaaaaccgatgagatggggaatggagttagttaacacttcctagctctacctccaatccttgtaatttgctgttaaaacttaaaaggagacagacggtctctgctatcaaaaccctgtgcagaatagtggatgacgaagccgacgaacaatgattcg

SEQ ID NO: 209079 - DNA, 1117 bp, Zea Mays
gtatatcatagtttgcctccaagttaccattatcagtattatgccaatcaagtagcactatctgaaattttgattgtgtggctggtattatcaaccagaatggttggttaatggttagtgctggaaaggaacaaaaatgaatctgtttgatggaagcaggaccaagggagctcactggtgctgttgatttgatcagccactacaaactgctgccacaccatgatttcttttgcaagaaacctttgccgctggcaatatcagatacacattatcttcacaatgttgtgggagacactgaaattcgcaaaggagaaggaatggagttagatcaacttgttcataatgcatatctgagggataaacctgcttatattcagccctttgatatggaaactctggggcaagcgttccaacttcgagaaacagctcttgtggatttgccttctactgaaaaaggtataccgactatttcgggtaaaccaaaaagtgagtccaaggacaaagagaagaagcataaaaggcacaaagacaaagacaaggaacacaagaagcacaaacatcggcataaggatcggagtaaggacaaagataaagacaaagacaaggataagaaaaaagataaaagtggccatcatgaaaagaagaggaagcatgagggaacagaagattcagtagatgtgcataagcacaagaagagtaagcacaagagctccaaaaccgatgagatggggaatggagttagttaacacttcctagctctacctccaatccttgtaatttgctgttaaaacttaaaaggagacagacggtctctgctatcaaaaccctgtgcagaatagtggtcctgtgagaagaaacatcttcgaaaggccaaaaacacaatgccgaagctaccaatcagggagcttcgtagcgtatctccagatgcaccgacttaaagatgaaatgaccaatcggcccatgacaacttgtgttatgattgtaaccatttgtaaagggcatgaatgtaatttctcacaggctgcgtcctgtgcctataaatagatgaacagtaccctcgtacttttcacgctttttcacatcttacttttgcccttgccttctgtcgcgctcaagg

SEQ ID NO: 209080 - DNA, 1349 bp, Zea Mays
aaacatttgaggacaaatgttaagatttatatttggatctgtgttttggcgaatgggaaaatctcaaacatccatacaagacaggatgggactacttcaggtggctgccataaacacagcaatggctgcattgacaaagactgtgggagttttcccaaaagaacggagtatagttgacagagaacgagcaaaaggttcctatgcacttggaccatatctttcatctaagttgttggctgagattcccattggagcagcatttccattgatatttggatcaattctctatccaatggctaaacttcacccaacattttctagatttgccaaattctgtggtattgtgactgttgagtcatttgctgcatcagcaatgggtctcactgttggagcaatggctcctacaactgaagctgcaatggctcttgggccatcccttatgacagtgtttattgtatttggaggatactatgttaaccctgacaatactccagtcatatttcgttggatcccaagaatatctctcattagatgggcctttcaagggctttgcattaacgagttcaagggtctgcaatttgagcaacaacattcatatgacattcaaacgggtgaacaggccttggaaaggttttcattgggaggaattcgaattgcagatactctggttgcacagggtaggattctgatgttctggtactggtcaacctaccttcttctgaagaaaaacagaccgaagtatcagcagctccttccaccattggaacaagataaaaataagccgcaggtggaataagcttttcatttgcagacttcgaaagaataaattaaggtagggcatctttgaatcaatcatttctttgcagtggtcctaattcaacaaaaaggctttatgtggggggaacatattgcaattagcaacgcaatcaatgtactatattgaatctccattacttctatacctttctgttcgttatcgtttccttcactaagtttttctcatgggaaaattatcgccaataaaacttgccctgggccctggttagagttaatggaatatgaactcccagtctcatgatgacagttctgccatgatatagttattacagtatctggttattccctatagtttatagttatttcagtgtctggttattccctatagcccctgtttgtttcggcttttcgcagcttctggccaccaaaagctgctgcggactgccaaacactcagcttttcagtcagtttctataaaattcgtttgggtaaaaaccattcaaagtcaacataaatatataatcggttgagtcgtcgcaatagtagtaatccgtcactttatagatcctgag

SEQ ID NO: 209081 - DNA, 2364 bp, Zea Mays
ctcgttcgcggttgactcgttgacccatggcaaggtttctgttgtcaaatgtgtcaggggaggcgaaaccggggaggctgcttgcactaatggggccatcgggctctggcaaaacaactttgctcaatgtgctagcagggcagctcgccgcatcgtcttccttgcacctttccgggtttctgtatatcaatggtcggcctatctcgaagggcggatataagattgcttttgtcaggcaggaagacctgttcttctcacagctcactgtgcgggagacgctctcacttgctgctgagctccagcttcctgacttgtgggctcctgagagaaaggagagctatgtcaatgatcttttgttacgtatggggttggtcaattgtgctgattctattgttggtgatgcaaaagttcgtggaataagtgggggtgagaagaagcgcctctcacttgcatgtgagttgattgctagcccttcagtcatctttgcagacgaaccaacaacaggccttgatgccttccaagctgagaaggtcatggagactcttcgtcaacttgctcaggatgggcacactgttatctgttcgatacaccagccaagaggttcagtctatggcaaatttgatgacatcgtactactgtcagatggagaaactgtatacatgggacctgcaaaagaagaacctctaacatacttctcatcattagggtaccagtgtccagatcatatgaaccctgccgagttcttggctgatctcatttccattgattatggctcaactgaaagtgtacagtcatcacagaaaaggatcgagaatctcattgaggcgttttctaacaaatctgtggtcactgaaggtaacaatttaattgcaattccagaggatcctgaattgtctgccaaacttgttcggaagactacagtgaagaaaagacatggttggtggaggcaatttcgtttgctttttaagcgagcatggatgcaggcttttcgtgatggaccaacaaacaaagtgagatcacgaatgtctgttgcttcagcagttatatttggatctgtgttttggcgaatgggaaaatctcaaacatccatacaagacaggatgggactacttcaggtggctgccataaacacagcaatggctgcattgacaaagactgtgggagttttcccaaaagaacggagtatagttgacagagaacgagcaaaaggttcctatgcacttggaccatatctttcatctaagttgttggctgagattcccattggagcagcatttccattgatatttggatcaattctctatccaatggctaaacttcacccaacattttctagatttgccaaattctgtggtattgtgactgttgagtcatttgctgcatcagcaatgggtctcactgttggagcaatggctcctacaactgaagctgcaatggctcttgggccatcccttatgacagtgtttattgtatttggaggatactatgttaaccctgacaatactccagtcatatttcgttggatcccaagaatatctctcattagatgggcctttcaagggctttgcattaacgagttcaagggtctgcaatttgagcaacaacattcatatgacattcaaacgggtgaacaggccttggaaaggttttcattgggaggaattcgaattgcagatactctggttgcacagggtaggattctgatgttctggtactggtcaacctaccttcttctgaagaaaaacagaccgaagtatcagcagctccttccaccattggaacaagataaaaataagccgcaggtggaataagcttttcatttgcagacttcgaaagaataaattaaggtagggcatctttgaatcaatcatttctttgcagtggtcctaattcaacaaaaaggctttatgtggggggaacatattgcaattagcaacgcaatcaatgtactatattgaatctccattacttctatacctttctgttcgttatcgtttccttcactaagtttttctcatgggaaaattatcgccaataaaacttgccctgggccctggttagagttaatggaatatgaactcccagtctcatgatgacagttctgccatgatatagttattacagtatctggttattccctatagtttatagttatttcagtgtctggttattccctatagcccctgtttgtttcggcttttcgcagcttctggccaccaaaagctgctgcggactgccaaacactcagcttttcagtcagtttctataaaattcgtttgggtaaaaaccattcaaagtcaacataaatatataatcggttgagtcgtcgcaatagtagtaatccgtcactttatagatcctgag

SEQ ID NO: 209082 - DNA, 271 bp, Zea Mays
ccggagtcatgtgaggaacaatgagtttcaacaaagttccatccatcttgcatggctatgaccattgaacaggccaaaaaactagatcactttgtttgctcagactgtttgaaagaaaatggttcaaagagactttcaaatgtatatgccacttcatcaaattcttagcccaaggatgaatcaataaggcagacgaggtgaaaactgagtgccaacatccaggggagatgtgctgcttctgtggcgaatcagcccttgcactggcgagagc

SEQ ID NO: 209083 - DNA, 259 bp, Zea Mays
gcaaaaggagacttcaaaggatggttccatccatcttgcatggctatgaccattgaacaggccaaaaaactagatcactttgtttgctcagactgtttgaaagaaaatggttcaaagagactttcaaatgtatatgccacttcatcaaattcttagcccaaggatgaatcaataaggcagacgaggtgaaaactgagtgccaacatccaggggagatgtgctgcttctgtggcgaatcagcccttgcactggcgagagc

SEQ ID NO: 209084 - DNA, 749 bp, Zea Mays
ctcctgcctgcagtttccgtagaagaaaagtgcccctacactgctacagacagagagaactcacattgcggttgcggacctcagcttgcccactacagagctaaccaaaagagatgaaagggagcctttcccacgagctcgagacggggctcccagccgccgacgtgtgggaggtctacggaggcctccttgttggggacttgattccccagctgcttcctcaagttttctcaaaggttgaactcgtagagggagacggtggagttggaacggttctgctcgtcactctcccgccagaggctttcaaagagaagttcgtcaaggtcgatgacgaaaaccgcgtcaaggagtgcctggtaaccgagggaagcttttttgaccgtggcttcaagaaatacctggtgcgaatcgagatcataggagaagatcgggaggcatccaccataagatcaactatcgagtacgaagttgaccaggagcatgcaggcaacccccctgttgccagtagcagtggcttggctactatcgctaaggccatcgcagaatatatcatcaagcagaagaagaaaggtcctcctgagtcctgagtaattaagctcccatgtaatcaactccgggaagaaaggatattatattatatcgtgtatatgtttgatcagtgaacaactgaagttaatttgtgtctaccaatgaacaaatagaatacggtaacgagcgaatggttgccatttgaacccaaagggtacagc

SEQ ID NO: 209085 - DNA, 324 bp, Zea Mays
ctcctgcctgcagtttccgtagaagaaaagtgcccctacactgctacagacagagagaactcacattgcggttgcggacctcagcttgcccactacagagctaaccaaaagagatgaaagggagcctttcccacgagctcgagacggggctcccagccgccgacgtgtgggaggtctacggaggcctccttgttggggacttgattccccagctgcttcctcaagttttctcaaaggttgaactcgtagagggagacggtggagttggaacggttctgctcgtcactctcccgccagaggctttcaaagagaagttcgtcaagg

SEQ ID NO: 209086 - DNA, 2984 bp, Zea Mays
tagagtccgggcaggcagccatctccgtcttctccgcgctctccatcctcggcgggcgggtgggaggggcgagtcgacgaccagcacgcgcgcgcgtccagcgcaaccgcgtcacggaaccctagcgtcgcctcgttcgctgcccaactctcctccagactccagtgcacagattatcagaatgcctcgaggacaaggctcttctgtgtcaacccgtgagaatcccaaagttgatcgggcaactgattcaaatgatgacagccgcaagaataggaggggtgcttatttgctactgggattgctgatagtgttccttcatggatcatggtctgtttatcagatccagtttggaagccttcctttgccccttgatgctgagcaggctggaaagaggggtttctcggaagcttcggcgctgaagcattatgtatatgcagtagcagaaaaaataaagaagacagctcattgggaggttgatgttcaattggagttgtttcacacagatataggcgcaaatcgtctatctggtggtcttttcaagggaaagactctcttgtattcagacttaaagcatgtgctattgagagttactcccaaatatttaccagaagctgaggaaaacttgattctggtttcttctcatattgacactgtttcgacaacggaaggagctggagattgcagttcatgtgtgggagtcatgttagagcttgcacggggagtggcccagtgggcacatgggtttaagagtggtatcttgtttttatttaatactggagaagaagagggtcttgatggcgcccatagttttataactcagcaccactggagaaattcagtaatatttgcggttgatctggaagctatgggtatcagtgggaaatccacactcttccagggtactgaccattgggcattggaaagctttgcagctgtagccaaatacccatctgctcagatagcttcacaggatgtttttagttctggcgcaataaaatctgctactgattttcaaatatatgaggaagttggccgtcttcctggacttgattttgcatataccgatacaacatctgtgtatcatacgaagcatctccaaaatttttgaaagatgcacaacaaaggaagcaaggaaagacagagcaggatagagctgtttacttcgatatcctgggaaagtacatggtggtctatccgctgcgacttgctaccatgtttcacaactcaatcatattgcagtcacttctaatatggggaacatcattgcttatgggtggacaccctgcactggtgtcctttgcaatatcatgtttgagcatcattctaatgtggatattttctatctgcttaccagttgtggtagcatttgctctgccctatatgtgtccgtttcctattccatatgttgcaaatccatggttaactattggcttatttggttcacctgcactgcttggagcatttattggtcagcatattggatttattctcctgaagaggcatcttcgacgcgtgcattccaaagcaaaaacaggcataactcctagcatgatagaaaatgttactgacctggaagctgagaggtggatttttaaatctggttttgtccagtggttaatagctctgatactaggaacatatttcaaggttggatcatcgtatatagcactcatctggcttgtttctcctgcttttgcatatggttttttggaagctactctctcccctgttcggctacctaaacagcttaaggttgtcacgttggttgtgggtttggttgcaccagttgtgtcttctgctggtttggctgttcgtatggcggatgtaattgttggaagtatagtacgtattgacaggaatcctggcggactaccagactggcttggaaatgtaatagtttcggttgccattgctgttgtcgtttgttccacgtttgtgtatctgctttcatacattcatatctcaggtgataaaagaattctgggtttgctattatccttatcctttggtctttcaattgctttggcatcaagtggcattgtgccagcatttacggaggatgtcgctcgatctgtaaacgttgtacatgtcgtcgataccacaggagtacatggcgggcatatagaaccagtatcctatatctctttgttttccaatacacctggaaagctgacgaatgaattagtggaccttggaggcgaagaattttcttgcggaaggaacatgactactgacttggtaacatttacagtgaagtatggctgttggagttacaaagagagcagtaccggatggagcaggtctgaggttcctgtgctccttgtagaaagtgattcggttataggtggtgctcgacagacagtagtatcagtggataccaagtcatcgacgcgttggacgcttggaatcaacaaagatggaatcgatgacttcacagttcaagtggattcggagaagatagtcctacctggtgataagagcgagatagatgggtggcatacaatccagtttgcagggggcaagaactcgccgacgaagttccagctgacgctatactggtcgtctagcaaaccatctgagagagaagctaaacaagcagcggacgctcctttgctggtgaaactaagaacagatgtgaatagagtcacaccgcaggtggcaagggtggtggagaagctgccacggtggtgcacgcccttcggcaagtccacctctccgtacacgctagctttcttgacggccctccgtgtcgatatttagtcagtcagcagcatttgtttcccatacataggcgtccagtccagcacctttcgttttgaactgtattttagtttgatagtagcaagttataggcccatagaattgtacacaaaagctgccaagggcggtctggtgtaaacgtgctttgcacttgctctaatttgtcctgtatcaaagtttcagattagtttgtggtatttgtgtgtaccattcctgcccccatc

SEQ ID NO: 209087 - DNA, 3207 bp, Zea Mays
tagagtccgggcaggcagccatctccgtcttctccgcgctctccatcctcggcgggcgggtgggaggggcgagtcgacgaccagcacgcgcgcgcgtccagcgcaaccgcgtcacggaaccctagcgtcgcctcgttcgctgcccaactctcctccagactccagtgcacaggtctccatcacggggaattctcatatagcaagtcgtcgtcctcgtcctcgtcctcgtcctctcctccggtgggtggatcggccatcgcgccgggccgggcgggcatacctacgtacacactccccggttcccgtccccgtccccgtcccgcattcgattggttccttcgtcttcgtctgccgattatcagaatgcctcgaggacaaggctcttctgtgtcaacccgtgagaatcccaaagttgatcgggcaactgattcaaatgatgacagccgcaagaataggaggggtgcttatttgctactgggattgctgatagtgttccttcatggatcatggtctgtttatcagatccagtttggaagccttcctttgccccttgatgctgagcaggctggaaagaggggtttctcggaagcttcggcgctgaagcatgtaaagtatttgacaggcttgggtcctcacccagtcggttcagatcccctcgatcatgctattcagatataggcgcaaatcgtctatctggtggtcttttcaagggaaagactctcttgtattcagacttaaagcatgtgctattgagagttactcccaaatatttaccagaagctgaggaaaacttgattctggtttcttctcatattgacactgtttcgacaacggaaggagctggagattgcagttcatgtgtgggagtcatgttagagcttgcacggggagtggcccagtgggcacatgggtttaagagtggtatcttgtttttatttaatactggagaagaagagggtcttgatggcgcccatagttttataactcagcaccactggagaaattcagtaatatttgcggttgatctggaagctatgggtatcagtgggaaatccacactcttccagggtactgaccattgggcattggaaagctttgcagctgtagccaaatacccatctgctcagatagcttcacaggatgtttttagttctggcgcaataaaatctgctactgattttcaaatatatgaggaagttggccgtcttcctggacttgattttgcatataccgatacaacatctgtgtatcatacgaagggtctcttcagcatattggagataacatgcttgctttcctactccattctgcagcatctccaaaatttttgaaagatgcacaacaaaggaagcaaggaaagacagagcaggatagagctgtttacttcgatatcctgggaaagtacatggtggtctatccgctgcgacttgctaccatgtttcacaactcaatcatattgcagtcacttctaatatggggaacatcattgcttatgggtggacaccctgcactggtgtcctttgcaatatcatgtttgagcatcattctaatgtggatattttctatctgcttaccagttgtggtagcatttgctctgccctatatgtgtccgtttcctattccatatgttgcaaatccatggttaactattggcttatttggttcacctgcactgcttggagcatttattggtcagcatattggatttattctcctgaagaggcatcttcgacgcgtgcattccaaagcaaaaacaggcataactcctagcatgatagaaaatgttactgacctggaagctgagaggtggatttttaaatctggttttgtccagtggttaatagctctgatactaggaacatatttcaaggttggatcatcgtatatagcactcatctggcttgtttctcctgcttttgcatatggttttttggaagctactctctcccctgttcggctacctaaacagcttaaggttgtcacgttggttgtgggtttggttgcaccagttgtgtcttctgctggtttggctgttcgtatggcggatgtaattgttggaagtatagtacgtattgacaggaatcctggcggactaccagactggcttggaaatgtaatagtttcggttgccattgctgttgtcgtttgttccacgtttgtgtatctgctttcatacattcatatctcaggtgataaaagaattctgggtttgctattatccttatcctttggtctttcaattgctttggcatcaagtggcattgtgccagcatttacggaggatgtcgctcgatctgtaaacgttgtacatgtcgtcgataccacaggagtacatggcgggcatatagaaccagtatcctatatctctttgttttccaatacacctggaaagctgacgaatgaattagtggaccttggaggcgaagaattttcttgcggaaggaacatgactactgacttggtaacatttacagtgaagtatggctgttggagttacaaagagagcagtaccggatggagcaggtctgaggttcctgtgctccttgtagaaagtgattcggttataggtggtgctcgacagacagtagtatcagtggataccaagtcatcgacgcgttggacgcttggaatcaacaaagatggaatcgatgacttcacagttcaagtggattcggagaagatagtcctacctggtgataagagcgagatagatgggtggcatacaatccagtttgcagggggcaagaactcgccgacgaagttccagctgacgctatactggtcgtctagcaaaccatctgagagagaagctaaacaagcagcggacgctcctttgctggtgaaactaagaacagatgtgaatagagtcacaccgcaggtggcaagggtggtggagaagctgccacggtggtgcacgcccttcggcaagtccacctctccgtacacgctagctttcttgacggccctccgtgtcgatatttagtcagtcagcagcatttgtttcccatacataggcgtccagtccagcacctttcgttttgaactgtattttagtttgatagtagcaagttataggcccatagaattgtacacaaaagctgccaagggcggtctggtgtaaacgtgctttgcacttgctctaatttgtcctgtatcaaagtttcagattagtttgtggtatttgtgtgtaccattcctgcccccatc

SEQ ID NO: 209088 - DNA, 1608 bp, Zea Mays
aactcacctcatcatcatcactcccccgtccttgatctcctctctctctctctctgtcgccaagagggcgccgccgccaccaacgcaacgcgcgccgccgcagatctccgccaccgacgcgccggccatggagtacgagcgcattgagaagccgttccccgtccagggcggcgggttctcgcccaagcggctgcgcgcgatgctgctgggggtggacaagcgccgcaaggggcaggacggcgccgccgaggaggacgaggacggcggcggcgactacggcgccctgccgaaggcccacgccagatccggcgccggcgacgattcaagcgagaagagatcaagatccaggcttgggaggaccatcagaaagcccagatagaagctgagatgaggaaaatcgaggttcgcagactgtttcctgtcaattttcctgttaataacgatgggcgatagatccctgatggattctccacgttaccgagacacacatgcattttcacctcttgagttttaacttgtgaaagtttaaaacacagaggcgaaaagttagcggcctagatcccacacctgctgcggctactatccgtctgaactcaatggcattgccctctctaggctatcatttcatttggacactcccgatgaagatgcaatgcattctcaaatttagcatgagatataacttacagccaggacactagttttcgactgcacctgcacatagcggttggcgtcagtatccatttggatttgacagtagcaagtagtccaagtgttgtttgttcttaatacaggacggcaagtgtttctaggctactgtactcaaatgaggcagcctcgttgtgctgtgccaccactctgtgattcagttcttctgttcagtttgccatagatgttcaggttcagaagaacatacaaacccaaagggtgcagcgctgagctgtgtttgtggatactgcattgttggtatcgatagttttaaccatggcccgtgctttgcgttcctttcctcaaggtcgaggtggagcggatgcgtgcccgcgcgcaagacaagctgatgaccaagctcgcgtcggcgaggcacagcgcagacgagaagcgtgccacggcggagctgaaacggaaccgcgcagccgcgaggaccgctgagcaggcagagcacatcaggaggaccggccgggtgccgccgtcgtttggctgctggaactggtgctcatgaagtgcccatggaagatgagtcgcccgttgagaatgagtcgcttgtaagctgttgtaactatatatatatatatatacacacgtatgtaaggtgtgagatccatgcgtcctgtgctgtggtggttactgtgtaagtgtcacagatgtaccgaattcaaggccgagcttggattcctagtgcacatatgtgataaacttcacaccaagagacctccatgctagttgtgactgaatttgatttgtgctctacttgatgcttatactaacagtccgcactgtgatagagctagatatagcaatggtaattaagtttacatgttaattaacttgattaaccaacaaggttccactaatccatagaacaccaacctgagtaccggcaagaaaaag

SEQ ID NO: 209089 - DNA, 1482 bp, Zea Mays
aactcacctcatcatcatcactcccccgtccttgatctcctctctctctctctctgtcgccaagagggcgccgccgccaccaacgcaacgcgcgccgccgcagatctccgccaccgacgcgccggccatggagtacgagcgcattgagaagccgttccccgtccagggcggcgggttctcgcccaagcggctgcgcgcgatgctgctgggggtggacaagcgccgcaaggggcaggacggcgccgccgaggaggacgaggacggcggcggcgactacggcgccctgccgaaggcccacgccagatccggcgccggcgacgttaatttcaaccgccatgatgcatccaccacgcttcagagcgcagcaacatgcatacctcctccaacaacggtccggtcagtgtcgatgagggacatgggcacagagatgacgcccatcgcaagccaagagccgtcccggaccgggacgccggtgagggcgacgagcccaaactgctcccagccaacgactccacggaggacgctcggtggccccagcgcagtcggctccttcatcagccacggaggagaatgcagcagctcggagctgagcgagcaggagctgcagaccaaaaccaggagggagatcatgctccttggcacgcagctaggcaagaccagcatcgcggcatgggcgagcaagaaggaggaggagaaggacgcctcgctctcgctgaaaccggtgcccatggaccagtcgacgcagaacataaccgcgatccgtgcggctgcgtgggaggaggcggagaaggccaagtatttagcgagattcaagcgagaagagatcaagatccaggcttgggaggaccatcagaaagcccagatagaagctgagatgaggaaaatcgaggtcgaggtggagcggatgcgtgcccgcgcgcaagacaagctgatgaccaagctcgcgtcggcgaggcacagcgcagacgagaagcgtgccacggcggagctgaaacggaaccgcgcagccgcgaggaccgctgagcaggcagagcacatcaggaggaccggccgggtgccgccgtcgtttggctgctggaactggtgctcatgaagtgcccatggaagatgagtcgcccgttgagaatgagtcgcttgtaagctgttgtaactatatatatatatatatacacacgtatgtaaggtgtgagatccatgcgtcctgtgctgtggtggttactgtgtaagtgtcacagatgtaccgaattcaaggccgagcttggattcctagtgcacatatgtgataaacttcacaccaagagacctccatgctagttgtgactgaatttgatttgtgctctacttgatgcttatactaacagtccgcactgtgatagagctagatatagcaatggtaattaagtttacatgttaattaacttgattaaccaacaaggttccactaatccatagaacaccaacctgagtaccggcaagaaaaag

SEQ ID NO: 209090 - DNA, 737 bp, Zea Mays
agattatttgccagatcatcttttgcagctcccaatctcagctcccactctttatcactttatatggttggagcctggagaatatgcaccagggctatcccaaagaaacacttgtgcgtttccttaaggctagagagtggaatgtagcaaaggctcataaaatgattgtagaatgtttgaattggaggattcaaaatgaaattgatagtgtgctcgagattcttctgtacaacttcgatggtggtacaatttgttcagtggttattttgaaagaatggcttggcatccatcgcgtcgctgctgctgaaatatctaaaggtctcccaatttttggcattggtgttgggcatagcacatatgacaaagcttcggtaattactctgatgcttgctatttgtttggtaggctatagctacagccaaaatcataaaagtgcctggtttgaagctatcagcactaagccaaataaaggattccggctctcatcaagtgactccccctcatgttgactttgcggatgtctcaattctagtggtggagctacgaacaacaatccgatgtcctgatcgagagcgatggagttaatgtttgaacttgtgtgtttgaacttgtgaactaaaaatgtgaactatggatgtgaacttaacttgtgtgtttgaacttgtgaactaaaaatgtgaactatggatgtgaacttgtgtgaatttgtgaacttatgtatttggacttatgtgaat

SEQ ID NO: 209091 - DNA, 872 bp, Zea Mays
atgtttatctcttgcgcgctcctcttcttcctccctggcgctcggtcgcttctctctggtctccacgcgcaccgcgtccagctccctcctccagctgtgtctgctgctcgccccagcctggagcttcgctcggcttccaactccggcgcccggccgagctccctgaatatgcaccagggctatcccaaagaaacacttgtgcgtttccttaaggctagagagtggaatgtagcaaaggctcataaaatgattgtagaatgtttgaattggaggattcaaaatgaaattgatagtgtgctcgagaggcctatagccccagtagatttatacaaatcaatacgtgattcacaacttattggcctgtcacgatacacaaaggagattcttctgtacaacttcgatggtggtacaatttgttcagtggttattttgaaagaatggcttggcatccatcgcgtcgctgctgctgaaatatctaaagtctgtggtctcccaatttttggcattggtgttgggcatagcacatatgacaaagcttcggctatagctacagccaaaatcataaaagtgcctggtttgaagctatcagcactaagccaaataaaggattccggctctcatcaagtgactccccctcatgttgactttgcggatgtctcaattctagtggtggagctacgaacaacaatccgatgtcctgatcgagagcgatggagttaatgtttgaacttgtgtgtttgaacttgtgaactaaaaatgtgaactatggatgtgaacttaacttgtgtgtttgaacttgtgaactaaaaatgtgaactatggatgtgaacttgtgtgaatttgtgaacttatgtatttggacttatgtgaat

SEQ ID NO: 209092 - DNA, 939 bp, Zea Mays
atgtttatctcttgcgcgctcctcttcttcctccctggcgctcggtcgcttctctctggtctccacgcgcaccgcgtccagctccctcctccagctgtgtctgctgctcgccccagcctggagcttcgctcggcttccaactccggcgcccggccgagctccctgctcccactctttatcactttatatggttggagcctggagaatatgcaccagggctatcccaaagaaacacttgtgcgtttccttaaggctagagagtggaatgtagcaaaggctcataaaatgattgtagaatgtttgaattggaggattcaaaatgaaattgatagtgtgctcgagaggcctatagccccagtagatttatacaaatcaatacgtgattcacaacttattggcctgtcacgatacacaaaggagattcttctgtacaacttcgatggtggtacaatttgttcagtggttattttgaaagaatggcttggcatccatcgcgtcgctgctgctgaaatatctaaaggtctcccaatttttggcattggtgttgggcatagcacatatgacaaagcttcggtaattactctgatgcttgctatttgtttggtaggctatagctacagccaaaatcataaaagtgcctggtttgaagctatcagcactaagccaaataaaggattccggctctcatcaagtgactccccctcatgttgactttgcggatgtctcaattctagtggtggagctacgaacaacaatccgatgtcctgatcgagagcgatggagttaatgtttgaacttgtgtgtttgaacttgtgaactaaaaatgtgaactatggatgtgaacttaacttgtgtgtttgaacttgtgaactaaaaatgtgaactatggatgtgaacttgtgtgaatttgtgaacttatgtatttggacttatgtgaat

SEQ ID NO: 209093 - DNA, 652 bp, Zea Mays
atgtttatctcttgcgcgctcctcttcttcctccctggcgctcggtcgcttctctctggtctccacgcgcaccgcgtccagctccctcctccagctgtgtctgctgctcgccccagcctggagcttcgctcggcttccaactccggcgcccggccgagctccctgaatatgcaccagggctatcccaaagaaacacttgtgcgtttccttaaggctagagagtggaatgtagcaaaggctcataaaatgattgtagaatgtttgaattggaggattcaaaatgaaattgatagtgtgctcgagattcttctgtacaacttcgatggtggtacaatttgttcagtggttattttgaaagaatggcttggcatccatcgcgtcgctgctgctgaaatatctaaaggtctcccaatttttggcattggtgttgggcatagcacatatgacaaagcttcggctatagctacagccaaaatcataaaagtgcctggtttgaagctatcagcactaagccaaataaaggtggctgaattttcagatttggaacagcgtctaagtctgaatttccaaagtagtttcttggacagttaacatcgcggatcctttgcacgatgcatcattttaaataacacggtgctgcgaaatgaagtct

SEQ ID NO: 209094 - DNA, 202 bp, Zea Mays
atgtttatctcttgcgcgctcctcttcttcctccctggcgctcggtcgcttctctctggtctccacgcgcaccgcgtccagctccctcctccagctgtgtctgctgctcgccccagcctggagcttcgctcggcttccaactccggcgcccggccgagctccctgttaaatgttgtgaggggttctgcctaatatgttactc

SEQ ID NO: 209095 - DNA, 280 bp, Zea Mays
atgtttatctcttgcgcgctcctcttcttcctccctggcgctcggtcgcttctctctggtctccacgcgcaccgcgtccagctccctcctccagctgtgtctgctgctcgccccagcctggagcttcgctcggcttccaactccggcgcccggccgagctccctgaggcctatagccccagtagatttatacaaatcaatacgtgattcacaacttattggcctgtcacgatacacaaaggagttaaatgttgtgaggggttctgcctaatatgttactc

SEQ ID NO: 209096 - DNA, 2022 bp, Zea Mays
gtccagagcacacgaaggcctagcccagaaccactggattggccactgccagcggcacagccgacgccttatccagcaaccgtcttcctcatccatggcataagccgcgcccgcctccgcacgccccgctccgatggcagccgcggctgtgaccctgccctcctcgggcacgcccttcgccgtcgccacaaccgcctcttcctcatccgcccgccgctgcctgctcctgccctccgcggctccccgccgagctctccgcgtcgtggcctccgccgctaccgaggcgccgcccaagcccacgcagccgccgacatcgccctccggcatcgtgctcgtcgacccatccgaagcccagaaggtgcaccggctcaaggccgtctacgaccagaaggtcgtcccgctcatcaccgaggagttcggctacaccaatgtccaccaggttcccaagctcgagaagattgtggtgaactgcggtctgggcgcggaggcagggaactcgaaggggctggatgccgccatgaaggacctggccatgatcaccgggcagtggcccgtcaagatccgtgagggaaacaccatcggtatcgcagtcaccctccgcggcagggctcatcaaccttgggctccctaggaccatggacttcctgggtgtcaaccccaacagcttcgacgggcacggcaactacagccttggcctccgtgaccagggcgtgttcccggagatcccgtacgaggtgggcgggaagaagaacggcatggacgtgtccatcgtcaccagcgccaagacggacaacgaggcgttcaggctgctggtcctcctcggcatgccattctcggagaacatcaagaccgacgtggtgatccggaagaagaggttgaagcgccaccacttcctgagcaagggcaaggggaagggaggacgacggtgaggagaggaaccagccagccagccagcccatggttgcacacgctctgttcagcttgttttaattccgatctttttgcagaatttggcttacaaattcgatgctgttgttgtctgtcaattatgtaacttgtgcacctatgaaaaaggtttgcaatgatcatgtccgttttgctgatttcttcttgatgcataatttgtagtcacaagttataccactgccagacattgtaatcggaggaagcagtaatgtgagacggacactgtaatgcaaacgtatttcagctgcatttctcatactgcttgtctagactatcaccgaagagcctatatgatcaatgatctcttttggcaatcggcctcaatagctacacttcggcagctcgggtgggccgatgacgagctcttcctccgggaaggcgcacggcttgccctccgcggcgagctccgggcacggcttgggcgagacgtgggaggtgacccccttgacgttggtgcagttccactgcagctccttggcgtccggcgcgaggcgggcggtcacgttggatatgcagatcccggtgtaggggtccttagggatgccctccatcctgccggccatggtcacgttctcggcgaacacgtcgctgtagttgatgccggtgacctcgggcatggcgttggggtcggacgtgttgtcggggtgctgcccgtagttgccggtcatccagaacacccacttcatggtgtggaggctgaggccgcgcacgaagatgtccctgacgaagccgcccctcccggcgccggacttgaccctgacggccgactccgtgttgatggccacgctgtcctcggcgcgcacgtcgcggatgccgccggacatctcgctgcccagcgcgatcatggcgctcgtgggggagacgcaggtcagcctccggatgacgatgtgctggctcggcatgttgaacctgatgccgtactcgtcccacccgctcttcacggccacgcagtcgtcgccggagacgatgtagcagtcctcgatcttgacacgcgaggaagaatctgcacacacgcacaggcaatgaaattcagaatcagaaacatgtgcttctcac

SEQ ID NO: 209097 - DNA, 557 bp, Zea Mays
attattaatcaactcatattcgacaaagtatacattagatagtttaggtttgataatggatccaaaatatgttagcctatgcatcttcgtattacttgtattgcatggagatactactttggcagggagtttgctaaatggcatccattctgctttagtgcaatgtgcaaggcaaattgttttatagaaggaaaaagctccgatggttcctatgcaaagggatatagatgtgattcacatggatttcattctatgtgtatttgccttttgtgtaaaagttagttatcttaagacaagcggggatatattctatgttcatatccgtcatttagggtgttgttcaaataattttatgggataataattaactagtttgtttacttctagatatatgtaatactacttaaataatccttatttctttaatttcttagctctatagctagaaacatgtttttagttgccaaccactttagtaatatatgtttcttctcctttattataaacctcaatacttgttgtgagcttctcattcatagtcttgtttacttgagagg

SEQ ID NO: 209098 - DNA, 3330 bp, Zea Mays
caaaaagcttcataattatagcaaagagtcggaagaggtgggcccttccctccggcgtccgccgccgtcaccactcgtcgttttcctagttcgcacacccatccgccggcggcctccccccgtctcgatagtcgataccaggttctaaatggcgatggcgatgatggctatgcgacgcgcggtggcgctcggcgctcgccacatccccgccgccgcagcctcttcgttccgagtcgtctccctccgccacatgagcgcggacgcgggcgccgcgatggagaagatccgcgccgccgggctgctcaggacgcaggggcttatcgctgggcagtgggtggacgcctacgacggaaagaccattgaggtgcaaaatccagcaactggtgaggtcctggcaaacgtgtcctgtatgggcagcagagaaacatctgatgctattgcttctgctcacagtacattctattcttggagtaaactcactgcaagtgagaggagcaaggcactaagaaaatggtacgatctaattatttcacacaaggaagagcttgcacttctcatgacactggagcaggggaaacctatgaaagaagcccttggtgaggtcaattatggtgcaagtttcatagaatattttgcagaggaagcaaagcgtatatatggtgacatcattcccccaactttatctgatcgcagattgttggttttgaagcagcctgttggggtagttggagctattacaccatggaattttccattagcaatgataacccggaaggttggaccagctttggcctgtggctgtactgttgttgtcaagccatcggagttcacacctctgacagcattagctgcagcagatcttgctcttcaagcgggaataccagcgggtgcattgaatgttgtgatgggtaatgctgctgagataggtgatgcgttgctgcagagtacacaggtcagaaagattacattcactggatcaacagctgttgggaaaaaactgatggctggatctgcaaatactgtgaaaaaggtctccttggaacttggtgggaatgcaccttgcattgttttcgatgatgcggacattgatgttgctgttaaaggcagtcttgctgccaagtttcgtaacagtggacagacatgtgtttgtgcaaacaggatattggtgcaagaaggtatctacgaaaagtttgcaaaagcattcatccaggctgttcagagtttgaaggttggtaacggtctagaagagagtacatctcagggtcctctgattaacgaagctgctgttcaaaaggtggagaagttcataaatgacgcgacttcaaagggagcaaatgtcatgctaggtggtaaaagacacagcctgggaatgtcattttatgagccaactgtagtagggaatgtcagcaatgatatgcttcttttcagagaagaagtttttggtccagttgcaccccttataccgttcaaaactgaggaagaagcagttcatatggccaacgatacaaacgcaggcttagctgcatacatatttaccaagagcatacctcgttcatggcgtgtatctgaatctcttgagtacggcttagttggggtaaacgagggaattatttcaacggaggtggcgccatttggcggagtaaagcagtctggtctagggagagaaggatcgaagtacggcattgacgagtacttggagctcaagtacatctgcatgggcaacttgggttgagtcctgaagtcggcctctagctcgaaacactcggcagatgatgaacggagaaaccaggcgtgcttagaagggcgtgagttgcgtttagctgcaagatcggtcatgatggattgatggcttcgaacctgtatacggcctgtttggattctcttctaccgtcgcttcagccaccaggcttcccaccgaagccacccccgcaacggtccgatagaagcgggcttccgtagaaagctgggctagctgggcatctgtccagtccttggctctcgccacgctagggtttctttggtccccgctgcctcgcatcgctcctgtctcgccttctaggcggagctgggattcttctcaatgacgacaacgagattctaagttcttcacgacgattctgatcccttcaaacttcatcgatagttagcatttgttatccatgatttgtcgtagtgaattgaagtttttggatcgagttcatcggattccagccgatgtacaccgagagatcccctttcatactttccagcataggtacttctccaaagatccagttcaagttggtgtccccgcacaatcgagttaaccaagagtttgatcagaagaagaggagctgcaggaggcgtctgtctgatcacaatgcccgccgccggaagcctcagccagatgcattcgcctttgcctctgcaaggctgccttcgtcgtcgttcgatgataggaggcaaataagttttgtctggaataaagctcctgttagccatcctttcacttctccatgggacagctcatctgagctccctcatgcaaaggaaataagagaggtgtcaacgaaagttgggacaattactggacaagttcatttggataaatcttacgtgtccaatgctgttccatcacttacccatggcaaagatgagccttggccaatgaaaggtccggacatgtctatagctgcttcaaaattcgatggagcaccggatcttcagcgtgctctctctcttctgtcagttggcgcctgcggattgcccgatcctgtacaccaaacatcttgcgtcatccaattcactagtgccagcgagaacagtggcgaccttcatctatcacatggagcgaactctggtctagcgtcatgcggtgatggacagcatatagcttctcagcctcaggctcagctggttcggtttaccatggataccagcaacagtgtctatgagcccagtttcttcagtgtaaaccagataaattaagcgttgaagacacacgccacttggtcatttggataaatagccctgaagatggcctgagcttgtgcaagaagttcttcaaccaaccaccggacataaggatctatctgttaatgttatctgtgtatttattagccatacctgaattaagttgaacccaatctaggccagcttatgtgcaatatgcagttccaacctgtgattgacccattttttctgttgtttctttgcccgtgatgtgactgctctggaacttaagtgtgatactgttgtagttacactttactgccctgacaatcatgtcaaacggctggatatctttgaaactgtccttgatgaatctggacgtgtattttgtgtgtgtgt

SEQ ID NO: 209099 - DNA, 3347 bp, Zea Mays
caaaaagcttcataattatagcaaagagtcggaagaggtgggcccttccctccggcgtccgccgccgtcaccactcgtcgttttcctagttcgcacacccatccgccggcggcctccccccgtctcgatagtcgataccaggttctaaatggcgatggcgatgatggctatgcgacgcgcggtggcgctcggcgctcgccacatccccgccgccgcagcctcttcgttccgagtcgtctccctccgccacatgagcgcggacgcgggcgccgcgatggagaagatccgcgccgccgggctgctcaggacgcaggggcttatcgctgggcagtgggtggacgcctacgacggaaagaccattgaggtgcaaaatccagcaactggtgaggtcctggcaaacgtgtcctgtatgggcagcagagaaacatctgatgctattgcttctgctcacagtacattctattcttggagtaaactcactgcaagtgagaggagcaaggcactaagaaaatggtacgatctaattatttcacacaaggaagagcttgcacttctcatgacactggagcaggggaaacctatgaaagaagcccttggtgaggtcaattatggtgcaagtttcatagaatattttgcagaggaagcaaagcgtatatatggtgacatcattcccccaactttatctgatcgcagattgttggttttgaagcagcctgttggggtagttggagctattacaccatggaattttccattagcaatgataacccggaaggttggaccagctttggcctgtggctgtactgttgttgtcaagccatcggagttcacacctctgacagcattagctgcagcagatcttgctcttcaagcgggaataccagcgggtgcattgaatgttgtgatgggtaatgctgctgagataggtgatgcgttgctgcagagtacacaggtcagaaagattacattcactggatcaacagctgttgggaaaaaactgatggctggatctgcaaatactgtgaaaaaggtctccttggaacttggtgggaatgcaccttgcattgttttcgatgatgcggacattgatgttgctgttaaaggcagtcttgctgccaagtttcgtaacagtggacagacatgtgtttgtgcaaacaggatattggtgcaagaaggtatctacgaaaagtttgcaaaagcattcatccaggctgttcagagtttgaaggttggtaacggtctagaagagagtacatctcagggtcctctgattaacgaagctgctgttcaaaaggtggagaagttcataaatgacgcgacttcaaagggagcaaatgtcatgctaggtggtaaaagacacagcctgggaatgtcattttatgagccaactgtagtagggaatgtcagcaatgatatgcttcttttcagagaagaagtttttggtccagttgcaccccttataccgttcaaaactgaggaagaagcagttcatatggccaacgatacaaacgcaggcttagctgcatacatatttaccaagagcatacctcgttcatggcgtgtatctgaatctcttgagtacggcttagttggggtaaacgagggaattatttcaacggaggtggcgccatttggcggagtaaagcagtctggtctagggagagaaggatcgaagtacggcattgacgagtacttggagctcaagtacatctgcatgggcaacttgggttgagtcctgaagtcggcctctagctcgaaacactcggcagatgatgaacggagaaaccaggcgtgcttagaagggcgtgagttgcgtttagctgcaagatcggtcatgatggattgatggcttcgaacctgtatacggcctgtttggattctcttctaccgtcgcttcagccaccaggcttcccaccgaagccacccccgcaacggtccgatagaagcgggcttccgtagaaagctgggctagctgggcatctgtccagtccttggctctcgccacgctagggtttctttggtccccgctgcctcgcatcgctcctgtctcgccttctaggcggagctgggattcttctcaatgacgacaacgagattctaagttcttcacgacgattctgatcccttcaaacttcatcgatagttagcatttgttatccatgatttgtcgtagtgaattgaagtttttggatcgagttcatcggattccagccgatgtacaccgagagatcccctttcatactttccagcataggtacttctccaaagatccagttcaagttggtgtccccgcacaatcgagttaaccaagatttcatgccctgtcagagtttgatcagaagaagaggagctgcaggaggcgtctgtctgatcacaatgcccgccgccggaagcctcagccagatgcattcgcctttgcctctgcaaggctgccttcgtcgtcgttcgatgataggaggcaaataagttttgtctggaataaagctcctgttagccatcctttcacttctccatgggacagctcatctgagctccctcatgcaaaggaaataagagaggtgtcaacgaaagttgggacaattactggacaagttcatttggataaatcttacgtgtccaatgctgttccatcacttacccatggcaaagatgagccttggccaatgaaaggtccggacatgtctatagctgcttcaaaattcgatggagcaccggatcttcagcgtgctctctctcttctgtcagttggcgcctgcggattgcccgatcctgtacaccaaacatcttgcgtcatccaattcactagtgccagcgagaacagtggcgaccttcatctatcacatggagcgaactctggtctagcgtcatgcggtgatggacagcatatagcttctcagcctcaggctcagctggttcggtttaccatggataccagcaacagtgtctatgagcccagtttcttcagtgtaaaccagataaattaagcgttgaagacacacgccacttggtcatttggataaatagccctgaagatggcctgagcttgtgcaagaagttcttcaaccaaccaccggacataaggatctatctgttaatgttatctgtgtatttattagccatacctgaattaagttgaacccaatctaggccagcttatgtgcaatatgcagttccaacctgtgattgacccattttttctgttgtttctttgcccgtgatgtgactgctctggaacttaagtgtgatactgttgtagttacactttactgccctgacaatcatgtcaaacggctggatatctttgaaactgtccttgatgaatctggacgtgtattttgtgtgtgtgt

SEQ ID NO: 209100 - DNA, 3574 bp, Zea Mays
ctacacgcctacaccataaacaaaggcaaaaagcttcataattatagcaaagagtcggaagaggtgggcccttccctccggcgtccgccgccgtcaccactcgtcgttttcctagttcgcacacccatccgccggcggcctccccccgtctcgatagtcgataccaggttctaaatggcgatggcgatgatggctatgcgacgcgcggtggcgctcggcgctcgccacatccccgccgccgcagcctcttcgttccgagtcgtctccctccgccacatgagcgcggacgcgggcgccgcgatggagaagatccgcgccgccgggctgctcaggacgcaggggcttatcgctgggcagtgggtggacgcctacgacggaaagaccattgaggtgcaaaatccagcaactggtgaggtcctggcaaacgtgtcctgtatgggcagcagagaaacatctgatgctattgcttctgctcacagtacattctattcttggagtaaactcactgcaagtgagaggagcaaggcactaagaaaatggtacgatctaattatttcacacaaggaagagcttgcacttctcatgacactggagcaggggaaacctatgaaagaagcccttggtgaggtcaattatggtgcaagtttcatagaatattttgcagaggaagcaaagcgtatatatggtgacatcattcccccaactttatctgatcgcagattgttggttttgaagcagcctgttggggtagttggagctattacaccatggaattttccattagcaatgataacccggaaggttggaccagctttggcctgtggctgtactgttgttgtcaagccatcggagttcacacctctgacagcattagctgcagcagatcttgctcttcaagcgggaataccagcgggtgcattgaatgttgtgatgggtaatgctgctgagataggtgatgcgttgctgcagagtacacagaaagattacattcactggatcaacagctgttgggaaaaaactgatggctggatctgcaaatactgtgaaaaaggtctccttggaacttggtgggaatgcaccttgcattgttttcgatgatgcggacattgatgttgctgttaaaggcagtcttgctgccaagtttcgtaacagtggacagacatgtgtttgtgcaaacaggatattggtgcaagaaggtatctacgaaaagtttgcaaaagcattcatccaggctgttcagagtttgaaggttggtaacggtctagaagagagtacatctcagggtcctctgattaacgaagctgctgttcaaaaggtggagaagttcataaatgacgcgacttcaaagggagcaaatgtcatgctaggtggtaaaagacacagcctgggaatgtcattttatgagccaactgtagtagggaatgtcagcaatgatatgcttcttttcagagaagaagtttttggtccagttgcaccccttataccgttcaaaactgaggaagaagcagttcatatggccaacgatacaaacgcaggcttagctgcatacatatttaccaagagcatacctcgttcatggcgtgtatctgaatctcttgagtacggcttagttggggtaaacgagggaattatttcaacggaggtggcgccatttggcggagtaaagcagtctggtctagggagagaaggatcgaagtacggcattgacgagtacttggagctcaagtacatctgcatgggcaacttgggttgagtcctgaagtcggcctctagctcgaaacactcggcagatgatgaacggagaaaccaggcgtgcttagaagggcgtgagttgcgtttagctgcaagatcggtcatgatggattgatggctgtgggagagcagttttagaataaatcgaataagccgcggagcattaaataaaagaagtggaaatgagatgtaaatggcgtggaactataaagtatggcttcaccttcgaacctgtatacggcctgtttggattctcttctaccgtcgcttcagccaccaggcttcccaccgaagccacccccgcaacggtccgatagaagcgggcttccgtagaaagctgggctagctgggcatctgtccagtccttggctctcgccacgctagggtttctttggtccccgctgcctcgcatcgctcctgtctcgccttctaggcggagctgggattcttctcaatgacgacaacgagattctaagttcttcacgacgattctgatcccttcaaacttcatcgatagttagcatttgttatccatgatttgtcgtagtgaattgaagtttttggatcgagttcatcggattccagccgatgtacaccgagagatcccctttcatactttccagcataggtacttctccaaagatccagttcaagttggtgtccccgcacaatcgagttaaccaagatttcatgccctgtcagagtttgatcagaagaagaggagctgcaggaggcgtctgtctgatcacaatgcccgccgccggaagcctcagccagatgcattcgcctttgcctctgcaaggctgccttcgtcgtcgttcgactttccaggacgaaaacgaaggggcctcctccggaaagataaaagcatttctttgtttccagatttcccaagctgctatttgcacaacaagtttagtaatatgataggaggcaaataagttttgtctggaataaagctcctgttagccatcctttcacttctccatgggacagctcatctgagctccctcatgcaaaggaaataagagaggtgtcaacgaaagttgggacaattactggacaagttcatttggataaatcttacgtgtccaatgctgttccatcacttacccatggcaaagatgagccttggccaatgaaaggtccggacatgtctatagctgcttcaaaattcgatggagcaccggatcttcagcgtgctctctctcttctgtcagttggcgcctgcggattgcccgatcctgtacaccaaacatcttgcgtcatccaattcactagtgccagcgagaacagtggcgaccttcatctatcacatggagcgaactctggtctagcgtcatgcggtgatggacagcatatagcttctcagcctcaggctcagctggttcggtttaccatggataccagcaacagtgtctatgagcccagtttcttcagtgtaaaccagataaattaagcgttgaagacacacgccacttggtcatttggataaatagccctgaagatggcctgagcttgtgcaagaagttcttcaaccaaccaccggacataaggatctatctgttaatgttatctgtgtatttattagccatacctgaattaagttgaacccaatctaggccagcttatgtgcaatatgcagttccaacctgtgattgacccattttttctgttgtttctttgcccgtgatgtgactgctctggaacttaagtgtgatactgttgtagttacactttactgccctgacaatcatgtcaaacggctggatatctttgaaactgtccttgatgaatctggacgtgtattttgtgtgtgtgt

SEQ ID NO: 209101 - DNA, 2454 bp, Zea Mays
caaaaagcttcataattatagcaaagagtcggaagaggtgggcccttccctccggcgtccgccgccgtcaccactcgtcgttttcctagttcgcacacccatccgccggcggcctccccccgtctcgatagtcgataccaggttctaaatggcgatggcgatgatggctatgcgacgcgcggtggcgctcggcgctcgccacatccccgccgccgcagcctcttcgttccgagtcgtctccctccgccacatgagcgcggacgcgggcgccgcgatggagaagatccgcgccgccgggctgctcaggacgcaggggcttatcgctgggcagtgggtggacgcctacgacggaaagaccattgaggtgcaaaatccagcaactggtgaggtcctggcaaacgtgtcctgtatgggcagcagagaaacatctgatgctattgcttctgctcacagtacattctattcttggagtaaactcactgcaagtgagaggagcaaggcactaagaaaatggtacgatctaattatttcacacaaggaagagcttgcacttctcatgacactggagcaggggaaacctatgaaagaagcccttggtgaggtcaattatggtgcaagtttcatagaatattttgcagaggaagcaaagcgtatatatggtgacatcattcccccaactttatctgatcgcagattgttggttttgaagcagcctgttggggtagttggagctattacaccatggaattttccattagcaatgataacccggaaggttggaccagctttggcctgtggctgtactgttgttgtcaagccatcggagttcacacctctgacagcattagctgcagcagatcttgctcttcaagcgggaataccagcgggtgcattgaatgttgtgatgggtaatgctgctgagataggtgatgcgttgctgcagagtacacaggtcagaaagattacattcactggatcaacagctgttgggaaaaaactgatggctggatctgcaaatactgtgaaaaaggtctccttggaacttggtgggaatgcaccttgcattgttttcgatgatgcggacattgatgttgctgttaaaggcagtcttgctgccaagtttcgtaacagtggacagacatgtgtttgtgcaaacaggatattggtgcaagaaggtatctacgaaaagtttgcaaaagcattcatccaggctgttcagagtttgaaggttggtaacggtctagaagagagtacatctcagggtcctctgattaacgaagctgctgttcaaaaggtggagaagttcataaatgacgcgacttcaaagggagcaaatgtcatgctaggtggtaaaagacacagcctgggaatgtcattttatgagccaactgtagtagggaatgtcagcaatgatatgcttcttttcagagaagaagtttttggtccagttgcaccccttataccgttcaaaactgaggaagaagcagttcatatggccaacgatacaaacgcaggcttagctgcatacatatttaccaagagcatacctcgttcatggcgtgtatctgaatctcttgagtacggcttagttggggtaaacgagggaattatttcaacggaggtggcgccatttggcggagtaaagcagtctggtctagggagagaaggatcgaagtacggcattgacgagtacttggagctcaagtacatctgcatgggcaacttgggttgagtcctgaagtcggcctctagctcgaaacactcggcagatgatgaacggagaaaccaggcgtgcttagaagggcgtgagttgcgtttagctgcaagatcggtcatgatggattgatggcttcgaacctgtatacggcctgtttggattctcttctaccgtcgcttcagccaccaggcttcccaccgaagccacccccgcaacggtccgatagaagcgggcttccgtagaaagctgggctagctgggcatctgtccagtccttggctctcgccacgctagggtttctttggtccccgctgcctcgcatcgctcctgtctcgccttctaggcggagctgggattcttctcaatgacgacaacgagattctaagttcttcacgacgattctgatcccttcaaacttcatcgatagttagcatttgttatccatgatttgtcgtagtgaattgaagtttttggatcgagttcatcggattccagccgatgtacaccgagagatcccctttcatactttccagcataggtacttctccaaagatccagttcaagttggtgtccccgcacaatcgagttaaccaagacttgtcttggcctgagtcatcgacggaacccgaatttgatgagccattcgacttcgttgcgcattttgaaaaaatgtggggagtcgaatatgactctgatcagatatcgtcgtttagtgacaacgaactgtgaatgatgtgc
